United States Patent Application Publication US 2024/0327476 A1 - sequence listing, part 47

SEQ ID NO: 87596 - DNA, 987 bp, synthetic construct
  misc_feature 1..987: note = Description of Artificial Sequence: Synthetic coding sequence
  source 1..987: mol_type = other DNA
atggccgtgcaggagagcgccgcccagctgagcatgaccctgaaggtgcaggagtaccccaccctgaaggtgccctacgagaccctgaacaagagattcagagccgcccagaagaacatcgacagagagaccagccacgtgaccatggtggtggccgagctggagaagaccctgagcggctgccccgccgtggacagcgtggtgagcctgctggacggcgtggtggagaagctgagcgtgctgaagagaaaggccgtggagagcatccaggccgaggacgagagcgccaagctgtgcaagagaagaatcgagcacctgaaggagcacagcagcgaccagcccgccgccgccagcgtgtggaagagaaagagaatggacagaatgatggtggagcacctgctgagatgcggctactacaacaccgccgtgaagctggccagacagagcggcatcgagacctgcaagaaggccctgcagcccagcagaagagagcccgccggcagaggcgcccccggccacggccacgccggcctgcccgccagacacgcccacctgcccgtgcagggccccagcggcccctgcaccgtggccgacgccgaccccgccgtgcccgtgagacagctgcccaccacccccgccggcaagcagttctgcgtgcacccccaccccgccggctggcccctgagccaccaggacacctgctacaaggaggacggcagcagcaagagccccgactgccccgtgtgcagcagaagcctgaacaagctggcccagcccctgcccatggcccactgcgccaacagcagactggtgtgcaagatcagcggcgacgtgatgaacgagaacaacccccccatgatgctgcccaacggctacgtgtacggctacaacagcctgctgagcatcagacaggacgacaaggtggtgtgccccagaaccaaggaggtgttccacttcagccaggccgagaaggtgtacatcatgtag

SEQ ID NO: 87597 - DNA, 1128 bp, synthetic construct
  misc_feature 1..1128: note = Description of Artificial Sequence: Synthetic coding sequence
  source 1..1128: mol_type = other DNA
atggccgtgcaggagagcgccgcccagctgagcatgaccctgaaggtgcaggagtaccccaccctgaaggtgccctacgagaccctgaacaagagattcagagccgcccagaagaacatcgacagagagaccagccacgtgaccatggtggtggccgagctggagaagctgagcgtgctgaagagaaaggccgtggagagcatccaggccgaggacgagagcgccaagctgtgcaagagaagaatcgagcacctgaaggagcacagcagcgaccagcccgccgccgccagcgtgtggaagagaaagagaatggacagaatgatggtggagcacctgctgagatgcggctactacaacaccgccgtgaagctggccagacagagcggcatcgaggacctggtgaacatcgagatgttcctgaccgccaaggaggtggaggagagcctggagagaagagagaccgccacctgcctggcctggtgccacgacaacaagagcagactgagaaagatgaagagctgcctggagttcagcctgagaatccaggagttcatcgagctgatcagacagaacaagagactggacgccgtgagacacgccagaaagcacttcagccaggccgagggcagccagctggacgaggtgagacaggccatgggcatgctggccttcccccccgacacccacatcagcccctacaaggacctgctggaccccgccagatggagaatgctgatccagcagttcagatacgacaactacagactgcaccagctgggcaacaacagcgtgttcaccctgaccctgcaggccggcctgagcgccatcaagaccccccagtgctacaaggaggacggcagcagcaagagccccgactgccccgtgtgcagcagaagcctgaacaagctggcccagcccctgcccatggcccactgcgccaacagcagactggtgtgcaagatcagcggcgacgtgatgaacgagaacaacccccccatgatgctgcccaacggctacgtgtacggctacaacagcctgctgagcatcagacaggacgacaaggtggtgtgccccagaaccaaggaggtgttccacttcagccaggccgagaaggtgtacatcatgtag

SEQ ID NO: 87598 - DNA, 1467 bp, synthetic construct
  misc_feature 1..1467: note = Description of Artificial Sequence: Synthetic coding sequence
  source 1..1467: mol_type = other DNA
atggcccccgccgcctggctgagaagcgccgccgccagagccctgctgccccccatgctgctgctgctgctgcagcccccccccctgctggccagagccctgccccccgacgcccaccacctgcacgccgagagaagaggcccccagccctggcacgccgccctgcccagcagccccgcccccgcccccgccacccaggaggcccccagacccgccagcagcctgagaccccccagatgcggcgtgcccgaccccagcgacggcctgagcgccagaaacagacagaagagattcgtgctgagcggcggcagatgggagaagaccgacctgacctacagaatcctgagattcccctggcagctggtgcaggagcaggtgagacagaccatggccgaggccctgaaggtgtggagcgacgtgacccccctgaccttcaccgaggtgcacgagggcagagccgacatcatgatcgacttcgccagatactggcacggcgacgacctgcccttcgacggccccggcggcatcctggcccacgccttcttccccaagacccacagagagggcgacgtgcacttcgactacgacgagacctggaccatcggcgacgaccagggcaccgacctgctgcaggtggccgcccacgagttcggccacgtgctgggcctgcagcacaccaccgccgccaaggccctgatgagcgccttctacaccttcagataccccctgagcctgagccccgacgactgcagaggcgtgcagcacctgtacggccagccctggcccaccgtgaccagcagaacccccgccctgggcccccaggccggcatcgacaccaacgagatcgcccccctggagcccgacgccccccccgacgcctgcgaggccagcttcgacgccgtgagcaccatcagaggcgagctgttcttcttcaaggccggcttcgtgtggagactgagaggcggccagctgcagcccggctaccccgccctggccagcagacactggcagggcctgcccagccccgtggacgccgccttcgaggacgcccagggccacatctggttcttccagggcgcccagtactgggtgtacgacggcgagaagcccgtgctgggccccgcccccctgaccgagctgggcctggtgagattccccgtgcacgccgccctggtgtggggccccgagaagaacaagatctacttcttcagaggcagagactactggagattccaccccagcaccagaagagtggacagccccgtgcccagaagagccaccgactggagaggcgtgcccagcgagatcgacgccgccttccaggacgccgacggctacgcctacttcctgagaggcagactgtactggaagttcgaccccgtgaaggtgaaggccctggagggcttccccagactggtgggccccgacttcttcggctgcgccgagcccgccaacaccttcctgtag

SEQ ID NO: 87599 - DNA, 1563 bp, synthetic construct
  misc_feature 1..1563: note = Description of Artificial Sequence: Synthetic coding sequence
  source 1..1563: mol_type = other DNA
atgagaaacaagaagatcctgaaggaggacgagctgctgagcgagacccagcaggccgccttccaccagatcgccatggagcccttcgagatcaacgtgcccaagcccaagagaagaaacggcgtgaacttcagcctggccgtggtggtgatctacctgatcctgctgaccgccggcgccggcctgctggtggtgcaggtgctgaacctgcaggccagactgagagtgctggagatgtacttcctgaacgacaccctggccgccgaggacagccccagcttcagcctgctgcagagcgcccaccccggcgagcacctggcccagggcgccagcagactgcaggtgctgcaggcccagctgacctgggtgagagtgagccacgagcacctgctgcagagagtggacaacttcacccagaaccccggcatgttcagaatcaagggcgagcagggcgcccccggcctgcagggccacaagggcgccatgggcatgcccggcgcccccggcccccccggcccccccgccgagaagggcgccaagggcgccatgggcagagacggcgccaccggccccagcggcccccagggcccccccggcgtgaagggcgaggccggcctgcagggcccccagggcgcccccggcaagcagggcgccaccggcacccccggcccccagggcgagaagggcagcaagggcgacggcggcctgatcggccccaagggcgagaccggcaccaagggcgagaagggcgacctgggcctgcccggcagcaagggcgacagaggcatgaagggcgacgccggcgtgatgggcccccccggcgcccagggcagcaagggcgacttcggcagacccggcccccccggcctggccggcttccccggcgccaagggcgaccagggccagcccggcctgcagggcgtgcccggcccccccggcgccgtgggccaccccggcgccaagggcgagcccggcagcgccggcagccccggcagagccggcctgcccggcagccccggcagccccggcgccaccggcctgaagggcagcaagggcgacaccggcctgcagggccagcagggcagaaagggcgagagcggcgtgcccggccccgccggcgtgaagggcgagcagggcagccccggcctggccggccccaagggcgcccccggccaggccggccagaagggcgaccagggcgtgaagggcagcagcggcgagcagggcgtgaagggcgagaagggcgagagaggcgagaacagcgtgagcgtgagaatcgtgggcagcagcaacagaggcagagccgaggtgtactacagcggcacctggggcaccatctgcgacgacgagtggcagaacagcgacgccatcgtgttctgcagaatgctgggctacagcaagggcagagccctgtacaaggtgggcgccggcaccggccagatctggctggacaacgtgcagtgcagaggcaccgagagcaccctgtggagctgcaccaagaacagctggggccaccacgactgcagccacgaggaggacgccggcgtggagtgcagcgtgtag

SEQ ID NO: 87600 - DNA, 1329 bp, synthetic construct
  misc_feature 1..1329: note = Description of Artificial Sequence: Synthetic coding sequence
  source 1..1329: mol_type = other DNA
atgtacttcctgaacgacaccctggccgccgaggacagccccagcttcagcctgctgcagagcgcccaccccggcgagcacctggcccagggcgccagcagactgcaggtgctgcaggcccagctgacctgggtgagagtgagccacgagcacctgctgcagagagtggacaacttcacccagaaccccggcatgttcagaatcaagggcgagcagggcgcccccggcctgcagggccacaagggcgccatgggcatgcccggcgcccccggcccccccggcccccccgccgagaagggcgccaagggcgccatgggcagagacggcgccaccggccccagcggcccccagggcccccccggcgtgaagggcgaggccggcctgcagggcccccagggcgcccccggcaagcagggcgccaccggcacccccggcccccagggcgagaagggcagcaagggcgacggcggcctgatcggccccaagggcgagaccggcaccaagggcgagaagggcgacctgggcctgcccggcagcaagggcgacagaggcatgaagggcgacgccggcgtgatgggcccccccggcgcccagggcagcaagggcgacttcggcagacccggcccccccggcctggccggcttccccggcgccaagggcgaccagggccagcccggcctgcagggcgtgcccggcccccccggcgccgtgggccaccccggcgccaagggcgagcccggcagcgccggcagccccggcagagccggcctgcccggcagccccggcagccccggcgccaccggcctgaagggcagcaagggcgacaccggcctgcagggccagcagggcagaaagggcgagagcggcgtgcccggccccgccggcgtgaagggcgagcagggcagccccggcctggccggccccaagggcgcccccggccaggccggccagaagggcgaccagggcgtgaagggcagcagcggcgagcagggcgtgaagggcgagaagggcgagagaggcgagaacagcgtgagcgtgagaatcgtgggcagcagcaacagaggcagagccgaggtgtactacagcggcacctggggcaccatctgcgacgacgagtggcagaacagcgacgccatcgtgttctgcagaatgctgggctacagcaagggcagagccctgtacaaggtgggcgccggcaccggccagatctggctggacaacgtgcagtgcagaggcaccgagagcaccctgtggagctgcaccaagaacagctggggccaccacgactgcagccacgaggaggacgccggcgtggagtgcagcgtgtag

SEQ ID NO: 87601 - DNA, 1356 bp, synthetic construct
  misc_feature 1..1356: note = Description of Artificial Sequence: Synthetic coding sequence
  source 1..1356: mol_type = other DNA
atggagcagtgggaccacttccacaaccagcaggaggacaccgacagctgcagcgagagcgtgaagttcgacgccagaagcatgaccgccctgctgccccccaaccccaagaacagccccagcctgcaggagaagctgaagagcttcaaggccgccctgatcgccctgtacctgctggtgttcgccgtgctgatccccctgatcggcatcgtggccgcccagctgctgaagtgggagaccaagaactgcagcgtgagcagcaccaacgccaacgacatcacccagagcctgaccggcaagggcaacgacagcgaggaggagatgagattccaggaggtgttcatggagcacatgagcaacatggagaagagaatccagcacatcctggacatggaggccaacctgatggacaccgagcacttccagaacttcagcatgaccaccgaccagagattcaacgacatcctgctgcagctgagcaccctgttcagcagcgtgcagggccacggcaacgccatcgacgagatcagcaagagcctgatcagcctgaacaccaccctgctggacctgcagctgaacatcgagaacctgaacggcaagatccaggagaacaccttcaagcagcaggaggagatcagcaagctggaggagagagtgtacaacgtgagcgccgagatcatggccatgaaggaggagcaggtgcacctggagcaggagatcaagggcgaggtgaaggtgctgaacaacatcaccaacgacctgagactgaaggactgggagcacagccagaccctgagaaacatcaccctgatccagggcccccccggcccccccggcgagaagggcgacagaggccccaccggcgagagcggccccagaggcttccccggccccatcggcccccccggcctgaagggcgacagaggcgccatcggcttccccggcagcagaggcctgcccggctacgccggcagacccggcaacagcggccccaagggccagaagggcgagaagggcagcggcaacaccctgacccccttcaccaaggtgagactggtgggcggcagcggcccccacgagggcagagtggagatcctgcacagcggccagtggggcaccatctgcgacgacagatgggaggtgagagtgggccaggtggtgtgcagaagcctgggctaccccggcgtgcaggccgtgcacaaggccgcccacttcggccagggcaccggccccatctggctgaacgaggtgttctgcttcggcagagagagcagcatcgaggagtgcaagatcagacagtggggcaccagagcctgcagccacagcgaggacgccggcgtgacctgcaccctgtag

SEQ ID NO: 87602 - DNA, 1167 bp, synthetic construct
  misc_feature 1..1167: note = Description of Artificial Sequence: Synthetic coding sequence
  source 1..1167: mol_type = other DNA
atggagcagtgggaccacttccacaaccagcaggaggacaccgacagctgcagcgagagcgtgaagttcgacgccagaagcatgaccgccctgctgccccccaaccccaagaacagccccagcctgcaggagaagctgaagagcttcaaggccgccctgatcgccctgtacctgctggtgttcgccgtgctgatccccctgatcggcatcgtggccgcccagctgctgaagtgggagaccaagaactgcagcgtgagcagcaccaacgccaacgacatcacccagagcctgaccggcaagggcaacgacagcgaggaggagatgagattccaggaggtgttcatggagcacatgagcaacatggagaagagaatccagcacatcctggacatggaggccaacctgatggacaccgagcacttccagaacttcagcatgaccaccgaccagagattcaacgacatcctgctgcagctgagcaccctgttcagcagcgtgcagggccacggcaacgccatcgacgagatcagcaagagcctgatcagcctgaacaccaccctgctggacctgcagctgaacatcgagaacctgaacggcaagatccaggagaacaccttcaagcagcaggaggagatcagcaagctggaggagagagtgtacaacgtgagcgccgagatcatggccatgaaggaggagcaggtgcacctggagcaggagatcaagggcgaggtgaaggtgctgaacaacatcaccaacgacctgagactgaaggactgggagcacagccagaccctgagaaacatcaccctgatccagggcccccccggcccccccggcgagaagggcgacagaggccccaccggcgagagcggccccagaggcttccccggccccatcggcccccccggcctgaagggcgacagaggcgccatcggcttccccggcagcagaggcctgcccggctacgccggcagacccggcaacagcggccccaagggccagaagggcgagaagggcagcggcaacaccctgagcaccggccccatctggctgaacgaggtgttctgcttcggcagagagagcagcatcgaggagtgcaagatcagacagtggggcaccagagcctgcagccacagcgaggacgccggcgtgacctgcaccctgtag

SEQ ID NO: 87603 - DNA, 1167 bp, synthetic construct; identical to SEQ ID NO: 87602
  misc_feature 1..1167: note = Description of Artificial Sequence: Synthetic coding sequence
  source 1..1167: mol_type = other DNA

SEQ ID NO: 87604 - DNA, 1077 bp, synthetic construct
  misc_feature 1..1077: note = Description of Artificial Sequence: Synthetic coding sequence
  source 1..1077: mol_type = other DNA
atggagcagtgggaccacttccacaaccagcaggaggacaccgacagctgcagcgagagcgtgaagttcgacgccagaagcatgaccgccctgctgccccccaaccccaagaacagccccagcctgcaggagaagctgaagagcttcaaggccgccctgatcgccctgtacctgctggtgttcgccgtgctgatccccctgatcggcatcgtggccgcccagctgctgaagtgggagaccaagaactgcagcgtgagcagcaccaacgccaacgacatcacccagagcctgaccggcaagggcaacgacagcgaggaggagatgagattccaggaggtgttcatggagcacatgagcaacatggagaagagaatccagcacatcctggacatggaggccaacctgatggacaccgagcacttccagaacttcagcatgaccaccgaccagagattcaacgacatcctgctgcagctgagcaccctgttcagcagcgtgcagggccacggcaacgccatcgacgagatcagcaagagcctgatcagcctgaacaccaccctgctggacctgcagctgaacatcgagaacctgaacggcaagatccaggagaacaccttcaagcagcaggaggagatcagcaagctggaggagagagtgtacaacgtgagcgccgagatcatggccatgaaggaggagcaggtgcacctggagcaggagatcaagggcgaggtgaaggtgctgaacaacatcaccaacgacctgagactgaaggactgggagcacagccagaccctgagaaacatcaccctgatccagggcccccccggcccccccggcgagaagggcgacagaggccccaccggcgagagcggccccagaggcttccccggccccatcggcccccccggcctgaagggcgacagaggcgccatcggcttccccggcagcagaggcctgcccggctacgccggcagacccggcaacagcggccccaagggccagaagggcgagaagggcagcggcaacaccctgagacccgtgcagctgaccgaccacatcagagccggccccagctag

SEQ ID NO: 87605 - DNA, 1410 bp, synthetic construct
  misc_feature 1..1410: note = Description of Artificial Sequence: Synthetic coding sequence
  source 1..1410: mol_type = other DNA
atgtgctacctgagcgccatcatcagcatcagcctgctgaacaagaagcccagcatggagcagtgggaccacttccacaaccagcaggaggacaccgacagctgcagcgagagcgtgaagttcgacgccagaagcatgaccgccctgctgccccccaaccccaagaacagccccagcctgcaggagaagctgaagagcttcaaggccgccctgatcgccctgtacctgctggtgttcgccgtgctgatccccctgatcggcatcgtggccgcccagctgctgaagtgggagaccaagaactgcagcgtgagcagcaccaacgccaacgacatcacccagagcctgaccggcaagggcaacgacagcgaggaggagatgagattccaggaggtgttcatggagcacatgagcaacatggagaagagaatccagcacatcctggacatggaggccaacctgatggacaccgagcacttccagaacttcagcatgaccaccgaccagagattcaacgacatcctgctgcagctgagcaccctgttcagcagcgtgcagggccacggcaacgccatcgacgagatcagcaagagcctgatcagcctgaacaccaccctgctggacctgcagctgaacatcgagaacctgaacggcaagatccaggagaacaccttcaagcagcaggaggagatcagcaagctggaggagagagtgtacaacgtgagcgccgagatcatggccatgaaggaggagcaggtgcacctggagcaggagatcaagggcgaggtgaaggtgctgaacaacatcaccaacgacctgagactgaaggactgggagcacagccagaccctgagaaacatcaccctgatccagggcccccccggcccccccggcgagaagggcgacagaggccccaccggcgagagcggccccagaggcttccccggccccatcggcccccccggcctgaagggcgacagaggcgccatcggcttccccggcagcagaggcctgcccggctacgccggcagacccggcaacagcggccccaagggccagaagggcgagaagggcagcggcaacaccctgacccccttcaccaaggtgagactggtgggcggcagcggcccccacgagggcagagtggagatcctgcacagcggccagtggggcaccatctgcgacgacagatgggaggtgagagtgggccaggtggtgtgcagaagcctgggctaccccggcgtgcaggccgtgcacaaggccgcccacttcggccagggcaccggccccatctggctgaacgaggtgttctgcttcggcagagagagcagcatcgaggagtgcaagatcagacagtggggcaccagagcctgcagccacagcgaggacgccggcgtgacctgcaccctgtag

SEQ ID NO: 87606 - DNA, 195 bp, synthetic construct
  misc_feature 1..195: note = Description of Artificial Sequence: Synthetic coding sequence
  source 1..195: mol_type = other DNA
atggagcagtgggaccacttccacaaccagcaggaggacaccgacagctgcagcgagagcgtgaagttcgacgccagaagcatgaccgccctgctgccccccaaccccaagaacagccccagcctgcaggagaagctgaagagcttcaaggccgccctgatcgccctgtacctgctggtgttcgccgtgctgtag

SEQ ID NO: 87607 - DNA, 399 bp, synthetic construct
  misc_feature 1..399: note = Description of Artificial Sequence: Synthetic coding sequence
  source 1..399: mol_type = other DNA
atggccatgaaggaggagcaggtgcacctggagcaggagatcaagggcgaggtgaaggtgctgaacaacatcaccaacgacctgagactgaaggactgggagcacagccagaccctgagaaacatcaccctgatccagggcccccccggcccccccggcgagaagggcgacagaggccccaccggcgagagcggccccagaggcttccccggccccatcggcccccccggcctgaagggcgacagaggcgccatcggcttccccggcagcagaggcctgcccggctacgccggcagacccggcaacagcggccccaagggccagaagggcgagaagggcagcggcaacaccctgagacccgtgcagctgaccgaccacatcagagccggccccagctag

SEQ ID NO: 87608 - DNA, 4203 bp, synthetic construct
  misc_feature 1..4203: note = Description of Artificial Sequence: Synthetic coding sequence
  source 1..4203: mol_type = other DNA
atggagctgctgccccccctgccccagagcttcctgctgctgctgctgctgcccgccaagcccgccgccggcgaggactggcagtgccccagaaccccctacgccgccagcagagacttcgacgtgaagtacgtggtgcccagcttcagcgccggcggcctggtgcaggccatggtgacctacgagggcgacagaaacgagagcgccgtgttcgtggccatcagaaacagactgcacgtgctgggccccgacctgaagagcgtgcagagcctggccaccggccccgccggcgaccccggctgccagacctgcgccgcctgcggccccggcccccacggcccccccggcgacaccgacaccaaggtgctggtgctggaccccgccctgcccgccctggtgagctgcggcagcagcctgcagggcagatgcttcctgcacgacctggagccccagggcaccgccgtgcacctggccgcccccgcctgcctgttcagcgcccaccacaacagacccgacgactgccccgactgcgtggccagccccctgggcaccagagtgaccgtggtggagcagggccaggccagctacttctacgtggccagcagcctggacgccgccgtggccgccagcttcagccccagaagcgtgagcatcagaagactgaaggccgacgccagcggcttcgcccccggcttcgtggccctgagcgtgctgcccaagcacctggtgagctacagcatcgagtacgtgcacagcttccacaccggcgccttcgtgtacttcctgaccgtgcagcccgccagcgtgaccgacgaccccagcgccctgcacaccagactggccagactgagcgccaccgagcccgagctgggcgactacagagagctggtgctggactgcagattcgcccccaagagaagaagaagaggcgcccccgagggcggccagccctaccccgtgctgagagtggcccacagcgcccccgtgggcgcccagctggccaccgagctgagcatcgccgagggccaggaggtgctgttcggcgtgttcgtgaccggcaaggacggcggccccggcgtgggccccaacagcgtggtgtgcgccttccccatcgacctgctggacaccctgatcgacgagggcgtggagagatgctgcgagagccccgtgcaccccggcctgagaagaggcctggacttcttccagagccccagcttctgccccaacccccccggcctggaggccctgagccccaacaccagctgcagacacttccccctgctggtgagcagcagcttcagcagagtggacctgttcaacggcctgctgggccccgtgcaggtgaccgccctgtacgtgaccagactggacaacgtgaccgtggcccacatgggcaccatggacggcagaatcctgcaggtggagctggtgagaagcctgaactacctgctgtacgtgagcaacttcagcctgggcgacagcggccagcccgtgcagagagacgtgagcagactgggcgaccacctgctgttcgccagcggcgaccaggtgttccaggtgcccatccagggccccggctgcagacacttcctgacctgcggcagatgcctgagagcctggcacttcatgggctgcggctggtgcggcaacatgtgcggccagcagaaggagtgccccggcagctggcagcaggaccactgcccccccaagctgaccgagttccacccccacagcggccccctgagaggcagcaccagactgaccctgtgcggcagcaacttctacctgcaccccagcggcctggtgcccgagggcacccaccaggtgaccgtgggccagagcccctgcagacccctgcccaaggacagcagcaagctgagacccgtgcccagaaaggacttcgtggaggagttcgagtgcgagctggagcccctgggcacccaggccgtgggccccaccaacgtgagcctgaccgtgaccaacatgccccccggcaagcacttcagagtggacggcaccagcgtgctgagaggcttcagcttcatggagcccgtgctgatcgccgtgcagcccctgttcggccccagagccggcggcacctgcctgaccctggagggccagagcctgagcgtgggcaccagcagagccgtgctggtgaacggcaccgagtgcctgctggccagagtgagcgagggccagctgctgtgcgccaccccccccggcgccaccgtggccagcgtgcccctgagcctgcaggtgggcggcgcccaggtgcccggcagctggaccttccagtacagagaggaccccgtggtgctgagcatcagccccaactgcggctacatcaacagccacatcaccatctgcggccagcacctgaccagcgcctggcacctggtgctgagcttccacgacggcctgagagccgtggagagcagatgcgagagacagctgcccgagcagcagctgtgcagactgcccgagtacgtggtgagagacccccagggctgggtggccggcaacctgagcgccagaggcgacggcgccgccggcttcaccctgcccggcttcagattcctgccccccccccacccccccagcgccaacctggtgcccctgaagcccgaggagcacgccatcaagttcgagtacatcggcctgggcgccgtggccgactgcgtgggcatcaacgtgaccgtgggcggcgagagctgccagcacgagttcagaggcgacatggtggtgtgccccctgccccccagcctgcagctgggccaggacggcgcccccctgcaggtgtgcgtggacggcgagtgccacatcctgggcagagtggtgagacccggccccgacggcgtgccccagagcaccctgctgggcatcctgctgcccctgctgctgctggtggccgccctggccaccgccctggtgttcagctactggtggagaagaaagcagctggtgctgccccccaacctgaacgacctggccagcctggaccagaccgccggcgccacccccctgcccatcctgtacagcggcagcgactacagaagcggcctggccctgcccgccatcgacggcctggacagcaccacctgcgtgcacggcgccagcttcagcgacagcgaggacgagagctgcgtgcccctgctgagaaaggagagcatccagctgagagacctggacagcgccctgctggccgaggtgaaggacgtgctgatcccccacgagagagtggtgacccacagcgacagagtgatcggcaagggccacttcggcgtggtgtaccacggcgagtacatcgaccaggcccagaacagaatccagtgcgccatcaagagcctgagcagaatcaccgagatgcagcaggtggaggccttcctgagagagggcctgctgatgagaggcctgaaccaccccaacgtgctggccctgatcggcatcatgctgccccccgagggcctgccccacgtgctgctgccctacatgtgccacggcgacctgctgcagttcatcagaagcccccagagaaaccccaccgtgaaggacctgatcagcttcggcctgcaggtggccagaagcatggagtacctggccgagcagaagttcgtgcacagagacctggccgccagaaactgcatgctggacgagagcttcaccgtgaaggtggccgacttcggcctggccagagacatcctggacagagagtactacagcgtgcagcagcacagacacgccagactgcccgtgaagtggatggccctggagagcctgcagacctacagattcaccaccaagagcgacgtgtggagcttcggcgtgctgctgtgggagctgctgaccagaggcgcccccccctacagacacatcgaccccttcgacctgacccacttcctggcccagggcagaagactgccccagcccgagtactgccccgacagcctgtaccaggtgatgcagcagtgctgggaggccgaccccgccgtgagacccaccttcagagtgctggtgggcgaggtggagcagatcgtgagcgccctgctgggcgaccactacgtgcagctgcccgccacctacatgaacctgggccccagcaccagccacgagatgaacgtgagacccgagcagccccagttcagccccatgcccggcaacgtgagaagacccagacccctgagcgagccccccagacccacctag

SEQ ID NO: 87609 - DNA, 4056 bp, synthetic construct
  misc_feature 1..4056: note = Description of Artificial Sequence: Synthetic coding sequence
  source 1..4056: mol_type = other DNA
atggagctgctgccccccctgccccagagcttcctgctgctgctgctgctgcccgccaagcccgccgccggcgaggactggcagtgccccagaaccccctacgccgccagcagagacttcgacgtgaagtacgtggtgcccagcttcagcgccggcggcctggtgcaggccatggtgacctacgagggcgacagaaacgagagcgccgtgttcgtggccatcagaaacagactgcacgtgctgggccccgacctgaagagcgtgcagagcctggccaccggccccgccggcgaccccggctgccagacctgcgccgcctgcggccccggcccccacggcccccccggcgacaccgacaccaaggtgctggtgctggaccccgccctgcccgccctggtgagctgcggcagcagcctgcagggcagatgcttcctgcacgacctggagccccagggcaccgccgtgcacctggccgcccccgcctgcctgttcagcgcccaccacaacagacccgacgactgccccgactgcgtggccagccccctgggcaccagagtgaccgtggtggagcagggccaggccagctacttctacgtggccagcagcctggacgccgccgtggccgccagcttcagccccagaagcgtgagcatcagaagactgaaggccgacgccagcggcttcgcccccggcttcgtggccctgagcgtgctgcccaagcacctggtgagctacagcatcgagtacgtgcacagcttccacaccggcgccttcgtgtacttcctgaccgtgcagcccgccagcgtgaccgacgaccccagcgccctgcacaccagactggccagactgagcgccaccgagcccgagctgggcgactacagagagctggtgctggactgcagattcgcccccaagagaagaagaagaggcgcccccgagggcggccagccctaccccgtgctgagagtggcccacagcgcccccgtgggcgcccagctggccaccgagctgagcatcgccgagggccaggaggtgctgttcggcgtgttcgtgaccggcaaggacggcggccccggcgtgggccccaacagcgtggtgtgcgccttccccatcgacctgctggacaccctgatcgacgagggcgtggagagatgctgcgagagccccgtgcaccccggcctgagaagaggcctggacttcttccagagccccagcttctgccccaacccccccggcctggaggccctgagccccaacaccagctgcagacacttccccctgctggtgagcagcagcttcagcagagtggacctgttcaacggcctgctgggccccgtgcaggtgaccgccctgtacgtgaccagactggacaacgtgaccgtggcccacatgggcaccatggacggcagaatcctgcaggtggagctggtgagaagcctgaactacctgctgtacgtgagcaacttcagcctgggcgacagcggccagcccgtgcagagagacgtgagcagactgggcgaccacctgctgttcgccagcggcgaccaggtgttccaggtgcccatccagggccccggctgcagacacttcctgacctgcggcagatgcctgagagcctggcacttcatgggctgcggctggtgcggcaacatgtgcggccagcagaaggagtgccccggcagctggcagcaggaccactgcccccccaagctgaccgagttccacccccacagcggccccctgagaggcagcaccagactgaccctgtgcggcagcaacttctacctgcaccccagcggcctggtgcccgagggcacccaccaggtgaccgtgggccagagcccctgcagacccctgcccaaggacagcagcaagctgagacccgtgcccagaaaggacttcgtggaggagttcgagtgcgagctggagcccctgggcacccaggccgtgggccccaccaacgtgagcctgaccgtgaccaacatgccccccggcaagcacttcagagtggacggcaccagcgtgctgagaggcttcagcttcatggagcccgtgctgatcgccgtgcagcccctgttcggccccagagccggcggcacctgcctgaccctggagggccagagcctgagcgtgggcaccagcagagccgtgctggtgaacggcaccgagtgcctgctggccagagtgagcgagggccagctgctgtgcgccaccccccccggcgccaccgtggccagcgtgcccctgagcctgcaggtgggcggcgcccaggtgcccggcagctggaccttccagtacagagaggaccccgtggtgctgagcatcagccccaactgcggctacatcaacagccacatcaccatctgcggccagcacctgaccagcgcctggcacctggtgctgagcttccacgacggcctgagagccgtggagagcagatgcgagagacagctgcccgagcagcagctgtgcagactgcccgagtacgtggtgagagacccccagggctgggtggccggcaacctgagcgccagaggcgacggcgccgccggcttcaccctgcccggcttcagattcctgccccccccccacccccccagcgccaacctggtgcccctgaagcccgaggagcacgccatcaagttcgaggtgtgcgtggacggcgagtgccacatcctgggcagagtggtgagacccggccccgacggcgtgccccagagcaccctgctgggcatcctgctgcccctgctgctgctggtggccgccctggccaccgccctggtgttcagctactggtggagaagaaagcagctggtgctgccccccaacctgaacgacctggccagcctggaccagaccgccggcgccacccccctgcccatcctgtacagcggcagcgactacagaagcggcctggccctgcccgccatcgacggcctggacagcaccacctgcgtgcacggcgccagcttcagcgacagcgaggacgagagctgcgtgcccctgctgagaaaggagagcatccagctgagagacctggacagcgccctgctggccgaggtgaaggacgtgctgatcccccacgagagagtggtgacccacagcgacagagtgatcggcaagggccacttcggcgtggtgtaccacggcgagtacatcgaccaggcccagaacagaatccagtgcgccatcaagagcctgagcagaatcaccgagatgcagcaggtggaggccttcctgagagagggcctgctgatgagaggcctgaaccaccccaacgtgctggccctgatcggcatcatgctgccccccgagggcctgccccacgtgctgctgccctacatgtgccacggcgacctgctgcagttcatcagaagcccccagagaaaccccaccgtgaaggacctgatcagcttcggcctgcaggtggccagaagcatggagtacctggccgagcagaagttcgtgcacagagacctggccgccagaaactgcatgctggacgagagcttcaccgtgaaggtggccgacttcggcctggccagagacatcctggacagagagtactacagcgtgcagcagcacagacacgccagactgcccgtgaagtggatggccctggagagcctgcagacctacagattcaccaccaagagcgacgtgtggagcttcggcgtgctgctgtgggagctgctgaccagaggcgcccccccctacagacacatcgaccccttcgacctgacccacttcctggcccagggcagaagactgccccagcccgagtactgccccgacagcctgtaccaggtgatgcagcagtgctgggaggccgaccccgccgtgagacccaccttcagagtgctggtgggcgaggtggagcagatcgtgagcgccctgctgggcgaccactacgtgcagctgcccgccacctacatgaacctgggccccagcaccagccacgagatgaacgtgagacccgagcagccccagttcagccccatgcccggcaacgtgagaagacccagacccctgagcgagccccccagacccacctag

SEQ ID NO: 87610 - DNA, 2157 bp, synthetic construct
  misc_feature 1..2157: note = Description of Artificial Sequence: Synthetic coding sequence
  source 1..2157: mol_type = other DNA
atggaggacctgggcgagaacaccatggtgctgagcaccctgagaagcctgaacaacttcatcagccagagagtggagggcggcagcggcctggacatcagcaccagcgcccccggcagcctgcagatgcagtaccagcagagcatgcagctggaggagagagccgagcagatcagaagcaagagccacctgatccaggtggagagagagaagatgcagatggagctgagccacaagagagccagagtggagctggagagagccgccagcaccagcgccagaaactacgagagagaggtggacagaaaccaggagctgctgaccagaatcagacagctgcaggagagagaggccggcgccgaggagaagatgcaggagcagctggagagaaacagacagtgccagcagaacctggacgccgccagcaagagactgagagagaaggaggacagcctggcccaggccggcgagaccatcaacgccctgaagggcagaatcagcgagctgcagtggagcgtgatggaccaggagatgagagtgaagagactggagagcgagaagcaggagctgcaggagcagctggacctgcagcacaagaagtgccaggaggccaaccagaagatccaggagctgcaggccagccaggaggccagagccgaccacgagcagcagatcaaggacctggagcagaagctgagcctgcaggagcaggacgccgccatcgtgaagaacatgaagagcgagctggtgagactgcccagactggagagagagctgaagcagctgagagaggagagcgcccacctgagagagatgagagagaccaacggcctgctgcaggaggagctggagggcctgcagagaaagctgggcagacaggagaagatgcaggagaccctggtgggcctggagctggagaacgagagactgctggccaagctgcagagctgggagagactggaccagaccatgggcctgagcatcagaacccccgaggacctgagcagattcgtggtggagctgcagcagagagagctggccctgaaggacaagaacagcgccgtgaccagcagcgccagaggcctggagaaggccagacagcagctgcaggaggagctgagacaggtgagcggccagctgctggaggagagaaagaagagagagacccacgaggccctggccagaagactgcagaagagagtgctgctgctgaccaaggagagagacggcatgagagccatcctgggcagctacgacagcgagctgacccccgccgagtacagcccccagctgaccagaagaatgagagaggccgaggacatggtgcagaaggtgcacagccacagcgccgagatggaggcccagctgagccaggccctggaggagctgggcggccagaagcagagagccgacatgctggagatggagctgaagatgctgaagagccagagcagcagcgccgagcagagcttcctgttcagcagagaggaggccgacaccctgagactgaaggtggaggagctggagggcgagagaagcagactggaggaggagaagagaatgctggaggcccagctggagagaagagccctgcagggcgactacgaccagagcagaaccaaggtgctgcacatgagcctgaaccccaccagcgtggccagacagagactgagagaggaccacagccagctgcaggccgagtgcgagagactgagaggcctgctgagagccatggagagaggcggcaccgtgcccgccgacctggaggccgccgccgccagcctgcccagcagcaaggaggtggccgagctgaagaagcaggtggagagcgccgagctgaagaaccagagactgaaggaggtgttccagaccaagatccaggagttcagaaaggcctgctacaccctgaccggctaccagatcgacatcaccaccgagaaccagtacagactgaccagcctgtacgccgagcaccccggcgactgcctgatcttcaaggccaccagccccagcggcagcaagatgcagctgctggagaccgagttcagccacaccgtgggcgagctgatcgaggtgcacctgagaagacaggacagcatccccgccttcctgagcagcctgaccctggagctgttcagcagacagaccgtggcctag

SEQ ID NO: 87611 - DNA, 2157 bp, synthetic construct; identical to SEQ ID NO: 87610
  misc_feature 1..2157: note = Description of Artificial Sequence: Synthetic coding sequence
  source 1..2157: mol_type = other DNA

SEQ ID NO: 87612 - DNA, 1881 bp, synthetic construct
  misc_feature 1..1881: note = Description of Artificial Sequence: Synthetic coding sequence
  source 1..1881: mol_type = other DNA
atgctgcccgccagaggctgcgtgagaaagagaaccgtgtggcccagactggccagagtgctgatcgtgaccctgctgaccctggagctgagctacgcccccctgccctgccagctgagcggcgtgccctacaacaccggcgaccccgtgggcagatgggccagaccctgcatctggccctgcccctggcacaccaccatcaacgccctgaagggcagaatcagcgagctgcagtggagcgtgatggaccaggagatgagagtgaagagactggagagcgagaagcaggagctgcaggagcagctggacctgcagcacaagaagtgccaggaggccaaccagaagatccaggagctgcaggccagccaggaggccagagccgaccacgagcagcagatcaaggacctggagcagaagctgagcctgcaggagcaggacgccgccatcgtgaagaacatgaagagcgagctggtgagactgcccagactggagagagagctgaagcagctgagagaggagagcgcccacctgagagagatgagagagaccaacggcctgctgcaggaggagctggagggcctgcagagaaagctgggcagacaggagaagatgcaggagaccctggtgggcctggagctggagaacgagagactgctggccaagctgcagagctgggagagactggaccagaccatgggcctgagcatcagaacccccgaggacctgagcagattcgtggtggagctgcagcagagagagctggccctgaaggacaagaacagcgccgtgaccagcagcgccagaggcctggagaaggccagacagcagctgcaggaggagctgagacaggtgagcggccagctgctggaggagagaaagaagagagagacccacgaggccctggccagaagactgcagaagagagtgctgctgctgaccaaggagagagacggcatgagagccatcctgggcagctacgacagcgagctgacccccgccgagtacagcccccagctgaccagaagaatgagagaggccgaggacatggtgcagaaggtgcacagccacagcgccgagatggaggcccagctgagccaggccctggaggagctgggcggccagaagcagagagccgacatgctggagatggagctgaagatgctgaagagccagagcagcagcgccgagcagagcttcctgttcagcagagaggaggccgacaccctgagactgaaggtggaggagctggagggcgagagaagcagactggaggaggagaagagaatgctggaggcccagctggagagaagagccctgcagggcgactacgaccagagcagaaccaaggtgctgcacatgagcctgaaccccaccagcgtggccagacagagactgagagaggaccacagccagctgcaggccgagtgcgagagactgagaggcctgctgagagccatggagagaggcggcaccgtgcccgccgacctggaggccgccgccgccagcctgcccagcagcaaggaggtggccgagctgaagaagcaggtggagagcgccgagctgaagaaccagagactgaaggaggtgttccagaccaagatccaggagttcagaaaggcctgctacaccctgaccggctaccagatcgacatcaccaccgagaaccagtacagactgaccagcctgtacgccgagcaccccggcgactgcctgatcttcaaggccaccagccccagcggcagcaagatgcagctgctggagaccgagttcagccacaccgtgggcgagctgatcgaggtgcacctgagaagacaggacagcatccccgccttcctgagcagcctgaccctggagctgttcagcagacagaccgtggcctag

SEQ ID NO: 87613 - DNA, 2157 bp, synthetic construct; identical to SEQ ID NO: 87610
  misc_feature 1..2157: note = Description of Artificial Sequence: Synthetic coding sequence
  source 1..2157: mol_type = other DNA

SEQ ID NO: 87614 - DNA, 474 bp, synthetic construct
  misc_feature 1..474: note = Description of Artificial Sequence: Synthetic coding sequence
  source 1..474: mol_type = other DNA
atggaggacctgggcgagaacaccatggtgctgagcaccctgagaagcctgaacaacttcatcagccagagagtggagggcggcagcggcctggacatcagcaccagcgcccccggcagcctgcagatgcagtaccagcagagcatgcagctggaggagagagccgagcagatcagaagcaagagccacctgatccaggtggagagagagaagatgcagatggagctgagccacaagagagccagagtggagctggagagagccgccagcaccagcgccagaaactacgagagagaggtggacagaaaccaggagctgctgaccagaatcagacagctgcaggagagagaggccggcgccgaggagaagatgcaggagcagctggagagaaacagacagtgccagcagaacctggacgccgccagcaagagactgagagagaaggaggacagcctggcccaggccggcgagtag

SEQ ID NO: 87615 - DNA, 810 bp, synthetic construct
  misc_feature 1..810: note = Description of Artificial Sequence: Synthetic coding sequence
  source 1..810: mol_type = other DNA
atgagagagctggagttcgccaagctggagtgctgcctggcctggcagctgcaggccagcagaagagagctggagatggagctgaagatgctgaagagccagagcagcagcgccgagcagagcttcctgttcagcagagaggaggccgacaccctgagactgaaggtggaggagctggagggcgagagaagcagactggaggaggagaagagaatgctggaggcccagctggagagaagagccctgcagggcgactacgaccagagcagaaccaaggtgctgcacatgagcctgaaccccaccagcgtggccagacagagactgagagaggaccacagccagctgcaggccgagtgcgagagactgagaggcctgctgagagccatggagagaggcggcaccgtgcccgccgacctggaggccgccgccgccagcctgcccagcagcaaggaggtggccgagctgaagaagcaggtggagagcgccgagctgaagaaccagagactgaaggaggtgttccagaccaagatccaggagttcagaaaggcctgctacaccctgaccggctaccagatcgacatcaccaccgagaaccagtacagactgaccagcctgtacgccgagcaccccggcgactgcctgatcttcaaggccaccagccccagcggcagcaagatgcagctgctggagaccgagttcagccacaccgtgggcgagctgatcgaggtgcacctgagaagacaggacagcatccccgccttcctgagcagcctgaccctggagctgttcagcagacagaccgtggcctag

SEQ ID NO: 87616 - DNA, 618 bp, synthetic construct
  misc_feature 1..618: note = Description of Artificial Sequence: Synthetic coding sequence
  source 1..618: mol_type = other DNA
atggccctgcagctgagcagagagcagggcatcaccctgagaggcagcgccgagatcgtggccgagttcttcagcttcggcatcaacagcatcctgtaccagagaggcatctaccccagcgagaccttcaccagagtgcagaagtacggcctgaccctgctggtgaccaccgacctggagctgatcaagtacctgaacaacgtggtggagcagctgaaggactggctgtacaagtgcagcgtgcagaagctggtggtggtgatcagcaacatcgagagcggcgaggtgctggagagatggcagttcgacatcgagtgcgacaagaccgccaaggacgacagcgcccccagagagaagagccagaaggccatccaggacgagatcagaagcgtgatcagacagatcaccgccaccgtgaccttcctgcccctgctggaggtgagctgcagcttcgacctgctgatctacaccgacaaggacctggtggtgcccgagaagtgggaggagagcggcccccagttcatcaccaacagcgaggaggtgagactgagaagcttcaccaccaccatccacaaggtgaacagcatggtggcctacaagatccccgtgaacgactag

SEQ ID NO: 87617 - DNA, 1212 bp, synthetic construct
  misc_feature 1..1212: note = Description of Artificial Sequence: Synthetic coding sequence
  source 1..1212: mol_type = other DNA
atgcccaacagaaaggccagcagaaacgcctactacttcttcgtgcaggagaagatccccgagctgagaagaagaggcctgcccgtggccagagtggccgacgccatcccctactgcagcagcgactgggccaagcccgtgttcacccccctgagaagacccggcatgctggtgcccaagcagaacgtgagcccccccgacatgagcgccctgagcctgaagggcgaccaggccctgctgggcggcatcttctacttcctgaacatcttcagccacggcgagctgcccccccactgcgagcagagattcctgccctgcgagatcggctgcgtgaagtacagcctgcaggagggcatcatggccgacttccacagcttcatcaaccccggcgagatccccagaggcttcagattccactgccaggccgccagcgacagcagccacaagatccccatcagcaacttcgagagaggccacaaccaggccaccgtgctgcagaacctgtacagattcatccaccccaaccccggcaactggccccccatctactgcaagagcgacgacagaaccagagtgaactggtgcctgaagcacatggccaaggccagcgagatcagacaggacctgcagctgctgaccgtggaggacctggtggtgggcatctaccagcagaagttcctgaaggagcccagcaagacctggatcagaagcctgctggacgtggccatgtgggactacagcagcaacaccagatgcaagtggcacgaggagaacgacatcctgttctgcgccctggccgtgtgcaagaagatcgcctactgcatcagcaacagcctggccaccctgttcggcatccagctgaccgaggcccacgtgcccctgcaggactacgaggccagcaacagcgtgacccccaagatggtggtgctggacgccggcagataccagaagctgagagtgggcagcagcggcttcagccacttcaacagcagcaacgaggagcagagaagcaacacccccatcggcgactaccccagcagagccaagatcagcggccagaacagcagcgtgagaggcagaggcatcaccagactgctggagagcatcagcaacagcagcagcaacatccacaagttcagcaactgcgacaccagcctgagcccctacatgagccagaaggacggctacaagagcttcagcagcctgagctag

SEQ ID NO: 87618 - DNA, 1305 bp, synthetic construct
  misc_feature 1..1305: note = Description of Artificial Sequence: Synthetic coding sequence
  source 1..1305: mol_type = other DNA
atgcccaacagaaaggccagcagaaacgcctactacttcttcgtgcaggagaagatccccgagctgagaagaagaggcctgcccgtggccagagtggccgacgccatcccctactgcagcagcgactgggccctgctgagagaggaggagaaggagaagtacgccgagatggccagagagtggagagccgcccagggcaaggaccccggccccagcgagaagcagaagcccgtgttcacccccctgagaagacccggcatgctggtgcccaagcagaacgtgagcccccccgacatgagcgccctgagcctgaagggcgaccaggccctgctgggcggcatcttctacttcctgaacatcttcagccacggcgagctgcccccccactgcgagcagagattcctgccctgcgagatcggctgcgtgaagtacagcctgcaggagggcatcatggccgacttccacagcttcatcaaccccggcgagatccccagaggcttcagattccactgccaggccgccagcgacagcagccacaagatccccatcagcaacttcgagagaggccacaaccaggccaccgtgctgcagaacctgtacagattcatccaccccaaccccggcaactggccccccatctactgcaagagcgacgacagaaccagagtgaactggtgcctgaagcacatggccaaggccagcgagatcagacaggacctgcagctgctgaccgtggaggacctggtggtgggcatctaccagcagaagttcctgaaggagcccagcaagacctggatcagaagcctgctggacgtggccatgtgggactacagcagcaacaccagatgcaagtggcacgaggagaacgacatcctgttctgcgccctggccgtgtgcaagaagatcgcctactgcatcagcaacagcctggccaccctgttcggcatccagctgaccgaggcccacgtgcccctgcaggactacgaggccagcaacagcgtgacccccaagatggtggtgctggacgccggcagataccagaagctgagagtgggcagcagcggcttcagccacttcaacagcagcaacgaggagcagagaagcaacacccccatcggcgactaccccagcagagccaagatcagcggccagaacagcagcgtgagaggcagaggcatcaccagactgctggagagcatcagcaacagcagcagcaacatccacaagttcagcaactgcgacaccagcctgagcccctacatgagccagaaggacggctacaagagcttcagcagcctgagctag

SEQ ID NO: 87619 - DNA, 951 bp, synthetic construct
  misc_feature 1..951: note = Description of Artificial Sequence: Synthetic coding sequence
  source 1..951: mol_type = other DNA
atgcccaacagaaaggccagcagaaacgcctactacttcttcgtgcaggagaagatccccgagctgagaagaagaggcctgcccgtggccagagtggccgacgccatcccctactgcagcagcgactgggccaagcccgtgttcacccccctgagaagacccggcatgctggtgcccaagcagaacgtgagcccccccgacatgagcgccctgagcctgaagggcgaccaggccctgctgggcggcatcttctacttcctgaacatcttcagccacggcgagctgcccccccactgcgagcagagattcctgccctgcgagatcggctgcgtgaagtacagcctgcaggagggcatcatggccgacttccacagcttcatcaaccccggcgagatccccagaggcttcagattccactgccaggccgccagcgacagcagccacaagatccccatcagcaacttcgagagaggccacaaccaggccaccgtgctgcagaacctgtacagattcatccaccccaaccccggcaactggccccccatctactgcaagagcgacgacagaaccagagtgaactggtgcctgaagcacatggccaaggccagcgagatcagacaggacctgcagctgctgaccgtggaggacctggtggtgggcatctaccagcagaagttcctgaaggagcccagcaagacctggatcagaagcctgctggacgtggccatgtgggactacagcagcaacaccagatgcaagtggcacgaggagaacgacatcctgttctgcgccctggccgtgtgcaagaagatcgcctactgcatcagcaacagcctggccaccctgttcggcatccagctgaccgaggcccacgtgcccctgcaggactacgaggccagcaacagcgtgacccccaagatggtggtgctggacgccggcagataccagtag

SEQ ID NO: 87620 - DNA, 471 bp, synthetic construct
  misc_feature 1..471: note = Description of Artificial Sequence: Synthetic coding sequence
  source 1..471: mol_type = other DNA
ctgctgcagagatgcaagtggcacgaggagaacgacatcctgttctgcgccctggccgtgtgcaagaagatcgcctactgcatcagcaacagcctggccaccctgttcggcatccagctgaccgaggcccacgtgcccctgcaggactacgaggccagcaacagcgtgacccccaagatggtggtgctggacgccggcagataccagaagctgagagtgggcagcagcggcttcagccacttcaacagcagcaacgaggagcagagaagcaacacccccatcggcgactaccccagcagagccaagatcagcggccagaacagcagcgtgagaggcagaggcatcaccagactgctggagagcatcagcaacagcagcagcaacatccacaagttcagcaactgcgacaccagcctgagcccctacatgagccagaaggacggctacaagagcttcagcagcctgagctag

SEQ ID NO: 87621 - DNA, 747 bp, synthetic construct
  misc_feature 1..747: note = Description of Artificial Sequence: Synthetic coding sequence
  source 1..747: mol_type = other DNA
atggaccagagacagagaagaatcctgggccagcccctgagcatccccaccagccagcccaagcagaagagaaccagcatgatcagcttcttcagcaaggtgagctggaagctgagattccagaagagagagcccctgaagaacgtgttcttcatcctggccgagagagccagagaccccagcgccaagaagagacacatggccatgagaaacctgggcaccatggcctacgaggcccccgacaaggtgagaaagtacaagaagatcgtgctggacctgctggtgtacggcctgtacgaccccgtgaacctggaggtgatccacgagagcatgaagaccctgaccgtggtgctgggcaagatccagggcaagggcctgggcagcttcttcatcgacatcaccctgcagaccagaaccctgctggacgacgagaacgacagcctgagatacagcgccttcgtgctgttcggccagctggccgccttcgccggcagaaagtggaagaagttcttcaccagccaggtgaagcagaccagagacagcctgctgatccacctgcaggacagaaacccccaggtggccaaggcctgcaagaccaccttccaggcctgcagcccctacctgaagctgaaggaggagtacagcttccagagcgaggaggaccagagaaacaccaagctgtaccagcagctgagccactaccaccccgagatcctgcagttcttctacgccaacaagatcctgtag

SEQ ID NO: 87622 - DNA, 747 bp, synthetic construct; identical to SEQ ID NO: 87621
  misc_feature 1..747: note = Description of Artificial Sequence: Synthetic coding sequence
  source 1..747: mol_type = other DNA

SEQ ID NO: 87623 - DNA, 591 bp, synthetic construct
  misc_feature 1..591: note = Description of Artificial Sequence: Synthetic coding sequence
  source 1..591: mol_type = other DNA
atggaccagagacagagaagaatcctgggccagcccctgagcatccccaccagccagcccaagcagaagagaaccagcatgatcagcttcttcagcaaggtgagctggaagctgagattccagaagagagagcccctgaagaacgtgttcttcatcctggccgagagagccagagaccccagcgccaagaagagacacatggccatgagaaacctgggcaccatggcctacgaggcccccgacaaggtgagaaagtacaagaagatcgtgctggacctgctggtgtacggcctgtacgaccccgtgaacctggaggtgatccacgagagcatgaagaccctgaccgtggtgctgggcaagatccagggcaagggcctgggcagcttcttcatcgacatcaccctgcagaccagaaccctgctggacgacgcctgcaagaccaccttccaggcctgcagcccctacctgaagctgaaggaggagtacagcttccagagcgaggaggaccagagaaacaccaagctgtaccagcagctgagccactaccaccccgagatcctgcagttcttctacgccaacaagatcctgtag

SEQ ID NO: 87624 - DNA, 633 bp, synthetic construct
  misc_feature 1..633: note = Description of Artificial Sequence: Synthetic coding sequence
  source 1..633: mol_type = other DNA
atggcctggggcagcaagggcatccagggctgggagaacctggccgagagcagccacctggccaccaccagagagagcagcccccccgagagcggcaccggcagcggcagcagcagaggcagcagactgcaggagccccaggtgagctggaagctgagattccagaagagagagcccctgaagaacgtgttcttcatcctggccgagagagccagagaccccagcgccaagaagagacacatggccatgagaaacctgggcaccatggcctacgaggcccccgacaaggtgagaaagtacaagaagatcgtgctggacctgctggtgtacggcctgtacgaccccgtgaacctggaggtgatccacgagagcatgaagaccctgaccgtggtgctgggcaagatccagggcaagggcctgggcagcttcttcatcgacatcaccctgcagaccagaaccctgctggacgacgcctgcaagaccaccttccaggcctgcagcccctacctgaagctgaaggaggagtacagcttccagagcgaggaggaccagagaaacaccaagctgtaccagcagctgagccactaccaccccgagatcctgcagttcttctacgccaacaagatcctgtag

SEQ ID NO: 87625 - DNA, 789 bp, synthetic construct
  misc_feature 1..789: note = Description of Artificial Sequence: Synthetic coding sequence
  source 1..789: mol_type = other DNA
atggcctggggcagcaagggcatccagggctgggagaacctggccgagagcagccacctggccaccaccagagagagcagcccccccgagagcggcaccggcagcggcagcagcagaggcagcagactgcaggagccccaggtgagctggaagctgagattccagaagagagagcccctgaagaacgtgttcttcatcctggccgagagagccagagaccccagcgccaagaagagacacatggccatgagaaacctgggcaccatggcctacgaggcccccgacaaggtgagaaagtacaagaagatcgtgctggacctgctggtgtacggcctgtacgaccccgtgaacctggaggtgatccacgagagcatgaagaccctgaccgtggtgctgggcaagatccagggcaagggcctgggcagcttcttcatcgacatcaccctgcagaccagaaccctgctggacgacgagaacgacagcctgagatacagcgccttcgtgctgttcggccagctggccgccttcgccggcagaaagtggaagaagttcttcaccagccaggtgaagcagaccagagacagcctgctgatccacctgcaggacagaaacccccaggtggccaaggcctgcaagaccaccttccaggcctgcagcccctacctgaagctgaaggaggagtacagcttccagagcgaggaggaccagagaaacaccaagctgtaccagcagctgagccactaccaccccgagatcctgcagttcttctacgccaacaagatcctgtag

SEQ ID NO: 87626 - DNA, 591 bp, synthetic construct; identical to SEQ ID NO: 87623
  misc_feature 1..591: note = Description of Artificial Sequence: Synthetic coding sequence
  source 1..591: mol_type = other DNA

SEQ ID NO: 87627 - DNA, 771 bp, synthetic construct
  misc_feature 1..771: note = Description of Artificial Sequence: Synthetic coding sequence
  source 1..771: mol_type = other DNA
atgaagctgctggagaacagcagcttcgaggccatcaacagccagctgaccgtggagaccggcgacgcccacatcatcggcagaatcgagagctacagctgcaagatggccggcgacgacaagcacatgttcaagcagttctgccaggagggccagccccacgtgctggaggccctgagccccccccagaccagcggcctgagccccagcagactgagcaagagccagggcggcgaggaggagggccccctgagcgacaagtgcagcagaaagaccctgttctacctgatcgccaccctgaacgagagcttcagacccgactacgacttcagcaccgccagaagccacgagttcagcagagagcccagcctgagctgggtggtgaacgccgtgaactgcagcctgttcagcgccgtgagagaggacttcaaggacctgaagccccagctgtggaacgccgtggacgaggagatctgcctggccgagtgcgacatctacagctacaaccccgacctggacagcgaccccttcggcgaggacggcagcctgtggagcttcaactacttcttctacaacaagagactgaagagaatcgtgttcttcagctgcagaagcatcagcggcagcacctacacccccagcgaggccggcaacgagctggacatggagctgggcgaggaggaggtggaggaggagagcagaagcggcggcagcggcgccgaggagaccagcaccatggaggaggacagagtgcccgtgatctgcatctag

SEQ ID NO: 87628 - DNA, 213 bp, synthetic construct
  misc_feature 1..213: note = Description of Artificial Sequence: Synthetic coding sequence
  source 1..213: mol_type = other DNA
atgaagctgctggagaacagcagcttcgaggccatcaacagccagctgaccgtggagaccggcgacgcccacatcatcggcagaatcgagagctacagctgcaagatggccggcgacgacaagcacatgttcaagcagttctgccaggagggccagccccacgtgctggaggccctgagccccccccagaccagcggcctgagccccagctag

SEQ ID NO: 87629 - DNA, 771 bp, synthetic construct; identical to SEQ ID NO: 87627
  misc_feature 1..771: note = Description of Artificial Sequence: Synthetic coding sequence
  source 1..771: mol_type = other DNA

SEQ ID NO: 87630 - DNA, 1104 bp, synthetic construct
  misc_feature 1..1104: note = Description of Artificial Sequence: Synthetic coding sequence
  source 1..1104: mol_type = other DNA
atgagaaagggcaagggccccatctgcctgttcagcagacccaccctgagacccagcagaagcaaggtgagcctgatcgagggcagaggcgccaacatggccgccagatggagattctggtgcgtgagcgtgaccatggtggtggccctgctgatcgtgtgcgacgtgcccagcgccagcgcccagagaaagaaggagatggtgctgagcgagaaggtgagccagctgatggagtggaccaacaagagacccgtgatcagaatgaacggcgacaagttcagaagactggtgaaggccccccccagaaactacagcgtgatcgtgatgttcaccgccctgcagctgcacagacagtgcgtggtgtgcaagcaggccgacgaggagttccagatcctggccaacagctggagatacagcagcgccttcaccaacagaatcttcttcgccatggtggacttcgacgagggcagcgacgtgttccagatgctgaacatgaacagcgcccccaccttcatcaacttccccgccaagggcaagcccaagagaggcgacacctacgagctgcaggtgagaggcttcagcgccgagcagatcgccagatggatcgccgacagaaccgacgtgaacatcagagtgatcagaccccccaactacgccggccccctgatgctgggcctgctgctggccgtgatcggcggcctggtgtacctgagaagaagcaacatggagttcctgttcaacaagaccggctgggccttcgccgccctgtgcttcgtgctggccatgaccagcggccagatgtggaaccacatcagaggccccccctacgcccacaagaacccccacaccggccacgtgaactacatccacggcagcagccaggcccagttcgtggccgagacccacatcgtgctgctgttcaacggcggcgtgaccctgggcatggtgctgctgtgcgaggccgccaccagcgacatggacatcggcaagagaaagatcatgtgcgtggccggcatcggcctggtggtgctgttcttcagctggatgctgagcatcttcagaagcaagtaccacggctacccctacagcttcctgatgagctag

SEQ ID NO: 87631 - DNA, 657 bp, synthetic construct
  misc_feature 1..657: note = Description of Artificial Sequence: Synthetic coding sequence
  source 1..657: mol_type = other DNA
atggtggacttcgacgagggcagcgacgtgttccagatgctgaacatgaacagcgcccccaccttcatcaacttccccgccaagggcaagcccaagagaggcgacacctacgagctgcaggtgagaggcttcagcgccgagcagatcgccagatggatcgccgacagaaccgacgtgaacatcagagtgatcagaccccccaactacgccggccccctgatgctgggcctgctgctggccgtgatcggcggcctggtgtacctgagaagaagcaacatggagttcctgttcaacaagaccggctgggccttcgccgccctgtgcttcgtgctggccatgaccagcggccagatgtggaaccacatcagaggccccccctacgcccacaagaacccccacaccggccacgtgaactacatccacggcagcagccaggcccagttcgtggccgagacccacatcgtgctgctgttcaacggcggcgtgaccctgggcatggtgctgctgtgcgaggccgccaccagcgacatggacatcggcaagagaaagatcatgtgcgtggccggcatcggcctggtggtgctgttcttcagctggatgctgagcatcttcagaagcaagtaccacggctacccctacagcttcctgatgagctag

SEQ ID NO: 87632 - DNA, 330 bp, synthetic construct
  misc_feature 1..330: note = Description of Artificial Sequence: Synthetic coding sequence
  source 1..330: mol_type = other DNA
atggagagcgacttctacctgagatactacgtgggccacaagggcaagttcggccacgagttcctggagttcgagttcagacccgacggcaagctgagatacgccaacaacagcaactacaagaacgacgtgatgatcagaaaggaggagctggagatcgtgatcggcgacgagcacatcagcttcaccaccagcaagatcggcagcctgatcgacgtgaaccagagcaaggaccccgagggcctgagagtgttctactacctggtgcaggacctgaagtgcctggtgttcagcctgatcggcctgcacttcaagatcaagcccatctag

SEQ ID NO: 87633 - DNA, 441 bp, synthetic construct
  misc_feature 1..441: note = Description of Artificial Sequence: Synthetic coding sequence
  source 1..441: mol_type = other DNA
atggagagcgacttctacctgagatactacgtgggccacaagggcaagttcggccacgagttcctggagttcgagttcagacccgacggcaagctgagatacgccaacaacagcaactacaagaacgacgtgatgatcagaaaggaggcctacgtgcacaagagcgtgatggaggagctgaagagaatcatcgacgacagcgagatcaccaaggaggacgacgccctgtggcccccccccgacagagtgggcagacaggagctggagatcgtgatcggcgacgagcacatcagcttcaccaccagcaagatcggcagcctgatcgacgtgaaccagagcaaggaccccgagggcctgagagtgttctactacctggtgcaggacctgaagtgcctggtgttcagcctgatcggcctgcacttcaagatcaagcccatctag

SEQ ID NO: 87634 - DNA, 1731 bp, synthetic construct
  misc_feature 1..1731: note = Description of Artificial Sequence: Synthetic coding sequence
  source 1..1731: mol_type = other DNA
atgggcagcatcctgagcagaagaatcgccggcgtggaggacatcgacatccaggccaacagcgcctacagatacccccccaagagcggcaactacttcgccagccacttcttcatgggcggcgagaagttcgacaccccccaccccgagggctacctgttcggcgagaacatggacctgaacttcctgggcagcagacccgtgcagttcccctacgtgacccccgccccccacgagcccgtgaagaccctgagaagcctggtgaacatcagaaaggacagcctgagactggtgagatacaaggacgacgccgacagccccaccgaggacggcgacaagcccagagtgctgtacagcctggagttcaccttcgacgccgacgccagagtggccatcaccatctactgccaggccagcgaggagttcctgaacggcagagccgtgtacagccccaagagccccagcctgcagagcgagaccgtgcactacaagagaggcgtgagccagcagttcagcctgcccagcttcaagatcgacttcagcgagtggaaggacgacgagctgaacttcgacctggacagaggcgtgttccccgtggtgatccaggccgtggtggacgagggcgacgtggtggaggtgaccggccacgcccacgtgctgctggccgccttcgagaagcacatggacggcagcttcagcgtgaagcccctgaagcagaagcagatcgtggacagagtgagctacctgctgcaggagatctacggcatcgagaacaagaacaaccaggagaccaagcccagcgacgacgagaacagcgacaacagcaacgagtgcgtggtgtgcctgagcgacctgagagacaccctgatcctgccctgcagacacctgtgcctgtgcaccagctgcgccgacaccctgagataccaggccaacaactgccccatctgcagactgcccttcagagccctgctgcagatcagagccgtgagaaagaagcccggcgccctgagccccgtgagcttcagccccgtgctggcccagagcctggagcacgacgagcacagctgccccttcaagaagagcaagccccaccccgccagcctggccagcaagaagcccaagagagagaccaacagcgacagcgtgccccccggctacgagcccatcagcctgctggaggccctgaacggcctgagagccgtgagccccgccatccccagcgcccccctgtacgaggagatcacctacagcggcatcagcgacggcctgagccaggccagctgccccctggccgccatcgaccacatcctggacagcagcagacagaagggcagaccccagagcaaggcccccgacagcaccctgagaagccccagcagccccatccacgaggaggacgaggagaagctgagcgaggacgtggacgcccccccccccctgggcggcgccgagctggccctgagagagagcagcagccccgagagcttcatcaccgaggaggtggacgagagcagcagcccccagcagggcaccagagccgccagcatcgagaacgtgctgcaggacagcagccccgagcactgcggcagaggcccccccgccgacatctacctgcccggcagacccaccagcatggagaccgcccacggcctggccaccaccagccccacctggccccccctgggcggccccagccccgaccccagcgccgccgagctgacccccctgtag

SEQ ID NO: 87635 - DNA, 1659 bp, synthetic construct
  misc_feature 1..1659: note = Description of Artificial Sequence: Synthetic coding sequence
  source 1..1659: mol_type = other DNA
atgggcagcatcctgagcagaagaatcgccggcgtggaggacatcgacatccaggccaacagcgcctacagatacccccccaagagcggcaactacttcgccagccacttcttcatgggcggcgagaagttcgacaccccccaccccgagggctacctgttcggcgagaacatggacctgaacttcctgggcagcagacccgtgcagttcccctacgtgacccccgccccccacgagcccgtgaagaccctgagaagcctggtgaacatcagaaaggacagcctgagactggtgagatacaaggacgacgccgacagccccaccgaggacggcgacaagcccagagtgctgtacagcctggagttcaccttcgacgccgacgccagagtggccatcaccatctactgccaggccagcgaggagttcctgaacggcagagccgtgtacagccccaagagccccagcctgcagagcgagaccgtgcactacaagagaggcgtgagccagcagttcagcctgcccagcttcaagatcgacttcagcgagtggaaggacgacgagctgaacttcgacctggacagaggcgtgttccccgtggtgatccaggccgtggtggacgagggcgacgtggtggaggtgaccggccacgcccacgtgctgctggccgccttcgagaagcacatggacggcagcttcagcgtgaagcccctgaagcagaagcagatcgtggacagagtgagctacctgctgcaggagatctacggcatcgagaacaagaacaaccaggagaccaagcccagcgacgacgagaacagcgacaacagcaacgagtgcgtggtgtgcctgagcgacctgagagacaccctgatcctgccctgcagacacctgtgcctgtgcaccagctgcgccgacaccctgagataccaggccaacaactgccccatctgcagactgcccttcagagccctgctgcagatcagagccgtgagaaagaagcccggcgccctgagccccgtgagcttcagccccgtgctggcccagagcctggagcacgacgagcacagctgccccttcaagaagagcaagccccaccccgccagcctggccagcaagaagcccaagagagagaccaacagcgacagcgtgccccccggctacgagcccatcagcctgctggaggccctgaacggcctgagagccgtgagccccgccatccccagcgcccccctgtacgaggagatcacctacagcggcatcagcgacggcctgagccaggccagctgccccctggccgccatcgaccacatcctggacagcagcagacagaagggcagaccccagagcaaggcccccgacagcaccctgagaagccccagcagccccatccacgaggaggacgaggagaagctgagcgaggacgtggacgcccccccccccctgggcggcgccgagctggccctgagagagagcagcagccccgagagcttcatcaccgaggaggtggacgagagcagcagcccccagcagggcaccagagccgccagcatcgagaacgtgctgcaggacagcagccccgagcactgcggcagaggcccccccgccgacatctacctgcccgccctgggccccgacagctgcagcgtgggcatcgacgagtag

SEQ ID NO: 87636 - DNA, 1596 bp, synthetic construct
  misc_feature 1..1596: note = Description of Artificial Sequence: Synthetic coding sequence
  source 1..1596: mol_type = other DNA
atgggcagcatcctgagcagaagaatcgccggcgtggaggacatcgacatccaggccaacagcgcctacagatacccccccaagagcggcaactacttcgccagccacttcttcatgggcggcgagaagttcgacaccccccaccccgagggctacctgttcggcgagaacatggacctgaacttcctgggcagcagacccgtgcagttcccctacgtgacccccgccccccacgagcccgtgaagaccctgagaagcctggtgaacatcagaaaggacagcctgagactggtgagatacaaggacgacgccgacagccccaccgaggacggcgacaagcccagagtgctgtacagcctggagttcaccttcgacgccgacgccagagtggccatcaccatctactgccaggccagcgaggagttcctgaacggcagagccgtgtacagccccaagagccccagcctgcagagcgagaccgtgcactacaagagaggcgtgagccagcagttcagcctgcccagcttcaagatcgacttcagcgagtggaaggacgacgagctgaacttcgacctggacagaggcgtgttccccgtggtgatccaggccgtggtggacgagggcgacgccgtggtggaggtgaccggccacgcccacgtgctgctggccgccttcgagaagcacatggacggcagcttcagcgtgaagcccctgaagcagaagcagatcgtggacagagtgagctacctgctgcaggagatctacggcatcgagaacaagaacaaccaggagaccaagcccagcgacgacgagaacagcgacaacagcaacgagtgcgtggtgtgcctgagcgacctgagagacaccctgatcctgccctgcagacacctgtgcctgtgcaccagctgcgccgacaccctgagataccaggccaacaactgccccatctgcagactgcccttcagagccctgctgcagatcagagccgtgagaaagaagcccggcgccctgagccccgtgagcttcagccccgtgctggcccagagcctggagcacgacgagcacagcaacagcgacagcgtgccccccggctacgagcccatcagcctgctggaggccctgaacggcctgagagccgtgagccccgccatccccagcgcccccctgtacgaggagatcacctacagcggcatcagcgacggcctgagccaggccagctgccccctggccgccatcgaccacatcctggacagcagcagacagaagggcagaccccagagcaaggcccccgacagcaccctgagaagccccagcagccccatccacgaggaggacgaggagaagctgagcgaggacgtggacgcccccccccccctgggcggcgccgagctggccctgagagagagcagcagccccgagagcttcatcaccgaggaggtggacgagagcagcagcccccagcagggcaccagagccgccagcatcgagaacgtgctgcaggacagcagccccgagcactgcggcagaggcccccccgccgacatctacctgcccgccctgggccccgacagctgcagcgtgggcatcgacgagtag

SEQ ID NO: 87637 - DNA, 963 bp, synthetic construct
  misc_feature 1..963: note = Description of Artificial Sequence: Synthetic coding sequence
  source 1..963: mol_type = other DNA
atgggcagcatcctgagcagaagaatcgccggcgtggaggacatcgacatccaggccaacagcgcctacagatacccccccaagagcggcaactacttcgccagccacttcttcatgggcggcgagaagttcgacaccccccaccccgagggctacctgttcggcgagaacatggacctgaacttcctgggcagcagacccgtgcagttcccctacgtgacccccgccccccacgagcccgtgaagaccctgagaagcctggtgaacatcagaaaggacagcctgagactggtgagatacaaggacgacgccgacagccccaccgaggacggcgacaagcccagagtgctgtacagcctggagttcaccttcgacgccgacgccagagtggccatcaccatctactgccaggccagcgaggagttcctgaacggcagagccgtgtacagccccaagagccccagcctgcagagcgagaccgtgcactacaagagaggcgtgagccagcagttcagcctgcccagcttcaagatcgacttcagcgagtggaaggacgacgagctgaacttcgacctggacagaggcgtgttccccgtggtgatccaggccgtggtggacgagggcgacgtggtggaggtgaccggccacgcccacgtgctgctggccgccttcgagaagcacatggacggcagcttcagcgtgaagcccctgaagcagaagcagatcgtggacagagtgagctacctgctgcaggagatctacggcatcgagaacaagaacaaccaggagaccaagcccagcgacgacgagaacagcgacaacagcaacgagtgcgtggtgtgcctgagcgacctgagagacaccctgatcctgccctgcagacacctgtgcctgtgcaccagctgcgccgacaccctgagataccaggccaacaactgccccatctgcagactgcagctgtag

SEQ ID NO: 87638 - DNA, 1632 bp, synthetic construct
  misc_feature 1..1632: note = Description of Artificial Sequence: Synthetic coding sequence
  source 1..1632: mol_type = other DNA
atggccaagggcgagggcgccgagagcggcagcgccgccggcctgctgcccaccagcatcctgcagagcaccgagagacccgcccaggtgaagaaggagcccaagaagaagaagcagcagctgagcgtgtgcaacaagctgtgctacgccctgggcggcgccccctaccaggtgaccggctgcgccctgggcttcttcctgcagatctacctgctggacgtggcccagaaggacgaggaggtggtgttctgcttcagcagcttccaggtgggccccttcagcgccagcatcatcctgttcgtgggcagagcctgggacgccatcaccgaccccctggtgggcctgtgcatcagcaagagcccctggacctgcctgggcagactgatgccctggatcatcttcagcacccccctggccgtgatcgcctacttcctgatctggttcgtgcccgacttcccccacggccagacctactggtacctgctgttctactgcctgttcgagaccatggtgacctgcttccacgtgccctacagcgccctgaccatgttcatcagcaccgagcagaccgagagagacagcgccaccgcctacagaatgaccgtggaggtgctgggcaccgtgctgggcaccgccatccagggccagatcgtgggccaggccgacaccccctgcttccaggacctgaacagcagcaccgtggccagccagagcgccaaccacacccacggcaccaccagccacagagagacccagaaggcctacctgctggccgccggcgtgatcgtgtgcatctacatcatctgcgccgtgatcctgatcctgggcgtgagagagcagagagagccctacgaggcccagcagagcgagcccatcgcctacttcagaggcctgagactggtgatgagccacggcccctacatcaagctgatcaccggcttcctgttcaccagcctggccttcatgctggtggagggcaacttcgtgctgttctgcacctacaccctgggcttcagaaacgagttccagaacctgctgctggccatcatgctgagcgccaccctgaccatccccatctggcagtggttcctgaccagattcggcaagaagaccgccgtgtacgtgggcatcagcagcgccgtgcccttcctgatcctggtggccctgatggagagcaacctgatcatcacctacgccgtggccgtggccgccggcatcagcgtggccgccgccttcctgctgccctggagcatgctgcccgacgtgatcgacgacttccacctgaagcagccccacttccacggcaccgagcccatcttcttcagcttctacgtgttcttcaccaagttcgccagcggcgtgagcctgggcatcagcaccctgagcctggacttcgccggctaccagaccagaggctgcagccagcccgagagagtgaagttcaccctgaacatgctggtgaccatggcccccatcgtgctgatcctgctgggcctgctgctgttcaagatgtaccccatcgacgaggagagaagaagacagaacaagaaggccctgcaggccctgagagacgaggccagcagcagcggctgcagcgagaccgacagcaccgagctggccagcatcctgtag

SEQ ID NO: 87639 - DNA, 1593 bp, synthetic construct
  misc_feature 1..1593: note = Description of Artificial Sequence: Synthetic coding sequence
  source 1..1593: mol_type = other DNA
atggccaagggcgagggcgccgagagcggcagcgccgccggcctgctgcccaccagcatcctgcagagcaccgagagacccgcccaggtgaagaaggagcccaagaagaagaagcagcagctgagcgtgtgcaacaagctgtgctacgccctgggcggcgccccctaccaggtgaccggctgcgccctgggcttcttcctgcagatctacctgctggacgtggcccaggtgggccccttcagcgccagcatcatcctgttcgtgggcagagcctgggacgccatcaccgaccccctggtgggcctgtgcatcagcaagagcccctggacctgcctgggcagactgatgccctggatcatcttcagcacccccctggccgtgatcgcctacttcctgatctggttcgtgcccgacttcccccacggccagacctactggtacctgctgttctactgcctgttcgagaccatggtgacctgcttccacgtgccctacagcgccctgaccatgttcatcagcaccgagcagaccgagagagacagcgccaccgcctacagaatgaccgtggaggtgctgggcaccgtgctgggcaccgccatccagggccagatcgtgggccaggccgacaccccctgcttccaggacctgaacagcagcaccgtggccagccagagcgccaaccacacccacggcaccaccagccacagagagacccagaaggcctacctgctggccgccggcgtgatcgtgtgcatctacatcatctgcgccgtgatcctgatcctgggcgtgagagagcagagagagccctacgaggcccagcagagcgagcccatcgcctacttcagaggcctgagactggtgatgagccacggcccctacatcaagctgatcaccggcttcctgttcaccagcctggccttcatgctggtggagggcaacttcgtgctgttctgcacctacaccctgggcttcagaaacgagttccagaacctgctgctggccatcatgctgagcgccaccctgaccatccccatctggcagtggttcctgaccagattcggcaagaagaccgccgtgtacgtgggcatcagcagcgccgtgcccttcctgatcctggtggccctgatggagagcaacctgatcatcacctacgccgtggccgtggccgccggcatcagcgtggccgccgccttcctgctgccctggagcatgctgcccgacgtgatcgacgacttccacctgaagcagccccacttccacggcaccgagcccatcttcttcagcttctacgtgttcttcaccaagttcgccagcggcgtgagcctgggcatcagcaccctgagcctggacttcgccggctaccagaccagaggctgcagccagcccgagagagtgaagttcaccctgaacatgctggtgaccatggcccccatcgtgctgatcctgctgggcctgctgctgttcaagatgtaccccatcgacgaggagagaagaagacagaacaagaaggccctgcaggccctgagagacgaggccagcagcagcggctgcagcgagaccgacagcaccgagctggccagcatcctgtag

SEQ ID NO: 87640 - DNA, 1125 bp, synthetic construct
  misc_feature 1..1125: note = Description of Artificial Sequence: Synthetic coding sequence
  source 1..1125: mol_type = other DNA
atggtgacctgcttccacgtgccctacagcgccctgaccatgttcatcagcaccgagcagaccgagagagacagcgccaccgcctacagaatgaccgtggaggtgctgggcaccgtgctgggcaccgccatccagggccagatcgtgggccaggccgacaccccctgcttccaggacctgaacagcagcaccgtggccagccagagcgccaaccacacccacggcaccaccagccacagagagacccagaaggcctacctgctggccgccggcgtgatcgtgtgcatctacatcatctgcgccgtgatcctgatcctgggcgtgagagagcagagagagccctacgaggcccagcagagcgagcccatcgcctacttcagaggcctgagactggtgatgagccacggcccctacatcaagctgatcaccggcttcctgttcaccagcctggccttcatgctggtggagggcaacttcgtgctgttctgcacctacaccctgggcttcagaaacgagttccagaacctgctgctggccatcatgctgagcgccaccctgaccatccccatctggcagtggttcctgaccagattcggcaagaagaccgccgtgtacgtgggcatcagcagcgccgtgcccttcctgatcctggtggccctgatggagagcaacctgatcatcacctacgccgtggccgtggccgccggcatcagcgtggccgccgccttcctgctgccctggagcatgctgcccgacgtgatcgacgacttccacctgaagcagccccacttccacggcaccgagcccatcttcttcagcttctacgtgttcttcaccaagttcgccagcggcgtgagcctgggcatcagcaccctgagcctggacttcgccggctaccagaccagaggctgcagccagcccgagagagtgaagttcaccctgaacatgctggtgaccatggcccccatcgtgctgatcctgctgggcctgctgctgttcaagatgtaccccatcgacgaggagagaagaagacagaacaagaaggccctgcaggccctgagagacgaggccagcagcagcggctgcagcgagaccgacagcaccgagctggccagcatcctgtag

SEQ ID NO: 87641 - DNA, 801 bp, synthetic construct
  misc_feature 1..801: note = Description of Artificial Sequence: Synthetic coding sequence
  source 1..801: mol_type = other DNA
atggccaagggcgagggcgccgagagcggcagcgccgccggcctgctgcccaccagcatcctgcagagcaccgagagacccgcccagaaggagcccaagaagaagaagcagcagctgagcgtgtgcaacaagctgtgctacgccctgggcggcgccccctaccaggtgaccggctgcgccctgggcttcttcctgcagatctacctgctggacgtggcccaggtgggccccttcagcgccagcatcatcctgttcgtgggcagagcctgggacgccatcaccgaccccctggtgggcctgtgcatcagcaagagcccctggacctgcctgggcagactgatgccctggatcatcttcagcacccccctggccgtgatcgcctacttcctgatctggttcgtgcccgacttcccccacggccagacctactggtacctgctgttctactgcctgttcgagaccatggtgacctgcttccacgtgccctacagcgccctgaccatgttcatcagcaccgagcagaccgagagagacagcgccaccgcctacagaatgaccgtggaggtgctgggcaccgtgctgggcaccgccatccagggccagatcgtgggccaggccgacaccccctgcttccaggacctgaacagcagcaccgtggccagccagagcgccaaccacacccacggcaccaccagccacagagagacccagaaggcctacctgctggccgccggcgtgatcgtgtgcatctacatcatctgcgccgtgatcctgatcctgggcgtgagagagcagagatag

SEQ ID NO: 87642 - DNA, 2376 bp, synthetic construct
  misc_feature 1..2376: note = Description of Artificial Sequence: Synthetic coding sequence
  source 1..2376: mol_type = other DNA
atggccgacgacaaggtggccatcctgaccgacgacgaggaggagcagaagagaaagtacgtgctggccgaccccttcaacggcatcagcagagagcccgagccccccagcaacgagacccccagcagcaccgagaccagcgccatccccgaggaggagatcgactggatcgagaagcactgcgtgaagatcaacaacgacctgctgatcagcaaggtgttctacttcttcttctacagcgcctacggcagcctgtaccccctgctgcccgtgtactacaagcagctgggcatgagccccagccagagcggcctgctggtgggcatcagatacttcatcgagttctgcagcgcccccttctggggcgtggtggccgacagattcaagaagggcaagatcgtgctgctgttcagcctgctgtgctgggtgctgttcaacctgggcatcggcttcgtgaagcccgccaccctgagatgcgtgcccaagatcagacccaccacccaccccaccaacgccagccaccagctgaccatcctgcccaccaacagcagcttcaccagcttcctgaccatcagccccaagatgagagagaagagaaacctgctggagaccagactgaacgtgagcgacaccgtgaccctgcccaccgcccccaacatgaacagcgagcccaccctgcagccccagaccggcgagatcaccaacagaatgatggacctgaccctgaacagcagcaccgccacccccgtgagccccggcagcgtgaccaaggagaccaccaccgtgatcgtgaccaccaccaagagcctgcccagcgaccaggtgatgctggtgtacgaccagcaggaggtggaggccatcttcctggtgatcctggtggtggtgatcatcggcgagttcttcagcgccagcagcgtgaccatcgtggacaccgtgaccctgcagtacctgggcaagcacagagacagatacggcctgcagagaatgtggggcagcctgggctggggcctggccatgctgagcgtgggcatcggcatcgactacacccacatcgaggtgctgatcgacggcaagggctgcaagccccccgagtacagaaactaccagatcgtgttcatcgtgttcggcgtgctgatgaccatggccctgatcgtggccacccagttcagattcagatacaaccacttcaagaacgacgacagcaagggcaaggaggtggagatcccccaggtggagagaaacaacagcaccgagagcagcgaggagacccccaccaccaccagccacagccaggccttcaacttctgggacctgatcaagctgctgtgcagcgtgcagtacggcagcgtgctgttcgtggcctggttcatgggcttcggctacggcttcgtgttcaccttcctgtactggcacctggaggacctgaacggcaccaccaccctgttcggcgtgtgcagcgtgctgagccacgtgagcgagctgaccgcctacttcttcagccacaagctgatcgagctgatcggccacatcagagtgctgtacatcggcctggcctgcaacaccgccagatacatctacatcagctacctggagaacgcctggaccgtgctgcccatggaggtgctgcagggcgtgacccacgccgccatctgggccgcctgcatcagctacctgagcgccgccgtgccccccgagctgagaaccagcgcccagggcatcctgcagggcctgcacctgggcctgggcagaggctgcggcgccatgatcggcggcgtgctggtgaactacttcggcgccgccgccaccttcagaggcatcggcatggcctgcctggtgatcctgctgctgttcgccctgatccagtggctggccgtgcccgacgaggaggaggacaagaccatgctggccgagagaatccccgtgcccagcagccccgtgcccatcgccaccatcgacctggtgcagcagcagaccgaggacgtgatgcccagaatcgagcccagactgccccccaagaagaccaagcaccaggaggagcaggaggacgtgaacaagcccgcctggggcgtgagcagcagcccctgggtgaccttcgtgtacgccctgtaccagatcaaggagatgatgcagctgaccagagacaacagagccagcgagatccagcccctgcagggcaccaacgagaacagagagaacagccccgccggcagagcccagcccgtgccctgcgagacccacagcgaccccagcagaaaccagcccagccccgacgccgccgccagccagacccagaccagccccgcccaccccagcgtggacccctgcaccgaggagagcgaggagcagcaggcccagctggccgccggcggccactag

SEQ ID NO: 87643 - DNA, 2376 bp, synthetic construct; identical to SEQ ID NO: 87642
  misc_feature 1..2376: note = Description of Artificial Sequence: Synthetic coding sequence
  source 1..2376: mol_type = other DNA

SEQ ID NO: 87644 - DNA, 129 bp, synthetic construct
  misc_feature 1..129: note = Description of Artificial Sequence: Synthetic coding sequence
  source 1..129: mol_type = other DNA
atggccgacgacaaggtggccatcctgaccgacgacgaggaggagcagaagagaaagtacgtgctggccgaccccttcaacggcatcagcagagagcccgagccccccagcaacgagacccccagctag

SEQ ID NO: 87645 - DNA, 345 bp, synthetic construct
  misc_feature 1..345: note = Description of Artificial Sequence: Synthetic coding sequence
  source 1..345: mol_type = other DNA
atggccgacgacaaggtggccatcctgaccgacgacgaggaggagcagaagagaaagtacgtgctggccgaccccttcaacggcatcagcagagagcccgagccccccagcaacgagacccccagcagcaccgagaccagcgccatccccgaggaggagatcgactggatcgagaagcactgcgtgaagatcaacaacgacctgctgatcagcaaggtgttctacttcttcttctacagcgcctacggcagcctgtaccccctgctgcccgtgtactacaagcagctgggcatgagccccagccagagcggcctgctggtgggcatcagatacttcatcgagtag

SEQ ID NO: 87646 - DNA, 471 bp, synthetic construct
  misc_feature 1..471: note = Description of Artificial Sequence: Synthetic coding sequence
  source 1..471: mol_type = other DNA
atggccgacgacaaggtggccatcctgaccgacgacgaggaggagcagaagagaaagtacgtgctggccgaccccttcaacggcatcagcagagagcccgagccccccagcaacgagacccccagcagcaccgagaccagcgccatccccgaggaggagatcgactggatcgagaagcactgcgtgaagatcaacaacgacctgctgatcagcaaggtgttctacttcttcttctacagcgcctacggcagcctgtaccccctgctgcccgtgtactacaagcagctgggcatgagccccagccagagcggcctgctggtgggcatcagatacttcatcgagttctgcagcgcccccttctggggcgtggtggccgacagattcaagaagggcaagatcgtgctgctgttcagcctgctgtgctgggtgctgttcaacctgggcatcggcttcgtgaagcccgccacctag

SEQ ID NO: 87647 - DNA, 762 bp, synthetic construct
  misc_feature 1..762: note = Description of Artificial Sequence: Synthetic coding sequence
  source 1..762: mol_type = other DNA
atggaggtgctgcagggcgtgacccacgccgccatctgggccgcctgcatcagctacctgagcgccgccgtgccccccgagctgagaaccagcgcccagggcatcctgcagggcctgcacctgggcctgggcagaggctgcggcgccatgatcggcggcgtgctggtgaactacttcggcgccgccgccaccttcagaggcatcggcatggcctgcctggtgatcctgctgctgttcgccctgatccagtggctggccgtgcccgacgaggaggaggacaagaccatgctggccgagagaatccccgtgcccagcagccccgtgcccatcgccaccatcgacctggtgcagcagcagaccgaggacgtgatgcccagaatcgagcccagactgccccccaagaagaccaagcaccaggaggagcaggaggacgtgaacaagcccgcctggggcgtgagcagcagcccctgggtgaccttcgtgtacgccctgtaccagatcaaggagatgatgcagctgaccagagacaacagagccagcgagatccagcccctgcagggcaccaacgagaacagagagaacagccccgccggcagagcccagcccgtgccctgcgagacccacagcgaccccagcagaaaccagcccagccccgacgccgccgccagccagacccagaccagccccgcccaccccagcgtggacccctgcaccgaggagagcgaggagcagcaggcccagctggccgccggcggccactag

SEQ ID NO: 87648 - DNA, 696 bp, synthetic construct
  misc_feature 1..696: note = Description of Artificial Sequence: Synthetic coding sequence
  source 1..696: mol_type = other DNA
atggaggtgctgcagggcgtgacccacgccgccatctgggccgcctgcatcagctacctgagcgccgccgtgccccccgagctgagaaccagcgcccagggcatcctgcagggcctgcacctgggcctgggcagaggctgcggcgccatgatcggcggcgtgctggtgaactacttcggcgccgccgccaccttcagaggcatcggcatggcctgcctggtgatcctgctgctgttcgccctgatccagtggctggccgtgcccgacgaggaggaggacaagaccatgctggccgagagaatccccgtgcccagcagccccgtgcccatcgccaccatcgacctggtgcagcagcagaccgaggacgtgaacaagcccgcctggggcgtgagcagcagcccctgggtgaccttcgtgtacgccctgtaccagatcaaggagatgatgcagctgaccagagacaacagagccagcgagatccagcccctgcagggcaccaacgagaacagagagaacagccccgccggcagagcccagcccgtgccctgcgagacccacagcgaccccagcagaaaccagcccagccccgacgccgccgccagccagacccagaccagccccgcccaccccagcgtggacccctgcaccgaggagagcgaggagcagcaggcccagctggccgccggcggccactag

SEQ ID NO: 87649 - DNA, 1557 bp, synthetic construct
  misc_feature 1..1557: note = Description of Artificial Sequence: Synthetic coding sequence
  source 1..1557: mol_type = other DNA
atggccggcctgagaaacgagagcgagcaggagcccctgctgggcgacacccccggcagcagagagtgggacatcctggagaccgaggagcactacaagagcagatggagaagcatcagaatcctgtacctgaccatgttcctgagcagcgtgggcttcagcgtggtgatgatgagcatctggccctacctgcagaagatcgaccccaccgccgacaccagcttcctgggctgggtgatcgccagctacagcctgggccagatggtggccagccccatcttcggcctgtggagcaactacagacccagaaaggagcccctgatcgtgagcatcctgatcagcgtggccgccaactgcctgtacgcctacctgcacatccccgccagccacaacaagtactacatgctggtggccagaggcctgctgggcatcggcgccggcaacgtggccgtggtgagaagctacaccgccggcgccaccagcctgcaggagagaaccagcagcatggccaacatcagcatgtgccaggccctgggcttcatcctgggccccgtgttccagacctgcttcaccttcctgggcgagaagggcgtgacctgggacgtgatcaagctgcagatcaacatgtacaccacccccgtgctgctgagcgccttcctgggcatcctgaacatcatcctgatcctggccatcctgagagagcacagagtggacgacagcggcagacagtgcaagagcatcaacttcgaggaggccagcaccgacgaggcccaggtgccccagggcaacatcgaccaggtggccgtggtggccatcaacgtgctgttcttcgtgaccctgttcatcttcgccctgttcgagaccatcatcacccccctgaccatggacatgtacgcctggacccaggagcaggccgtgctgtacaacggcatcatcctggccgccctgggcgtggaggccgtggtgatcttcctgggcgtgaagctgctgagcaagaagatcggcgagagagccatcctgctgggcggcctgatcgtggtgtgggtgggcttcttcatcctgctgccctggggcaaccagttccccaagatccagtgggaggacctgcacaacaacagcatccccaacaccaccttcggcgagatcatcatcggcctgtggaagagccccatggaggacgacaacgagagacccaccggctgcagcatcgagcaggcctggtgcctgtacacccccgtgatccacctggcccagttcctgaccagcgccgtgctgatcggcctgggctaccccgtgtgcaacctgatgagctacaccctgtacagcaagatcctgggccccaagccccagggcgtgtacatgggctggctgaccgccagcggcagcggcgccagaatcctgggccccatgttcatcagccaggtgtacgcccactggggccccagatgggccttcagcctggtgtgcggcatcatcgtgctgaccatcaccctgctgggcgtggtgtacaagagactgatcgccctgagcgtgagatacggcagaatccaggagtag

SEQ ID NO: 87650 - DNA, 462 bp, synthetic construct
  misc_feature 1..462: note = Description of Artificial Sequence: Synthetic coding sequence
  source 1..462: mol_type = other DNA
atgttcctgagcagcgtgggcttcagcgtggtgatgatgagcatctggccctacctgcagaagatcgaccccaccgccgacaccagcttcctgggctgggtgatcgccagctacagcctgggccagatggtggccagccccatcttcggcctgtggagcaactacagacccagaaaggagcccctgatcgtgagcatcctgatcagcgtggccgccaactgcctgtacgcctacctgcacatccccgccagccacaacaagtactacatgctggtggccagaggcctgctgggcatcggcgccgtgttccagacctgcttcaccttcctgggcgagaagggcgtgacctgggacgtgatcaagctgcagatcaacatgtacaccacccccgtgctgctgagcgccttcctgggcatcctgaacatcatcctgatcctggccatcctgagcaagtacagatag

SEQ ID NO: 87651 - DNA, 555 bp, synthetic construct
  misc_feature 1..555: note = Description of Artificial Sequence: Synthetic coding sequence
  source 1..555: mol_type = other DNA
atgttcctgagcagcgtgggcttcagcgtggtgatgatgagcatctggccctacctgcagaagatcgaccccaccgccgacaccagcttcctgggctgggtgatcgccagctacagcctgggccagatggtggccagccccatcttcggcctgtggagcaactacagacccagaaaggagcccctgatcgtgagcatcctgatcagcgtggccgccaactgcctgtacgcctacctgcacatccccgccagccacaacaagtactacatgctggtggccagaggcctgctgggcatcggcgccggcaacgtggccgtggtgagaagctacaccgccggcgccaccagcctgcaggagagaaccagcagcatggccaacatcagcatgtgccaggccctgggcttcatcctgggccccgagaacatcgtgtggatgacccaggaggacagcgtgaaggtgctgatcctgaagaagcaggtgcagatgaagctgagattccccaaggagatcctgaccagactgctgctgtggcccagcatgttctgcttcctgtag

SEQ ID NO: 87652 - DNA, 750 bp, synthetic construct
  misc_feature 1..750: note = Description of Artificial Sequence: Synthetic coding sequence
  source 1..750: mol_type = other DNA
atgggcgagctgatggccttcctgctgcccctgatcatcgtgctgatggtgaagcacagcgacagcagaacccacagcctgagatacttcagactgggcgtgagcgaccccatccacggcgtgcccgagttcatcagcgtgggctacgtggacagccaccccatcaccacctacgacagcgtgaccagacagaaggagcccagagccccctggatggccgagaacctggcccccgaccactgggagagatacacccagctgctgagaggctggcagcagatgttcaaggtggagctgaagagactgcagagacactacaaccacagcggcagccacacctaccagagaatgatcggctgcgagctgctggaggacggcagcaccaccggcttcctgcagtacgcctacgacggccaggacttcctgatcttcaacaaggacaccctgagctggctggccgtggacaacgtggcccacaccatcaagcaggcctgggaggccaaccagcacgagctgctgtaccagaagaactggctggaggaggagtgcatcgcctggctgaagagattcctggagtacggcaaggacaccctgcagagaaccgagagcgagaccatccccctggtgatgaaggccgtgagcggcagcatcgtgctggtgatcgtgctggccggcgtgggcgtgctggtgtggagaagaagacccagagagcagaacggcgccatctacctgcccacccccgacagatag

SEQ ID NO: 87653 - DNA, 783 bp, synthetic construct
  misc_feature 1..783: note = Description of Artificial Sequence: Synthetic coding sequence
  source 1..783: mol_type = other DNA
atgagacccgaggacagaatgttccacatcagagccgtgatcctgagagccctgagcctggccttcctgctgagcctgagaggcgccggcgccatcaaggccgaccacgtgagcacctacgccgccttcgtgcagacccacagacccaccggcgagttcatgttcgagttcgacgaggacgagatgttctacgtggacctggacaagaaggagaccgtgtggcacctggaggagttcggccaggccttcagcttcgaggcccagggcggcctggccaacatcgccatcctgaacaacaacctgaacaccctgatccagagaagcaaccacacccaggccaccaacgacccccccgaggtgaccgtgttccccaaggagcccgtggagctgggccagcccaacaccctgatctgccacatcgacaagttcttcccccccgtgctgaacgtgacctggctgtgcaacggcgagctggtgaccgagggcgtggccgagagcctgttcctgcccagaaccgactacagcttccacaagttccactacctgaccttcgtgcccagcgccgaggacttctacgactgcagagtggagcactggggcctggaccagcccctgctgaagcactgggaggcccaggagcccatccagatgcccgagaccaccgagaccgtgctgtgcgccctgggcctggtgctgggcctggtgggcatcatcgtgggcaccgtgctgatcatcaagagcctgagaagcggccacgaccccagagcccagggcaccctgtag

SEQ ID NO: 87654 - DNA, 783 bp, synthetic construct; identical to SEQ ID NO: 87653
  misc_feature 1..783: note = Description of Artificial Sequence: Synthetic coding sequence
  source 1..783: mol_type = other DNA

SEQ ID NO: 87655 - DNA, 72 bp, synthetic construct
  misc_feature 1..72: note = Description of Artificial Sequence: Synthetic coding sequence
  source 1..72: mol_type = other DNA
atgagacccgaggacagaatgttccacatcagagccgtgatcctgagagccctgagcctggccttcctgtag

SEQ ID NO: 87656 - DNA, 387 bp, synthetic construct
  misc_feature 1..387: note = Description of Artificial Sequence: Synthetic coding sequence
  source 1..387: mol_type = other DNA
tgaaacaccctgatctgccacatcgacaagttcttcccccccgtgctgaacgtgacctggctgtgcaacggcgagctggtgaccgagggcgtggccgagagcctgttcctgcccagaaccgactacagcttccacaagttccactacctgaccttcgtgcccagcgccgaggacttctacgactgcagagtggagcactggggcctggaccagcccctgctgaagcactgggaggcccaggagcccatccagatgcccgagaccaccgagaccgtgctgtgcgccctgggcctggtgctgggcctggtgggcatcatcgtgggcaccgtgctgatcatcaagagcctgagaagcggccacgaccccagagcccagggcaccctgtag

SEQ ID NO: 87657 - DNA, 630 bp, synthetic construct
  misc_feature 1..630: note = Description of Artificial Sequence: Synthetic coding sequence
  source 1..630: mol_type = other DNA
atgagacccgaggacagaatgttccacatcagagccgtgatcctgagagccctgagcctggccttcctgctgagcctgagaggcgccggcgccatcaaggccgaccacgtgagcacctacgccgccttcgtgcagacccacagacccaccggcgagttcatgttcgagttcgacgaggacgagatgttctacgtggacctggacaagaaggagaccgtgtggcacctggaggagttcggccaggccttcagcttcgaggcccagggcggcctggccaacatcgccatcctgaacaacaacctgaacaccctgatccagagaagcaaccacacccaggccaccaacgacccccccgaggtgaccgtgttccccaaggagcccgtggagctgggccagcccaacaccctgatctgccacatcgacaagttcttcccccccgtgctgaacgtgacctggctgtgcaacggcgagctggtgaccgagggcgtggccgagagcctgttcctgcccagaaccgactacagcttccacaagttccactacctgaccttcgtgcccagcgccgaggacttctacgactgcagagtggagcactggggcctggaccagcccctgctgaagcactggtag

SEQ ID NO: 87658 - DNA, 783 bp, synthetic construct; identical to SEQ ID NO: 87653
  misc_feature 1..783: note = Description of Artificial Sequence: Synthetic coding sequence
  source 1..783: mol_type = other DNA

SEQ ID NO: 87659 - DNA, 72 bp, synthetic construct; identical to SEQ ID NO: 87655
  misc_feature 1..72: note = Description of Artificial Sequence: Synthetic coding sequence
  source 1..72: mol_type = other DNA

SEQ ID NO: 87660 - DNA, 783 bp, synthetic construct; identical to SEQ ID NO: 87653
  misc_feature 1..783: note = Description of Artificial Sequence: Synthetic coding sequence
  source 1..783: mol_type = other DNA

SEQ ID NO: 87661 - DNA, 387 bp, synthetic construct; identical to SEQ ID NO: 87656
  misc_feature 1..387: note = Description of Artificial Sequence: Synthetic coding sequence
  source 1..387: mol_type = other DNA

SEQ ID NO: 87662 - DNA, 783 bp, synthetic construct; identical to SEQ ID NO: 87653
  misc_feature 1..783: note = Description of Artificial Sequence: Synthetic coding sequence
  source 1..783: mol_type = other DNA

SEQ ID NO: 87663 - DNA, 72 bp, synthetic construct; identical to SEQ ID NO: 87655
  misc_feature 1..72: note = Description of Artificial Sequence: Synthetic coding sequence
  source 1..72: mol_type = other DNA

SEQ ID NO: 87664 - DNA, 630 bp, synthetic construct; identical to SEQ ID NO: 87657
  misc_feature 1..630: note = Description of Artificial Sequence: Synthetic coding sequence
  source 1..630: mol_type = other DNA

SEQ ID NO: 87665 - DNA, 72 bp, synthetic construct; identical to SEQ ID NO: 87655
  misc_feature 1..72: note = Description of Artificial Sequence: Synthetic coding sequence
  source 1..72: mol_type = other DNA

SEQ ID NO: 87666 - DNA, 387 bp, synthetic construct; identical to SEQ ID NO: 87656
  misc_feature 1..387: note = Description of Artificial Sequence: Synthetic coding sequence
  source 1..387: mol_type = other DNA

SEQ ID NO: 87667 - DNA, 783 bp, synthetic construct; identical to SEQ ID NO: 87653
  misc_feature 1..783: note = Description of Artificial Sequence: Synthetic coding sequence
  source 1..783: mol_type = other DNA

SEQ ID NO: 87668 - DNA, 387 bp, synthetic construct; identical to SEQ ID NO: 87656
  misc_feature 1..387: note = Description of Artificial Sequence: Synthetic coding sequence
  source 1..387: mol_type = other DNA

SEQ ID NO: 87669 - DNA, 72 bp, synthetic construct; identical to SEQ ID NO: 87655
  misc_feature 1..72: note = Description of Artificial Sequence: Synthetic coding sequence
  source 1..72: mol_type = other DNA

SEQ ID NO: 87670 - DNA, 630 bp, synthetic construct; identical to SEQ ID NO: 87657
  misc_feature 1..630: note = Description of Artificial Sequence: Synthetic coding sequence
  source 1..630: mol_type = other DNA

SEQ ID NO: 87671 - DNA, 639 bp, synthetic construct
  misc_feature 1..639: note = Description of Artificial Sequence: Synthetic coding sequence
  source 1..639: mol_type = other DNA
atgagacccgaggacagaatgttccacatcagagccgtgatcctgagagccctgagcctggccttcctgctgagcctgagaggcgccggcgccatcaaggccgaccacgtgagcacctacgccgccttcgtgcagacccacagacccaccggcgagttcatgttcgagttcgacgaggacgagatgttctacgtggacctggacaagaaggagaccgtgtggcacctggaggagttcggccaggccttcagcttcgaggtgaccgtgttccccaaggagcccgtggagctgggccagcccaacaccctgatctgccacatcgacaagttcttcccccccgtgctgaacgtgacctggctgtgcaacggcgagctggtgaccgagggcgtggccgagagcctgttcctgcccagaaccgactacagcttccacaagttccactacctgaccttcgtgcccagcgccgaggacttctacgactgcagagtggagcactggggcctggaccagcccctgctgaagcactgggaggcccaggagcccatccagatgcccgagaccaccgagaccgtgctgtgcgccctgggcctggtgctgggcctggtgggcatcatcgtgggcaccgtgctgatcatctag

SEQ ID NO: 87672 - DNA, 639 bp, synthetic construct; identical to SEQ ID NO: 87671
  misc_feature 1..639: note = Description of Artificial Sequence: Synthetic coding sequence
  source 1..639: mol_type = other DNA

SEQ ID NO: 87673 - DNA, 387 bp, synthetic construct; identical to SEQ ID NO: 87656
  misc_feature 1..387: note = Description of Artificial Sequence: Synthetic coding sequence
  source 1..387: mol_type = other DNA

SEQ ID NO: 87674 - DNA, 639 bp, synthetic construct; identical to SEQ ID NO: 87671
  misc_feature 1..639: note = Description of Artificial Sequence: Synthetic coding sequence
  source 1..639: mol_type = other DNA

SEQ ID NO: 87675 - DNA, 630 bp, synthetic construct; identical to SEQ ID NO: 87657
  misc_feature 1..630: note = Description of Artificial Sequence: Synthetic coding sequence
  source 1..630: mol_type = other DNA

SEQ ID NO: 87676 - DNA, 72 bp, synthetic construct; identical to SEQ ID NO: 87655
  misc_feature 1..72: note = Description of Artificial Sequence: Synthetic coding sequence
  source 1..72: mol_type = other DNA

SEQ ID NO: 87677 - DNA, 639 bp, synthetic construct; identical to SEQ ID NO: 87671
  misc_feature 1..639: note = Description of Artificial Sequence: Synthetic coding sequence
  source 1..639: mol_type = other DNA

SEQ ID NO: 87678 - DNA, 630 bp, synthetic construct; identical to SEQ ID NO: 87657
  misc_feature 1..630: note = Description of Artificial Sequence: Synthetic coding sequence
  source 1..630: mol_type = other DNA

SEQ ID NO: 87679 - DNA, 387 bp, synthetic construct; identical to SEQ ID NO: 87656
  misc_feature 1..387: note = Description of Artificial Sequence: Synthetic coding sequence
  source 1..387: mol_type = other DNA

SEQ ID NO: 87680 - DNA, 783 bp, synthetic construct; identical to SEQ ID NO: 87653
  misc_feature 1..783: note = Description of Artificial Sequence: Synthetic coding sequence
  source 1..783: mol_type = other DNA

SEQ ID NO: 87681 - DNA, 639 bp, synthetic construct; identical to SEQ ID NO: 87671
  misc_feature 1..639: note = Description of Artificial Sequence: Synthetic coding sequence
  source 1..639: mol_type = other DNA

SEQ ID NO: 87682 - DNA, 72 bp, synthetic construct; identical to SEQ ID NO: 87655
  misc_feature 1..72: note = Description of Artificial Sequence: Synthetic coding sequence
  source 1..72: mol_type = other DNA

SEQ ID NO: 87683 - DNA, 639 bp, synthetic construct; identical to SEQ ID NO: 87671
  misc_feature 1..639: note = Description of Artificial Sequence: Synthetic coding sequence
  source 1..639: mol_type = other DNA

SEQ ID NO: 87684 - DNA, 72 bp, synthetic construct; identical to SEQ ID NO: 87655
  misc_feature 1..72: note = Description of Artificial Sequence: Synthetic coding sequence
  source 1..72: mol_type = other DNA

SEQ ID NO: 87685 - DNA, 639 bp, synthetic construct; identical to SEQ ID NO: 87671
  misc_feature 1..639: note = Description of Artificial Sequence: Synthetic coding sequence
  source 1..639: mol_type = other DNA

SEQ ID NO: 87686 - DNA, 387 bp, synthetic construct; identical to SEQ ID NO: 87656
  misc_feature 1..387: note = Description of Artificial Sequence: Synthetic coding sequence
  source 1..387: mol_type = other DNA

SEQ ID NO: 87687 - DNA, 630 bp, synthetic construct; identical to SEQ ID NO: 87657
  misc_feature 1..630: note = Description of Artificial Sequence: Synthetic coding sequence
  source 1..630: mol_type = other DNA

SEQ ID NO: 87688 - DNA, 783 bp, synthetic construct; identical to SEQ ID NO: 87653
  misc_feature 1..783: note = Description of Artificial Sequence: Synthetic coding sequence
  source 1..783: mol_type = other DNA

SEQ ID NO: 87689 - DNA, 387 bp, synthetic construct; identical to SEQ ID NO: 87656
  misc_feature 1..387: note = Description of Artificial Sequence: Synthetic coding sequence
  source 1..387: mol_type = other DNA

SEQ ID NO: 87690 - DNA, 630 bp, synthetic construct; identical to SEQ ID NO: 87657
  misc_feature 1..630: note = Description of Artificial Sequence: Synthetic coding sequence
  source 1..630: mol_type = other DNA

SEQ ID NO: 87691 - DNA, 630 bp, synthetic construct; identical to SEQ ID NO: 87657
  misc_feature 1..630: note = Description of Artificial Sequence: Synthetic coding sequence
  source 1..630: mol_type = other DNA

SEQ ID NO: 87692 - DNA, 783 bp, synthetic construct; identical to SEQ ID NO: 87653
  misc_feature 1..783: note = Description of Artificial Sequence: Synthetic coding sequence
  source 1..783: mol_type = other DNA

SEQ ID NO: 87693 - DNA, 639 bp, synthetic construct; identical to SEQ ID NO: 87671
  misc_feature 1..639: note = Description of Artificial Sequence: Synthetic coding sequence
  source 1..639: mol_type = other DNA

SEQ ID NO: 87694 - DNA, 783 bp, synthetic construct; identical to SEQ ID NO: 87653
  misc_feature 1..783: note = Description of Artificial Sequence: Synthetic coding sequence
  source 1..783: mol_type = other DNA

SEQ ID NO: 87695 - DNA, 783 bp, synthetic construct; identical to SEQ ID NO: 87653
  misc_feature 1..783: note = Description of Artificial Sequence: Synthetic coding sequence
  source 1..783: mol_type = other DNA

SEQ ID NO: 87696 - DNA, 783 bp, synthetic construct; identical to SEQ ID NO: 87653
  misc_feature 1..783: note = Description of Artificial Sequence: Synthetic coding sequence
  source 1..783: mol_type = other DNA

SEQ ID NO: 87697 - DNA, 783 bp, synthetic construct; identical to SEQ ID NO: 87653
  misc_feature 1..783: note = Description of Artificial Sequence: Synthetic coding sequence
  source 1..783: mol_type = other DNA

SEQ ID NO: 87698 - DNA, 783 bp, synthetic construct; identical to SEQ ID NO: 87653
  misc_feature 1..783: note = Description of Artificial Sequence: Synthetic coding sequence
  source 1..783: mol_type = other DNA

SEQ ID NO: 87699 - DNA, 783 bp, synthetic construct; identical to SEQ ID NO: 87653
  misc_feature 1..783: note = Description of Artificial Sequence: Synthetic coding sequence
  source 1..783: mol_type = other DNA

SEQ ID NO: 87700 - DNA, 777 bp, synthetic construct
  misc_feature 1..777: note = Description of Artificial Sequence: Synthetic coding sequence
  source 1..777: mol_type = other DNA
atgatggtgctgcaggtgagcgccgcccccagaaccgtggccctgaccgccctgctgatggtgctgctgaccagcgtggtgcagggcagagccacccccgagaactacgtgtaccagctgagacaggagtgctacgccttcaacggcacccagagattcctggagagatacatctacaacagagaggagttcgtgagattcgacagcgacgtgggcgagttcagagccgtgaccgagctgggcagacccgacgaggactactggaacagccagaaggacctgctggaggagaagagagccgtgcccgacagagtgtgcagacacaactacgagctggacgaggccgtgaccctgcagagaagagtgcagcccaaggtgaacgtgagccccagcaagaagggccccctgcagcaccacaacctgctggtgtgccacgtgaccgacttctaccccggcagcatccaggtgagatggttcctgaacggccaggaggagaccgccggcgtggtgagcaccaacctgatcagaaacggcgactggaccttccagatcctggtgatgctggagatgaccccccagcagggcgacgtgtacatctgccaggtggagcacaccagcctggacagccccgtgaccgtggagtggaaggcccagagcgacagcgccagaagcaagaccctgaccggcgccggcggcttcgtgctgggcctgatcatctgcggcgtgggcatcttcatgcacagaagaagcaagaaggtgcagagaggcagcgcctag

SEQ ID NO: 87701 - DNA, 687 bp, synthetic construct
  misc_feature 1..687: note = Description of Artificial Sequence: Synthetic coding sequence
  source 1..687: mol_type = other DNA
atgatggtgctgcaggtgagcgccgcccccagaaccgtggccctgaccgccctgctgatggtgctgctgaccagcgtggtgcagggcagagccacccccgagaactacctgttccagggcagacaggagtgctacgccttcaacggcacccagagattcctggagagatacatctacaacagagaggagctggtgagattcgacagcgacgtgggcgagttcagagccgtgaccgagctgggcagacccgaggccgagtactggaacagccagaaggacatcctggaggaggagagagccgtgcccgacagaatgtgcagacacaactacgagctgggcggccccatgaccctgcagagaagaggcagcatccaggtgagatggttcctgaacggccaggaggagaccgccggcgtggtgagcaccaacctgatcagaaacggcgactggaccttccagatcctggtgatgctggagatgaccccccagcagggcgacgtgtacacctgccaggtggagcacaccagcctggacagccccgtgaccgtggagtggaaggcccagagcgacagcgccagaagcaagaccctgaccggcgccggcggcttcgtgctgggcctgatcatctgcggcgtgggcatcttcatgcacagaagaagcaagaaggtgcagagaggcagcgcctag

SEQ ID NO: 87702 - DNA, 777 bp, synthetic construct
  misc_feature 1..777: note = Description of Artificial Sequence: Synthetic coding sequence
  source 1..777: mol_type = other DNA
atgatggtgctgcaggtgagcgccgcccccagaaccgtggccctgaccgccctgctgatggtgctgctgaccagcgtggtgcagggcagagccacccccgagaactacctgttccagggcagacaggagtgctacgccttcaacggcacccagagattcctggagagatacatctacaacagagaggagctggtgagattcgacagcgacgtgggcgagttcagagccgtgaccgagctgggcagacccgaggccgagtactggaacagccagaaggacatcctggaggaggagagagccgtgcccgacagaatgtgcagacacaactacgagctgggcggccccatgaccctgcagagaagagtgcagcccagagtgaacgtgagccccagcaagaagggccccctgcagcaccacaacctgctggtgtgccacgtgaccgacttctaccccggcagcatccaggtgagatggttcctgaacggccaggaggagaccgccggcgtggtgagcaccaacctgatcagaaacggcgactggaccttccagatcctggtgatgctggagatgaccccccagcagggcgacgtgtacacctgccaggtggagcacaccagcctggacagccccgtgaccgtggagtggaaggcccagagcgacagcgccagaagcaagaccctgaccggcgccggcggcttcgtgctgggcctgatcatctgcggcgtgggcatcttcatgcacagaagaagcaagaaggtgcagagaggcagcgcctag

SEQ ID NO: 87703 - DNA, 690 bp, synthetic construct
  misc_feature 1..690: note = Description of Artificial Sequence: Synthetic coding sequence
  source 1..690: mol_type = other DNA
aagcaggcctggagaggcagcgccaccagactgggcccccagaacagcggcagacaggagtgctacgccttcaacggcacccagagattcctggagagatacatctacaacagagaggagctggtgagattcgacagcgacgtgggcgagttcagagccgtgaccgagctgggcagacccgaggccgagtactggaacagccagaaggacatcctggaggaggagagagccgtgcccgacagaatgtgcagacacaactacgagctgggcggccccatgaccctgcagagaagagtgcagcccagagtgaacgtgagccccagcaagaagggccccctgcagcaccacaacctgctggtgtgccacgtgaccgacttctaccccggcagcatccaggtgagatggttcctgaacggccaggaggagaccgccggcgtggtgagcaccaacctgatcagaaacggcgactggaccttccagatcctggtgatgctggagatgaccccccagcagggcgacgtgtacacctgccaggtggagcacaccagcctggacagccccgtgaccgtggagtggaaggcccagagcgacagcgccagaagcaagaccctgaccggcgccggcggcttcgtgctgggcctgatcatctgcggcgtgggcatcttcatgcacagaagaagcaagaagtag

SEQ ID NO: 87704 - DNA, 687 bp, synthetic construct
  misc_feature 1..687: note = Description of Artificial Sequence: Synthetic coding sequence
  source 1..687: mol_type = other DNA
atgatggtgctgcaggtgagcgccgcccccagaaccgtggccctgaccgccctgctgatggtgctgctgaccagcgtggtgcagggcagagccacccccgagaactacctgttccagggcagacaggagtgctacgccttcaacggcacccagagattcctggagagatacatctacaacagagaggagttcgccagattcgacagcgacgtgggcgagttcagagccgtgaccgagctgggcagacccgccgccgagtactggaacagccagaaggacatcctggaggagaagagagccgtgcccgacagaatgtgcagacacaactacgagctgggcggccccatgaccctgcagagaagaggcagcatccaggtgagatggttcctgaacggccaggaggagaccgccggcgtggtgagcaccaacctgatcagaaacggcgactggaccttccagatcctggtgatgctggagatgaccccccagcagggcgacgtgtacacctgccaggtggagcacaccagcctggacagccccgtgaccgtggagtggaaggcccagagcgacagcgccagaagcaagaccctgaccggcgccggcggcttcgtgctgggcctgatcatctgcggcgtgggcatcttcatgcacagaagaagcaagaaggtgcagagaggcagcgcctag

SEQ ID NO: 87705 - DNA, 687 bp, synthetic construct
  misc_feature 1..687: note = Description of Artificial Sequence: Synthetic coding sequence
  source 1..687: mol_type = other DNA
atgatggtgctgcaggtgagcgccgcccccagaaccgtggccctgaccgccctgctgatggtgctgctgaccagcgtggtgcagggcagagccacccccgagaactacctgttccagggcagacaggagtgctacgccttcaacggcacccagagattcctggagagatacatctacaacagagaggagttcgtgagattcgacagcgacgtgggcgagttcagagccgtgaccgagctgggcagacccgacgaggagtactggaacagccagaaggacatcctggaggagaagagagccgtgcccgacagaatgtgcagacacaactacgagctgggcggccccatgaccctgcagagaagaggcagcatccaggtgagatggttcctgaacggccaggaggagaccgccggcgtggtgagcaccaacctgatcagaaacggcgactggaccttccagatcctggtgatgctggagatgaccccccagcagggcgacgtgtacacctgccaggtggagcacaccagcatggacagccccgtgaccgtggagtggaaggcccagagcgacagcgccagaagcaagaccctgaccggcgccggcggcttcgtgctgggcctgatcatctgcggcgtgggcatcttcatgcacagaagaagcaagaaggtgcagagaggcagcgcctag

SEQ ID NO: 87706 - DNA, 708 bp, synthetic construct
  misc_feature 1..708: note = Description of Artificial Sequence: Synthetic coding sequence
  source 1..708: mol_type = other DNA
tgaaactacctgttccagggcagacaggagtgctacgccttcaacggcacccagagattcctggagagatacatctacaacagagaggagttcgtgagattcgacagcgacgtgggcgagttcagagccgtgaccgagctgggcagacccgacgaggagtactggaacagccagaaggacatcctggaggagaagagagccgtgcccgacagaatgtgcagacacaactacgagctgggcggccccatgaccctgcagagaagagtgcagcccagagtgaacgtgagccccagcaagaagggccccctgcagcaccacaacctgctggtgtgccacgtgaccgacttctaccccggcagcatccaggtgagatggttcctgaacggccaggaggagaccgccggcgtggtgagcaccaacctgatcagaaacggcgactggaccttccagatcctggtgatgctggagatgaccccccagcagggcgacgtgtacacctgccaggtggagcacaccagcatggacagccccgtgaccgtggagtggaaggcccagagcgacagcgccagaagcaagaccctgaccggcgccggcggcttcgtgctgggcctgatcatctgcggcgtgggcatcttcatgcacagaagaagcaagaagggcgagaaggcctgcagattcaacgaggacctgcacaagcagggcagctag

SEQ ID NO: 87707 - DNA, 777 bp, synthetic construct
  misc_feature 1..777: note = Description of Artificial Sequence: Synthetic coding sequence
  source 1..777: mol_type = other DNA
atgatggtgctgcaggtgagcgccgcccccagaaccgtggccctgaccgccctgctgatggtgctgctgaccagcgtggtgcagggcagagccacccccgagaactacctgttccagggcagacaggagtgctacgccttcaacggcacccagagattcctggagagatacatctacaacagagaggagttcgtgagattcgacagcgacgtgggcgagttcagagccgtgaccgagctgggcagacccgacgaggagtactggaacagccagaaggacatcctggaggagaagagagccgtgcccgacagaatgtgcagacacaactacgagctgggcggccccatgaccctgcagagaagagtgcagcccagagtgaacgtgagccccagcaagaagggccccctgcagcaccacaacctgctggtgtgccacgtgaccgacttctaccccggcagcatccaggtgagatggttcctgaacggccaggaggagaccgccggcgtggtgagcaccaacctgatcagaaacggcgactggaccttccagatcctggtgatgctggagatgaccccccagcagggcgacgtgtacacctgccaggtggagcacaccagcatggacagccccgtgaccgtggagtggaaggcccagagcgacagcgccagaagcaagaccctgaccggcgccggcggcttcgtgctgggcctgatcatctgcggcgtgggcatcttcatgcacagaagaagcaagaaggtgcagagaggcagcgcctag

SEQ ID NO: 87708 - DNA, 687 bp, synthetic construct; identical to SEQ ID NO: 87704
  misc_feature 1..687: note = Description of Artificial Sequence: Synthetic coding sequence
  source 1..687: mol_type = other DNA

SEQ ID NO: 87709 - DNA, 690 bp, synthetic construct
  misc_feature 1..690: note = Description of Artificial Sequence: Synthetic coding sequence
  source 1..690: mol_type = other DNA
aagcaggcctggagaggcagcgccaccagactgggcccccagaacagcggcagacaggagtgctacgccttcaacggcacccagagattcctggagagatacatctacaacagagaggagttcgtgagattcgacagcgacgtgggcgagttcagagccgtgaccgagctgggcagacccgacgaggagtactggaacagccagaaggacatcctggaggaggagagagccgtgcccgacagaatgtgcagacacaactacgagctgggcggccccatgaccctgcagagaagagtgcagcccagagtgaacgtgagccccagcaagaagggccccctgcagcaccacaacctgctggtgtgccacgtgaccgacttctaccccggcagcatccaggtgagatggttcctgaacggccaggaggagaccgccggcgtggtgagcaccaacctgatcagaaacggcgactggaccttccagatcctggtgatgctggagatgaccccccagcagggcgacgtgtacacctgccaggtggagcacaccagcctggacagccccgtgaccgtggagtggaaggcccagagcgacagcgccagaagcaagaccctgaccggcgccggcggcttcgtgctgggcctgatcatctgcggcgtgggcatcttcatgcacagaagaagcaagaagtag

SEQ ID NO: 87710 - DNA, 777 bp, synthetic construct
  misc_feature 1..777: note = Description of Artificial Sequence: Synthetic coding sequence
  source 1..777: mol_type = other DNA
atgatggtgctgcaggtgagcgccgcccccagaaccgtggccctgaccgccctgctgatggtgctgctgaccagcgtggtgcagggcagagccacccccgagaactacctgttccagggcagacaggagtgctacgccttcaacggcacccagagattcctggagagatacatctacaacagagaggagttcgtgagattcgacagcgacgtgggcgagttcagagccgtgaccgagctgggcagacccgacgaggagtactggaacagccagaaggacatcctggaggaggagagagccgtgcccgacagaatgtgcagacacaactacgagctgggcggccccatgaccctgcagagaagagtgcagcccagagtgaacgtgagccccagcaagaagggccccctgcagcaccacaacctgctggtgtgccacgtgaccgacttctaccccggcagcatccaggtgagatggttcctgaacggccaggaggagaccgccggcgtggtgagcaccaacctgatcagaaacggcgactggaccttccagatcctggtgatgctggagatgaccccccagcagggcgacgtgtacacctgccaggtggagcacaccagcctggacagccccgtgaccgtggagtggaaggcccagagcgacagcgccagaagcaagaccctgaccggcgccggcggcttcgtgctgggcctgatcatctgcggcgtgggcatcttcatgcacagaagaagcaagaaggtgcagagaggcagcgcctag

SEQ ID NO: 87711 - DNA, 708 bp, synthetic construct
  misc_feature 1..708: note = Description of Artificial Sequence: Synthetic coding sequence
  source 1..708: mol_type = other DNA
tgaaactacctgttccagggcagacaggagtgctacgccttcaacggcacccagagattcctggagagatacatctacaacagagaggagttcgccagattcgacagcgacgtgggcgagttcagagccgtgaccgagctgggcagacccgccgccgagtactggaacagccagaaggacatcctggaggagaagagagccgtgcccgacagaatgtgcagacacaactacgagctgggcggccccatgaccctgcagagaagagtgcagcccagagtgaacgtgagccccagcaagaagggccccctgcagcaccacaacctgctggtgtgccacgtgaccgacttctaccccggcagcatccaggtgagatggttcctgaacggccaggaggagaccgccggcgtggtgagcaccaacctgatcagaaacggcgactggaccttccagatcctggtgatgctggagatgaccccccagcagggcgacgtgtacacctgccaggtggagcacaccagcctggacagccccgtgaccgtggagtggaaggcccagagcgacagcgccagaagcaagaccctgaccggcgccggcggcttcgtgctgggcctgatcatctgcggcgtgggcatcttcatgcacagaagaagcaagaagggcgagaaggcctgcagattcaacgaggacctgcacaagcagggcagctag

SEQ ID NO: 87712 - DNA, 690 bp, synthetic construct
  misc_feature 1..690: note = Description of Artificial Sequence: Synthetic coding sequence
  source 1..690: mol_type = other DNA
aagcaggcctggagaggcagcgccaccagactgggcccccagaacagcggcagacaggagtgctacgccttcaacggcacccagagattcctggagagatacatctacaacagagaggagttcgccagattcgacagcgacgtgggcgagttcagagccgtgaccgagctgggcagacccgccgccgagtactggaacagccagaaggacatcctggaggagaagagagccgtgcccgacagaatgtgcagacacaactacgagctgggcggccccatgaccctgcagagaagagtgcagcccagagtgaacgtgagccccagcaagaagggccccctgcagcaccacaacctgctggtgtgccacgtgaccgacttctaccccggcagcatccaggtgagatggttcctgaacggccaggaggagaccgccggcgtggtgagcaccaacctgatcagaaacggcgactggaccttccagatcctggtgatgctggagatgaccccccagcagggcgacgtgtacacctgccaggtggagcacaccagcctggacagccccgtgaccgtggagtggaaggcccagagcgacagcgccagaagcaagaccctgaccggcgccggcggcttcgtgctgggcctgatcatctgcggcgtgggcatcttcatgcacagaagaagcaagaagtag

SEQ ID NO: 87713 - DNA, 777 bp, synthetic construct
  misc_feature 1..777: note = Description of Artificial Sequence: Synthetic coding sequence
  source 1..777: mol_type = other DNA
atgatggtgctgcaggtgagcgccgcccccagaaccgtggccctgaccgccctgctgatggtgctgctgaccagcgtggtgcagggcagagccacccccgagaactacctgttccagggcagacaggagtgctacgccttcaacggcacccagagattcctggagagatacatctacaacagagaggagttcgccagattcgacagcgacgtgggcgagttcagagccgtgaccgagctgggcagacccgccgccgagtactggaacagccagaaggacatcctggaggagaagagagccgtgcccgacagaatgtgcagacacaactacgagctgggcggccccatgaccctgcagagaagagtgcagcccagagtgaacgtgagccccagcaagaagggccccctgcagcaccacaacctgctggtgtgccacgtgaccgacttctaccccggcagcatccaggtgagatggttcctgaacggccaggaggagaccgccggcgtggtgagcaccaacctgatcagaaacggcgactggaccttccagatcctggtgatgctggagatgaccccccagcagggcgacgtgtacacctgccaggtggagcacaccagcctggacagccccgtgaccgtggagtggaaggcccagagcgacagcgccagaagcaagaccctgaccggcgccggcggcttcgtgctgggcctgatcatctgcggcgtgggcatcttcatgcacagaagaagcaagaaggtgcagagaggcagcgcctag

SEQ ID NO: 87714 - DNA, 249 bp, synthetic construct
  misc_feature 1..249: note = Description of Artificial Sequence: Synthetic coding sequence
  source 1..249: mol_type = other DNA
atgaccccccagcagggcgacgtgtacacctgccaggtggagcacaccagcctggacagccccgtgaccgtggagtggaaggcccagagcgacagcgccagaagcaagaccctgaccggcgccggcggcagagccggcgcccaccacctgtggagcggccacctgcacgcccaggaggagcaggagagcagcaccagaatctgcatcaacagagtgcccgagctgaccgagaagaccatcgtgccctag

SEQ ID NO: 87715 - DNA, 777 bp, synthetic construct; identical to SEQ ID NO: 87707
  misc_feature 1..777: note = Description of Artificial Sequence: Synthetic coding sequence
  source 1..777: mol_type = other DNA

SEQ ID NO: 87716 - DNA, 690 bp, synthetic construct; identical to SEQ ID NO: 87712
  misc_feature 1..690: note = Description of Artificial Sequence: Synthetic coding sequence
  source 1..690: mol_type = other DNA

SEQ ID NO: 87717 - DNA, 708 bp, synthetic construct
  misc_feature 1..708: note = Description of Artificial Sequence: Synthetic coding sequence
  source 1..708: mol_type = other DNA
tgaaactacctgttccagggcagacaggagtgctacgccttcaacggcacccagagattcctggagagatacatctacaacagagaggagctggtgagattcgacagcgacgtgggcgagttcagagccgtgaccgagctgggcagacccgaggccgagtactggaacagccagaaggacatcctggaggaggagagagccgtgcccgacagaatgtgcagacacaactacgagctgggcggccccatgaccctgcagagaagagtgcagcccagagtgaacgtgagccccagcaagaagggccccctgcagcaccacaacctgctggtgtgccacgtgaccgacttctaccccggcagcatccaggtgagatggttcctgaacggccaggaggagaccgccggcgtggtgagcaccaacctgatcagaaacggcgactggaccttccagatcctggtgatgctggagatgaccccccagcagggcgacgtgtacacctgccaggtggagcacaccagcctggacagccccgtgaccgtggagtggaaggcccagagcgacagcgccagaagcaagaccctgaccggcgccggcggcttcgtgctgggcctgatcatctgcggcgtgggcatcttcatgcacagaagaagcaagaagggcgagaaggcctgcagattcaacgaggacctgcacaagcagggcagctag

SEQ ID NO: 87718 - DNA, 777 bp, synthetic construct; identical to SEQ ID NO: 87713
  misc_feature 1..777: note = Description of Artificial Sequence: Synthetic coding sequence
  source 1..777: mol_type = other DNA

SEQ ID NO: 87719 - DNA, 708 bp, synthetic construct
  misc_feature 1..708: note = Description of Artificial Sequence: Synthetic coding sequence
  source 1..708: mol_type = other DNA
tgaaactacgtgtaccagctgagacaggagtgctacgccttcaacggcacccagagattcctggagagatacatctacaacagagaggagttcgtgagattcgacagcgacgtgggcgagttcagagccgtgaccgagctgggcagacccgacgaggactactggaacagccagaaggacctgctggaggagaagagagccgtgcccgacagagtgtgcagacacaactacgagctggacgaggccgtgaccctgcagagaagagtgcagcccaaggtgaacgtgagccccagcaagaagggccccctgcagcaccacaacctgctggtgtgccacgtgaccgacttctaccccggcagcatccaggtgagatggttcctgaacggccaggaggagaccgccggcgtggtgagcaccaacctgatcagaaacggcgactggaccttccagatcctggtgatgctggagatgaccccccagcagggcgacgtgtacatctgccaggtggagcacaccagcctggacagccccgtgaccgtggagtggaaggcccagagcgacagcgccagaagcaagaccctgaccggcgccggcggcttcgtgctgggcctgatcatctgcggcgtgggcatcttcatgcacagaagaagcaagaagggcgagaaggcctgcaagttcaacgaggacctgcacaagcagggcagctag

SEQ ID NO: 87720 - DNA, 690 bp, synthetic construct
  misc_feature 1..690: note = Description of Artificial Sequence: Synthetic coding sequence
  source 1..690: mol_type = other DNA
aagcaggcctggagaggcagcgccaccagactgggcccccagaacagcggcagacaggagtgctacgccttcaacggcacccagagattcctggagagatacatctacaacagagaggagttcgtgagattcgacagcgacgtgggcgagttcagagccgtgaccgagctgggcagacccgacgaggagtactggaacagccagaaggacatcctggaggagaagagagccgtgcccgacagaatgtgcagacacaactacgagctgggcggccccatgaccctgcagagaagagtgcagcccagagtgaacgtgagccccagcaagaagggccccctgcagcaccacaacctgctggtgtgccacgtgaccgacttctaccccggcagcatccaggtgagatggttcctgaacggccaggaggagaccgccggcgtggtgagcaccaacctgatcagaaacggcgactggaccttccagatcctggtgatgctggagatgaccccccagcagggcgacgtgtacacctgccaggtggagcacaccagcatggacagccccgtgaccgtggagtggaaggcccagagcgacagcgccagaagcaagaccctgaccggcgccggcggcttcgtgctgggcctgatcatctgcggcgtgggcatcttcatgcacagaagaagcaagaagtag

SEQ ID NO: 87721 - DNA, 687 bp, synthetic construct
  misc_feature 1..687: note = Description of Artificial Sequence: Synthetic coding sequence
  source 1..687: mol_type = other DNA
atgatggtgctgcaggtgagcgccgcccccagaaccgtggccctgaccgccctgctgatggtgctgctgaccagcgtggtgcagggcagagccacccccgagaactacgtgtaccagctgagacaggagtgctacgccttcaacggcacccagagattcctggagagatacatctacaacagagaggagttcgtgagattcgacagcgacgtgggcgagttcagagccgtgaccgagctgggcagacccgacgaggactactggaacagccagaaggacctgctggaggagaagagagccgtgcccgacagagtgtgcagacacaactacgagctggacgaggccgtgaccctgcagagaagaggcagcatccaggtgagatggttcctgaacggccaggaggagaccgccggcgtggtgagcaccaacctgatcagaaacggcgactggaccttccagatcctggtgatgctggagatgaccccccagcagggcgacgtgtacatctgccaggtggagcacaccagcctggacagccccgtgaccgtggagtggaaggcccagagcgacagcgccagaagcaagaccctgaccggcgccggcggcttcgtgctgggcctgatcatctgcggcgtgggcatcttcatgcacagaagaagcaagaaggtgcagagaggcagcgcctag

SEQ ID NO: 87722 - DNA, 687 bp, synthetic construct; identical to SEQ ID NO: 87705
  misc_feature 1..687: note = Description of Artificial Sequence: Synthetic coding sequence
  source 1..687: mol_type = other DNA

SEQ ID NO: 87723 - DNA, 687 bp, synthetic construct; identical to SEQ ID NO: 87704
  misc_feature 1..687: note = Description of Artificial Sequence: Synthetic coding sequence
  source 1..687: mol_type = other DNA

SEQ ID NO: 87724 - DNA, 690 bp, synthetic construct; identical to SEQ ID NO: 87720
  misc_feature 1..690: note = Description of Artificial Sequence: Synthetic coding sequence
  source 1..690: mol_type = other DNA

SEQ ID NO: 87725 - DNA, 708 bp, synthetic construct
  misc_feature 1..708: note = Description of Artificial Sequence: Synthetic coding sequence
  source 1..708: mol_type = other DNA
tgaaactacctgttccagggcagacaggagtgctacgccttcaacggcacccagagattcctggagagatacatctacaacagagaggagttcgtgagattcgacagcgacgtgggcgagttcagagccgtgaccgagctgggcagacccgacgaggagtactggaacagccagaaggacatcctggaggaggagagagccgtgcccgacagaatgtgcagacacaactacgagctgggcggccccatgaccctgcagagaagagtgcagcccagagtgaacgtgagccccagcaagaagggccccctgcagcaccacaacctgctggtgtgccacgtgaccgacttctaccccggcagcatccaggtgagatggttcctgaacggccaggaggagaccgccggcgtggtgagcaccaacctgatcagaaacggcgactggaccttccagatcctggtgatgctggagatgaccccccagcagggcgacgtgtacacctgccaggtggagcacaccagcctggacagccccgtgaccgtggagtggaaggcccagagcgacagcgccagaagcaagaccctgaccggcgccggcggcttcgtgctgggcctgatcatctgcggcgtgggcatcttcatgcacagaagaagcaagaagggcgagaaggcctgcagattcaacgaggacctgcacaagcagggcagctag

SEQ ID NO: 87726 - DNA, 708 bp, synthetic construct; identical to SEQ ID NO: 87711
  misc_feature 1..708: note = Description of Artificial Sequence: Synthetic coding sequence
  source 1..708: mol_type = other DNA

SEQ ID NO: 87727 - DNA, 687 bp, synthetic construct
  misc_feature 1..687: note = Description of Artificial Sequence: Synthetic coding sequence
  source 1..687: mol_type = other DNA
atgatggtgctgcaggtgagcgccgcccccagaaccgtggccctgaccgccctgctgatggtgctgctgaccagcgtggtgcagggcagagccacccccgagaactacctgttccagggcagacaggagtgctacgccttcaacggcacccagagattcctggagagatacatctacaacagagaggagttcgtgagattcgacagcgacgtgggcgagttcagagccgtgaccgagctgggcagacccgacgaggagtactggaacagccagaaggacatcctggaggaggagagagccgtgcccgacagaatgtgcagacacaactacgagctgggcggccccatgaccctgcagagaagaggcagcatccaggtgagatggttcctgaacggccaggaggagaccgccggcgtggtgagcaccaacctgatcagaaacggcgactggaccttccagatcctggtgatgctggagatgaccccccagcagggcgacgtgtacacctgccaggtggagcacaccagcctggacagccccgtgaccgtggagtggaaggcccagagcgacagcgccagaagcaagaccctgaccggcgccggcggcttcgtgctgggcctgatcatctgcggcgtgggcatcttcatgcacagaagaagcaagaaggtgcagagaggcagcgcctag

SEQ ID NO: 87728 - DNA, 690 bp, synthetic construct
  misc_feature 1..690: note = Description of Artificial Sequence: Synthetic coding sequence
  source 1..690: mol_type = other DNA
aagcaggcctggagaggcagcgccaccagactgggcccccagaacagcctgagacaggagtgctacgccttcaacggcacccagagattcctggagagatacatctacaacagagaggagttcgtgagattcgacagcgacgtgggcgagttcagagccgtgaccgagctgggcagacccgacgaggactactggaacagccagaaggacctgctggaggagaagagagccgtgcccgacagagtgtgcagacacaactacgagctggacgaggccgtgaccctgcagagaagagtgcagcccaaggtgaacgtgagccccagcaagaagggccccctgcagcaccacaacctgctggtgtgccacgtgaccgacttctaccccggcagcatccaggtgagatggttcctgaacggccaggaggagaccgccggcgtggtgagcaccaacctgatcagaaacggcgactggaccttccagatcctggtgatgctggagatgaccccccagcagggcgacgtgtacatctgccaggtggagcacaccagcctggacagccccgtgaccgtggagtggaaggcccagagcgacagcgccagaagcaagaccctgaccggcgccggcggcttcgtgctgggcctgatcatctgcggcgtgggcatcttcatgcacagaagaagcaagaagtag

SEQ ID NO: 87729 - DNA, 777 bp, synthetic construct; identical to SEQ ID NO: 87713
  misc_feature 1..777: note = Description of Artificial Sequence: Synthetic coding sequence
  source 1..777: mol_type = other DNA

SEQ ID NO: 87730 - DNA, 708 bp, synthetic construct; identical to SEQ ID NO: 87706
  misc_feature 1..708: note = Description of Artificial Sequence: Synthetic coding sequence
  source 1..708: mol_type = other DNA

SEQ ID NO: 87731 - DNA, 690 bp, synthetic construct; identical to SEQ ID NO: 87712
  misc_feature 1..690: note = Description of Artificial Sequence: Synthetic coding sequence
  source 1..690: mol_type = other DNA

SEQ ID NO: 87732 - DNA, 708 bp, synthetic construct; identical to SEQ ID NO: 87711
  misc_feature 1..708: note = Description of Artificial Sequence: Synthetic coding sequence
  source 1..708: mol_type = other DNA

SEQ ID NO: 87733 - DNA, 372 bp, synthetic construct
  misc_feature 1..372: note = Description of Artificial Sequence: Synthetic coding sequence
  source 1..372: mol_type = other DNA
atgatggtgctgcaggtgagcgccgcccccagaaccgtggccctgaccgccctgctgatggtgctgctgaccagcgtggtgcagggcagagccacccccgagaactacctgttccagggcagacaggagtgctacgccttcaacggcacccagagattcctggagagatacatctacaacagagaggagttcgccagattcgacagcgacgtgggcgagttcagagccgtgaccgagctgggcagacccgccgccgagtactggaacagccagaaggacatcctggaggagaagagagccgtgcccgacagaatgtgcagacacaactacgagctgggcggccccatgaccctgcagagaagaggcgagtag

SEQ ID NO: 87734 - DNA, 249 bp, synthetic construct; identical to SEQ ID NO: 87714
  misc_feature 1..249: note = Description of Artificial Sequence: Synthetic coding sequence
  source 1..249: mol_type = other DNA

SEQ ID NO: 87735 - DNA, 249 bp, synthetic construct; identical to SEQ ID NO: 87714
  misc_feature 1..249: note = Description of Artificial Sequence: Synthetic coding sequence
  source 1..249: mol_type = other DNA

SEQ ID NO: 87736 - DNA, 372 bp, synthetic construct
  misc_feature 1..372: note = Description of Artificial Sequence: Synthetic coding sequence
  source 1..372: mol_type = other DNA
atgatggtgctgcaggtgagcgccgcccccagaaccgtggccctgaccgccctgctgatggtgctgctgaccagcgtggtgcagggcagagccacccccgagaactacctgttccagggcagacaggagtgctacgccttcaacggcacccagagattcctggagagatacatctacaacagagaggagctggtgagattcgacagcgacgtgggcgagttcagagccgtgaccgagctgggcagacccgaggccgagtactggaacagccagaaggacatcctggaggaggagagagccgtgcccgacagaatgtgcagacacaactacgagctgggcggccccatgaccctgcagagaagaggcgagtag

SEQ ID NO: 87737 - DNA, 372 bp, synthetic construct
  misc_feature 1..372: note = Description of Artificial Sequence: Synthetic coding sequence
  source 1..372: mol_type = other DNA
atgatggtgctgcaggtgagcgccgcccccagaaccgtggccctgaccgccctgctgatggtgctgctgaccagcgtggtgcagggcagagccacccccgagaactacctgttccagggcagacaggagtgctacgccttcaacggcacccagagattcctggagagatacatctacaacagagaggagttcgtgagattcgacagcgacgtgggcgagttcagagccgtgaccgagctgggcagacccgacgaggagtactggaacagccagaaggacatcctggaggagaagagagccgtgcccgacagaatgtgcagacacaactacgagctgggcggccccatgaccctgcagagaagaggcgagtag

SEQ ID NO: 87738 - DNA, 372 bp, synthetic construct
  misc_feature 1..372: note = Description of Artificial Sequence: Synthetic coding sequence
  source 1..372: mol_type = other DNA
atgatggtgctgcaggtgagcgccgcccccagaaccgtggccctgaccgccctgctgatggtgctgctgaccagcgtggtgcagggcagagccacccccgagaactacctgttccagggcagacaggagtgctacgccttcaacggcacccagagattcctggagagatacatctacaacagagaggagttcgtgagattcgacagcgacgtgggcgagttcagagccgtgaccgagctgggcagacccgacgaggagtactggaacagccagaaggacatcctggaggaggagagagccgtgcccgacagaatgtgcagacacaactacgagctgggcggccccatgaccctgcagagaagaggcgagtag

SEQ ID NO: 87739 - DNA, 750 bp, synthetic construct
  misc_feature 1..750: note = Description of Artificial Sequence: Synthetic coding sequence
  source 1..750: mol_type = other DNA
atggtgctgctgaccagcgtggtgcagggcagagccacccccgagaactacgtgtaccagctgagacaggagtgctacgccttcaacggcacccagagattcctggagagatacatctacaacagagaggagttcgtgagattcgacagcgacgtgggcgagttcagagccgtgaccgagctgggcagacccgacgaggactactggaacagccagaaggacctgctggaggagaagagagccgtgcccgacagagtgtgcagacacaactacgagctggacgaggccgtgaccctgcagagaagagtgcagcccaaggtgaacgtgagccccagcaagaagggccccctgcagcaccacaacctgctggtgtgccacgtgaccgacttctaccccggcagcatccaggtgagatggttcctgaacggccaggaggagaccgccggcgtggtgagcaccaacctgatcagaaacggcgactggaccttccagatcctggtgatgctggagatgaccccccagcagggcgacgtgtacatctgccaggtggagcacaccagcctggacagccccgtgaccgtggagtggaaggcccagagcgacagcgccagaagcaagaccctgaccggcgccggcggcttcgtgctgggcctgatcatctgcggcgtgggcatcttcatgcacagaagaagcaagaagggcgagaaggcctgcaagttcaacgaggacctgcacaagcagggcagctag

SEQ ID NO: 87740 - DNA, 249 bp, synthetic construct; identical to SEQ ID NO: 87714
  misc_feature 1..249: note = Description of Artificial Sequence: Synthetic coding sequence
  source 1..249: mol_type = other DNA

SEQ ID NO: 87741 - DNA, 372 bp, synthetic construct; identical to SEQ ID NO: 87733
  misc_feature 1..372: note = Description of Artificial Sequence: Synthetic coding sequence
  source 1..372: mol_type = other DNA

SEQ ID NO: 87742 - DNA, 372 bp, synthetic construct; identical to SEQ ID NO: 87733
  misc_feature 1..372: note = Description of Artificial Sequence: Synthetic coding sequence
  source 1..372: mol_type = other DNA

SEQ ID NO: 87743 - DNA, 198 bp, synthetic construct
  misc_feature 1..198: note = Description of Artificial Sequence: Synthetic coding sequence
  source 1..198: mol_type = other DNA
atggacagccccgtgaccgtggagtggaaggcccagagcgacagcgccagaagcaagaccctgaccggcgccggcggcagagccggcgcccaccacctgtggagcggccacctgcacgcccaggaggagcaggagagcagcaccagaatctgcatcaacagagtgcccgagctgaccgagaagaccatcgtgccctag

SEQ ID NO: 87744 - DNA, 381 bp, synthetic construct
  misc_feature 1..381: note = Description of Artificial Sequence: Synthetic coding sequence
  source 1..381: mol_type = other DNA
atgatggtgctgcaggtgagcgccgcccccagaaccgtggccctgaccgccctgctgatggtgctgctgaccagcgtggtgcagggcagagccacccccgagaactacgtgtaccagctgagacaggagtgctacgccttcaacggcacccagagattcctggagagatacatctacaacagagaggagttcgtgagattcgacagcgacgtgggcgagttcagagccgtgaccgagctgggcagacccgacgaggactactggaacagccagaaggacctgctggaggagaagagagccgtgcccgacagagtgtgcagacacaactacgagctggacgaggccgtgaccctgcagagaagagagagaggcaagaagtag

SEQ ID NO: 87745 - DNA, 249 bp, synthetic construct
  misc_feature 1..249: note = Description of Artificial Sequence: Synthetic coding sequence
  source 1..249: mol_type = other DNA
atgaccccccagcagggcgacgtgtacatctgccaggtggagcacaccagcctggacagccccgtgaccgtggagtggaaggcccagagcgacagcgccagaagcaagaccctgaccggcgccggcggcagagccggcgcccaccacctgtggagcggccacctgcacgcccaggaggagcaggagagcagcaccagaatctgcatcaacagagtgcccgacctgaccgagaagaccaacgtgccctag

SEQ ID NO: 87746 - DNA, 249 bp, synthetic construct; identical to SEQ ID NO: 87714
  misc_feature 1..249: note = Description of Artificial Sequence: Synthetic coding sequence
  source 1..249: mol_type = other DNA

SEQ ID NO: 87747 - DNA, 372 bp, synthetic construct; identical to SEQ ID NO: 87737
  misc_feature 1..372: note = Description of Artificial Sequence: Synthetic coding sequence
  source 1..372: mol_type = other DNA

SEQ ID NO: 87748 - DNA, 198 bp, synthetic construct; identical to SEQ ID NO: 87743
  misc_feature 1..198: note = Description of Artificial Sequence: Synthetic coding sequence
  source 1..198: mol_type = other DNA

SEQ ID NO: 87749 - DNA, 768 bp, synthetic construct
  misc_feature 1..768: note = Description of Artificial Sequence: Synthetic coding sequence
  source 1..768: mol_type = other DNA
atgatcctgaacaaggccctgctgctgggcgccctggccctgaccaccgtgatgagcccctgcggcggcgaggacatcgtggccgaccacgtggccagctgcggcgtgaacctgtaccagttctacggccccagcggccagtacacccacgagttcgacggcgacgagcagttctacgtggacctggagagaaaggagaccgcctggagatggcccgagttcagcaagttcggcggcttcgacccccagggcgccctgagaaacatggccgtggccaagcacaacctgaacatcatgatcaagagatacaacagcaccgccgccaccaacgaggtgcccgaggtgaccgtgttcagcaagagccccgtgaccctgggccagcccaacaccctgatctgcctggtggacaacatcttcccccccgtggtgaacatcacctggctgagcaacggccagagcgtgaccgagggcgtgagcgagaccagcttcctgagcaagagcgaccacagcttcttcaagatcagctacctgaccttcctgcccagcgccgacgagatctacgactgcaaggtggagcactggggcctggaccagcccctgctgaagcactgggagcccgagatccccgcccccatgagcgagctgaccgagaccgtggtgtgcgccctgggcctgagcgtgggcctgatgggcatcgtggtgggcaccgtgttcatcatccagggcctgagaagcgtgggcgccagcagacaccagggccccctgtag

SEQ ID NO: 87750 - DNA, 768 bp, synthetic construct; identical to SEQ ID NO: 87749
  misc_feature 1..768: note = Description of Artificial Sequence: Synthetic coding sequence
  source 1..768: mol_type = other DNA

SEQ ID NO: 87751 - DNA, 765 bp, synthetic construct
  misc_feature 1..765: note = Description of Artificial Sequence: Synthetic coding sequence
  source 1..765: mol_type = other DNA
atgatcctgaacaaggccctgatgctgggcgccctggccctgaccaccgtgatgagcccctgcggcggcgaggacatcgtggccgaccacgtggccagctacggcgtgaacctgtaccagagctacggccccagcggccagtacacccacgagttcgacggcgacgagcagttctacgtggacctgggcagaaaggagaccgtgtggtgcctgcccgtgctgagacagttcagattcgacccccagttcgccctgaccaacatcgccgtgctgaagcacaacctgaacagcctgatcaagagaagcaacagcaccgccgccaccaacgaggtgcccgaggtgaccgtgttcagcaagagccccgtgaccctgggccagcccaacatcctgatctgcctggtggacaacatcttcccccccgtggtgaacatcacctggctgagcaacggccacagcgtgaccgagggcgtgagcgagaccagcttcctgagcaagagcgaccacagcttcttcaagatcagctacctgaccctgctgcccagcgccgaggagagctacgactgcaaggtggagcactggggcctggacaagcccctgctgaagcactgggagcccgagatccccgcccccatgagcgagctgaccgagaccgtggtgtgcgccctgggcctgagcgtgggcctggtgggcatcgtggtgggcaccgtgttcatcatcagaggcctgagaagcgtgggcgccagcagacaccagggccccctgtag

SEQ ID NO: 87752 - DNA, 768 bp, synthetic construct; identical to SEQ ID NO: 87749
  misc_feature 1..768: note = Description of Artificial Sequence: Synthetic coding sequence
  source 1..768: mol_type = other DNA

SEQ ID NO: 87753 - DNA, 768 bp, synthetic construct; identical to SEQ ID NO: 87749
  misc_feature 1..768: note = Description of Artificial Sequence: Synthetic coding sequence
  source 1..768: mol_type = other DNA

SEQ ID NO: 87754 - DNA, 765 bp, synthetic construct; identical to SEQ ID NO: 87751
  misc_feature 1..765: note = Description of Artificial Sequence: Synthetic coding sequence
  source 1..765: mol_type = other DNA

SEQ ID NO: 87755 - DNA, 765 bp, synthetic construct; identical to SEQ ID NO: 87751
  misc_feature 1..765: note = Description of Artificial Sequence: Synthetic coding sequence
  source 1..765: mol_type = other DNA

SEQ ID NO: 87756 - DNA, 75 bp, synthetic construct
  misc_feature 1..75: note = Description of Artificial Sequence: Synthetic coding sequence
  source 1..75: mol_type = other DNA
atgatcctgaacaaggccctgatgctgggcgccctggccctgaccaccgtgatgagcccctgcggcggcgagtag

SEQ ID NO: 87757 - DNA, 765 bp, synthetic construct
  misc_feature 1..765: note = Description of Artificial Sequence: Synthetic coding sequence
  source 1..765: mol_type = other DNA
atgatcctgaacaaggccctgatgctgggcgccctggccctgaccaccgtgatgagcccctgcggcggcgaggacatcgtggccgaccacgtggccagctacggcgtgaacctgtaccagagctacggccccagcggccagttcacccacgagttcgacggcgacgaggagttctacgtggacctggagagaaaggagaccgtgtggaagctgcccctgttccacagactgagattcgacccccagttcgccctgaccaacatcgccgtgctgaagcacaacctgaacatcctgatcaagagaagcaacagcaccgccgccaccaacgaggtgcccgaggtgaccgtgttcagcaagagccccgtgaccctgggccagcccaacaccctgatctgcctggtggacaacatcttcccccccgtggtgaacatcacctggctgagcaacggccacagcgtgaccgagggcgtgagcgagaccagcttcctgagcaagagcgaccacagcttcttcaagatcagctacctgaccttcctgcccagcgccgacgagatctacgactgcaaggtggagcactggggcctggacgagcccctgctgaagcactgggagcccgagatccccgcccccatgagcgagctgaccgagaccgtggtgtgcgccctgggcctgagcgtgggcctggtgggcatcgtggtgggcaccgtgctgatcatcagaggcctgagaagcgtgggcgccagcagacaccagggccccctgtag

SEQ ID NO: 87758 - DNA, 768 bp, synthetic construct
  misc_feature 1..768: note = Description of Artificial Sequence: Synthetic coding sequence
  source 1..768: mol_type = other DNA
atgatcctgaacaaggccctgatgctgggcgccctggccctgaccaccgtgatgagcccctgcggcggcgaggacatcgtggccgaccacgtggccagctacggcgtgaacctgtaccagagctacggccccagcggccagtacagccacgagttcgacggcgacgaggagttctacgtggacctggagagaaaggagaccgtgtggcagctgcccctgttcagaagattcagaagattcgacccccagttcgccctgaccaacatcgccgtgctgaagcacaacctgaacatcgtgatcaagagaagcaacagcaccgccgccaccaacgaggtgcccgaggtgaccgtgttcagcaagagccccgtgaccctgggccagcccaacaccctgatctgcctggtggacaacatcttcccccccgtggtgaacatcacctggctgagcaacggccacagcgtgaccgagggcgtgagcgagaccagcttcctgagcaagagcgaccacagcttcttcaagatcagctacctgaccttcctgcccagcgccgacgagatctacgactgcaaggtggagcactggggcctggacgagcccctgctgaagcactgggagcccgagatccccacccccatgagcgagctgaccgagaccgtggtgtgcgccctgggcctgagcgtgggcctggtgggcatcgtggtgggcaccgtgctgatcatcagaggcctgagaagcgtgggcgccagcagacaccagggccccctgtag

SEQ ID NO: 87759 - DNA, 768 bp, synthetic construct
  misc_feature 1..768: note = Description of Artificial Sequence: Synthetic coding sequence
  source 1..768: mol_type = other DNA
atgatcctgaacaaggccctgatgctgggcgccctggccctgaccaccgtgatgagcccctgcggcggcgaggacatcgtggccgaccacgtggccagctacggcgtgaacctgtaccagagctacggccccagcggccagtacagccacgagttcgacggcgacgaggagttctacgtggacctggagagaaaggagaccgtgtggcagctgcccctgttcagaagattcagaagattcgacccccagttcgccctgaccaacatcgccgtgctgaagcacaacctgaacatcgtgatcaagagaagcaacagcaccgccgccaccaacgaggtgcccgaggtgaccgtgttcagcaagagccccgtgaccctgggccagcccaacaccctgatctgcctggtggacaacatcttcccccccgtggtgaacatcacctggctgagcaacggccacagcgtgaccgagggcgtgagcgagaccagcttcctgagcaagagcgaccacagcttcttcaagatcagctacctgaccttcctgcccagcgacgacgagatctacgactgcaaggtggagcactggggcctggacgagcccctgctgaagcactgggagcccgagatccccacccccatgagcgagctgaccgagaccgtggtgtgcgccctgggcctgagcgtgggcctggtgggcatcgtggtgggcaccgtgctgatcatcagaggcctgagaagcgtgggcgccagcagacaccagggccccctgtag

SEQ ID NO: 87760 - DNA, 75 bp, synthetic construct
  misc_feature 1..75: note = Description of Artificial Sequence: Synthetic coding sequence
  source 1..75: mol_type = other DNA
atgatcctgaacaaggccctgctgctgggcgccctggccctgaccaccgtgatgagcccctgcggcggcgagtag

SEQ ID NO: 87761 - DNA, 768 bp, synthetic construct; identical to SEQ ID NO: 87759
  misc_feature 1..768: note = Description of Artificial Sequence: Synthetic coding sequence
  source 1..768: mol_type = other DNA

SEQ ID NO: 87762 - DNA, 765 bp, synthetic construct; identical to SEQ ID NO: 87757
  misc_feature 1..765: note = Description of Artificial Sequence: Synthetic coding sequence
  source 1..765: mol_type = other DNA

SEQ ID NO: 87763 - DNA, 765 bp, synthetic construct; identical to SEQ ID NO: 87757
  misc_feature 1..765: note = Description of Artificial Sequence: Synthetic coding sequence
  source 1..765: mol_type = other DNA

SEQ ID NO: 87764 - DNA, 765 bp, synthetic construct; identical to SEQ ID NO: 87757
  misc_feature 1..765: note = Description of Artificial Sequence: Synthetic coding sequence
  source 1..765: mol_type = other DNA

SEQ ID NO: 87765 - DNA, 768 bp, synthetic construct; identical to SEQ ID NO: 87758
  misc_feature 1..768: note = Description of Artificial Sequence: Synthetic coding sequence
  source 1..768: mol_type = other DNA

SEQ ID NO: 87766 - DNA, 75 bp, synthetic construct; identical to SEQ ID NO: 87756
  misc_feature 1..75: note = Description of Artificial Sequence: Synthetic coding sequence
  source 1..75: mol_type = other DNA

SEQ ID NO: 87767 - DNA, 75 bp, synthetic construct; identical to SEQ ID NO: 87756
  misc_feature 1..75: note = Description of Artificial Sequence: Synthetic coding sequence
  source 1..75: mol_type = other DNA

SEQ ID NO: 87768 - DNA, 768 bp, synthetic construct; identical to SEQ ID NO: 87759
  misc_feature 1..768: note = Description of Artificial Sequence: Synthetic coding sequence
  source 1..768: mol_type = other DNA

SEQ ID NO: 87769 - DNA, 765 bp, synthetic construct; identical to SEQ ID NO: 87757
  misc_feature 1..765: note = Description of Artificial Sequence: Synthetic coding sequence
  source 1..765: mol_type = other DNA

SEQ ID NO: 87770 - DNA, 765 bp, synthetic construct; identical to SEQ ID NO: 87757
  misc_feature 1..765: note = Description of Artificial Sequence: Synthetic coding sequence
  source 1..765: mol_type = other DNA

SEQ ID NO: 87771 - DNA, 765 bp, synthetic construct; identical to SEQ ID NO: 87757
  misc_feature 1..765: note = Description of Artificial Sequence: Synthetic coding sequence
  source 1..765: mol_type = other DNA

SEQ ID NO: 87772 - DNA, 768 bp, synthetic construct; identical to SEQ ID NO: 87759
  misc_feature 1..768: note = Description of Artificial Sequence: Synthetic coding sequence
  source 1..768: mol_type = other DNA

SEQ ID NO: 87773 - DNA, 765 bp, synthetic construct; identical to SEQ ID NO: 87757
  misc_feature 1..765: note = Description of Artificial Sequence: Synthetic coding sequence
  source 1..765: mol_type = other DNA

SEQ ID NO: 87774 - DNA, 645 bp, synthetic construct
  misc_feature 1..645: note = Description of Artificial Sequence: Synthetic coding sequence
  source 1..645: mol_type = other DNA
atgatcctgaacaaggccctgctgctgggcgccctggccctgaccaccgtgatgagcccctgcggcggcgaggacatcgtggccgaccacgtggccagctgcggcgtgaacctgtaccagttctacggccccagcggccagtacacccacgagttcgacggcgacgagcagttctacgtggacctggagagaaaggagaccgcctggagatggcccgagttcagcaagttcggcggcttcgacccccagggcgccctgagaaacatggccgtggccaagcacaacctgaacatcatgatcaagagatacaacagcaccgccgccaccaacgaggtgcccgaggtgaccgtgttcagcaagagccccgtgaccctgggccagcccaacaccctgatctgcctggtggacaacatcttcccccccgtggtgaacatcacctggctgagcaacggccagagcgtgaccgagggcgtgagcgagaccagcttcctgagcaagagcgaccacagcttcttcaagatcagctacctgaccttcctgcccagcgccgacgagatctacgactgcaaggtggagcactggggcctggaccagcccctgctgaagcactggggcgccagccccagcaccggcgccgaggagtag

SEQ ID NO: 87775 - DNA, 576 bp, synthetic construct
  misc_feature 1..576: note = Description of Artificial Sequence: Synthetic coding sequence
  source 1..576: mol_type = other DNA
atgagcccctgcggcggcgaggacatcgtggccgaccacgtggccagctacggcgtgaacctgtaccagagctacggccccagcggccagtacagccacgagttcgacggcgacgaggagttctacgtggacctggagagaaaggagaccgtgtggcagctgcccctgttcagaagattcagaagattcgacccccagttcgccctgaccaacatcgccgtgctgaagcacaacctgaacatcgtgatcaagagaagcaacagcaccgccgccaccaacgaggtgcccgaggtgaccgtgttcagcaagagccccgtgaccctgggccagcccaacaccctgatctgcctggtggacaacatcttcccccccgtggtgaacatcacctggctgagcaacggccacagcgtgaccgagggcgtgagcgagaccagcttcctgagcaagagcgaccacagcttcttcaagatcagctacctgaccttcctgcccagcgccgacgagatctacgactgcaaggtggagcactggggcctggacgagcccctgctgaagcactggggcctgctgcactag

SEQ ID NO: 87776 - DNA, 441 bp, synthetic construct
  misc_feature 1..441: note = Description of Artificial Sequence: Synthetic coding sequence
  source 1..441: mol_type = other DNA
atgatcctgaacaaggccctgatgctgggcgccctggccctgaccaccgtgatgagcccctgcggcggcgaggacatcgtggccgaccacgtggccagctacggcgtgaacctgtaccagagctacggccccagcggccagtacacccacgagttcgacggcgacgagcagttctacgtggacctgggcagaaaggagaccgtgtggtgcctgcccgtgctgagacagttcagattcgacccccagttcgccctgaccaacatgtgcatcgccatctacagaagcagaagagtggacctgctgcacgacctggccctgttcagcggccccatctaccacatccccttcctgctgcagatgttcctgctgagccccctgctgtgggacctgaactgctacatctgcagcgagctgaccaacgccttcgagctgttcccctag

SEQ ID NO: 87777 - DNA, 762 bp, synthetic construct
  misc_feature 1..762: note = Description of Artificial Sequence: Synthetic coding sequence
  source 1..762: mol_type = other DNA
ggctgcctgggcaagagaatgatcctgaacaaggccctgatgctgggcgccctggccctgaccaccgtgatgagcccctgcggcggcgaggacatcgtggccgaccacgtggccagctacggcgtgaacctgtaccagagctacggccccagcggccagtacacccacgagttcgacggcgacgagcagttctacgtggacctgggcagaaaggagaccgtgtggtgcctgcccgtgctgagacagttcagattcgacccccagttcgccctgaccaacatcgccgtgctgaagcacaacctgaacagcctgatcaagagaagcaacagcaccgccgccaccaacgaggtgcccgaggtgaccgtgttcagcaagagccccgtgaccctgggccagcccaacatcctgatctgcctggtggacaacatcttcccccccgtggtgaacatcacctggctgagcaacggccacagcgtgaccgagggcgtgagcgagaccagcttcctgagcaagagcgaccacagcttcttcaagatcagctacctgaccctgctgcccagcgccgaggagagctacgactgcaaggtggagcactggggcctggacaagcccctgctgaagcactggggcaaggacgagttccaccacttcctgatgctgagctgcctgagcagcagcgagctgcccgccttctacagctacatccccaagctggtgttccacaccagctgggtgagcttcttcctgatcttcttcttctag

SEQ ID NO: 87778 - DNA, 603 bp, synthetic construct
  misc_feature 1..603: note = Description of Artificial Sequence: Synthetic coding sequence
  source 1..603: mol_type = other DNA
atgagcccctgcggcggcgaggacatcgtggccgaccacgtggccagctacggcgtgaacctgtaccagagctacggccccagcggccagtacagccacgagttcgacggcgacgaggagttctacgtggacctggagagaaaggagaccgtgtggcagctgcccctgttcagaagattcagaagattcgacccccagttcgccctgaccaacatcgccgtgctgaagcacaacctgaacatcgtgatcaagagaagcaacagcaccgccgccaccaacgaggtgcccgaggtgaccgtgttcagcaagagccccgtgaccctgggccagcccaacaccctgatctgcctggtggacaacatcttcccccccgtggtgaacatcacctggctgagcaacggccacagcgtgaccgagggcgtgagcgagaccagcttcctgagcaagagcgaccacagcttcttcaagatcagctacctgaccttcctgcccagcgccgacgagatctacgactgcaaggtggagcactggggcctggacgagcccctgctgaagcactgggagagccagagcagagagagcgaggagagcaccaagagctag

SEQ ID NO: 87779 - DNA, 582 bp, synthetic construct
  misc_feature 1..582: note = Description of Artificial Sequence: Synthetic coding sequence
  source 1..582: mol_type = other DNA
atgagcccctgcggcggcgaggacatcgtggccgaccacgtggccagctacggcgtgaacctgtaccagagctacggccccagcggccagtacacccacgagttcgacggcgacgagcagttctacgtggacctgggcagaaaggagaccgtgtggtgcctgcccgtgctgagacagttcagattcgacccccagttcgccctgaccaacatcgccgtgctgaagcacaacctgaacagcctgatcaagagaagcaacagcaccgccgccaccaacgaggtgcccgaggtgaccgtgttcagcaagagccccgtgaccctgggccagcccaacatcctgatctgcctggtggacaacatcttcccccccgtggtgaacatcacctggctgagcaacggccacagcgtgaccgagggcgtgagcgagaccagcttcctgagcaagagcgaccacagcttcttcaagatcagctacctgaccctgctgcccagcgccgaggagagctacgactgcaaggtggagcactggggcctggacaagcccctgctgaagcactgggtgcacggcttcctgagcttctag

SEQ ID NO: 87780 - DNA, 606 bp, synthetic construct
  misc_feature 1..606: note = Description of Artificial Sequence: Synthetic coding sequence
  source 1..606: mol_type = other DNA
atgagcccctgcggcggcgaggacatcgtggccgaccacgtggccagctacggcgtgaacctgtaccagagctacggccccagcggccagtacagccacgagttcgacggcgacgaggagttctacgtggacctggagagaaaggagaccgtgtggcagctgcccctgttcagaagattcagaagattcgacccccagttcgccctgaccaacatcgccgtgctgaagcacaacctgaacatcgtgatcaagagaagcaacagcaccgccgccaccaacgaggtgcccgaggtgaccgtgttcagcaagagccccgtgaccctgggccagcccaacaccctgatctgcctggtggacaacatcttcccccccgtggtgaacatcacctggctgagcaacggccacagcgtgaccgagggcgtgagcgagaccagcttcctgagcaagagcgaccacagcttcttcaagatcagctacctgaccttcctgcccagcgccgacgagatctacgactgcaaggtggagcactggggcctggacgagcccctgctgaagcactggggcatccaggccgaggagggccagagaagaaagaagctgggctag

SEQ ID NO: 87781 - DNA, 258 bp, synthetic construct
  misc_feature 1..258: note = Description of Artificial Sequence: Synthetic coding sequence
  source 1..258: mol_type = other DNA
aacaccctgatctgcctggtggacaacatcttcccccccgtggtgaacatcacctggctgagcaacggccacagcgtgaccgagggcgtgagcgagaccagcttcctgagcaagagcgaccacagcttcttcaagatcagctacctgaccttcctgcccagcgccgacgagatctacgactgcaaggtggagcactggggcctggacgagcccctgctgaagcactggggcaaggacttcatgagcttcttctactag

SEQ ID NO: 87782 - DNA, 390 bp, synthetic construct
  misc_feature 1..390: note = Description of Artificial Sequence: Synthetic coding sequence
  source 1..390: mol_type = other DNA
ggctgcctgggcaagagaatgatcctgaacaaggccctgatgctgggcgccctggccctgaccaccgtgatgagcccctgcggcggcgaggacatcgtggccgaccacgtggccagctacggcgtgaacctgtaccagagctacggccccagcggccagtacagccacgagttcgacggcgacgaggagttctacgtggacctggagagaaaggagaccgtgtggcagctgcccctgttcagaagattcagaagattcgacccccagttcgccctgaccaacatcgccgtgctgaagcacaacctgaacatcgtgatcaagagaagcaacagcaccgccgccaccaacgaggtgcccgaggtgaccgtgttcagcaagagccccgtgtag

SEQ ID NO: 87783 - DNA, 768 bp, synthetic construct
  misc_feature 1..768: note = Description of Artificial Sequence: Synthetic coding sequence
  source 1..768: mol_type = other DNA
atgatcctgaacaaggccctgctgctgggcgccctggccctgaccgccgtgatgagcccctgcggcggcgaggacatcgtggccgaccacgtggccagctacggcgtgaacttctaccagagccacggccccagcggccagtacacccacgagttcgacggcgacgaggagttctacgtggacctggagaccaaggagaccgtgtggcagctgcccatgttcagcaagttcatcagcttcgacccccagagcgccctgagaaacatggccgtgggcaagcacaccctggagttcatgatgagacagagcaacagcaccgccgccaccaacgaggtgcccgaggtgaccgtgttcagcaagttccccgtgaccctgggccagcccaacaccctgatctgcctggtggacaacatcttcccccccgtggtgaacatcacctggctgagcaacggccacagcgtgaccgagggcgtgagcgagaccagcttcctgagcaagagcgaccacagcttcttcaagatcagctacctgaccttcctgcccagcgccgacgagatctacgactgcaaggtggagcactggggcctggacgagcccctgctgaagcactgggagcccgagatccccgcccccatgagcgagctgaccgagaccctggtgtgcgccctgggcctgagcgtgggcctgatgggcatcgtggtgggcaccgtgttcatcatccagggcctgagaagcgtggacgccagcagacaccagggcctgctgtag

SEQ ID NO: 87784 - DNA, 768 bp, synthetic construct
  misc_feature 1..768: note = Description of Artificial Sequence: Synthetic coding sequence
  source 1..768: mol_type = other DNA
atgatcctgaacaaggccctgctgctgggcgccctggccctgaccgccgtgatgagcccctgcggcggcgaggacatcgtggccgaccacgtggccagctacggcgtgaacttctaccagagccacggccccagcggccagtacacccacgagttcgacggcgacgaggagttctacgtggacctggagaccaaggagaccgtgtggcagctgcccatgttcagcaagttcatcagcttcgacccccagagcgccctgagaaacatggccgtgggcaagcacaccctggagttcatgatgagacagagcaacagcaccgccgccaccaacgaggtgcccgaggtgaccgtgttcagcaagttccccgtgaccctgggccagcccaacaccctgatctgcctggtggacaacatcttcccccccgtggtgaacatcacctggctgagcaacggccacagcgtgaccgagggcgtgagcgagaccagcttcctgagcaagagcgaccacagcttcttcaagatcagctacctgaccttcctgcccagcgccgacgagatctacgactgcaaggtggagcactggggcctggacgagcccctgctgaagcactgggagcccgagatccccgcccccatgagcgagctgaccgagaccctggtgtgcgccctgggcctgagcgtgggcctgatgggcatcgtggtgggcaccgtgttcatcatccagggcctgagaagcgtgggcgccagcagacaccagggcctgctgtag

SEQ ID NO: 87785 - DNA, 768 bp, synthetic construct
  misc_feature 1..768: note = Description of Artificial Sequence: Synthetic coding sequence
  source 1..768: mol_type = other DNA
atgatcctgaacaaggccctgctgctgggcgccctggccctgaccgccgtgatgagcccctgcggcggcgaggacatcgtggccgaccacgtggccagctacggcgtgaacttctaccagagccacggccccagcggccagtacacccacgagttcgacggcgacgaggagttctacgtggacctggagaccaaggagaccgtgtggcagctgcccatgttcagcaagttcatcagcttcgacccccagagcgccctgagaaacatggccgtgggcaagcacaccctggagttcatgatgggccagagcaacagcaccgccgccaccaacgaggtgcccgaggtgaccgtgttcagcaagttccccgtgaccctgggccagcccaacaccctgatctgcctggtggacaacatcttcccccccgtggtgaacatcacctggctgagcaacggccacagcgtgaccgagggcgtgagcgagaccagcttcctgagcaagagcgaccacagcttcttcaagatcagctacctgaccttcctgcccagcgccgacgagatctacgactgcaaggtggagcactggggcctggacgagcccctgctgaagcactgggagcccgagatccccgcccccatgagcgagctgaccgagaccctggtgtgcgccctgggcctgagcgtgggcctgatgggcatcgtggtgggcaccgtgttcatcatccagggcctgagaagcgtgggcgccagcagacaccagggcctgctgtag

SEQ ID NO: 87786 - DNA, 768 bp, synthetic construct; identical to SEQ ID NO: 87784
  misc_feature 1..768: note = Description of Artificial Sequence: Synthetic coding sequence
  source 1..768: mol_type = other DNA

SEQ ID NO: 87787 - DNA, 768 bp, synthetic construct
  misc_feature 1..768: note = Description of Artificial Sequence: Synthetic coding sequence
  source 1..768: mol_type = other DNA
atgatcctgaacaaggccctgctgctgggcgccctggccctgaccgccgtgatgagcccctgcggcggcgaggacatcgtggccgaccacgtggccagctacggcgtgaacttctaccagagccacggccccagcggccagtacacccacgagttcgacggcgacgaggagttctacgtggacctggagaccaaggagaccgtgtggcagctgcccatgttcagcaagttcatcagcttcgacccccagagcgccctgagaaacatggccgtgggcaagcacaccctggagttcatgatgagacagagcaacagcaccgccgccaccaacgaggtgcccgaggtgaccgtgttcagcaagttccccgtgaccctgggccagcccaacaccctgatctgcctggtggacaacatcttcccccccgtggtgaacatcacctggctgagcaacggccacagcgtgaccgagggcgtgagcgagaccagcttcctgagcaagagcgaccacagcttcttcaagatcagctacctgaccttcctgcccagcgccgacgagatctacgactgcaaggtggagcactggggcctggacgagcccctgctgaagcactgggagcccgagatccccgcccccatgagcgagctgaccgagaccctggtgtgcgccctgggcctgagcgccggcctgatgggcatcgtggtgggcaccgtgttcatcatccagggcctgagaagcgtgggcgccagcagacaccagggcctgctgtag

SEQ ID NO: 87788 - DNA, 768 bp, synthetic construct; identical to SEQ ID NO: 87784
  misc_feature 1..768: note = Description of Artificial Sequence: Synthetic coding sequence
  source 1..768: mol_type = other DNA

SEQ ID NO: 87789 - DNA, 768 bp, synthetic construct; identical to SEQ ID NO: 87784
  misc_feature 1..768: note = Description of Artificial Sequence: Synthetic coding sequence
  source 1..768: mol_type = other DNA

SEQ ID NO: 87790 - DNA, 768 bp, synthetic construct; identical to SEQ ID NO: 87787
  misc_feature 1..768: note = Description of Artificial Sequence: Synthetic coding sequence
  source 1..768: mol_type = other DNA

SEQ ID NO: 87791 - DNA, 768 bp, synthetic construct; identical to SEQ ID NO: 87784
  misc_feature 1..768: note = Description of Artificial Sequence: Synthetic coding sequence
  source 1..768: mol_type = other DNA

SEQ ID NO: 87792 - DNA, 249 bp, synthetic construct
  misc_feature 1..249: note = Description of Artificial Sequence: Synthetic coding sequence
  source 1..249: mol_type = other DNA
gaccacgtggccagctacggcgtgaacttctaccagagccacggccccagcggccagtacacccacgagttcgacggcgacgaggagttctacgtggacctggagaccaaggagaccgtgtggcagctgcccatgttcagcaagttcatcagcttcgacccccagagcgccctgagaaacatggccgtgggcaagcacaccctggagttcatgatgagacagagcaacagcaccgccgccaccaactag

SEQ ID NO: 87793 - DNA, 768 bp, synthetic construct; identical to SEQ ID NO: 87784
  misc_feature 1..768: note = Description of Artificial Sequence: Synthetic coding sequence
  source 1..768: mol_type = other DNA

SEQ ID NO: 87794 - DNA, 84 bp, synthetic construct
  misc_feature 1..84: note = Description of Artificial Sequence: Synthetic coding sequence
  source 1..84: mol_type = other DNA
atgatcctgaacaaggccctgctgctgggcgccctggccctgaccgccgtgatgagcccctgcggcggcgaggacatcgtgtag

SEQ ID NO: 87795 - DNA, 810 bp, synthetic construct
  misc_feature 1..810: note = Description of Artificial Sequence: Synthetic coding sequence
  source 1..810: mol_type = other DNA
atgagctggaagaaggccctgagaatccccggcgacctgagagtggccaccgtgaccctgatgctggccatgctgagcagcctgctggccgagggcagagacagccccgaggacttcgtgttccagttcaagggcatgtgctacttcaccaacggcaccgagagagtgagactggtgaccagatacatctacaacagagaggagtacgccagattcgacagcgacgtgggcgtgtacagagccgtgaccccccagggcagacccgacgccgagtactggaacagccagaaggaggtgctggagggcaccagagccgagctggacaccgtgtgcagacacaactacgaggtggccttcagaggcatcctgcagagaagagtggagcccaccgtgaccatcagccccagcagaaccgaggccctgaaccaccacaacctgctggtgtgcagcgtgaccgacttctaccccggccagatcaaggtgagatggttcagaaacgaccaggaggagaccgccggcgtggtgagcacccccctgatcagaaacggcgactggaccttccagatcctggtgatgctggagatgaccccccagagaggcgacgtgtacacctgccacgtggagcaccccagcctgcagagccccatcaccgtggagtggagagcccagagcgagagcgcccagagcaagatgctgagcggcgtgggcggcttcgtgctgggcctgatcttcctgggcctgggcctgatcatcagacagagaagccagaagggcccccagggccccccccccgccggcctgctgcactag

SEQ ID NO: 87796 - DNA, 786 bp, synthetic construct
  misc_feature 1..786: note = Description of Artificial Sequence: Synthetic coding sequence
  source 1..786: mol_type = other DNA
atgagctggaagaaggccctgagaatccccggcggcctgagagccgccaccgtgaccctgatgctgagcatgctgagcacccccgtggccgagggcagagacagccccgaggacttcgtgtaccagttcaagggcatgtgctacttcaccaacggcaccgagagagtgagactggtgagcagaagcatctacaacagagaggagatcgtgagattcgacagcgacgtgggcgagttcagagccgtgaccctgctgggcctgcccgccgccgagtactggaacagccagaaggacatcctggagagaaagagagccgccgtggacagagtgtgcagacacaactaccagctggagctgagaaccaccctgcagagaagagtggagcccaccgtgaccatcagccccagcagaaccgaggccctgaaccaccacaacctgctggtgtgcagcgtgaccgacttctaccccgcccagatcaaggtgagatggttcagaaacgaccaggaggagaccgccggcgtggtgagcacccccctgatcagaaacggcgactggaccttccagatcctggtgatgctggagatgaccccccagagaggcgacgtgtacacctgccacgtggagcaccccagcctgcagagccccatcaccgtggagtggagagcccagagcgagagcgcccagagcaagatgctgagcggcatcggcggcttcgtgctgggcctgatcttcctgggcctgggcctgatcatccaccacagaagccagaagggcctgctgcactag

SEQ ID NO: 87797 - DNA, 786 bp, synthetic construct; identical to SEQ ID NO: 87796
  misc_feature 1..786: note = Description of Artificial Sequence: Synthetic coding sequence
  source 1..786: mol_type = other DNA

SEQ ID NO: 87798 - DNA, 810 bp, synthetic construct
  misc_feature 1..810: note = Description of Artificial Sequence: Synthetic coding sequence
  source 1..810: mol_type = other DNA
atgagctggaagaaggccctgagaatccccggcggcctgagagccgccaccgtgaccctgatgctggccatgctgagcacccccgtggccgagggcagagacagccccgaggacttcgtgtaccagttcaaggccatgtgctacttcaccaacggcaccgagagagtgagatacgtgaccagatacatctacaacagagaggagtacgccagattcgacagcgacgtggaggtgtacagagccgtgacccccctgggcccccccgacgccgagtactggaacagccagaaggaggtgctggagagaaccagagccgagctggacaccgtgtgcagacacaactaccagctggagctgagaaccaccctgcagagaagagtggagcccaccgtgaccatcagccccagcagaaccgaggccctgaaccaccacaacctgctggtgtgcagcgtgaccgacttctaccccgcccagatcaaggtgagatggttcagaaacgaccaggaggagaccaccggcgtggtgagcacccccctgatcagaaacggcgactggaccttccagatcctggtgatgctggagatgaccccccagcacggcgacgtgtacacctgccacgtggagcaccccagcctgcagaaccccatcaccgtggagtggagagcccagagcgagagcgcccagagcaagatgctgagcggcatcggcggcttcgtgctgggcctgatcttcctgggcctgggcctgatcatccaccacagaagccagaagggcccccagggccccccccccgccggcctgctgcactag

SEQ ID NO: 87799 - DNA, 810 bp, synthetic construct
  misc_feature 1..810: note = Description of Artificial Sequence: Synthetic coding sequence
  source 1..810: mol_type = other DNA
atgagctggaagaaggccctgagaatccccggcggcctgagagtggccaccgtgaccctgatgctggccatgctgagcacccccgtggccgagggcagagacagccccgaggacttcgtgtaccagttcaagggcatgtgctacttcaccaacggcaccgagagagtgagactggtgaccagatacatctacaacagagaggagtacgccagattcgacagcgacgtgggcgtgtacagagccgtgacccccctgggcccccccgacgccgagtactggaacagccagaaggaggtgctggagagaaccagagccgagctggacaccgtgtgcagacacaactaccagctggagctgagaaccaccctgcagagaagagtggagcccaccgtgaccatcagccccagcagaaccgaggccctgaaccaccacaacctgctggtgtgcagcgtgaccgacttctaccccgcccagatcaaggtgagatggttcagaaacgaccaggaggagaccaccggcgtggtgagcacccccctgatcagaaacggcgactggaccttccagatcctggtgatgctggagatgaccccccagagaggcgacgtgtacacctgccacgtggagcaccccagcctgcagaaccccatcatcgtggagtggagagcccagagcgagagcgcccagagcaagatgctgagcggcatcggcggcttcgtgctgggcctgatcttcctgggcctgggcctgatcatccaccacagaagccagaagggcccccagggccccccccccgccggcctgctgcactag

SEQ ID NO: 87800 - DNA, 675 bp, synthetic construct
  misc_feature 1..675: note = Description of Artificial Sequence: Synthetic coding sequence
  source 1..675: mol_type = other DNA
atgagctggaagaaggccctgagaatccccggcgacctgagagtggccaccgtgaccctgatgctggccatgctgagcagcctgctggccgagggcagagacagccccgaggacttcgtgttccagttcaagggcatgtgctacttcaccaacggcaccgagagagtgagactggtgaccagatacatctacaacagagaggagtacgccagattcgacagcgacgtgggcgtgtacagagccgtgaccccccagggcagacccgacgccgagtactggaacagccagaaggaggtgctggagggcaccagagccgagctggacaccgtgtgcagacacaactacgaggtggccttcagaggcatcctgcagagaagagtggagcccaccgtgaccatcagccccagcagaaccgaggccctgaaccaccacaacctgctggtgtgcagcgtgaccgacttctaccccggccagatcaaggtgagatggttcagaaacgaccaggaggagaccgccggcgtggtgagcacccccctgatcagaaacggcgactggaccttccagatcctggtgatgctggagatgaccccccagagaggcgacgtgtacacctgccacgtggagcaccccagcctgcagagccccatcaccgtggagtggagactgctgcactag

SEQ ID NO: 87801 - DNA, 786 bp, synthetic construct
  misc_feature 1..786: note = Description of Artificial Sequence: Synthetic coding sequence
  source 1..786: mol_type = other DNA
atgagctggaagaaggccctgagaatccccggcgacctgagagtggccaccgtgaccctgatgctggccatgctgagcagcctgctggccgagggcagagacagccccgaggacttcgtgttccagttcaagggcatgtgctacttcaccaacggcaccgagagagtgagactggtgaccagatacatctacaacagagaggagtacgccagattcgacagcgacgtgggcgtgtacagagccgtgaccccccagggcagacccgacgccgagtactggaacagccagaaggaggtgctggagggcaccagagccgagctggacaccgtgtgcagacacaactacgaggtggccttcagaggcatcctgcagagaagagtggagcccaccgtgaccatcagccccagcagaaccgaggccctgaaccaccacaacctgctggtgtgcagcgtgaccgacttctaccccggccagatcaaggtgagatggttcagaaacgaccaggaggagaccgccggcgtggtgagcacccccctgatcagaaacggcgactggaccttccagatcctggtgatgctggagatgaccccccagagaggcgacgtgtacacctgccacgtggagcaccccagcctgcagagccccatcaccgtggagtggagagcccagagcgagagcgcccagagcaagatgctgagcggcgtgggcggcttcgtgctgggcctgatcttcctgggcctgggcctgatcatcagacagagaagccagaagggcctgctgcactag

SEQ ID NO: 87802 - DNA, 786 bp, synthetic construct
  misc_feature 1..786: note = Description of Artificial Sequence: Synthetic coding sequence
  source 1..786: mol_type = other DNA
atgagctggaagaaggccctgagaatccccggcggcctgagagccgccaccgtgaccctgatgctggccatgctgagcacccccgtggccgagggcagagacagccccgaggacttcgtgtaccagttcaaggccatgtgctacttcaccaacggcaccgagagagtgagatacgtgaccagatacatctacaacagagaggagtacgccagattcgacagcgacgtggaggtgtacagagccgtgacccccctgggcccccccgacgccgagtactggaacagccagaaggaggtgctggagagaaccagagccgagctggacaccgtgtgcagacacaactaccagctggagctgagaaccaccctgcagagaagagtggagcccaccgtgaccatcagccccagcagaaccgaggccctgaaccaccacaacctgctggtgtgcagcgtgaccgacttctaccccgcccagatcaaggtgagatggttcagaaacgaccaggaggagaccaccggcgtggtgagcacccccctgatcagaaacggcgactggaccttccagatcctggtgatgctggagatgaccccccagcacggcgacgtgtacacctgccacgtggagcaccccagcctgcagaaccccatcaccgtggagtggagagcccagagcgagagcgcccagagcaagatgctgagcggcatcggcggcttcgtgctgggcctgatcttcctgggcctgggcctgatcatccaccacagaagccagaagggcctgctgcactag

SEQ ID NO: 87803 - DNA, 675 bp, synthetic construct
  misc_feature 1..675: note = Description of Artificial Sequence: Synthetic coding sequence
  source 1..675: mol_type = other DNA
atgagctggaagaaggccctgagaatccccggcggcctgagagccgccaccgtgaccctgatgctgagcatgctgagcacccccgtggccgagggcagagacagccccgaggacttcgtgtaccagttcaagggcatgtgctacttcaccaacggcaccgagagagtgagactggtgagcagaagcatctacaacagagaggagatcgtgagattcgacagcgacgtgggcgagttcagagccgtgaccctgctgggcctgcccgccgccgagtactggaacagccagaaggacatcctggagagaaagagagccgccgtggacagagtgtgcagacacaactaccagctggagctgagaaccaccctgcagagaagagtggagcccaccgtgaccatcagccccagcagaaccgaggccctgaaccaccacaacctgctggtgtgcagcgtgaccgacttctaccccgcccagatcaaggtgagatggttcagaaacgaccaggaggagaccgccggcgtggtgagcacccccctgatcagaaacggcgactggaccttccagatcctggtgatgctggagatgaccccccagagaggcgacgtgtacacctgccacgtggagcaccccagcctgcagagccccatcaccgtggagtggagactgctgcactag

SEQ ID NO: 87804 - DNA, 786 bp, synthetic construct; identical to SEQ ID NO: 87802
  misc_feature 1..786: note = Description of Artificial Sequence: Synthetic coding sequence
  source 1..786: mol_type = other DNA

SEQ ID NO: 87805 - DNA, 786 bp, synthetic construct
  misc_feature 1..786: note = Description of Artificial Sequence: Synthetic coding sequence
  source 1..786: mol_type = other DNA
atgagctggaagaaggccctgagaatccccggcggcctgagagtggccaccgtgaccctgatgctggccatgctgagcacccccgtggccgagggcagagacagccccgaggacttcgtgtaccagttcaagggcatgtgctacttcaccaacggcaccgagagagtgagaggcgtgaccagatacatctacaacagagaggagtacgccagattcgacagcgacgtgggcgtgtacagagccgtgacccccctgggcccccccgccgccgagtactggaacagccagaaggaggtgctggagagaaccagagccgagctggacaccgtgtgcagacacaactaccagctggagctgagaaccaccctgcagagaagagtggagcccaccgtgaccatcagccccagcagaaccgaggccctgaaccaccacaacctgctggtgtgcagcgtgaccgacttctaccccgcccagatcaaggtgagatggttcagaaacgaccaggaggagaccaccggcgtggtgagcacccccctgatcagaaacggcgactggaccttccagatcctggtgatgctggagatgaccccccagagaggcgacgtgtacacctgccacgtggagcaccccagcctgcagaaccccatcatcgtggagtggagagcccagagcgagagcgcccagagcaagatgctgagcggcatcggcggcttcgtgctgggcctgatcttcctgggcctgggcctgatcatccaccacagaagccagaagggcctgctgcactag

SEQ ID NO: 87806 - DNA, 675 bp, synthetic construct
  misc_feature 1..675: note = Description of Artificial Sequence: Synthetic coding sequence
  source 1..675: mol_type = other DNA
atgagctggaagaaggccctgagaatccccggcggcctgagagccgccaccgtgaccctgatgctgagcatgctgagcacccccgtggccgagggcagagacagccccgaggacttcgtgtaccagttcaagggcatgtgctacttcaccaacggcaccgagagagtgagactggtgagcagaagcatctacaacagagaggagatcgtgagattcgacagcgacgtgggcgagttcagagccgtgaccctgctgggcctgcccgccgccgagtactggaacagccagaaggacatcctggagagaaagagagccgccgtggacagagtgtgcagacacaactaccagctggagctgagaaccaccctgcagagaagagtggagcccaccgtgaccatcagccccagcagaaccgaggccctgaaccaccacaacctgctggtgtgcagcgtgaccgacttctaccccgcccagatcaaggtgagatggttcagaaacggccaggaggagaccgccggcgtggtgagcacccccctgatcagaaacggcgactggaccttccagatcctggtgatgctggagatgaccccccagagaggcgacgtgtacacctgccacgtggagcaccccagcctgcagagccccatcaccgtggagtggagactgctgcactag

SEQ ID NO: 87807 - DNA, 786 bp, synthetic construct
  misc_feature 1..786: note = Description of Artificial Sequence: Synthetic coding sequence
  source 1..786: mol_type = other DNA
atgagctggaagaaggccctgagaatccccggcggcctgagagtggccaccgtgaccctgatgctggccatgctgagcacccccgtggccgagggcagagacagccccgaggacttcgtgtaccagttcaagggcatgtgctacttcaccaacggcaccgagagagtgagactggtgaccagatacatctacaacagagaggagtacgccagattcgacagcgacgtgggcgtgtacagagccgtgacccccctgggcccccccgacgccgagtactggaacagccagaaggaggtgctggagagaaccagagccgagctggacaccgtgtgcagacacaactaccagctggagctgagaaccaccctgcagagaagagtggagcccaccgtgaccatcagccccagcagaaccgaggccctgaaccaccacaacctgctggtgtgcagcgtgaccgacttctaccccgcccagatcaaggtgagatggttcagaaacgaccaggaggagaccaccggcgtggtgagcacccccctgatcagaaacggcgactggaccttccagatcctggtgatgctggagatgaccccccagagaggcgacgtgtacacctgccacgtggagcaccccagcctgcagaaccccatcatcgtggagtggagagcccagagcgagagcgcccagagcaagatgctgagcggcatcggcggcttcgtgctgggcctgatcttcctgggcctgggcctgatcatccaccacagaagccagaagggcctgctgcactag

SEQ ID NO: 87808 - DNA, 786 bp, synthetic construct
  misc_feature 1..786: note = Description of Artificial Sequence: Synthetic coding sequence
  source 1..786: mol_type = other DNA
atgagctggaagaaggccctgagaatccccggcggcctgagagccgccaccgtgaccctgatgctgagcatgctgagcacccccgtggccgagggcagagacagccccgaggacttcgtgtaccagttcaagggcatgtgctacttcaccaacggcaccgagagagtgagactggtgagcagaagcatctacaacagagaggagatcgtgagattcgacagcgacgtgggcgagttcagagccgtgaccctgctgggcctgcccgccgccgagtactggaacagccagaaggacatcctggagagaaagagagccgccgtggacagagtgtgcagacacaactaccagctggagctgagaaccaccctgcagagaagagtggagcccaccgtgaccatcagccccagcagaaccgaggccctgaaccaccacaacctgctggtgtgcagcgtgaccgacttctaccccgcccagatcaaggtgagatggttcagaaacggccaggaggagaccgccggcgtggtgagcacccccctgatcagaaacggcgactggaccttccagatcctggtgatgctggagatgaccccccagagaggcgacgtgtacacctgccacgtggagcaccccagcctgcagagccccatcaccgtggagtggagagcccagagcgagagcgcccagagcaagatgctgagcggcatcggcggcttcgtgctgggcctgatcttcctgggcctgggcctgatcatccaccacagaagccagaagggcctgctgcactag

SEQ ID NO: 87809 - DNA, 810 bp, synthetic construct
  misc_feature 1..810: note = Description of Artificial Sequence: Synthetic coding sequence
  source 1..810: mol_type = other DNA
atgagctggaagaaggccctgagaatccccggcggcctgagagccgccaccgtgaccctgatgctgagcatgctgagcacccccgtggccgagggcagagacagccccgaggacttcgtgtaccagttcaagggcatgtgctacttcaccaacggcaccgagagagtgagactggtgagcagaagcatctacaacagagaggagatcgtgagattcgacagcgacgtgggcgagttcagagccgtgaccctgctgggcctgcccgccgccgagtactggaacagccagaaggacatcctggagagaaagagagccgccgtggacagagtgtgcagacacaactaccagctggagctgagaaccaccctgcagagaagagtggagcccaccgtgaccatcagccccagcagaaccgaggccctgaaccaccacaacctgctggtgtgcagcgtgaccgacttctaccccgcccagatcaaggtgagatggttcagaaacggccaggaggagaccgccggcgtggtgagcacccccctgatcagaaacggcgactggaccttccagatcctggtgatgctggagatgaccccccagagaggcgacgtgtacacctgccacgtggagcaccccagcctgcagagccccatcaccgtggagtggagagcccagagcgagagcgcccagagcaagatgctgagcggcatcggcggcttcgtgctgggcctgatcttcctgggcctgggcctgatcatccaccacagaagccagaagggcccccagggccccccccccgccggcctgctgcactag

SEQ ID NO: 87810 - DNA, 786 bp, synthetic construct; identical to SEQ ID NO: 87807
  misc_feature 1..786: note = Description of Artificial Sequence: Synthetic coding sequence
  source 1..786: mol_type = other DNA

SEQ ID NO: 87811 - DNA, 675 bp, synthetic construct
  misc_feature 1..675: note = Description of Artificial Sequence: Synthetic coding sequence
  source 1..675: mol_type = other DNA
atgagctggaagaaggccctgagaatccccggcggcctgagagccgccaccgtgaccctgatgctggccatgctgagcacccccgtggccgagggcagagacagccccgaggacttcgtgtaccagttcaaggccatgtgctacttcaccaacggcaccgagagagtgagatacgtgaccagatacatctacaacagagaggagtacgccagattcgacagcgacgtggaggtgtacagagccgtgacccccctgggcccccccgacgccgagtactggaacagccagaaggaggtgctggagagaaccagagccgagctggacaccgtgtgcagacacaactaccagctggagctgagaaccaccctgcagagaagagtggagcccaccgtgaccatcagccccagcagaaccgaggccctgaaccaccacaacctgctggtgtgcagcgtgaccgacttctaccccgcccagatcaaggtgagatggttcagaaacgaccaggaggagaccaccggcgtggtgagcacccccctgatcagaaacggcgactggaccttccagatcctggtgatgctggagatgaccccccagcacggcgacgtgtacacctgccacgtggagcaccccagcctgcagaaccccatcaccgtggagtggagactgctgcactag

SEQ ID NO: 87812 - DNA, 786 bp, synthetic construct; identical to SEQ ID NO: 87808
  misc_feature 1..786: note = Description of Artificial Sequence: Synthetic coding sequence
  source 1..786: mol_type = other DNA

SEQ ID NO: 87813 - DNA, 405 bp, synthetic construct
  misc_feature 1..405: note = Description of Artificial Sequence: Synthetic coding sequence
  source 1..405: mol_type = other DNA
atgagctggaagaaggccctgagaatccccggcggcctgagagccgccaccgtgaccctgatgctgagcatgctgagcacccccgtggccgagggcagagacagccccgtggagcccaccgtgaccatcagccccagcagaaccgaggccctgaaccaccacaacctgctggtgtgcagcgtgaccgacttctaccccgcccagatcaaggtgagatggttcagaaacggccaggaggagaccgccggcgtggtgagcacccccctgatcagaaacggcgactggaccttccagatcctggtgatgctggagatgaccccccagagaggcgacgtgtacacctgccacgtggagcaccccagcctgcagagccccatcaccgtggagtggagactgctgcactag

SEQ ID NO: 87814 - DNA, 405 bp, synthetic construct
  misc_feature 1..405: note = Description of Artificial Sequence: Synthetic coding sequence
  source 1..405: mol_type = other DNA
atgagctggaagaaggccctgagaatccccggcggcctgagagtggccaccgtgaccctgatgctggccatgctgagcacccccgtggccgagggcagagacagccccgtggagcccaccgtgaccatcagccccagcagaaccgaggccctgaaccaccacaacctgctggtgtgcagcgtgaccgacttctaccccgcccagatcaaggtgagatggttcagaaacgaccaggaggagaccaccggcgtggtgagcacccccctgatcagaaacggcgactggaccttccagatcctggtgatgctggagatgaccccccagagaggcgacgtgtacacctgccacgtggagcaccccagcctgcagaaccccatcatcgtggagtggagactgctgcactag

SEQ ID NO: 87815 - DNA, 435 bp, synthetic construct
  misc_feature 1..435: note = Description of Artificial Sequence: Synthetic coding sequence
  source 1..435: mol_type = other DNA
atgagctggaagaaggccctgagaatccccggcggcctgagagtggccaccgtgacccccctgggcccccccgacgccgagtactggaacagccagaaggaggtgctggagagaaccagagccgagctggacaccgtgtgcagacacaactaccagctggagctgagaaccaccctgcagagaagagtggagcccaccgtgaccatcagccccagcagaaccgaggccctgaaccaccacaacctgctggtgtgcagcgtgaccgacttctaccccgcccagatcaaggtgagatggttcagaaacgaccaggaggagaccaccggcgtggtgagcacccccctgatcagaaacggcgactggaccttccagatcctggtgatgctggagatgaccccccagagaggcgacgtgtacacctgccacgtggagtag

SEQ ID NO: 87816 - DNA, 405 bp, synthetic construct
  misc_feature 1..405: note = Description of Artificial Sequence: Synthetic coding sequence
  source 1..405: mol_type = other DNA
atgagctggaagaaggccctgagaatccccggcggcctgagagccgccaccgtgaccctgatgctggccatgctgagcacccccgtggccgagggcagagacagccccgtggagcccaccgtgaccatcagccccagcagaaccgaggccctgaaccaccacaacctgctggtgtgcagcgtgaccgacttctaccccgcccagatcaaggtgagatggttcagaaacgaccaggaggagaccaccggcgtggtgagcacccccctgatcagaaacggcgactggaccttccagatcctggtgatgctggagatgaccccccagcacggcgacgtgtacacctgccacgtggagcaccccagcctgcagaaccccatcaccgtggagtggagactgctgcactag

SEQ ID NO: 87817 - DNA, 786 bp, synthetic construct; identical to SEQ ID NO: 87801
  misc_feature 1..786: note = Description of Artificial Sequence: Synthetic coding sequence
  source 1..786: mol_type = other DNA

SEQ ID NO: 87818 - DNA, 675 bp, synthetic construct
  misc_feature 1..675: note = Description of Artificial Sequence: Synthetic coding sequence
  source 1..675: mol_type = other DNA
atgagctggaagaaggccctgagaatccccggcggcctgagagtggccaccgtgaccctgatgctggccatgctgagcacccccgtggccgagggcagagacagccccgaggacttcgtgtaccagttcaagggcatgtgctacttcaccaacggcaccgagagagtgagactggtgaccagatacatctacaacagagaggagtacgccagattcgacagcgacgtgggcgtgtacagagccgtgacccccctgggcccccccgacgccgagtactggaacagccagaaggaggtgctggagagaaccagagccgagctggacaccgtgtgcagacacaactaccagctggagctgagaaccaccctgcagagaagagtggagcccaccgtgaccatcagccccagcagaaccgaggccctgaaccaccacaacctgctggtgtgcagcgtgaccgacttctaccccgcccagatcaaggtgagatggttcagaaacgaccaggaggagaccaccggcgtggtgagcacccccctgatcagaaacggcgactggaccttccagatcctggtgatgctggagatgaccccccagagaggcgacgtgtacacctgccacgtggagcaccccagcctgcagaaccccatcatcgtggagtggagactgctgcactag

SEQ ID NO: 87819 - DNA, 435 bp, synthetic construct
  misc_feature 1..435: note = Description of Artificial Sequence: Synthetic coding sequence
  source 1..435: mol_type = other DNA
atgagctggaagaaggccctgagaatccccggcgacctgagagtggccaccgtgaccccccagggcagacccgacgccgagtactggaacagccagaaggaggtgctggagggcaccagagccgagctggacaccgtgtgcagacacaactacgaggtggccttcagaggcatcctgcagagaagagtggagcccaccgtgaccatcagccccagcagaaccgaggccctgaaccaccacaacctgctggtgtgcagcgtgaccgacttctaccccggccagatcaaggtgagatggttcagaaacgaccaggaggagaccgccggcgtggtgagcacccccctgatcagaaacggcgactggaccttccagatcctggtgatgctggagatgaccccccagagaggcgacgtgtacacctgccacgtggagtag

SEQ ID NO: 87820 - DNA, 435 bp, synthetic construct
  misc_feature 1..435: note = Description of Artificial Sequence: Synthetic coding sequence
  source 1..435: mol_type = other DNA
atgagctggaagaaggccctgagaatccccggcggcctgagagccgccaccgtgaccctgctgggcctgcccgccgccgagtactggaacagccagaaggacatcctggagagaaagagagccgccgtggacagagtgtgcagacacaactaccagctggagctgagaaccaccctgcagagaagagtggagcccaccgtgaccatcagccccagcagaaccgaggccctgaaccaccacaacctgctggtgtgcagcgtgaccgacttctaccccgcccagatcaaggtgagatggttcagaaacggccaggaggagaccgccggcgtggtgagcacccccctgatcagaaacggcgactggaccttccagatcctggtgatgctggagatgaccccccagagaggcgacgtgtacacctgccacgtggagtag

SEQ ID NO: 87821 - DNA, 435 bp, synthetic construct
  misc_feature 1..435: note = Description of Artificial Sequence: Synthetic coding sequence
  source 1..435: mol_type = other DNA
atgagctggaagaaggccctgagaatccccggcggcctgagagccgccaccgtgacccccctgggcccccccgacgccgagtactggaacagccagaaggaggtgctggagagaaccagagccgagctggacaccgtgtgcagacacaactaccagctggagctgagaaccaccctgcagagaagagtggagcccaccgtgaccatcagccccagcagaaccgaggccctgaaccaccacaacctgctggtgtgcagcgtgaccgacttctaccccgcccagatcaaggtgagatggttcagaaacgaccaggaggagaccaccggcgtggtgagcacccccctgatcagaaacggcgactggaccttccagatcctggtgatgctggagatgaccccccagcacggcgacgtgtacacctgccacgtggagtag

SEQ ID NO: 87822 - DNA, 411 bp, synthetic construct
  misc_feature 1..411: note = Description of Artificial Sequence: Synthetic coding sequence
  source 1..411: mol_type = other DNA
atgagctggaagaaggccctgagaatccccggcggcctgagagccgccaccgtgaccctgatgctgagcatgctgagcacccccgtggccgagggcagagacagccccgaggacttcgtgtaccagttcaagggcatgtgctacttcaccaacggcaccgagagagtgagactggtgagcagaagcatctacaacagagaggagatcgtgagattcgacagcgacgtgggcgagttcagagccgtgaccctgctgggcctgcccgccgccgagtactggaacagccagaaggacatcctggagagaaagagagccgccgtggacagagtgtgcagacacaactaccagctggagctgagaaccaccctgcagagaagaggcatggtgaccggccccagcagaagctggtag

SEQ ID NO: 87823 - DNA, 411 bp, synthetic construct
  misc_feature 1..411: note = Description of Artificial Sequence: Synthetic coding sequence
  source 1..411: mol_type = other DNA
atgagctggaagaaggccctgagaatccccggcggcctgagagccgccaccgtgaccctgatgctggccatgctgagcacccccgtggccgagggcagagacagccccgaggacttcgtgtaccagttcaaggccatgtgctacttcaccaacggcaccgagagagtgagatacgtgaccagatacatctacaacagagaggagtacgccagattcgacagcgacgtggaggtgtacagagccgtgacccccctgggcccccccgacgccgagtactggaacagccagaaggaggtgctggagagaaccagagccgagctggacaccgtgtgcagacacaactaccagctggagctgagaaccaccctgcagagaagaggcaccgtgaccggccccagcagaagctggtag

SEQ ID NO: 87824 - DNA, 411 bp, synthetic construct
  misc_feature 1..411: note = Description of Artificial Sequence: Synthetic coding sequence
  source 1..411: mol_type = other DNA
atgagctggaagaaggccctgagaatccccggcgacctgagagtggccaccgtgaccctgatgctggccatgctgagcagcctgctggccgagggcagagacagccccgaggacttcgtgttccagttcaagggcatgtgctacttcaccaacggcaccgagagagtgagactggtgaccagatacatctacaacagagaggagtacgccagattcgacagcgacgtgggcgtgtacagagccgtgaccccccagggcagacccgacgccgagtactggaacagccagaaggaggtgctggagggcaccagagccgagctggacaccgtgtgcagacacaactacgaggtggccttcagaggcatcctgcagagaagaggcatggtgaccggcctgagcagaagctggtag

SEQ ID NO: 87825 - DNA, 717 bp, synthetic construct
  misc_feature 1..717: note = Description of Artificial Sequence: Synthetic coding sequence
  source 1..717: mol_type = other DNA
atgctgagcacccccgtggccgagggcagagacagccccgaggacttcgtgtaccagttcaagggcatgtgctacttcaccaacggcaccgagagagtgagactggtgagcagaagcatctacaacagagaggagatcgtgagattcgacagcgacgtgggcgagttcagagccgtgaccctgctgggcctgcccgccgccgagtactggaacagccagaaggacatcctggagagaaagagagccgccgtggacagagtgtgcagacacaactaccagctggagctgagaaccaccctgcagagaagagtggagcccaccgtgaccatcagccccagcagaaccgaggccctgaaccaccacaacctgctggtgtgcagcgtgaccgacttctaccccgcccagatcaaggtgagatggttcagaaacggccaggaggagaccgccggcgtggtgagcacccccctgatcagaaacggcgactggaccttccagatcctggtgatgctggagatgaccccccagagaggcgacgtgtacacctgccacgtggagcaccccagcctgcagagccccatcaccgtggagtggagagcccagagcgagagcgcccagagcaagatgctgagcggcatcggcggcttcgtgctgggcctgatcttcctgggcctgggcctgatcatccaccacagaagccagaagggcctgctgcactag

SEQ ID NO: 87826 - DNA, 543 bp, synthetic construct
  misc_feature 1..543: note = Description of Artificial Sequence: Synthetic coding sequence
  source 1..543: mol_type = other DNA
atgtgctacttcaccaacggcaccgagagagtgagaggcgtgaccagatacatctacaacagagaggagtacgccagattcgacagcgacgtgggcgtgtacagagccgtgacccccctgggcccccccgccgccgagtactggaacagccagaaggaggtgctggagagaaccagagccgagctggacaccgtgtgcagacacaactaccagctggagctgagaaccaccctgcagagaagagtggagcccaccgtgaccatcagccccagcagaaccgaggccctgaaccaccacaacctgctggtgtgcagcgtgaccgacttctaccccgcccagatcaaggtgagatggttcagaaacgaccaggaggagaccaccggcgtggtgagcacccccctgatcagaaacggcgactggaccttccagatcctggtgatgctggagatgaccccccagagaggcgacgtgtacacctgccacgtggagcaccccagcctgcagaaccccatcatcgtggagtggagaatggacgagttctag

SEQ ID NO: 87827 - DNA, 717 bp, synthetic construct
  misc_feature 1..717: note = Description of Artificial Sequence: Synthetic coding sequence
  source 1..717: mol_type = other DNA
atgctgagcacccccgtggccgagggcagagacagccccgaggacttcgtgtaccagttcaagggcatgtgctacttcaccaacggcaccgagagagtgagactggtgagcagaagcatctacaacagagaggagatcgtgagattcgacagcgacgtgggcgagttcagagccgtgaccctgctgggcctgcccgccgccgagtactggaacagccagaaggacatcctggagagaaagagagccgccgtggacagagtgtgcagacacaactaccagctggagctgagaaccaccctgcagagaagagtggagcccaccgtgaccatcagccccagcagaaccgaggccctgaaccaccacaacctgctggtgtgcagcgtgaccgacttctaccccgcccagatcaaggtgagatggttcagaaacgaccaggaggagaccgccggcgtggtgagcacccccctgatcagaaacggcgactggaccttccagatcctggtgatgctggagatgaccccccagagaggcgacgtgtacacctgccacgtggagcaccccagcctgcagagccccatcaccgtggagtggagagcccagagcgagagcgcccagagcaagatgctgagcggcatcggcggcttcgtgctgggcctgatcttcctgggcctgggcctgatcatccaccacagaagccagaagggcctgctgcactag

SEQ ID NO: 87828 - DNA, 744 bp, synthetic construct
  misc_feature 1..744: note = Description of Artificial Sequence: Synthetic coding sequence
  source 1..744: mol_type = other DNA
atgctgagcacccccgtggccgagggcagagacagccccgaggacttcgtgtaccagttcaagggcatgtgctacttcaccaacggcaccgagagagtgagaggcgtgaccagatacatctacaacagagaggagtacgccagattcgacagcgacgtgggcgtgtacagagccgtgacccccctgggcccccccgccgccgagtactggaacagccagaaggaggtgctggagagaaccagagccgagctggacaccgtgtgcagacacaactaccagctggagctgagaaccaccctgcagagaagagtggagcccaccgtgaccatcagccccagcagaaccgaggccctgaaccaccacaacctgctggtgtgcagcgtgaccgacttctaccccgcccagatcaaggtgagatggttcagaaacgaccaggaggagaccaccggcgtggtgagcacccccctgatcagaaacggcgactggaccttccagatcctggtgatgctggagatgaccccccagagaggcgacgtgtacacctgccacgtggagcaccccagcctgcagaaccccatcatcgtggagtggagagcccagagcgagagcgcccagagcaagatgctgagcggcatcggcggcttcgtgctgggcctgatcttcctgggcctgggcctgatcatccaccacagaagccagaaggccctgccccagggccccccccccgccggcgacatcagctag

SEQ ID NO: 87829 - DNA, 717 bp, synthetic construct; identical to SEQ ID NO: 87827
  misc_feature 1..717: note = Description of Artificial Sequence: Synthetic coding sequence
  source 1..717: mol_type = other DNA

SEQ ID NO: 87830 - DNA, 801 bp, synthetic construct
  misc_feature 1..801: note = Description of Artificial Sequence: Synthetic coding sequence
  source 1..801: mol_type = other DNA
atggtgtgcctgagactgcccggcggcagctgcatggccgtgctgaccgtgaccctgatggtgctgagcagccccctggccctggccggcgacaccagacccagattcctggagtacagcaccagcgagtgccacttcttcaacggcaccgagagagtgagatacctggacagatacttccacaaccaggaggagaacgtgagattcgacagcgacgtgggcgagttcagagccgtgaccgagctgggcagacccgacgccgagtactggaacagccagaaggacctgctggagcagaagagaggcagagtggacaactactgcagacacaactacggcgtggtggagagcttcaccgtgcagagaagagtgcaccccaaggtgaccgtgtaccccagcaagacccagcccctgcagcaccacaacctgctggtgtgcagcgtgagcggcttctaccccggcagcatcgaggtgagatggttcagaaacggccaggaggagaagaccggcgtggtgagcaccggcctgatccacaacggcgactggaccttccagaccctggtgatgctggagaccgtgcccagaagcggcgaggtgtacacctgccaggtggagcaccccagcgtgaccagccccctgaccgtggagtggagagccagaagcgagagcgcccagagcaagatgctgagcggcgtgggcggcttcgtgctgggcctgctgttcctgggcgccggcctgttcatctacttcagaaaccagaagggccacagcggcctgcagcccagaggcttcctgagctag

SEQ ID NO: 87831 - DNA, 801 bp, synthetic construct
  misc_feature 1..801: note = Description of Artificial Sequence: Synthetic coding sequence
  source 1..801: mol_type = other DNA
atggtgtgcctgaagctgcccggcggcagctgcatgaccgccctgaccgtgaccctgatggtgctgagcagccccctggccctgagcggcgacaccagacccagattcctgtggcagcccaagagagagtgccacttcttcaacggcaccgagagagtgagattcctggacagatacttctacaaccaggaggagagcgtgagattcgacagcgacgtgggcgagttcagagccgtgaccgagctgggcagacccgacgccgagtactggaacagccagaaggacatcctggagcaggccagagccgccgtggacacctactgcagacacaactacggcgtggtggagagcttcaccgtgcagagaagagtgcagcccaaggtgaccgtgtaccccagcaagacccagcccctgcagcaccacaacctgctggtgtgcagcgtgagcggcttctaccccggcagcatcgaggtgagatggttcctgaacggccaggaggagaaggccggcatggtgagcaccggcctgatccagaacggcgactggaccttccagaccctggtgatgctggagaccgtgcccagaagcggcgaggtgtacacctgccaggtggagcaccccagcgtgaccagccccctgaccgtggagtggagagccagaagcgagagcgcccagagcaagatgctgagcggcgtgggcggcttcgtgctgggcctgctgttcctgggcgccggcctgttcatctacttcagaaaccagaagggccacagcggcctgcagcccaccggcttcctgagctag

SEQ ID NO: 87832 - DNA, 801 bp, synthetic construct; identical to SEQ ID NO: 87830
  misc_feature 1..801: note = Description of Artificial Sequence: Synthetic coding sequence
  source 1..801: mol_type = other DNA

SEQ ID NO: 87833 - DNA, 753 bp, synthetic construct
  misc_feature 1..753: note = Description of Artificial Sequence: Synthetic coding sequence
  source 1..753: mol_type = other DNA
ctgctgaagctgaccagagacttcccccagagacacgagaagtaccagagctgggccggcaccttccacctgtgcctgaagaagaacaagtaccccgacagcagaagcaccttcatcaagcacgccggcagctacctgaagagaggcgagttcctgagcatccacaccgccatcacctgcttcttcctgcagatcagcgccagattcctggagcaggtgaagcacgagtgccacttcttcaacggcaccgagagagtgagattcctggacagatacttctaccaccaggaggagtacgtgagattcgacagcgacgtgggcgagtacagagccgtgaccgagctgggcagacccgacgccgagtactggaacagccagaaggacctgctggagcagagaagagccgaggtggacacctactgcagacacaactacggcgtggtggagagcttcaccgtgcagagaagagtgtaccccgaggtgaccgtgtaccccgccaagacccagcccctgcagcaccacaacctgctggtgtgcagcgtgaacggcttctaccccggcagcatcgaggtgagatggttcagaaacggccaggaggagaagaccggcgtggtgagcaccggcctgatccagaacggcgactggaccttccagaccctggtgatgctggagaccgtgcccagaagcggcgaggtgtacacctgccaggtggagcaccccagcctgaccagccccctgaccgtggagtggtag

SEQ ID NO: 87834 - DNA, 756 bp, synthetic construct
  misc_feature 1..756: note = Description of Artificial Sequence: Synthetic coding sequence
  source 1..756: mol_type = other DNA
tgactgctgaagctgaccagagacttcccccagagacacgagaagtaccagagctgggccggcaccttccacctgtgcctgaagaagaacaagtaccccgacagcagaagcaccttcatcaagcacgccggcagctacctgaagagaggcgagttcctggccatccacaccgccatcacctgcttcttcagacagatcagcgccagattcctggagtacagcaccagcgagtgccacttcttcaacggcaccgagagagtgagatacctggacagatacttccacaaccaggaggagaacgtgagattcgacagcgacgtgggcgagttcagagccgtgaccgagctgggcagacccgacgccgagtactggaacagccagaaggacctgctggagcagaagagaggcagagtggacaactactgcagacacaactacggcgtggtggagagcttcaccgtgcagagaagagtgcaccccaaggtgaccgtgtaccccagcaagacccagcccctgcagcaccacaacctgctggtgtgcagcgtgagcggcttctaccccggcagcatcgaggtgagatggttcagaaacggccaggaggagaagaccggcgtggtgagcaccggcctgatccacaacggcgactggaccttccagaccctggtgatgctggagaccgtgcccagaagcggcgaggtgtacacctgccaggtggagcaccccagcgtgaccagccccctgaccgtggagtggtag

SEQ ID NO: 87835 - DNA, 801 bp, synthetic construct
  misc_feature 1..801: note = Description of Artificial Sequence: Synthetic coding sequence
  source 1..801: mol_type = other DNA
atggtgtgcctgaagttccccggcggcagctgcatggccgccctgaccgtgaccctgatggtgctgagcagccccctggccctggccggcgacaccagacccagattcctggagcaggtgaagcacgagtgccacttcttcaacggcaccgagagagtgagattcctggacagatacttctaccaccaggaggagtacgtgagattcgacagcgacgtgggcgagtacagagccgtgaccgagctgggcagacccgacgccgagtactggaacagccagaaggacctgctggagcagagaagagccgaggtggacacctactgcagacacaactacggcgtggtggagagcttcaccgtgcagagaagagtgtaccccgaggtgaccgtgtaccccgccaagacccagcccctgcagcaccacaacctgctggtgtgcagcgtgaacggcttctaccccggcagcatcgaggtgagatggttcagaaacggccaggaggagaagaccggcgtggtgagcaccggcctgatccagaacggcgactggaccttccagaccctggtgatgctggagaccgtgcccagaagcggcgaggtgtacacctgccaggtggagcaccccagcctgaccagccccctgaccgtggagtggagagccagaagcgagagcgcccagagcaagatgctgagcggcgtgggcggcttcgtgctgggcctgctgttcctgggcgccggcctgttcatctacttcagaaaccagaagggccacagcggcctgcagcccaccggcttcctgagctag

SEQ ID NO: 87836 - DNA, 756 bp, synthetic construct; identical to SEQ ID NO: 87834
  misc_feature 1..756: note = Description of Artificial Sequence: Synthetic coding sequence
  source 1..756: mol_type = other DNA

SEQ ID NO: 87837 - DNA, 753 bp, synthetic construct
  misc_feature 1..753: note = Description of Artificial Sequence: Synthetic coding sequence
  source 1..753: mol_type = other DNA
tgactgctgaagctgaccagagacttcccccagagacacgagaagtaccagagctgggccggcaccttccacctgtgcctgaagaagaacaagtaccccgacagcagaagcaccttcatcaagcacgccggcagctacctgaagagaggcgagttcctgagcatccacaccgccatcacctgcttcttcctgcagatcagcgccagattcctgtggcagggcaagtacaagtgccacttcttcaacggcaccgagagagtgcagttcctggagagactgttctacaaccaggaggagttcgtgagattcgacagcgacgtgggcgagtacagagccgtgaccgagctgggcagacccgtggccgagagctggaacagccagaaggacatcctggaggacagaagaggccaggtggacaccgtgtgcagacacaactacggcgtgggcgagagcttcaccgtgcagagaagagtgcaccccgaggtgaccgtgtaccccgccaagacccagcccctgcagcaccacaacctgctggtgtgcagcgtgagcggcttctaccccggcagcatcgaggtgagatggttcagaaacggccaggaggagaaggccggcgtggtgagcaccggcctgatccagaacggcgactggaccttccagaccctggtgatgctggagaccgtgcccagaagcggcgaggtgtacacctgccaggtggagcaccccagcgtgatgagccccctgaccgtggagtag

SEQ ID NO: 87838 - DNA, 801 bp, synthetic construct
  misc_feature 1..801: note = Description of Artificial Sequence: Synthetic coding sequence
  source 1..801: mol_type = other DNA
atggtgtgcctgaagctgcccggcggcagctgcatggccgccctgaccgtgaccctgatggtgctgagcagccccctggccctggccggcgacacccagcccagattcctgtggcagggcaagtacaagtgccacttcttcaacggcaccgagagagtgcagttcctggagagactgttctacaaccaggaggagttcgtgagattcgacagcgacgtgggcgagtacagagccgtgaccgagctgggcagacccgtggccgagagctggaacagccagaaggacatcctggaggacagaagaggccaggtggacaccgtgtgcagacacaactacggcgtgggcgagagcttcaccgtgcagagaagagtgcaccccgaggtgaccgtgtaccccgccaagacccagcccctgcagcaccacaacctgctggtgtgcagcgtgagcggcttctaccccggcagcatcgaggtgagatggttcagaaacggccaggaggagaaggccggcgtggtgagcaccggcctgatccagaacggcgactggaccttccagaccctggtgatgctggagaccgtgcccagaagcggcgaggtgtacacctgccaggtggagcaccccagcgtgatgagccccctgaccgtggagtggagagccagaagcgagagcgcccagagcaagatgctgagcggcgtgggcggcttcgtgctgggcctgctgttcctgggcgccggcctgttcatctacttcagaaaccagaagggccacagcggcctgcagcccaccggcttcctgagctag

SEQ ID NO: 87839 - DNA, 801 bp, synthetic construct; identical to SEQ ID NO: 87838
  misc_feature 1..801: note = Description of Artificial Sequence: Synthetic coding sequence
  source 1..801: mol_type = other DNA

SEQ ID NO: 87840 - DNA, 810 bp, synthetic construct
  misc_feature 1..810: note = Description of Artificial Sequence: Synthetic coding sequence
  source 1..810: mol_type = other DNA
atgagctggaagaaggccctgagaatccccggcggcctgagagtggccaccgtgaccctgatgctggccatgctgagcacccccgtggccgagggcagagacagccccgaggacttcgtgtaccagttcaagggcatgtgctacttcaccaacggcaccgagagagtgagaggcgtgaccagatacatctacaacagagaggagtacgccagattcgacagcgacgtgggcgtgtacagagccgtgacccccctgggcccccccgccgccgagtactggaacagccagaaggaggtgctggagagaaccagagccgagctggacaccgtgtgcagacacaactaccagctggagctgagaaccaccctgcagagaagagtgtaccccgaggtgaccgtgtaccccgccaagacccagcccctgcagcaccacaacctgctggtgtgcagcgtgaacggcttctaccccggcagcatcgaggtgagatggttcagaaacggccaggaggagaagaccggcgtggtgagcaccggcctgatccagaacggcgactggaccttccagaccctggtgatgctggagaccgtgcccagaagcggcgaggtgtacacctgccaggtggagcaccccagcctgaccagccccctgaccgtggagtggagagccagaagcgagagcgcccagagcaagatgctgagcggcgtgggcggcttcgtgctgggcctgctgttcctgggcgccggcctgttcatctacttcagaaaccagaagggccacagcggcctgcagcccaccggcttcctgagctag

SEQ ID NO: 87841 - DNA, 792 bp, synthetic construct
  misc_feature 1..792: note = Description of Artificial Sequence: Synthetic coding sequence
  source 1..792: mol_type = other DNA
atggtgtgcctgaagttccccggcggcagctgcatggccgccctgaccgtgaccctgatggtgctgagcagccccctggccctggccggcgacaccagacccagattcctggagcaggtgaagcacgagtgccacttcttcaacggcaccgagagagtgagattcctggacagatacttctaccaccaggaggagtacgtgagattcgacagcgacgtgggcgagtacagagccgtgaccgagctgggcagacccgacgccgagtactggaacagccagaaggacctgctggagcagagaagagccgaggtggacacctactgcagacacaactacggcgtggtggagagcttcaccgtgcagagaagagtgtaccccgaggtgaccgtgtaccccgccaagacccagcccctgcagcaccacaacctgctggtgtgcagcgtgaacggcttctaccccggcagcatcgaggtgagatggttcagaaacggccaggaggagaagaccggcgtggtgagcaccggcctgatccagaacggcgactggaccttccagaccctggtgatgctggagaccgtgcccagaagcggcgaggtgtacacctgccaggtggagcaccccagcctgaccagccccctgaccgtggagtggagagccagaagcgagagcgcccagagcaagatgctgagcggcgtgggcggcttcgtgctgggcctgctgttcctgggcgccggcctgttcatctacttcagaaaccagaagggccacagcggcctgcagcccaccggctag

SEQ ID NO: 87842 - DNA, 141 bp, synthetic construct
  misc_feature 1..141: note = Description of Artificial Sequence: Synthetic coding sequence
  source 1..141: mol_type = other DNA
cacagcggcctgcagcccaccggcaacaccttcagcagcagcctgagaaacagattcggcggccaggcccagcacgcctgcaaccccagcaccctgggcggcagaggcggcagaatcatgagaatccccgagctgaagtag

SEQ ID NO: 87843 - DNA, 891 bp, synthetic construct
  misc_feature 1..891: note = Description of Artificial Sequence: Synthetic coding sequence
  source 1..891: mol_type = other DNA
atggtgtgcctgaagttccccggcggcagctgcatggccgccctgaccgtgaccctgatggtgctgagcagccccctggccctggccggcgacaccagacccagattcctggagcaggtgaagcacgagtgccacttcttcaacggcaccgagagagtgagattcctggacagatacttctaccaccaggaggagtacgtgagattcgacagcgacgtgggcgagtacagagccgtgaccgagctgggcagacccgacgccgagtactggaacagccagaaggacctgctggagcagagaagagccgaggtggacacctactgcagacacaactacggcgtggtggagagcttcaccgtgcagagaagagtgtaccccgaggtgaccgtgtaccccgccaagacccagcccctgcagcaccacaacctgctggtgtgcagcgtgaacggcttctaccccggcagcatcgaggtgagatggttcagaaacggccaggaggagaagaccggcgtggtgagcaccggcctgatccagaacggcgactggaccttccagaccctggtgatgctggagaccgtgcccagaagcggcgaggtgtacacctgccaggtggagcaccccagcctgaccagccccctgaccgtggagtggagagccagaagcgagagcgcccagagcaagatgctgagcggcgtgggcggcttcgtgctgggcctgctgttcctgggcgccggcctgttcatctacttcagaaaccagaagggccacagcggcctgcagcccaccggcaacaccttcagcagcagcctgagaaacagattcggcggccaggcccagtggctgacccccgtgatccccgccctgtgggaggccgaggccggcgagagctag

SEQ ID NO: 87844 - DNA, 801 bp, synthetic construct
  misc_feature 1..801: note = Description of Artificial Sequence: Synthetic coding sequence
  source 1..801: mol_type = other DNA
atggtgtgcctgaagctgcccggcggcagcagcctggccgccctgaccgtgaccctgatggtgctgagcagcagactggccttcgccggcgacaccagacccagattcctggagctgctgaagagcgagtgccacttcttcaacggcaccgagagagtgagattcctggagagacacttccacaaccaggaggagtacgccagattcgacagcgacgtgggcgagtacagagccgtgagagagctgggcagacccgacgccgagtactggaacagccagaaggacctgctggagcagaagagaggccaggtggacaactactgcagacacaactacggcgtgggcgagagcttcaccgtgcagagaagagtgcacccccaggtgaccgtgtaccccgccaagacccagcccctgcagcaccacaacctgctggtgtgcagcgtgagcggcttctaccccggcagcatcgaggtgagatggttcagaaacggccaggaggagaaggccggcgtggtgagcaccggcctgatccagaacggcgactggaccttccagaccctggtgatgctggagaccgtgcccagaagcggcgaggtgtacacctgccaggtggagcaccccagcgtgaccagccccctgaccgtggagtggagcgccagaagcgagagcgcccagagcaagatgctgagcggcgtgggcggcttcgtgctgggcctgctgttcctgggcgccggcctgttcatctacttcagaaaccagaagggccacagcggcctgcagcccaccggcttcctgagctag

SEQ ID NO: 87845 - DNA, 801 bp, synthetic construct
  misc_feature 1..801: note = Description of Artificial Sequence: Synthetic coding sequence
  source 1..801: mol_type = other DNA
atggtgtgcctgaagctgcccggcggcagcagcctggccgccctgaccgtgaccctgatggtgctgagcagcagactggccttcgccggcgacaccagacccagattcctggagctgagaaagagcgagtgccacttcttcaacggcaccgagagagtgagatacctggacagatacttccacaaccaggaggagttcctgagattcgacagcgacgtgggcgagtacagagccgtgaccgagctgggcagacccgtggccgagagctggaacagccagaaggacctgctggagcagaagagaggcagagtggacaactactgcagacacaactacggcgtgggcgagagcttcaccgtgcagagaagagtgcacccccaggtgaccgtgtaccccgccaagacccagcccctgcagcaccacaacctgctggtgtgcagcgtgagcggcttctaccccggcagcatcgaggtgagatggttcagaaacggccaggaggagaaggccggcgtggtgagcaccggcctgatccagaacggcgactggaccttccagaccctggtgatgctggagaccgtgcccagaagcggcgaggtgtacacctgccaggtggagcaccccagcgtgaccagcgccctgaccgtggagtggagagccagaagcgagagcgcccagagcaagatgctgagcggcgtgggcggcttcgtgctgggcctgctgttcctgggcgccggcctgttcatctacttcagaaaccagaagggccacagcggcctgcagcccaccggcttcctgagctag

SEQ ID NO: 87846 - DNA, 801 bp, synthetic construct; identical to SEQ ID NO: 87844
  misc_feature 1..801: note = Description of Artificial Sequence: Synthetic coding sequence
  source 1..801: mol_type = other DNA

SEQ ID NO: 87847 - DNA, 801 bp, synthetic construct
  misc_feature 1..801: note = Description of Artificial Sequence: Synthetic coding sequence
  source 1..801: mol_type = other DNA
atggtgtgcctgaagctgcccggcggcagctacatggccaagctgaccgtgaccctgatggtgctgagcagccccctggccctggccggcgacaccagacccagattcctgcagcaggacaagtacgagtgccacttcttcaacggcaccgagagagtgagattcctgcacagagacatctacaaccaggaggaggacctgagattcgacagcgacgtgggcgagtacagagccgtgaccgagctgggcagacccgacgccgagtactggaacagccagaaggacttcctggaggacagaagagccgccgtggacacctactgcagacacaactacggcgtgggcgagagcttcaccgtgcagagaagagtggagcccaaggtgaccgtgtaccccgccagaacccagaccctgcagcaccacaacctgctggtgtgcagcgtgaacggcttctaccccggcagcatcgaggtgagatggttcagaaacagccaggaggagaaggccggcgtggtgagcaccggcctgatccagaacggcgactggaccttccagaccctggtgatgctggagaccgtgcccagaagcggcgaggtgtacacctgccaggtggagcaccccagcgtgaccagccccctgaccgtggagtggagagcccagagcgagagcgcccagagcaagatgctgagcggcgtgggcggcttcgtgctgggcctgctgttcctgggcgccggcctgttcatctacttcaagaaccagaagggccacagcggcctgcaccccaccggcctggtgagctag

SEQ ID NO: 87848 - DNA, 891 bp, synthetic construct
  misc_feature 1..891: note = Description of Artificial Sequence: Synthetic coding sequence
  source 1..891: mol_type = other DNA
atgggcgagctgatggccttcctgctgcccctgatcatcgtgctgatggtgaagcacagcgacagcagaacccacagcctgagatacttcagactgggcgtgagcgaccccatccacggcgtgcccgagttcatcagcgtgggctacgtggacagccaccccatcaccacctacgacagcgtgaccagacagaaggagcccagagccccctggatggccgagaacctggcccccgaccactgggagagatacacccagctgctgagaggctggcagcagatgttcaaggtggagctgaagagactgcagagacactacaaccacagcgacaacgtggcccacaccatcaagcaggcctgggaggccaaccagcacgagctgctgtaccagaagaactggctggaggaggagtgcatcgcctggctgaagagattcctggagtacggcaaggacaccctgcagagaaccgagccccccctggtgagagtgaacagaaaggagaccttccccggcgtgaccgccctgttctgcaaggcccacggcttctacccccccgagatctacatgacctggatgaagaacggcgaggagatcgtgcaggagatcgactacggcgacatcctgcccagcggcgacggcacctaccaggcctgggccagcatcgagctggacccccagagcagcaacctgtacagctgccacgtggagcactgcggcgtgcacatggtgctgcaggtgccccaggagagcgagaccatccccctggtgatgaaggccgtgagcggcagcatcgtgctggtgatcgtgctggccggcgtgggcgtgctggtgtggagaagaagacccagagagcagaacggcgccatctacctgcccacccccgacagatag

SEQ ID NO: 87849 - DNA, 1026 bp, synthetic construct
  misc_feature 1..1026: note = Description of Artificial Sequence: Synthetic coding sequence
  source 1..1026: mol_type = other DNA
atgggcgagctgatggccttcctgctgcccctgatcatcgtgctgatggtgaagcacagcgacagcagaacccacagcctgagatacttcagactgggcgtgagcgaccccatccacggcgtgcccgagttcatcagcgtgggctacgtggacagccaccccatcaccacctacgacagcgtgaccagacagaaggagcccagagccccctggatggccgagaacctggcccccgaccactgggagagatacacccagctgctgagaggctggcagcagatgttcaaggtggagctgaagagactgcagagacactacaaccacagcggcagccacacctaccagagaatgatcggctgcgagctgctggaggacggcagcaccaccggcttcctgcagtacgcctacgacggccaggacttcctgatcttcaacaaggacaccctgagctggctggccgtggacaacgtggcccacaccatcaagcaggcctgggaggccaaccagcacgagctgctgtaccagaagaactggctggaggaggagtgcatcgcctggctgaagagattcctggagtacggcaaggacaccctgcagagaaccgagccccccctggtgagagtgaacagaaaggagaccttccccggcgtgaccgccctgttctgcaaggcccacggcttctacccccccgagatctacatgacctggatgaagaacggcgaggagatcgtgcaggagatcgactacggcgacatcctgcccagcggcgacggcacctaccaggcctgggccagcatcgagctggacccccagagcagcaacctgtacagctgccacgtggagcactgcggcgtgcacatggtgctgcaggtgccccaggagagcgagaccatccccctggtgatgaaggccgtgagcggcagcatcgtgctggtgatcgtgctggccggcgtgggcgtgctggtgtggagaagaagacccagagagcagaacggcgccatctacctgcccacccccgacagatag

SEQ ID NO: 87850 - DNA, 645 bp, synthetic construct
  misc_feature 1..645: note = Description of Artificial Sequence: Synthetic coding sequence
  source 1..645: mol_type = other DNA
atgggcgagctgatggccttcctgctgcccctgatcatcgtgctgatggtgaagcacagcgacagcagaacccacagcctgagatacttcagactgggcgtgagcgaccccatccacggcgtgcccgagttcatcagcgtgggctacgtggacagccaccccatcaccacctacgacagcgtgaccagacagaaggagcccagagccccctggatggccgagaacctggcccccgaccactgggagagatacacccagctgctgagaggctggcagcagatgttcaaggtggagctgaagagactgcagagacactacaaccacagcggcagccacacctaccagagaatgatcggctgcgagctgctggaggacggcagcaccaccggcttcctgcagtacgcctacgacggccaggacttcctgatcttcaacaaggacaccctgagctggctggccgtggacaacgtggcccacaccatcaagcaggcctgggaggccaaccagcacgagctgctgtaccagaagaactggctggaggaggagtgcatcgcctggctgaagagattcctggagtacggcaaggacaccctgcagagaaccgagcagaacggcgccatctacctgcccacccccgacagatag

SEQ ID NO: 87851 - DNA, 792 bp, synthetic construct
  misc_feature 1..792: note = Description of Artificial Sequence: Synthetic coding sequence
  source 1..792: mol_type = other DNA
atgtgggagctgagaagcgccagcttctggagagccatcttcgccgagttcttcgccaccctgttctacgtgttcttcggcctgggcagcagcctgagatgggcccccggccccctgcacgtgctgcaggtggccatggccttcggcctggccctggccaccctggtgcagagcgtgggccacatcagcggcgcccacgtgaaccccgccgtgaccttcgccttcctggtgggcagccagatgagcctgctgagagccttctgctacatggccgcccagctgctgggcgccgtggccggcgccgccgtgctgtacagcgtgaccccccccgccgtgagaggcaacctggccctgaacaccctgcaccccgccgtgagcgtgggccaggccaccaccgtggagatcttcctgaccctgcagttcgtgctgtgcatcttcgccacctacgacgagagaagaaacggccagctgggcagcgtggccctggccgtgggcttcagcctggccctgggccacctgttcggcatgtactacaccggcgccggcatgaaccccgccagaagcttcgcccccgccatcctgaccggcaacttcaccaaccactgggtgtactgggtgggccccatcatcggcggcggcctgggcagcctgctgtacgacttcctgctgttccccagactgaagagcatcagcgagagactgagcgtgctgaagggcgccaagcccgacgtgagcaacggccagcccgaggtgaccggcgagcccgtggagctgaacacccaggccctgtag

SEQ ID NO: 87852 - DNA, 2682 bp, synthetic construct
  misc_feature 1..2682: note = Description of Artificial Sequence: Synthetic coding sequence
  source 1..2682: mol_type = other DNA
atggccaccgaggagttcatcatcagaatccccccctaccactacatccacgtgctggaccagaacagcaacgtgagcagagtggaggtgggccccaagacctacatcagacaggacaacgagagagtgctgttcgcccccatgagaatggtgaccgtgccccccagacactactgcaccgtggccaaccccgtgagcagagacgcccagggcctggtgctgttcgacgtgaccggccaggtgagactgagacacgccgacctggagatcagactggcccaggaccccttccccctgtaccccggcgaggtgctggagaaggacatcacccccctgcaggtggtgctgcccaacaccgccctgcacctgaaggccctgctggacttcgaggacaaggacggcgacaaggtggtggccggcgacgagtggctgttcgagggccccggcacctacatccccagaaaggaggtggaggtggtggagatcatccaggccaccatcatcagacagaaccaggccctgagactgagagccagaaaggagtgctgggacagagacggcaaggagagagtgaccggcgaggagtggctggtgaccaccgtgggcgcctacctgcccgccgtgttcgaggaggtgctggacctggtggacgccgtgatcctgaccgagaagaccgccctgcacctgagagccagaagaaacttcagagacttcagaggcgtgagcagaagaaccggcgaggagtggctggtgaccgtgcaggacaccgaggcccacgtgcccgacgtgcacgaggaggtgctgggcgtggtgcccatcaccaccctgggcccccacaactactgcgtgatcctggaccccgtgggccccgacggcaagaaccagctgggccagaagagagtggtgaagggcgagaagagcttcttcctgcagcccggcgagcagctggagcagggcatccaggacgtgtacgtgctgagcgagcagcagggcctgctgctgagagccctgcagcccctggaggagggcgaggacgaggagaaggtgagccaccaggccggcgaccactggctgatcagaggccccctggagtacgtgcccagcgccaaggtggaggtggtggaggagagacaggccatccccctggacgagaacgagggcatctacgtgcaggacgtgaagaccggcaaggtgagagccgtgatcggcagcacctacatgctgacccaggacgaggtgctgtgggagaaggagctgccccccggcgtggaggagctgctgaacaagggccaggaccccctggccgacagaggcgagaaggacaccgccaagagcctgcagcccctggcccccagaaacaagaccagagtggtgagctacagagtgccccacaacgccgccgtgcaggtgtacgactacagagagaagagagccagagtggtgttcggccccgagctggtgagcctgggccccgaggagcagttcaccgtgctgagcctgagcgccggcagacccaagagaccccacgccagaagagccctgtgcctgctgctgggccccgacttcttcaccgacgtgatcaccatcgagaccgccgaccacgccagactgcagctgcagctggcctacaactggcacttcgaggtgaacgacagaaaggacccccaggagaccgccaagctgttcagcgtgcccgacttcgtgggcgacgcctgcaaggccatcgccagcagagtgagaggcgccgtggccagcgtgaccttcgacgacttccacaagaacagcgccagaatcatcagaaccgccgtgttcggcttcgagaccagcgaggccaagggccccgacggcatggccctgcccagacccagagaccaggccgtgttcccccagaacggcctggtggtgagcagcgtggacgtgcagagcgtggagcccgtggaccagagaaccagagacgccctgcagagaagcgtgcagctggccatcgagatcaccaccaacagccaggaggccgccgccaagcacgaggcccagagactggagcaggaggccagaggcagactggagagacagaagatcctggaccagagcgaggccgagaaggccagaaaggagctgctggagctggaggccctgagcatggccgtggagagcaccggcaccgccaaggccgaggccgagagcagagccgaggccgccagaatcgagggcgagggcagcgtgctgcaggccaagctgaaggcccaggccctggccatcgagaccgaggccgagctgcagagagtgcagaaggtgagagagctggagctggtgtacgccagagcccagctggagctggaggtgagcaaggcccagcagctggccgaggtggaggtgaagaagttcaagcagatgaccgaggccatcggccccagcaccatcagagacctggccgtggccggccccgagatgcaggtgaagctgctgcagagcctgggcctgaagagcaccctgatcaccgacggcagcacccccatcaacctgttcaacaccgccttcggcctgctgggcatgggccccgagggccagcccctgggcagaagagtggccagcggccccagccccggcgagggcatcagcccccagagcgcccaggccccccaggcccccggcgacaaccacgtggtgcccgtgctgagatag

SEQ ID NO: 87853 - DNA, 2682 bp, synthetic construct; identical to SEQ ID NO: 87852
  misc_feature 1..2682: note = Description of Artificial Sequence: Synthetic coding sequence
  source 1..2682: mol_type = other DNA

SEQ ID NO: 87854 - DNA, 480 bp, synthetic construct
  misc_feature 1..480: note = Description of Artificial Sequence: Synthetic coding sequence
  source 1..480: mol_type = other DNA
atgtgctggaccagaaccgccacctgccccgtgtggagaagcggccagagacccaccagcggcagaaccatgagaggcagcggcttcggcggcagaagacacccctacggcaaggacagccccgccccccccggcagcgccgagctgcccggcctgcagggcagcgtgcccccccactggggcggcgtggccggcaacagcgccggccacagaggccccagagccagatgccccagaggcggcgccggcggctgcgcccaccaccaccccggccccccccagctgctgagagacagcagaccctgcagaaccggctggcaggagagcgccggcgccgaggccagaggccagggcagagaggtgttcttcccccccgccagaagagccgccggcaccagacaccccggctgcgtgtgcgccgtgggcgccgccggcgccgccgccgagggccccgccgcccccggcggcggcggcggctag

SEQ ID NO: 87855 - DNA, 1251 bp, synthetic construct
  misc_feature 1..1251: note = Description of Artificial Sequence: Synthetic coding sequence
  source 1..1251: mol_type = other DNA
atgagcaccaagcagatcacctgcagatacttcatgcacggcgtgtgcagagagggcagccagtgcctgttcagccacgacctggccaacagcaagcccagcaccatctgcaagtactaccagaagggctactgcgcctacggcaccagatgcagatacgaccacaccagacccagcgccgccgccggcggcgccgtgggcaccatggcccacagcgtgcccagccccgccttccacagcccccacccccccagcgaggtgaccgccagcatcgtgaagaccaacagccacgagcccggcaagagagagaagagaaccctggtgctgagagacagaaacctgagcggcatggccgagagaaagacccagcccagcatggtgagcaaccccggcagctgcagcgacccccagcccagccccgagatgaagccccacagctacctggacgccatcagaagcggcctggacgacgtggaggccagcagcagctacagcaacgagcagcagctgtgcccctacgccgccgccggcgagtgcagattcggcgacgcctgcgtgtacctgcacggcgaggtgtgcgagatctgcagactgcaggtgctgcaccccttcgaccccgagcagagaaaggcccacgagaagatctgcatgctgaccttcgagcacgagatggagaaggccttcgccttccaggccagccaggacaaggtgtgcagcatctgcatggaggtgatcctggagaaggccagcgccagcgagagaagattcggcatcctgagcaactgcaaccacacctactgcctgagctgcatcagacagtggagatgcgccaagcagttcgagaaccccatcatcaagagctgccccgagtgcagagtgatcagcgagttcgtgatccccagcgtgtactgggtggaggaccagaacaagaagaacgagctgatcgaggccttcaagcagggcatgggcaagaaggcctgcaagtacttcgagcagggcaagggcacctgccccttcggcagcaagtgcctgtacagacacgcctaccccgacggcagactggccgagcccgagaagcccagaaagcagctgagcagccagggcaccgtgagattcttcaacagcgtgagactgtgggacttcatcgagaacagagagagcagacacgtgcccaacaacgaggacgtggacatgaccgagctgggcgacctgttcatgcacctgagcggcgtggagagcagcgagccctag

SEQ ID NO: 87856 - DNA, 1524 bp, synthetic construct
  misc_feature 1..1524: note = Description of Artificial Sequence: Synthetic coding sequence
  source 1..1524: mol_type = other DNA
atggaggagcccgccgcccccagcgaggcccacgaggccgccggcgcccaggccggcgccgaggccgccagagagggcgtgagcggccccgacctgcccgtgtgcgagcccagcggcgagagcgccgcccccgacagcgccctgccccacgccgccagaggctgggcccccttccccgtggcccccgtgcccgcccacctgagaagaggcggcctgagacccgcccccgccagcggcggcggcgcctggcccagccccctgcccagcagaagcagcggcatctggaccaagcagatcatctgcagatactacatccacggccagtgcaaggagggcgagaactgcagatacagccacgacctgagcggcagaaagatggccaccgagggcggcgtgagcccccccggcgccagcgccggcggcggccccagcaccgccgcccacatcgagccccccacccaggaggtggccgaggccccccccgccgccagcagcctgagcctgcccgtgatcggcagcgccgccgagagaggcttcttcgaggccgagagagacaacgccgacagaggcgccgccggcggcgccggcgtggagagctgggccgacgccatcgagttcgtgcccggccagccctacagaggcagatgggtggccagcgcccccgaggcccccctgcagagcagcgagaccgagagaaagcagatggccgtgggcagcggcctgagattctgctactacgccagcagaggcgtgtgcttcagaggcgagagctgcatgtacctgcacggcgacatctgcgacatgtgcggcctgcagaccctgcaccccatggacgccgcccagagagaggagcacatgagagcctgcatcgaggcccacgagaaggacatggagctgagcttcgccgtgcagagaggcatggacaaggtgtgcggcatctgcatggaggtggtgtacgagaaggccaaccccaacgacagaagattcggcatcctgagcaactgcaaccacagcttctgcatcagatgcatcagaagatggagaagcgccagacagttcgagaacagaatcgtgaagagctgcccccagtgcagagtgaccagcgagctggtgatccccagcgagttctgggtggaggaggaggaggagaagcagaagctgatccagcagtacaaggaggccatgagcaacaaggcctgcagatacttcgccgagggcagaggcaactgccccttcggcgacacctgcttctacaagcacgagtaccccgagggctggggcgacgagccccccggccccggcggcggcagcttcagcgcctactggcaccagctggtggagcccgtgagaatgggcgagggcaacatgctgtacaagagcatcaagaaggagctggtggtgctgagactggccagcctgctgttcaagagattcctgagcctgagagacgagctgcccttcagcgaggaccagtgggacctgctgcactacgagctggaggagtacttcaacctgatcctgtag

SEQ ID NO: 87857 - DNA, 462 bp, synthetic construct
  misc_feature 1..462: note = Description of Artificial Sequence: Synthetic coding sequence
  source 1..462: mol_type = other DNA
atggcccccgccgccgccaccggcggcagcaccctgcccagcggcttcagcgtgttcaccaccctgcccgacctgctgttcatcttcgagttcatcttcggcggcctggtgtggatcctggtggccagcagcctggtgccctggcccctggtgcagggctgggtgatgttcgtgagcgtgttctgcttcgtggccaccaccaccctgatcatcctgtacatcatcggcgcccacggcggcgagaccagctgggtgaccctggacgccgcctaccactgcaccgccgccctgttctacctgagcgccagcgtgctggaggccctggccaccatcaccatgcaggacggcttcacctacagacactaccacgagaacatcgccgccgtggtgttcagctacatcgccaccctgctgtacgtggtgcacgccgtgttcagcctgatcagatggaagagcagctag

SEQ ID NO: 87858 - DNA, 168 bp, synthetic construct
  misc_feature 1..168: note = Description of Artificial Sequence: Synthetic coding sequence
  source 1..168: mol_type = other DNA
atggcccccgccgccgccaccggcggcagcaccctgcccagcggcttcagcgtgttcaccaccctgcccgacctgctgttcatcttcgagttcgtgttcagctacatcgccaccctgctgtacgtggtgcacgccgtgttcagcctgatcagatggaagagcagctag

SEQ ID NO: 87859 - DNA, 336 bp, synthetic construct
  misc_feature 1..336: note = Description of Artificial Sequence: Synthetic coding sequence
  source 1..336: mol_type = other DNA
atggcccccgccgccgccaccggcggcagcaccctgcccagcggcttcagcgtgttcaccaccctgcccgacctgctgttcatcttcgagttcatcttcggcggcctggtgtggatcctggtggccagcagcctggtgccctggcccctggtgcagggctgggtgatgttcgtgagcgtgttctgcttcgtggccaccaccaccctgatcatcctgtacatcatcggcgcccacggcggcgagaccagctgggtgaccctggtgttcagctacatcgccaccctgctgtacgtggtgcacgccgtgttcagcctgatcagatggaagagcagctag

SEQ ID NO: 87860 - DNA, 294 bp, synthetic construct
  misc_feature 1..294: note = Description of Artificial Sequence: Synthetic coding sequence
  source 1..294: mol_type = other DNA
atggcccccgccgccgccaccggcggcagcaccctgcccagcggcttcagcgtgttcaccaccctgcccgacctgctgttcatcttcgagttcgacgccgcctaccactgcaccgccgccctgttctacctgagcgccagcgtgctggaggccctggccaccatcaccatgcaggacggcttcacctacagacactaccacgagaacatcgccgccgtggtgttcagctacatcgccaccctgctgtacgtggtgcacgccgtgttcagcctgatcagatggaagagcagctag

SEQ ID NO: 87861 - DNA, 462 bp, synthetic construct
  misc_feature 1..462: note = Description of Artificial Sequence: Synthetic coding sequence
  source 1..462: mol_type = other DNA
atggccagccccgacccccccgccaccagctacgcccccagcgacgtgcccagcggcgtggccctgttcctgaccatccccttcgccttcttcctgcccgagctgatcttcggcttcctggtgtggaccatggtggccgccacccacatcgtgtaccccctgctgcagggctgggtgatgtacgtgagcctgaccagcttcctgatcagcctgatgttcctgctgagctacctgttcggcttctacaagagattcgagagctggagagtgctggacagcctgtaccacggcaccaccggcatcctgtacatgagcgccgccgtgctgcaggtgcacgccaccatcgtgagcgagaagctgctggaccccagaatctactacatcaacagcgccgccagcttcttcgccttcatcgccaccctgctgtacatcctgcacgccttcagcatctactaccactag

SEQ ID NO: 87862 - DNA, 6216 bp, synthetic construct
  misc_feature 1..6216: note = Description of Artificial Sequence: Synthetic coding sequence
  source 1..6216: mol_type = other DNA
atggagctggcccacagcctgctgctgaacgaggaggccctggcccagatcaccgaggccaagagacccgtgttcatcttcgagtggctgagattcctggacaaggtgctggtggccgccaacaagaccgacgtgaaggagaagcagaagaagctggtggagcagctgaccggcctgatcagcagcagccccggcccccccaccagaaagctgctggccaagaacctggccgccctgtacagcatcggcgacaccttcaccgtgttccagaccctggacaagtgcaacgacatcatcagaaacaaggacgacaccgccgcctacctgcccaccaagctggccgccgtggcctgcgtgggcgccttctacgagaagatgggcagaatgctgggcagcgccttccccgagaccgtgaacaacctgctgaagagcctgaagagcgccgagagccagggcagaagcgagatcctgatgagcctgcagaaggtgctgagcggcctgggcggcgccgccgccagcagccacagagacatctacaagaacgccagaagcctgctgaccgacagaagcatggccgtgagatgcgccgtggccaagtgcctgctggagctgcagaacgaggccgtgttcatgtggaccgccgagctggagaacatcgccaccctgtgcttcaaggccctggagaacagcaactacggcgtgagagtggccgtgagcaagctgctgggcaccgtgatggccaccgccctgatgcccaagcaggccaccgtgatgagacagaacgtgaagagagccaccttcgacgaggtgctggagctgatggccaccggcttcctgagaggcggcagcggcttcctgaagagcggcggcgagatgctgaaggtgggcggcagcgtgaacagagaggtgagagtgggcgtgacccaggcctacgtggtgttcgtgaccaccctgggcggccagtggctggagagaagcttcgccaccttcctgagccacgtgctggacctggtgagccaccccagagccacccagacccacgtggaggccgtgtacagcagaagatgcgtgagcttcatcctgagagccaccgtgggcagcctgctgggcgagaaggcccagatcgccgccgccaaggagatctgccaggccatcggcaagcagatgaaggccgtggaggccgtggtgaacgacaccagcggcgagaacaagagcggcgccgccgacatcgccgccagccagcacgtgatggtgtgcgccctgcaggagctgggcagcctggtgcagagcctgaacgccaccgccagccccctgatccaggaggccagcatcggcctgctggagatcgtgaccagcgtgctgctgcaccccagcatggccgccagactggccgccgcctggtgcctgagatgcgtggccgtggccctgcccttccagctgacccccttcctggacagatgcgccgagagactgaacaacctgaagaccagccccgaggccgtgagcggctacagcttcgccatggccgccctgctgggcggcgtgcaccagtgccccctgggcatcccccacgccaagggcaagatggtggtgagcatcgccgaggacctgctgagaaccgccgcccagaacagcagactgagcctgcagagaacccaggccggctggctgctgctgggcgccctgatgaccctgggccccagcgtggtgagataccacctgcccaagatgctgctgctgtggagaaacgtgttccccagaagcctgaaggagctggaggccgagaaggccagaggcgacagcttcacctggcaggtgaccctggagggcagagccggcgccctgtgcgccatgagaagcttcgtggcccactgccccgagctgctgaccgaggacgtgatcagaaagctgatgacccccatcgagtgcgccatgaccatgatgagccacatccccagcgtgatgaaggcccacggcgcccacctgaaggccagcgccgccatggtgagactgagactgtacgacatcctggccctgctgccccccaagacctacgagggcagcttcaacgccctgctgagagagctggtggccgagttcaccctgaccgacaacagcgccaacaccaccaccagcctgctgagaagcctgtgccactacgacgacagcgtgctgctgggcagctggctgcaggagaccgaccacaagagcatcgaggaccagctgcagcccaacagcgccagcggcagcggcgccctggagcacgaccccagcagcatctacctgagaatccccgccggcgaggccgtgcccggccccctgcccctgggcgtgagcgtgatcgacgccagcgtggccctgttcggcgtggtgttcccccacgtgagctacaagcacagactgcagatgctggaccacttcgccgagtgcgtgaagcaggccaagggcgtgagacagcaggccgtgcagctgaacatcttcaccgccgtgctgagcgccctgaagggcctggccgagaacaagagcaccctgggccccgaggaggtgagaaagagcgccctgaccctggtgatgggccccctggacaaccccaaccccatcctgagatgcgccgccggcgaggccctgggcagaatggcccaggtggtgggcgaggccaccttcatcgccagaatggcccagtacagcttcgacaagctgaagagcgccagagacgtggtgagcagaaccggccacagcctggccctgggctgcctgcacagatacgtgggcggcatcggcagcggccagcacctgaagaccagcgtgagcatcctgctggccctggcccaggacggcaccagccccgaggtgcagacctggagcctgcacagcctggccctgatcgtggacagcagcggccccatgtacagaggctacgtggagcccaccctgagcctggtgctgaccctgctgctgaccgtgccccccagccacaccgaggtgcaccagtgcctgggcagatgcctgggcgccatcatcaccaccgtgggccccgagctgcagggcaacggcgccaccaccagcaccatcagaagcagctgcctggtgggctgcgccatcacccaggaccacagcgacagcctggtgcaggccgccgccatcagctgcctgcagcagctgcacatgttcgcccccagacacgtgaacctgagcagcctggtgcccagcctgtgcgtgcacctgtgcagcagccacctgctgctgagaagagccgccgtggcctgcctgagacagctggcccagagagaggccgccgaggtgtgcgagtacgccatgagcctggccaagaacaccggcgacaaggagagcagcagcgccaacgtgagccccttcgcccccggcgtgagcagcagaaccgacatccactgcagacaccagggcgtgaacatcaccgagaccggcctggagggcctgctgttcggcatgctggacagagagaccgacagaaagctgtgcagcgacatccacgacaccctgggccacatgctgagcagcctggccgtggagaagctgagccactggctgatgctgtgcaaggacgtgctggccgccagcagcgacatgagcaccgccaccctgctgagcagcggcaaggacgaggaggccgagaagaaggacgagatggacgacgacaccatgttcaccaccctgggcgaggaggacaagagcaagcccttcgtggcccccagatgggccaccagagtgttcgccgccgactgcctgtgcagaatcatcaacctgtgcgagaacgccgaccaggcccacttcgacctggccctggccagaagcgccaagctgagaaaccccaccaacgacctgctggtgctgcacctgagcgacctgatcagaatggccttcatggccgccaccgaccacagcaaccagctgagaatggccggcctgcaggccctggaggacatcatcaagaagttcgccagcgtgcccgagcccgagttccccggccacgtgatcctggagcagtaccaggccaacgtgggcgccgccctgagacccgccttcagccaggacacccccagcgacatcatcgccaaggcctgccaggtgtgcagcacctggatcggcagcggcgtggtgagcgacctgaacgacctgagaagagtgcacaacctgctggtgagcagcctggacaaggtgcaggccggcaagggcagcagcagccagctgtacagagagagcgccaccaccatggagaagctggccgtgctgaaggcctgggccgaggtgtacgtggtggccatgaacatcaagaaggaggccgagagcaagcccaagagagccatcaagaacaccgacgacgacgacgacgactgcggcaccatcgacgagctgccccccgacagcctgatcaccctggtgcagcccgagctgcccaccctgagcagactgtggctggccgccctgaaggactacgccctgctgaccctgcccgccgagttcagcagccagctgccccccgacggcggcgccttctacacccccgagaccatcgacaccgccagactgcactacagaaacagctgggcccccatcctgcacgccgtggccctgtggctgaacagcaccggcttcacctgcagcgagagcaccgaggccgccgccatcagcggcctgcagaagagaagcaccagcgtgaacctgaaccaggccagcggcgccgtgggcagcgccaagagcctgcccgagatcaacaaggacagaatgcacctgatcctgggcgtgagcatccagttcctgtgcagccccagacccgaggagcccatcgagcacgtgaccgcctgcctgcaggccctgcacaccctgctggacagcccctacgccagagtgcacatcgccgaggaccagctgatcggcgtggagctgctgagcgtgctgcacagactgctgctgacctggaaccccagcagcgtgcagctgctggtgaccggcgtggtgcagcagatcgtgagagccgcccaggactacctgcaggagaagagaaacaccctgaacgaggacgacatggagaaggaggcctgcaccgtgctgggcgagggcggcgacagcggcggcctgatccccggcaagagcctggtgttcgccaccatggagctgctgatgttcatcctggtgagacacatgccccacctgagcaccaaggtgagcgacagccccagccacatcgccaccaagaccagactgagcgaggagagcgccagactggtggccgccaccgtgaccatcctgagcgacctgcccagcctgtgcagccccgccggctgcatgaccatcctgcccaccatcctgttcctgatcgccagaatcctgaaggacaccgccatcaagagcgccgacaaccaggtgcccccccccgtgagcgccgccctgcagggcatcaagagcatcgtgaccctgagcatggccaagaccgaggccggcgtgcagaagcagtggaccgccctgatcagaagcaccctggcctgcatcctggagtacagccagcccgaggacagcgtgcccacccccgacgaggtgagcatgctgaccgccatcgccctgttcctgtggagcgccagcaacgagatcatcggcgtgcagagcctgcagaacggctgcatgaacagattcaagaacgccctgaacagctgcgacccctgggtgcaggccaagtgctaccagctgctgctgagcgtgttccagcacagcaacagagccctgagcaccccctacatccacagcctggcccccatcgtggtggagaagctgaaggccgtggagagaaacagacccgccagcaacatcgagctgctggccgtgcaggagggcatcaaggtgctggagaccctggtggccctgggcgaggagcagaacagagtgcagctgctggccctgctggtgcccaccctgatcagctacctgctggacgagaacagcttcgccagcgccagcagcgccagcaaggacctgcacgagttcgccctgcagaacctgatgcacatcggccccctgtacccccacgccttcaagaccgtgatgggcgccgcccccgagctgaaggtgagactggagaccgccgtgagagccagccaggccagcaaggccaaggccgccgccagacagcccgcccccgccatccacagcgcccccaccatcaagctgaagaccagcttcttctag

SEQ ID NO: 87863 - DNA, 1005 bp, synthetic construct
  misc_feature 1..1005: note = Description of Artificial Sequence: Synthetic coding sequence
  source 1..1005: mol_type = other DNA
atgagcgagcccatcagagtgctggtgaccggcgccgccggccagatcgcctacagcctgctgtacagcatcggcaacggcagcgtgttcggcaaggaccagcccatcatcctggtgctgctggacatcacccccatgatgggcgtgctggacggcgtgctgatggagctgcaggactgcgccctgcccctgctgaaggacgtgatcgccaccgacaaggaggacgtggccttcaaggacctggacgtggccatcctggtgggcagcatgcccagaagagagggcatggagagaaaggacctgctgaaggccaacgtgaagatcttcaagagccagggcgccgccctggacaagtacgccaagaagagcgtgaaggtgatcgtggtgggcaaccccgccaacaccaactgcctgaccgccagcaagagcgcccccagcatccccaaggagaacttcagctgcctgaccagactggaccacaacagagccaaggcccagatcgccctgaagctgggcgtgaccgccaacgacgtgaagaacgtgatcatctggggcaaccacagcagcacccagtaccccgacgtgaaccacgccaaggtgaagctgcagggcaaggaggtgggcgtgtacgaggccctgaaggacgacagctggctgaagggcgagttcgtgaccaccgtgcagcagagaggcgccgccgtgatcaaggccagaaagctgagcagcgccatgagcgccgccaaggccatctgcgaccacgtgagagacatctggttcggcacccccgagggcgagttcgtgagcatgggcgtgatcagcgacggcaacagctacggcgtgcccgacgacctgctgtacagcttccccgtggtgatcaagaacaagacctggaagttcgtggagggcctgcccatcaacgacttcagcagagagaagatggacctgaccgccaaggagctgaccgaggagaaggagagcgccttcgagttcctgagcagcgcctag

SEQ ID NO: 87864 - DNA, 1059 bp, synthetic construct
  misc_feature 1..1059: note = Description of Artificial Sequence: Synthetic coding sequence
  source 1..1059: mol_type = other DNA
atgagaagatgcagctacttccccaaggacgtgaccgtgttcgacaaggacgacaagagcgagcccatcagagtgctggtgaccggcgccgccggccagatcgcctacagcctgctgtacagcatcggcaacggcagcgtgttcggcaaggaccagcccatcatcctggtgctgctggacatcacccccatgatgggcgtgctggacggcgtgctgatggagctgcaggactgcgccctgcccctgctgaaggacgtgatcgccaccgacaaggaggacgtggccttcaaggacctggacgtggccatcctggtgggcagcatgcccagaagagagggcatggagagaaaggacctgctgaaggccaacgtgaagatcttcaagagccagggcgccgccctggacaagtacgccaagaagagcgtgaaggtgatcgtggtgggcaaccccgccaacaccaactgcctgaccgccagcaagagcgcccccagcatccccaaggagaacttcagctgcctgaccagactggaccacaacagagccaaggcccagatcgccctgaagctgggcgtgaccgccaacgacgtgaagaacgtgatcatctggggcaaccacagcagcacccagtaccccgacgtgaaccacgccaaggtgaagctgcagggcaaggaggtgggcgtgtacgaggccctgaaggacgacagctggctgaagggcgagttcgtgaccaccgtgcagcagagaggcgccgccgtgatcaaggccagaaagctgagcagcgccatgagcgccgccaaggccatctgcgaccacgtgagagacatctggttcggcacccccgagggcgagttcgtgagcatgggcgtgatcagcgacggcaacagctacggcgtgcccgacgacctgctgtacagcttccccgtggtgatcaagaacaagacctggaagttcgtggagggcctgcccatcaacgacttcagcagagagaagatggacctgaccgccaaggagctgaccgaggagaaggagagcgccttcgagttcctgagcagcgcctag

SEQ ID NO: 87865 - DNA, 738 bp, synthetic construct
  misc_feature 1..738: note = Description of Artificial Sequence: Synthetic coding sequence
  source 1..738: mol_type = other DNA
atgcccagaagagagggcatggagagaaaggacctgctgaaggccaacgtgaagatcttcaagagccagggcgccgccctggacaagtacgccaagaagagcgtgaaggtgatcgtggtgggcaaccccgccaacaccaactgcctgaccgccagcaagagcgcccccagcatccccaaggagaacttcagctgcctgaccagactggaccacaacagagccaaggcccagatcgccctgaagctgggcgtgaccgccaacgacgtgaagaacgtgatcatctggggcaaccacagcagcacccagtaccccgacgtgaaccacgccaaggtgaagctgcagggcaaggaggtgggcgtgtacgaggccctgaaggacgacagctggctgaagggcgagttcgtgaccaccgtgcagcagagaggcgccgccgtgatcaaggccagaaagctgagcagcgccatgagcgccgccaaggccatctgcgaccacgtgagagacatctggttcggcacccccgagggcgagttcgtgagcatgggcgtgatcagcgacggcaacagctacggcgtgcccgacgacctgctgtacagcttccccgtggtgatcaagaacaagacctggaagttcgtggagggcctgcccatcaacgacttcagcagagagaagatggacctgaccgccaaggagctgaccgaggagaaggagagcgccttcgagttcctgagcagcgcctag

SEQ ID NO: 87866 - DNA, 1017 bp, synthetic construct
  misc_feature 1..1017: note = Description of Artificial Sequence: Synthetic coding sequence
  source 1..1017: mol_type = other DNA
atgctgagcgccctggccagacccgccagcgccgccctgagaagaagcttcagcaccagcgcccagaacaacgccaaggtggccgtgctgggcgccagcggcggcatcggccagcccctgagcctgctgctgaagaacagccccctggtgagcagactgaccctgtacgacatcgcccacacccccggcgtggccgccgacctgagccacatcgagaccaaggccgccgtgaagggctacctgggccccgagcagctgcccgactgcctgaagggctgcgacgtggtggtgatccccgccggcgtgcccagaaagcccggcatgaccagagacgacctgttcaacaccaacgccaccatcgtggccaccctgaccgccgcctgcgcccagcactgccccgaggccatgatctgcgtgatcgccaaccccgtgaacagcaccatccccatcaccgccgaggtgttcaagaagcacggcgtgtacaaccccaacaagatcttcggcgtgaccaccctggacatcgtgagagccaacaccttcgtggccgagctgaagggcctggaccccgccagagtgaacgtgcccgtgatcggcggccacgccggcaagaccatcatccccctgatcagccagtgcacccccaaggtggacttcccccaggaccagctgaccgccctgaccggcagaatccaggaggccggcaccgaggtggtgaaggccaaggccggcgccggcagcgccaccctgagcatggcctacgccggcgccagattcgtgttcagcctggtggacgccatgaacggcaaggagggcgtggtggagtgcagcttcgtgaagagccaggagaccgagtgcacctacttcagcacccccctgctgctgggcaagaagggcatcgagaagaacctgggcatcggcaaggtgagcagcttcgaggagaagatgatcagcgacgccatccccgagctgaaggccagcatcaagaagggcgaggacttcgtgaagaccctgaagtag

SEQ ID NO: 87867 - DNA, 1872 bp, synthetic construct
  misc_feature 1..1872: note = Description of Artificial Sequence: Synthetic coding sequence
  source 1..1872: mol_type = other DNA
atgaacagatacaccaccatgagacagctgggcgacggcacctacggcagcgtgctgatgggcaagagcaacgagagcggcgagctggtggccatcaagagaatgaagagaaagttctacagctgggacgagtgcatgaacctgagagaggtgaagagcctgaagaagctgaaccacgccaacgtgatcaagctgaaggaggtgatcagagagaacgaccacctgtacttcatcttcgagtacatgaaggagaacctgtaccagctgatgaaggacagaaacaagctgttccccgagagcgtgatcagaaacatcatgtaccagatcctgcagggcctggccttcatccacaagcacggcttcttccacagagacatgaagcccgagaacctgctgtgcatgggccccgagctggtgaagatcgccgacttcggcctggccagagagctgagaagccagcccccctacaccgactacgtgagcaccagatggtacagagcccccgaggtgctgctgagaagcagcgtgtacagcagccccatcgacgtgtgggccgtgggcagcatcatggccgagctgtacatgctgagacccctgttccccggcaccagcgaggtggacgagatcttcaagatctgccaggtgctgggcacccccaagaagagcgactggcccgagggctaccagctggccagcagcatgaacttcagattcccccagtgcgtgcccatcaacctgaagaccctgatccccaacgccagcaacgaggccatccagctgatgaccgagatgctgaactgggaccccaagaagagacccaccgccagccaggccctgaagcacccctacttccaggtgggccaggtgctgggccccagcagcaaccacctggagagcaagcagagcctgaacaagcagctgcagcccctggagagcaagcccagcctggtggaggtggagcccaagcccctgcccgacatcatcgaccaggtggtgggccagccccagcccaagaccagccagcagcccctgcagcccatccagcccccccagaacctgagcgtgcagcagccccccaagcagcagagccaggagaagcccccccagaccctgttccccagcatcgtgaagaacatgcccaccaagcccaacggcaccctgagccacaagagcggcagaagaagatggggccagaccatcttcaagagcggcgacagctgggaggagctggaggactacgacttcggcgccagccacagcaagaagcccagcatgggcgtgttcaaggagaagagaaagaaggacagccccttcagactgcccgagcccgtgcccagcggcagcaaccacagcaccggcgagaacaagagcctgcccgccgtgaccagcctgaagagcgacagcgagctgagcaccgcccccaccagcaagcagtactacctgaagcagagcagatacctgcccggcgtgaaccccaagaaggtgagcctgatcgccagcggcaaggagatcaacccccacacctggagcaaccagctgttccccaagagcctgggccccgtgggcgccgagctggccttcaagagaagcaacgccggcaacctgggcagctacgccacctacaaccagagcggctacatccccagcttcctgaagaaggaggtgcagagcgccggccagagaatccacctggcccccctgaacgccaccgccagcgagtacacctggaacaccaagaccggcagaggccagttcagcggcagaacctacaaccccaccgccaagaacctgaacatcgtgaacagagcccagcccatccccagcgtgcacggcagaaccgactgggtggccaagtacggcggccacagatag

SEQ ID NO: 87868 - DNA, 1872 bp, synthetic construct; identical to SEQ ID NO: 87867
  misc_feature 1..1872: note = Description of Artificial Sequence: Synthetic coding sequence
  source 1..1872: mol_type = other DNA

SEQ ID NO: 87869 - DNA, 867 bp, synthetic construct
  misc_feature 1..867: note = Description of Artificial Sequence: Synthetic coding sequence
  source 1..867: mol_type = other DNA
atgaacagatacaccaccatgagacagctgggcgacggcacctacggcagcgtgctgatgggcaagagcaacgagagcggcgagctggtggccatcaagagaatgaagagaaagttctacagctgggacgagtgcatgaacctgagagaggtgaagagcctgaagaagctgaaccacgccaacgtgatcaagctgaaggaggtgatcagagagaacgaccacctgtacttcatcttcgagtacatgaaggagaacctgtaccagctgatgaaggacagaaacaagctgttccccgagagcgtgatcagaaacatcatgtaccagatcctgcagggcctggccttcatccacaagcacggcttcttccacagagacatgaagcccgagaacctgctgtgcatgggccccgagctggtgaagatcgccgacttcggcctggccagagagctgagaagccagcccccctacaccgactacgtgagcaccagatggtacagagcccccgaggtgctgctgagaagcagcgtgtacagcagccccatcgacgtgtgggccgtgggcagcatcatggccgagctgtacatgctgagacccctgttccccggcaccagcgaggtggacgagatcttcaagatctgccaggtgctgggcacccccaagaagagcgactggcccgagggctaccagctggccagcagcatgaacttcagattcccccagtgcgtgcccatcaacctgaagaccctgatccccaacgccagcaacgaggccatccagctgatgaccgagatgctgaactgggaccccaagaagagacccaccgccagccagccctgcttcctggtggaggtggagagacccaactag

SEQ ID NO: 87870 - DNA, 1374 bp, synthetic construct
  misc_feature 1..1374: note = Description of Artificial Sequence: Synthetic coding sequence
  source 1..1374: mol_type = other DNA
atgaacagatacaccaccatgagacagctgggcgacggcacctacggcagcgtgctgatgggcaagagcaacgagagcggcgagctggtggccatcaagagaatgaagagaaagttctacagctgggacgagtgcatgaacctgagagaggtgaagagcctgaagaagctgaaccacgccaacgtgatcaagctgaaggaggtgatcagagagaacgaccacctgtacttcatcttcgagtacatgaaggagaacctgtaccagctgatgaaggacagaaacaagctgttccccgagagcgtgatcagaaacatcatgtaccagatcctgcagggcctggccttcatccacaagcacggcttcttccacagagacatgaagcccgagaacctgctgtgcatgggccccgagctggtgaagatcgccgacttcggcctggccagagagctgagaagccagcccccctacaccgactacgtgagcaccagatggtacagagcccccgaggtgctgctgagaagcagcgtgtacagcagccccatcgacgtgtgggccgtgggcagcatcatggccgagctgtacatgctgagacccctgttccccggcaccagcgaggtggacgagatcttcaagatctgccaggtgctgggcacccccaagaagagcgactggcccgagggctaccagctggccagcagcatgaacttcagattcccccagtgcgtgcccatcaacctgaagaccctgatccccaacgccagcaacgaggccatccagctgatgaccgagatgctgaactgggaccccaagaagagacccaccgccagccaggccctgaagcacccctacttccaggtgggccaggtgctgggccccagcagcaaccacctggagagcaagcagagcctgaacaagcagctgcagcccctggagagcaagcccagcctggtggaggtggagcccaagcccctgcccgacatcatcgaccaggtggtgggccagccccagcccaagaccagccagcagcccctgcagcccatccagcccccccagaacctgagcgtgcagcagccccccaagcagcagagccaggagaagcccccccagaccctgttccccagcatcgtgaagaacatgcccaccaagcccaacggcaccctgagccacaagagcggcagaagaagatggggccagaccatcttcaagagcggcgacagctgggaggagctggaggactacgacttcggcgccagccacagcaagaagcccagcatgggcgtgttcaaggagaagagaaagaaggacagccccttcagacagcaggtgaagatggccgtgatcagcctgagcgcccaccagttccccaccctgtag

SEQ ID NO: 87871 - DNA, 942 bp, synthetic construct
  misc_feature 1..942: note = Description of Artificial Sequence: Synthetic coding sequence
  source 1..942: mol_type = other DNA
atggaggagatgagcggcgagagcgtggtgagcagcgccgtgcccgccgccgccaccagaaccaccagcttcaagggcaccagccccagcagcaagtacgtgaagctgaacgtgggcggcgccctgtactacaccaccatgcagaccctgaccaagcaggacaccatgctgaaggccatgttcagcggcagaatggaggtgctgaccgacagcgagggctggatcctgatcgacagatgcggcaagcacttcggcaccatcctgaactacctgagagacggcgccgtgcccctgcccgagagcagaagagagatcgaggagctgctggccgaggccaagtactacctggtgcagggcctggtggaggagtgccaggccgccctgcagaacaaggacacctacgagcccttctgcaaggtgcccgtgatcaccagcagcaaggaggagcagaagctgatcgccaccagcaacaagcccgccgtgaagctgctgtacaacagaagcaacaacaagtacagctacaccagcaacagcgacgacaacatgctgaagaacatcgagctgttcgacaagctgagcctgagattcaacggcagagtgctgttcatcaaggacgtgatcggcgacgagatctgctgctggagcttctacggccagggcagaaagatcgccgaggtgtgctgcaccagcatcgtgtacgccaccgagaagaagcagaccaaggtggagttccccgaggccagaatctacgaggagaccctgaacatcctgctgtacgaggcccaggacggcagaggccccgacaacgccctgctggaggccaccggcggcgccgccggcagaagccaccacctggacgaggacgaggagagagagagaatcgagagagtgagaagaatccacatcaagagacccgacgacagagcccacctgcaccagtag

SEQ ID NO: 87872 - DNA, 558 bp, synthetic construct
  misc_feature 1..558: note = Description of Artificial Sequence: Synthetic coding sequence
  source 1..558: mol_type = other DNA
atgggccccgagagacacctgagcggcgcccccgccagaatggccaccgtggtgctgggcggcgacaccatgggccccgagagaatcttccccaaccagaccgaggagctgggccaccagggccccagcgagggcaccggcgactggagcagcgaggagcccgaggaggagcaggaggagaccggcagcggccccgccggctacagctaccagcccctgaaccaggaccccgagcaggaggaggtggagctggcccccgtgggcgacggcgacgtggtggccgacatccaggacagaatccaggccctgggcctgcacctgcccgacccccccctggagagcgaggacgaggacgaggagggcgccaccgccctgaacaaccacagcagcatccccatggaccccgagcacgtggagctggtgaagagaaccatggccggcgtgagcctgcccgcccccggcgtgcccgcctgggccagagagatcagcgacgcccagtgggaggacgtggtgcagaaggccctgcaggccagacaggccagccccgcctggaagtag

SEQ ID NO: 87873 - DNA, 1719 bp, synthetic construct
  misc_feature 1..1719: note = Description of Artificial Sequence: Synthetic coding sequence
  source 1..1719: mol_type = other DNA
atggagcccgaggcccccagaagaagacacacccaccagagaggctacctgctgaccagaaacccccacctgaacaaggacctggccttcaccctggaggagagacagcagctgaacatccacggcctgctgccccccagcttcaacagccaggagatccaggtgctgagagtggtgaagaacttcgagcacctgaacagcgacttcgacagatacctgctgctgatggacctgcaggacagaaacgagaagctgttctacagagtgctgaccagcgacatcgagaagttcatgcccatcgtgtacacccccaccgtgggcctggcctgccagcagtacagcctggtgttcagaaagcccagaggcctgttcatcaccatccacgacagaggccacatcgccagcgtgctgaacgcctggcccgaggacgtgatcaaggccatcgtggtgaccgacggcgagagaatcctgggcctgggcgacctgggctgcaacggcatgggcatccccgtgggcaagctggccctgtacaccgcctgcggcggcatgaacccccaggagtgcctgcccgtgatcctggacgtgggcaccgagaacgaggagctgctgaaggaccccctgtacatcggcctgagacagagaagagtgagaggcagcgagtacgacgacttcctggacgagttcatggaggccgtgagcagcaagtacggcatgaactgcctgatccagttcgaggacttcgccaacgtgaacgccttcagactgctgaacaagtacagaaaccagtactgcaccttcaacgacgacatccagggcaccgccagcgtggccgtggccggcctgctggccgccctgagaatcaccaagaacaagctgagcgaccagaccatcctgttccagggcgccggcgaggccgccctgggcatcgcccacctgatcgtgatggccctggagaaggagggcctgcccaaggagaaggccatcaagaagatctggctggtggacagcaagggcctgatcgtgaagggcagagccagcctgacccaggagaaggagaagttcgcccacgagcacgaggagatgaagaacctggaggccatcgtgcaggagatcaagcccaccgccctgatcggcgtggccgccatcggcggcgccttcagcgagcagatcctgaaggacatggccgccttcaacgagagacccatcatcttcgccctgagcaaccccaccagcaaggccgagtgcagcgccgagcagtgctacaagatcaccaagggcagagccatcttcgccagcggcagccccttcgaccccgtgaccctgcccaacggccagaccctgtaccccggccagggcaacaacagctacgtgttccccggcgtggccctgggcgtggtggcctgcggcctgagacagatcaccgacaacatcttcctgaccaccgccgaggtgatcgcccagcaggtgagcgacaagcacctggaggagggcagactgtacccccccctgaacaccatcagagacgtgagcctgaagatcgccgagaagatcgtgaaggacgcctaccaggagaagaccgccaccgtgtaccccgagccccagaacaaggaggccttcgtgagaagccagatgtacagcaccgactacgaccagatcctgcccgactgctacagctggcccgaggaggtgcagaagatccagaccaaggtggaccagtag

SEQ ID NO: 87874 - DNA, 699 bp, synthetic construct
  misc_feature 1..699: note = Description of Artificial Sequence: Synthetic coding sequence
  source 1..699: mol_type = other DNA
gtgaagggcagagccagcctgacccaggagaaggagaagttcgcccacgagcacgaggagatgaagaacctggaggccatcgtgcaggagatcaagcccaccgccctgatcggcgtggccgccatcggcggcgccttcagcgagcagatcctgaaggacatggccgccttcaacgagagacccatcatcttcgccctgagcaaccccaccagcaaggccgagtgcagcgccgagcagtgctacaagatcaccaagggcagagccatcttcgccagcggcagccccttcgaccccgtgaccctgcccaacggccagaccctgtaccccggccagggcaacaacagctacgtgttccccggcgtggccctgggcgtggtggcctgcggcctgagacagatcaccgacaacatcttcctgaccaccgccgaggtgatcgcccagcaggtgagcgacaagcacctggaggagggcagactgtacccccccctgaacaccatcagagacgtgagcctgaagatcgccgagaagatcgtgaaggacgcctaccaggagaagaccgccaccgtgtaccccgagccccagaacaaggaggccttcgtgagaagccagatgtacagcaccgactacgaccagatcctgcccgactgctacagctggcccgaggaggtgcagaagatccagaccaaggtggaccagtag

SEQ ID NO: 87875 - DNA, 1221 bp, synthetic construct
  misc_feature 1..1221: note = Description of Artificial Sequence: Synthetic coding sequence
  source 1..1221: mol_type = other DNA
atgggcatccccgtgggcaagctggccctgtacaccgcctgcggcggcatgaacccccaggagtgcctgcccgtgatcctggacgtgggcaccgagaacgaggagctgctgaaggaccccctgtacatcggcctgagacagagaagagtgagaggcagcgagtacgacgacttcctggacgagttcatggaggccgtgagcagcaagtacggcatgaactgcctgatccagttcgaggacttcgccaacgtgaacgccttcagactgctgaacaagtacagaaaccagtactgcaccttcaacgacgacatccagggcaccgccagcgtggccgtggccggcctgctggccgccctgagaatcaccaagaacaagctgagcgaccagaccatcctgttccagggcgccggcgaggccgccctgggcatcgcccacctgatcgtgatggccctggagaaggagggcctgcccaaggagaaggccatcaagaagatctggctggtggacagcaagggcctgatcgtgaagggcagagccagcctgacccaggagaaggagaagttcgcccacgagcacgaggagatgaagaacctggaggccatcgtgcaggagatcaagcccaccgccctgatcggcgtggccgccatcggcggcgccttcagcgagcagatcctgaaggacatggccgccttcaacgagagacccatcatcttcgccctgagcaaccccaccagcaaggccgagtgcagcgccgagcagtgctacaagatcaccaagggcagagccatcttcgccagcggcagccccttcgaccccgtgaccctgcccaacggccagaccctgtaccccggccagggcaacaacagctacgtgttccccggcgtggccctgggcgtggtggcctgcggcctgagacagatcaccgacaacatcttcctgaccaccgccgaggtgatcgcccagcaggtgagcgacaagcacctggaggagggcagactgtacccccccctgaacaccatcagagacgtgagcctgaagatcgccgagaagatcgtgaaggacgcctaccaggagaagaccgccaccgtgtaccccgagccccagaacaaggaggccttcgtgagaagccagatgtacagcaccgactacgaccagatcctgcccgactgctacagctggcccgaggaggtgcagaagatccagaccaaggtggaccagtag

SEQ ID NO: 87876 - DNA, 1494 bp, synthetic construct
  misc_feature 1..1494: note = Description of Artificial Sequence: Synthetic coding sequence
  source 1..1494: mol_type = other DNA
atggacctgcaggacagaaacgagaagctgttctacagagtgctgaccagcgacatcgagaagttcatgcccatcgtgtacacccccaccgtgggcctggcctgccagcagtacagcctggtgttcagaaagcccagaggcctgttcatcaccatccacgacagaggccacatcgccagcgtgctgaacgcctggcccgaggacgtgatcaaggccatcgtggtgaccgacggcgagagaatcctgggcctgggcgacctgggctgcaacggcatgggcatccccgtgggcaagctggccctgtacaccgcctgcggcggcatgaacccccaggagtgcctgcccgtgatcctggacgtgggcaccgagaacgaggagctgctgaaggaccccctgtacatcggcctgagacagagaagagtgagaggcagcgagtacgacgacttcctggacgagttcatggaggccgtgagcagcaagtacggcatgaactgcctgatccagttcgaggacttcgccaacgtgaacgccttcagactgctgaacaagtacagaaaccagtactgcaccttcaacgacgacatccagggcaccgccagcgtggccgtggccggcctgctggccgccctgagaatcaccaagaacaagctgagcgaccagaccatcctgttccagggcgccggcgaggccgccctgggcatcgcccacctgatcgtgatggccctggagaaggagggcctgcccaaggagaaggccatcaagaagatctggctggtggacagcaagggcctgatcgtgaagggcagagccagcctgacccaggagaaggagaagttcgcccacgagcacgaggagatgaagaacctggaggccatcgtgcaggagatcaagcccaccgccctgatcggcgtggccgccatcggcggcgccttcagcgagcagatcctgaaggacatggccgccttcaacgagagacccatcatcttcgccctgagcaaccccaccagcaaggccgagtgcagcgccgagcagtgctacaagatcaccaagggcagagccatcttcgccagcggcagccccttcgaccccgtgaccctgcccaacggccagaccctgtaccccggccagggcaacaacagctacgtgttccccggcgtggccctgggcgtggtggcctgcggcctgagacagatcaccgacaacatcttcctgaccaccgccgaggtgatcgcccagcaggtgagcgacaagcacctggaggagggcagactgtacccccccctgaacaccatcagagacgtgagcctgaagatcgccgagaagatcgtgaaggacgcctaccaggagaagaccgccaccgtgtaccccgagccccagaacaaggaggccttcgtgagaagccagatgtacagcaccgactacgaccagatcctgcccgactgctacagctggcccgaggaggtgcagaagatccagaccaaggtggaccagtag

SEQ ID NO: 87877 - DNA, 1755 bp, synthetic construct
  misc_feature 1..1755: note = Description of Artificial Sequence: Synthetic coding sequence
  source 1..1755: mol_type = other DNA
atgctgagcagactgagagtggtgagcaccacctgcaccctggcctgcagacacctgcacatcaaggagaagggcaagcccctgatgctgaaccccagaaccaacaagggcatggccttcaccctgcaggagagacagatgctgggcctgcagggcctgctgccccccaagatcgagacccaggacatccaggccctgagattccacagaaacctgaagaagatgaccagccccctggagaagtacatctacatcatgggcatccaggagagaaacgagaagctgttctacagaatcctgcaggacgacatcgagagcctgatgcccatcgtgtacacccccaccgtgggcctggcctgcagccagtacggccacatcttcagaagacccaagggcctgttcatcagcatcagcgacagaggccacgtgagaagcatcgtggacaactggcccgagaaccacgtgaaggccgtggtggtgaccgacggcgagagaatcctgggcctgggcgacctgggcgtgtacggcatgggcatccccgtgggcaagctgtgcctgtacaccgcctgcgccggcatcagacccgacagatgcctgcccgtgtgcatcgacgtgggcaccgacaacatcgccctgctgaaggaccccttctacatgggcctgtaccagaagagagacagaacccagcagtacgacgacctgatcgacgagttcatgaaggccatcaccgacagatacggcagaaacaccctgatccagttcgaggacttcggcaaccacaacgccttcagattcctgagaaagtacagagagaagtactgcaccttcaacgacgacatccagggcaccgccgccgtggccctggccggcctgctggccgcccagaaggtgatcagcaagcccatcagcgagcacaagatcctgttcctgggcgccggcgaggccgccctgggcatcgccaacctgatcgtgatgagcatggtggagaacggcctgagcgagcaggaggcccagaagaagatctggatgttcgacaagtacggcctgctggtgaagggcagaaaggccaagatcgacagctaccaggagcccttcacccacagcgcccccgagagcatccccgacaccttcgaggacgccgtgaacatcctgaagcccagcaccatcatcggcgtggccggcgccggcagactgttcacccccgacgtgatcagagccatggccagcatcaacgagagacccgtgatcttcgccctgagcaaccccaccgcccaggccgagtgcaccgccgaggaggcctacaccctgaccgagggcagatgcctgttcgccagcggcagccccttcggccccgtgaagctgaccgacggcagagtgttcacccccggccagggcaacaacgtgtacatcttccccggcgtggccctggccgtgatcctgtgcaacaccagacacatcagcgacagcgtgttcctggaggccgccaaggccctgaccagccagctgaccgacgaggagctggcccagggcagactgtacccccccctggccaacatccaggaggtgagcatcaacatcgccatcaaggtgaccgagtacctgtacgccaacaagatggccttcagataccccgagcccgaggacaaggccaagtacgtgaaggagagaacctggagaagcgagtacgacagcctgctgcccgacgtgtacgagtggcccgagagcgccagcagcccccccgtgatcaccgagtag

SEQ ID NO: 87878 - DNA, 1440 bp, synthetic construct
  misc_feature 1..1440: note = Description of Artificial Sequence: Synthetic coding sequence
  source 1..1440: mol_type = other DNA
atgctgagcagactgagagtggtgagcaccacctgcaccctggcctgcagacacctgcacatcaaggagaagggcaagcccctgatgctgaaccccagaaccaacaagggcatggccttcaccctgcaggagagacagatgctgggcctgcagggcctgctgccccccaagatcgagacccaggacatccaggccctgagattccacagaaacctgaagaagatgaccagccccctggagaagtacatctacatcatgggcatccaggagagaaacgagaagctgttctacagaatcctgcaggacgacatcgagagcctgatgcccatcgtgtacacccccaccgtgggcctggcctgcagccagtacggccacatcttcagaagacccaagggcctgttcatcagcatcagcgacagaggccacgtgagaagcatcgtggacaactggcccgagaaccacgtgaaggccgtggtggtgaccgacggcgagagaatcctgggcctgggcgacctgggcgtgtacggcatgggcatccccgtgggcaagctgtgcctgtacaccgcctgcgccggcatcagacccgacagatgcctgcccgtgtgcatcgacgtgggcaccgacaacatcgccctgctgaaggaccccttctacatgggcctgtaccagaagagagacagaacccagcagtacgacgacctgatcgacgagttcatgaaggccatcaccgacagatacggcagaaacaccctgatccagttcgaggacttcggcaaccacaacgccttcagattcctgagaaagtacagagagaagtactgcaccttcaacgacgacatccagggcaccgccgccgtggccctggccggcctgctggccgcccagaaggtgatcagcaagcccatcagcgagcacaagatcctgttcctgggcgccggcgaggccgccctgggcatcgccaacctgatcgtgatgagcatggtggagaacggcctgagcgagcaggaggcccagaagaagatctggatgttcgacaagtacggcctgctggtgaagggcagaaaggccaagatcgacagctaccaggagcccttcacccacagcgcccccgagagcatccccgacaccttcgaggacgccgtgaacatcctgaagcccagcaccatcatcggcgtggccggcgccggcagactgttcacccccgacgtgatcagagccatggccagcatcaacgagagacccgtgatcttcgccctgagcaaccccaccgcccaggccgagtgcaccgccgaggaggcctacaccctgaccgagggcagatgcctgttcgccagcggcagccccttcggccccgtgaagctgaccgacggcagagtgttcacccccggccagggcaacaacgtgtacatcttccccggctacagaatccccatctgctag

SEQ ID NO: 87879 - DNA, 780 bp, synthetic construct
  misc_feature 1..780: note = Description of Artificial Sequence: Synthetic coding sequence
  source 1..780: mol_type = other DNA
atggccttcaccctggaggagagactgcagctgggcatccacggcctgatccccccctgcttcctgagccaggacgtgcagctgctgagaatcatgagatactacgagagacagcagagcgacctggacaagtacatcatcctgatgaccctgcaggacagaaacgagaagctgttctacagagtgctgaccagcgacgtggagaagttcatgcccatcgtgtacacccccaccgtgggcctggcctgccagcactacggcctgaccttcagaagacccagaggcctgttcatcaccatccacgacaagggccacctggccaccatgctgaacagctggcccgaggacaacatcaaggccgtggtggtgaccgacggcgagagaatcctgggcctgggcgacctgggctgctacggcatgggcatccccgtgggcaagctggccctgtacaccgcctgcggcggcgtgaacccccagcagtgcctgcccgtgctgctggacgtgggcaccaacaacgaggagctgctgagagaccccctgtacatcggcctgaagcaccagagagtgcacggcaaggcctacgacgacctgctggacgagttcatgcaggccgtgaccgacaagttcggcatcaactgcctgatccagttcgaggacttcgccaacgccaacgccttcagactgctgaacaagtacagaaacaagtactgcatgttcaacgacgacatccaggacgacttcagcagaggccccaagagaagccagctgttcttcaagtag

SEQ ID NO: 87880 - DNA, 1815 bp, synthetic construct
  misc_feature 1..1815: note = Description of Artificial Sequence: Synthetic coding sequence
  source 1..1815: mol_type = other DNA
atgggcgccgccctgggcaccggcaccagactggccccctggcccggcagagcctgcggcgccctgcccagatggacccccaccgcccccgcccagggctgccacagcaagcccggccccgccagacccgtgcccctgaagaagagaggctacgacgtgaccagaaacccccacctgaacaagggcatggccttcaccctggaggagagactgcagctgggcatccacggcctgatccccccctgcttcctgagccaggacgtgcagctgctgagaatcatgagatactacgagagacagcagagcgacctggacaagtacatcatcctgatgaccctgcaggacagaaacgagaagctgttctacagagtgctgaccagcgacgtggagaagttcatgcccatcgtgtacacccccaccgtgggcctggcctgccagcactacggcctgaccttcagaagacccagaggcctgttcatcaccatccacgacaagggccacctggccaccatgctgaacagctggcccgaggacaacatcaaggccgtggtggtgaccgacggcgagagaatcctgggcctgggcgacctgggctgctacggcatgggcatccccgtgggcaagctggccctgtacaccgcctgcggcggcgtgaacccccagcagtgcctgcccgtgctgctggacgtgggcaccaacaacgaggagctgctgagagaccccctgtacatcggcctgaagcaccagagagtgcacggcaaggcctacgacgacctgctggacgagttcatgcaggccgtgaccgacaagttcggcatcaactgcctgatccagttcgaggacttcgccaacgccaacgccttcagactgctgaacaagtacagaaacaagtactgcatgttcaacgacgacatccagggcaccgccagcgtggccgtggccggcatcctggccgccctgagaatcaccaagaacaagctgagcaaccacgtgttcgtgttccagggcgccggcgaggccgccatgggcatcgcccacctgctggtgatggccctggagaaggagggcgtgcccaaggccgaggccaccagaaagatctggatggtggacagcaagggcctgatcgtgaagggcagaagccacctgaaccacgagaaggagatgttcgcccaggaccaccccgaggtgaacagcctggaggaggtggtgagactggtgaagcccaccgccatcatcggcgtggccgccatcgccggcgccttcaccgagcagatcctgagagacatggccagcttccacgagagacccatcatcttcgccctgagcaaccccaccagcaaggccgagtgcaccgccgagaagtgctacagagtgaccgagggcagaggcatcttcgccagcggcagccccttcaagagcgtgaccctggaggacggcaagaccttcatccccggccagggcaacaacgcctacgtgttccccggcgtggccctgggcgtgatcgccggcggcatcagacacatccccgacgagatcttcctgctgaccgccgagcagatcgcccaggaggtgagcgagcagcacctgagccagggcagactgtacccccccctgagcaccatcagagacgtgagcctgagaatcgccatcaaggtgctggactacgcctacaagcacaacctggccagctactaccccgagcccaaggacaaggaggccttcgtgagaagcctggtgtacacccccgactacgacagcttcaccctggacagctacacctggcccaaggaggccatgaacgtgcagaccgtgtag

SEQ ID NO: 87881 - DNA, 1815 bp, synthetic construct; identical to SEQ ID NO: 87880
  misc_feature 1..1815: note = Description of Artificial Sequence: Synthetic coding sequence
  source 1..1815: mol_type = other DNA

SEQ ID NO: 87882 - DNA, 1746 bp, synthetic construct
  misc_feature 1..1746: note = Description of Artificial Sequence: Synthetic coding sequence
  source 1..1746: mol_type = other DNA
atgggcgccgccctgggcaccggcaccagactggccccctggcccggcagagcctgcggcgccctgcccagatggacccccaccgcccccgcccagggctgccacagcaagcccggccccgccagacccgtgcccctgaagaagagaggctacgacgtgaccagaaacccccacctgaacaagggcatggccttcaccctggaggagagactgcagctgggcatccacggcctgatccccccctgcttcctgagccaggacgtgcagctgctgagaatcatgagatactacgagagacagcagagcgacctggacaagtacatcatcctgatgaccctgcaggacagaaacgagaagctgttctacagagtgctgaccagcgacgtggagaagttcatgcccatcgtgtacacccccaccgtgggcctggcctgccagcactacggcctgaccttcagaagacccagaggcctgttcatcaccatccacgacaagggccacctggccaccatgctgaacagctggcccgaggacaacatcaaggccgtggtggtgaccgacggcgagagaatcctgggcctgggcgacctgggctgctacggcatgggcatccccgtgggcaagctggccctgtacaccgcctgcggcggcgtgaacccccagcagtgcctgcccgtgctgctggacgtgggcaccaacaacgaggagctgctgagagaccccctgtacatcggcctgaagcaccagagagtgcacggcaaggcctacgacgacctgctggacgagttcatgcaggccgtgaccgacaagttcggcatcaactgcctgatccagttcgaggacttcgccaacgccaacgccttcagactgctgaacaagtacagaaacaagtactgcatgttcaacgacgacatccagggcaccgccagcgtggccgtggccggcatcctggccgccctgagaatcaccaagaacaagctgagcaaccacgtgttcgtgttccagggcgccggcgaggccgccatgggcatcgcccacctgctggtgatggccctggagaaggagggcgtgcccaaggccgaggccaccagaaagatctggatggtggacagcaagggcctgatcgtgaagggcagaagccacctgaaccacgagaaggagatgttcgcccaggaccaccccgaggtgaacagcctggaggaggtggtgagactggtgaagcccaccgccatcatcggcgtggccgccatcgccggcgccttcaccgagcagatcctgagagacatggccagcttccacgagagacccatcatcttcgccctgagcaaccccaccagcaaggccgagtgcaccgccgagaagtgctacagagtgaccgagggcagaggcatcttcgccagcggcagccccttcaagagcgtgaccctggaggacggcaagaccttcatccccggccagggcaacaacgcctacgtgttccccggcgtggccctgggcgtgatcgccggcggcatcagacacatccccgacgagatcttcctgctgaccgccgagcagatcgcccaggaggtgagcgagcagcacctgagccagggcagactgtacccccccctgagcaccatcagagacgtgagcctgagaatcgccatcaaggtgctggactacgcctacaagcacaacctggccagctactaccccgagcccaaggacaaggaggccttcgtgagaagcctggtgtacacctag

SEQ ID NO: 87883 - DNA, 1029 bp, synthetic construct
  misc_feature 1..1029: note = Description of Artificial Sequence: Synthetic coding sequence
  source 1..1029: mol_type = other DNA
atgggcgccgccctgggcaccggcaccagactggccccctggcccggcagagcctgcggcgccctgcccagatggacccccaccgcccccgcccagggctgccacagcaagcccggccccgccagacccgtgcccctgaagaagagaggctacgacgtgaccagaaacccccacctgaacaagggcatggccttcaccctggaggagagactgcagctgggcatccacggcctgatccccccctgcttcctgagccaggacgtgcagctgctgagaatcatgagatactacgagagacagcagagcgacctggacaagtacatcatcctgatgaccctgcaggacagaaacgagaagctgttctacagagtgctgaccagcgacgtggagaagttcatgcccatcgtgtacacccccaccgtgggcctggcctgccagcactacggcctgaccttcagaagacccagaggcctgttcatcaccatccacgacaagggccacctggccaccatgctgaacagctggcccgaggacaacatcaaggccgtggtggtgaccgacggcgagagaatcctgggcctgggcgacctgggctgctacggcatgggcatccccgtgggcaagctggccctgtacaccgcctgcggcggcgtgaacccccagcagtgcctgcccgtgctgctggacgtgggcaccaacaacgaggagctgctgagagaccccctgtacatcggcctgaagcaccagagagtgcacggcaaggcctacgacgacctgctggacgagttcatgcaggccgtgaccgacaagttcggcatcaactgcctgatccagttcgaggacttcgccaacgccaacgccttcagactgctgaacaagtacagaaacaagtactgcatgttcaacgacgacatccagggcaccacctgccacaccttcagctgcccctggcacctgtgggcccaggtgatgttccagcacatccccggccccatgggcttcagcgagtggctgcccagaaacagctag

SEQ ID NO: 87884 - DNA, 189 bp, synthetic construct
  misc_feature 1..189: note = Description of Artificial Sequence: Synthetic coding sequence
  source 1..189: mol_type = other DNA
atgggcgccgccctgggcaccggcaccagactggccccctggcccggcagagcctgcggcgccctgcccagatggacccccaccgcccccgcccagggctgccacagcaagcccggccccgccagacccgtgcccctgaagaagagaggctacgacgtgaccagaaacccccacctgaacaaggtgtag

SEQ ID NO: 87885 - DNA, 186 bp, synthetic construct
  misc_feature 1..186: note = Description of Artificial Sequence: Synthetic coding sequence
  source 1..186: mol_type = other DNA
atgggcgccgccctgggcaccggcaccagactggccccctggcccggcagagcctgcggcgccctgcccagatggacccccaccgcccccgcccagggctgccacagcaagcccggccccgccagacccgtgcccctgaagaagagaggctacgacgtgaccagaaacccccacctgaacaagtag

SEQ ID NO: 87886 - DNA, 456 bp, synthetic construct
  misc_feature 1..456: note = Description of Artificial Sequence: Synthetic coding sequence
  source 1..456: mol_type = other DNA
atgggcgccgccctgggcaccggcaccagactggccccctggcccggcagagcctgcggcgccctgcccagatggacccccaccgcccccgcccagggctgccacagcaagcccggccccgccagacccgtgcccctgaagaagagaggctacgacgtgaccagaaacccccacctgaacaagggcatggccttcaccctggaggagagactgcagctgggcatccacggcctgatccccccctgcttcctgagccaggacgtgcagctgctgagaatcatgagatactacgagagacagcagagcgacctggacaagtacatcatcctgatgaccctgcaggacagaaacgagaagctgttctacagagtgctgaccagcgacgtggagaagttcatgcccatcgtgtacacccccaccgtgggcctggcctgccagcactacggcctgacctag

SEQ ID NO: 87887 - DNA, 240 bp, synthetic construct
  misc_feature 1..240: note = Description of Artificial Sequence: Synthetic coding sequence
  source 1..240: mol_type = other DNA
atgggcgccgccctgggcaccggcaccagactggccccctggcccggcagagcctgcggcgccctgcccagatggacccccaccgcccccgcccagggctgccacagcaagcccggccccgccagacccgtgcccctgaagaagagaggctacgacgtgaccagaaacccccacctgaacaaggtgatgggccagagagccggcagacccgccctgagaagcagaggctgcagaaagtag

SEQ ID NO: 87888 - DNA, 1815 bp, synthetic construct; identical to SEQ ID NO: 87880
  misc_feature 1..1815: note = Description of Artificial Sequence: Synthetic coding sequence
  source 1..1815: mol_type = other DNA

SEQ ID NO: 87889 - DNA, 759 bp, synthetic construct
  misc_feature 1..759: note = Description of Artificial Sequence: Synthetic coding sequence
  source 1..759: mol_type = other DNA
atggccttcaccctggaggagagactgcagctgggcatccacggcctgatccccccctgcttcctgagccaggacgtgcagctgctgagaatcatgagatactacgagagacagcagagcgacctggacaagtacatcatcctgatgaccctgcaggacagaaacgagaagctgttctacagagtgctgaccagcgacgtggagaagttcatgcccatcgtgtacacccccaccgtgggcctggcctgccagcactacggcctgaccttcagaagacccagaggcctgttcatcaccatccacgacaagggccacctggccaccatgctgaacagctggcccgaggacaacatcaaggccgtggtggtgaccgacggcgagagaatcctgggcctgggcgacctgggctgctacggcatgggcatccccgtgggcaagctggccctgtacaccgcctgcggcggcgtgaacccccagcagtgcctgcccgtgctgctggacgtgggcaccaacaacgaggagctgctgagagaccccctgtacatcggcctgaagcaccagagagtgcacggcaaggcctacgacgacctgctggacgagttcatgcaggccgtgaccgacaagttcggcatcaactgcctgatccagttcgaggacttcgccaacgccaacgccttcagactgctgaacaagtacagaaacaagtactgcatgttcaacgacgacatccaggcccccagcaccgcccccgccacctag

SEQ ID NO: 87890 - DNA, 1482 bp, synthetic construct
  misc_feature 1..1482: note = Description of Artificial Sequence: Synthetic coding sequence
  source 1..1482: mol_type = other DNA
atgagaggcttcggccccggcctgaccgccagaagactgctgcccctgagactgccccccagaccccccggccccagactggccagcggccaggccgccggcgccctggagagagccatggacgagctgctgagaagagccgtgccccccacccccgcctacgagctgagagagaagacccccgcccccgccgagggccagtgcgccgacttcgtgagcttctacggcggcctggccgagaccgcccagagagccgagctgctgggcagactggccagaggcttcggcgtggaccacggccaggtggccgagcagagcgccggcgtgctgcacctgagacagcagcagagagaggccgccgtgctgctgcaggccgaggacagactgagatacgccctggtgcccagatacagaggcctgttccaccacatcagcaagctggacggcggcgtgagattcctggtgcagctgagagccgacctgctggaggcccaggccctgaagctggtggagggccccgacgtgagagagatgaacggcgtgctgaagggcatgctgagcgagtggttcagcagcggcttcctgaacctggagagagtgacctggcacagcccctgcgaggtgctgcagaagatcagcgaggccgaggccgtgcaccccgtgaagaactggatggacatgaagagaagagtgggcccctacagaagatgctacttcttcagccactgcagcacccccggcgagcccctggtggtgctgcacgtggccctgaccggcgacatcagcagcaacatccaggccatcgtgaaggagcacccccccagcgagaccgaggagaagaacaagatcaccgccgccatcttctacagcatcagcctgacccagcagggcctgcagggcgtggagctgggcaccttcctgatcaagagagtggtgaaggagctgcagagagagttcccccacctgggcgtgttcagcagcctgagccccatccccggcttcaccaagtggctgctgggcctgctgaacagccagaccaaggagcacggcagaaacgagctgttcaccgacagcgagtgcaaggagatcagcgagatcaccggcggccccatcaacgagaccctgaagctgctgctgagcagcagcgagtgggtgcagagcgagaagctggtgagagccctgcagacccccctgatgagactgtgcgcctggtacctgtacggcgagaagcacagaggctacgccctgaaccccgtggccaacttccacctgcagaacggcgccgtgctgtggagaatcaactggatggccgacgtgagcctgagaggcatcaccggcagctgcggcctgatggccaactacagatacttcctggaggagaccggccccaacagcaccagctacctgggcagcaagatcatcaaggccagcgagcaggtgctgagcctggtggcccagttccagaagaacagcaagctgtag

SEQ ID NO: 87891 - DNA, 558 bp, synthetic construct
  misc_feature 1..558: note = Description of Artificial Sequence: Synthetic coding sequence
  source 1..558: mol_type = other DNA
atggccagaaagaagctgaagaagttcaccaccctggagatcgtgctgagcgtgctgctgctggtgctgttcatcatcagcatcgtgctgatcgtgctgctggccaaggagagcctgaagagcaccgcccccgaccccggcaccaccggcacccccgaccccggcaccaccggcacccccgaccccggcaccaccggcaccacccacgccagaaccaccggcccccccgaccccggcaccaccggcaccacccccgtgagcgccgagtgccccgtggtgaacgagctggagagaatcaactgcatccccgaccagccccccaccaaggccacctgcgaccagagaggctgctgctggaacccccagggcgccgtgagcgtgccctggtgctactacagcaagaaccacagctaccacgtggagggcaacctggtgaacaccaacgccggcttcaccgccagactgaagaacctgcccagcagccccgtgttcggcagcaacgtggacaacgtgctgctgaccgccgagtaccagaccagcaacagattccacttctag

SEQ ID NO: 87892 - DNA, 4989 bp, synthetic construct
  misc_feature 1..4989: note = Description of Artificial Sequence: Synthetic coding sequence
  source 1..4989: mol_type = other DNA
gccgtgagcgtgccctggtgctactacagcaagaaccacagctaccacgtggagggcaacctggtgaacaccaacgccggcttcaccgccagactgaagaacctgcccagcagccccgtgttcggcagcaacgtggacaacgtgctgctgaccgccgagtaccagaccagcaacagattccacttcaagctgaccgaccagaccaacaacagattcgaggtgccccacgagcacgtgcagagcttcagcggcaacgccgccgccagcctgacctaccaggtggagatcagcagacagcccttcagcatcaaggtgaccagaagaagcaacaacagagtgctgttcgacagcagcatcggccccctgctgttcgccgaccagttcctgcagctgagcaccagactgcccagcaccaacgtgtacggcctgggcgagcacgtgcaccagcagtacagacacgacatgaactggaagacctggcccatcttcaacagagacaccacccccaacggcaacggcaccaacctgtacggcgcccagaccttcttcctgtgcctggaggacgccagcggcctgagcttcggcgtgttcctgatgaacagcaacgccatggaggtggtgctgcagcccgcccccgccatcacctacagaaccatcggcggcatcctggacttctacgtgttcctgggcaacacccccgagcaggtggtgcaggagtacctggagctgatcggcagacccgccctgcccagctactgggccctgggcttccacctgagcagatacgagtacggcaccctggacaacatgagagaggtggtggagagaaacagagccgcccagctgccctacgacgtgcagcacgccgacatcgactacatggacgagagaagagacttcacctacgacagcgtggacttcaagggcttccccgagttcgtgaacgagctgcacaacaacggccagaagctggtgatcatcgtggaccccgccatcagcaacaacagcagcagcagcaagccctacggcccctacgacagaggcagcgacatgaagatctgggtgaacagcagcgacggcgtgacccccctgatcggcgaggtgtggcccggccagaccgtgttccccgactacaccaaccccaactgcgccgtgtggtggaccaaggagttcgagctgttccacaaccaggtggagttcgacggcatctggatcgacatgaacgaggtgagcaacttcgtggacggcagcgtgagcggctgcagcaccaacaacctgaacaacccccccttcacccccagaatcctggacggctacctgttctgcaagaccctgtgcatggacgccgtgcagcactggggcaagcagtacgacatccacaacctgtacggctacagcatggccgtggccaccgccgaggccgccaagaccgtgttccccaacaagagaagcttcatcctgaccagaagcaccttcgccggcagcggcaagttcgccgcccactggctgggcgacaacaccgccacctgggacgacctgagatggagcatccccggcgtgctggagttcaacctgttcggcatccccatggtgggccccgacatctgcggcttcgccctggacacccccgaggagctgtgcagaagatggatgcagctgggcgccttctaccccttcagcagaaaccacaacggccagggctacaaggaccaggaccccgccagcttcggcgccgacagcctgctgctgaacagcagcagacactacctgaacatcagatacaccctgctgccctacctgtacaccctgttcttcagagcccacagcagaggcgacaccgtggccagacccctgctgcacgagttctacgaggacaacagcacctgggacgtgcaccagcagttcctgtggggccccggcctgctgatcacccccgtgctggacgagggcgccgagaaggtgatggcctacgtgcccgacgccgtgtggtacgactacgagaccggcagccaggtgagatggagaaagcagaaggtggagatggagctgcccggcgacaagatcggcctgcacctgagaggcggctacatcttccccacccagcagcccaacaccaccaccctggccagcagaaagaaccccctgggcctgatcatcgccctggacgagaacaaggaggccaagggcgagctgttctgggacaacggcgagaccaaggacaccgtggccaacaaggtgtacctgctgtgcgagttcagcgtgacccagaacagactggaggtgaacatcagccagagcacctacaaggaccccaacaacctggccttcaacgagatcaagatcctgggcaccgaggagcccagcaacgtgaccgtgaagcacaacggcgtgcccagccagaccagccccaccgtgacctacgacagcaacctgaaggtggccatcatcaccgacatcgacctgctgctgggcgaggcctacaccgtggagtggagcatcaagatcagagacgaggagaagatcgactgctaccccgacgagaacggcgccagcgccgagaactgcaccgccagaggctgcatctgggaggccagcaacagcagcggcgtgcccttctgctacttcgtgaacgacctgtacagcgtgagcgacgtgcagtacaacagccacggcgccaccgccgacatcagcctgaagagcagcgtgtacgccaacgccttccccagcacccccgtgaaccccctgagactggacgtgacctaccacaagaacgagatgctgcagttcaagatctacgaccccaacaagaacagatacgaggtgcccgtgcccctgaacatccccagcatgcccagcagcacccccgagggccagctgtacgacgtgctgatcaagaagaaccccttcggcatcgagatcagaagaaagagcaccggcaccatcatctgggacagccagctgctgggcttcaccttcagcgacatgttcatcagaatcagcaccagactgcccagcaagtacctgtacggcttcggcgagaccgagcacagaagctacagaagagacctggagtggcacacctggggcatgttcagcagagaccagccccccggctacaagaagaacagctacggcgtgcacccctactacatgggcctggaggaggacggcagcgcccacggcgtgctgctgctgaacagcaacgccatggacgtgaccttccagcccctgcccgccctgacctacagaaccaccggcggcgtgctggacttctacgtgttcctgggccccacccccgagctggtgacccagcagtacaccgagctgatcggcagacccgtgatggtgccctactggagcctgggcttccagctgtgcagatacggctaccagaacgacagcgagatcgccagcctgtacgacgagatggtggccgcccagatcccctacgacgtgcagtacagcgacatcgactacatggagagacagctggacttcaccctgagccccaagttcgccggcttccccgccctgatcaacagaatgaaggccgacggcatgagagtgatcctgatcctggaccccgccatcagcggcaacgagacccagccctaccccgccttcaccagaggcgtggaggacgacgtgttcatcaagtaccccaacgacggcgacatcgtgtggggcaaggtgtggcccgacttccccgacgtggtggtgaacggcagcctggactgggacagccaggtggagctgtacagagcctacgtggccttccccgacttcttcagaaacagcaccgccaagtggtggaagagagagatcgaggagctgtacaacaacccccagaaccccgagagaagcctgaagttcgacggcatgtggatcgacatgaacgagcccagcagcttcgtgaacggcgccgtgagccccggctgcagagacgccagcctgaaccaccccccctacatgccccacctggagagcagagacagaggcctgagcagcaagaccctgtgcatggagagccagcagatcctgcccgacggcagcctggtgcagcactacaacgtgcacaacctgtacggctggagccagaccagacccacctacgaggccgtgcaggaggtgaccggccagagaggcgtggtgatcaccagaagcaccttccccagcagcggcagatgggccggccactggctgggcgacaacaccgccgcctgggaccagctgaagaagagcatcatcggcatgatggagttcagcctgttcggcatcagctacaccggcgccgacatctgcggcttcttccaggacgccgagtacgagatgtgcgtgagatggatgcagctgggcgccttctaccccttcagcagaaaccacaacaccatcggcaccagaagacaggaccccgtgagctgggacgccgccttcgtgaacatcagcagaaacgtgctgcagaccagatacaccctgctgccctacctgtacaccctgatgcagaaggcccacaccgagggcgtgaccgtggtgagacccctgctgcacgagttcgtgagcgaccaggtgacctgggacatcgacagccagttcctgctgggccccgccttcctggtgagccccgtgctggagagaaacgccagaaacgtgaccgcctacttccccagagccagatggtacgactactacaccggcgtggacatcaacgccagaggcgagtggaagaccctgcccgcccccctggaccacatcaacctgcacgtgagaggcggctacatcctgccctggcaggagcccgccctgaacacccacctgagcagaaagaaccccctgggcctgatcatcgccctggacgagaacaaggaggccaagggcgagctgttctgggacgacggccagaccaaggacaccgtggccaagaaggtgtacctgctgtgcgagttcagcgtgacccagcaggtggtgttcctgaacatcgtgttcaactag

SEQ ID NO: 87893 - DNA, 5574 bp, synthetic construct
  misc_feature 1..5574: note = Description of Artificial Sequence: Synthetic coding sequence
  source 1..5574: mol_type = other DNA
atggccagaaagaagctgaagaagttcaccaccctggagatcgtgctgagcgtgctgctgctggtgctgttcatcatcagcatcgtgctgatcgtgctgctggccaaggagagcctgaagagcaccgcccccgaccccggcaccaccggcacccccgaccccggcaccaccggcacccccgaccccggcaccaccggcaccacccacgccagaaccaccggcccccccgaccccggcaccaccggcaccacccccgtgagcgccgagtgccccgtggtgaacgagctggagagaatcaactgcatccccgaccagccccccaccaaggccacctgcgaccagagaggctgctgctggaacccccagggcgccgtgagcgtgccctggtgctactacagcaagaaccacagctaccacgtggagggcaacctggtgaacaccaacgccggcttcaccgccagactgaagaacctgcccagcagccccgtgttcggcagcaacgtggacaacgtgctgctgaccgccgagtaccagaccagcaacagattccacttcaagctgaccgaccagaccaacaacagattcgaggtgccccacgagcacgtgcagagcttcagcggcaacgccgccgccagcctgacctaccaggtggagatcagcagacagcccttcagcatcaaggtgaccagaagaagcaacaacagagtgctgttcgacagcagcatcggccccctgctgttcgccgaccagttcctgcagctgagcaccagactgcccagcaccaacgtgtacggcctgggcgagcacgtgcaccagcagtacagacacgacatgaactggaagacctggcccatcttcaacagagacaccacccccaacggcaacggcaccaacctgtacggcgcccagaccttcttcctgtgcctggaggacgccagcggcctgagcttcggcgtgttcctgatgaacagcaacgccatggaggtggtgctgcagcccgcccccgccatcacctacagaaccatcggcggcatcctggacttctacgtgttcctgggcaacacccccgagcaggtggtgcaggagtacctggagctgatcggcagacccgccctgcccagctactgggccctgggcttccacctgagcagatacgagtacggcaccctggacaacatgagagaggtggtggagagaaacagagccgcccagctgccctacgacgtgcagcacgccgacatcgactacatggacgagagaagagacttcacctacgacagcgtggacttcaagggcttccccgagttcgtgaacgagctgcacaacaacggccagaagctggtgatcatcgtggaccccgccatcagcaacaacagcagcagcagcaagccctacggcccctacgacagaggcagcgacatgaagatctgggtgaacagcagcgacggcgtgacccccctgatcggcgaggtgtggcccggccagaccgtgttccccgactacaccaaccccaactgcgccgtgtggtggaccaaggagttcgagctgttccacaaccaggtggagttcgacggcatctggatcgacatgaacgaggtgagcaacttcgtggacggcagcgtgagcggctgcagcaccaacaacctgaacaacccccccttcacccccagaatcctggacggctacctgttctgcaagaccctgtgcatggacgccgtgcagcactggggcaagcagtacgacatccacaacctgtacggctacagcatggccgtggccaccgccgaggccgccaagaccgtgttccccaacaagagaagcttcatcctgaccagaagcaccttcgccggcagcggcaagttcgccgcccactggctgggcgacaacaccgccacctgggacgacctgagatggagcatccccggcgtgctggagttcaacctgttcggcatccccatggtgggccccgacatctgcggcttcgccctggacacccccgaggagctgtgcagaagatggatgcagctgggcgccttctaccccttcagcagaaaccacaacggccagggctacaaggaccaggaccccgccagcttcggcgccgacagcctgctgctgaacagcagcagacactacctgaacatcagatacaccctgctgccctacctgtacaccctgttcttcagagcccacagcagaggcgacaccgtggccagacccctgctgcacgagttctacgaggacaacagcacctgggacgtgcaccagcagttcctgtggggccccggcctgctgatcacccccgtgctggacgagggcgccgagaaggtgatggcctacgtgcccgacgccgtgtggtacgactacgagaccggcagccaggtgagatggagaaagcagaaggtggagatggagctgcccggcgacaagatcggcctgcacctgagaggcggctacatcttccccacccagcagcccaacaccaccaccctggccagcagaaagaaccccctgggcctgatcatcgccctggacgagaacaaggaggccaagggcgagctgttctgggacaacggcgagaccaaggacaccgtggccaacaaggtgtacctgctgtgcgagttcagcgtgacccagaacagactggaggtgaacatcagccagagcacctacaaggaccccaacaacctggccttcaacgagatcaagatcctgggcaccgaggagcccagcaacgtgaccgtgaagcacaacggcgtgcccagccagaccagccccaccgtgacctacgacagcaacctgaaggtggccatcatcaccgacatcgacctgctgctgggcgaggcctacaccgtggagtggagcatcaagatcagagacgaggagaagatcgactgctaccccgacgagaacggcgccagcgccgagaactgcaccgccagaggctgcatctgggaggccagcaacagcagcggcgtgcccttctgctacttcgtgaacgacctgtacagcgtgagcgacgtgcagtacaacagccacggcgccaccgccgacatcagcctgaagagcagcgtgtacgccaacgccttccccagcacccccgtgaaccccctgagactggacgtgacctaccacaagaacgagatgctgcagttcaagatctacgaccccaacaagaacagatacgaggtgcccgtgcccctgaacatccccagcatgcccagcagcacccccgagggccagctgtacgacgtgctgatcaagaagaaccccttcggcatcgagatcagaagaaagagcaccggcaccatcatctgggacagccagctgctgggcttcaccttcagcgacatgttcatcagaatcagcaccagactgcccagcaagtacctgtacggcttcggcgagaccgagcacagaagctacagaagagacctggagtggcacacctggggcatgttcagcagagaccagccccccggctacaagaagaacagctacggcgtgcacccctactacatgggcctggaggaggacggcagcgcccacggcgtgctgctgctgaacagcaacgccatggacgtgaccttccagcccctgcccgccctgacctacagaaccaccggcggcgtgctggacttctacgtgttcctgggccccacccccgagctggtgacccagcagtacaccgagctgatcggcagacccgtgatggtgccctactggagcctgggcttccagctgtgcagatacggctaccagaacgacagcgagatcgccagcctgtacgacgagatggtggccgcccagatcccctacgacgtgcagtacagcgacatcgactacatggagagacagctggacttcaccctgagccccaagttcgccggcttccccgccctgatcaacagaatgaaggccgacggcatgagagtgatcctgatcctggaccccgccatcagcggcaacgagacccagccctaccccgccttcaccagaggcgtggaggacgacgtgttcatcaagtaccccaacgacggcgacatcgtgtggggcaaggtgtggcccgacttccccgacgtggtggtgaacggcagcctggactgggacagccaggtggagctgtacagagcctacgtggccttccccgacttcttcagaaacagcaccgccaagtggtggaagagagagatcgaggagctgtacaacaacccccagaaccccgagagaagcctgaagttcgacggcatgtggatcgacatgaacgagcccagcagcttcgtgaacggcgccgtgagccccggctgcagagacgccagcctgaaccaccccccctacatgccccacctggagagcagagacagaggcctgagcagcaagaccctgtgcatggagagccagcagatcctgcccgacggcagcctggtgcagcactacaacgtgcacaacctgtacggctggagccagaccagacccacctacgaggccgtgcaggaggtgaccggccagagaggcgtggtgatcaccagaagcaccttccccagcagcggcagatgggccggccactggctgggcgacaacaccgccgcctgggaccagctgaagaagagcatcatcggcatgatggagttcagcctgttcggcatcagctacaccggcgccgacatctgcggcttcttccaggacgccgagtacgagatgtgcgtgagatggatgcagctgggcgccttctaccccttcagcagaaaccacaacaccatcggcaccagaagacaggaccccgtgagctgggacgtggccttcgtgaacatcagcagaaccgtgctgcagaccagatacaccctgctgccctacctgtacaccctgatgcacaaggcccacaccgagggcgtgaccgtggtgagacccctgctgcacgagttcgtgagcgaccaggtgacctgggacatcgacagccagttcctgctgggccccgccttcctggtgagccccgtgctggagagaaacgccagaaacgtgaccgcctacttccccagagccagatggtacgactactacaccggcgtggacatcaacgccagaggcgagtggaagaccctgcccgcccccctggaccacatcaacctgcacgtgagaggcggctacatcctgccctggcaggagcccgccctgaacacccacctgagcagacagaagttcatgggcttcaagatcgccctggacgacgagggcaccgccggcggctggctgttctgggacgacggccagagcatcgacacctacggcaagggcctgtactacctggccagcttcagcgccagccagaacaccatgcagagccacatcatcttcaacaactacatcaccggcaccaaccccctgaagctgggctacatcgagatctggggcgtgggcagcgtgcccgtgaccagcgtgagcatcagcgtgagcggcatggtgatcacccccagcttcaacaacgaccccaccacccaggtgctgagcatcgacgtgaccgacagaaacatcagcctgcacaacttcaccagcctgacctggatcagcaccctgtag

SEQ ID NO: 87894 - DNA, 2061 bp, synthetic construct
  misc_feature 1..2061: note = Description of Artificial Sequence: Synthetic coding sequence
  source 1..2061: mol_type = other DNA
atgctgctgagaggcgtgctgctggccctgcaggccctgcagctggccggcgccctggacctgcccgccggcagctgcgccttcgaggagagcacctgcggcttcgacagcgtgctggccagcctgccctggatcctgaacgaggagggccactacatctacgtggacaccagcttcggcaagcagggcgagaaggccgtgctgctgagccccgacctgcaggccgaggagtggagctgcctgagactggtgtaccagatcaccaccagcagcgagagcctgagcgaccccagccagctgaacctgtacatgagattcgaggacgagagcttcgacagactgctgtggagcgccaaggagcccagcgacagctggctgatcgccagcctggacctgcagaacagcagcaagaagttcaagatcctgatcgagggcgtgctgggccagggcaacaccgccagcatcgccctgttcgagatcaagatgaccaccggctactgcatcgagtgcgacttcgaggagaaccacctgtgcggcttcgtgaacagatggaaccccaacgtgaactggttcgtgggcggcggcagcatcagaaacgtgcacagcatcctgccccaggaccacaccttcaagagcgagctgggccactacatgtacgtggacagcgtgtacgtgaagcacttccaggaggtggcccagctgatcagccccctgaccaccgcccccatggccggctgcctgagcttctactaccagatccagcagggcaacgacaacgtgttcagcctgtacaccagagacgtggccggcctgtacgaggagatctggaaggccgacagacccggcaacgccgcctggaacctggccgaggtggagttcagcgccccctaccccatggaggtgatcttcgaggtggccttcaacggccccaagggcggctacgtggccctggacgacatcagcttcagccccgtgcactgccagaaccagaccgagctgctgttcagcgccgtggaggccagctgcaacttcgagcaggacctgtgcaacttctaccaggacaaggagggccccggctggaccagagtgaaggtgaagcccaacatgtacagagccggcgaccacaccaccggcctgggctactacctgctggccaacaccaagttcaccagccagcccggctacatcggcagactgtacggccccagcctgcccggcaacctgcagtactgcctgagattccactacgccatctacggcttcctgaagatgagcgacaccctggccgtgtacatcttcgaggagaaccacgtggtgcaggagaagatctggagcgtgctggagagccccagaggcgtgtggatgcaggccgagatcaccttcaagaagcccatgcccaccaaggtggtgttcatgagcctgtgcaagagcttctgggactgcggcctggtggccctggacgacatcaccatccagctgggcagctgcagcagcagcgagaagctgccccccccccccggcgagtgcaccttcgagcaggacgagtgcaccttcacccaggagaagagaaacagaagcagctggcacagaagaagaggcgagacccccaccagctacaccggccccaagggcgaccacaccaccggcgtgggctactacatgtacatcgaggccagccacatggtgtacggccagaaggccagactgctgagcagacccctgagaggcgtgagcggcaagcactgcctgaccttcttctaccacatgtacggcggcggcaccggcctgctgagcgtgtacctgaagaaggaggaggacagcgaggagagcctgctgtggagaagaagaggcgagcagagcatcagctggctgagagccctgatcgagtacagctgcgagagacagcaccagatcatcttcgaggccatcagaggcgtgagcatcagaagcgacatcgccatcgacgacgtgaagttccaggccggcccctgcggcgagatggaggacaccacccagcagagcagcggctacagcgaggacctgaacgagatcgagtactag

SEQ ID NO: 87895 - DNA, 2880 bp, synthetic construct
  misc_feature 1..2880: note = Description of Artificial Sequence: Synthetic coding sequence
  source 1..2880: mol_type = other DNA
atggaggtgacctgcctgctgctgctggccctgatccccttccactgcagaggccagggcgtgtacgcccccgcccaggcccagatcgtgcacgccggccaggcctgcgtggtgaaggaggacaacatcagcgagagagtgtacaccatcagagagggcgacaccctgatgctgcagtgcctggtgaccggccaccccagaccccaggtgagatggaccaagaccgccggcagcgccagcgacaagttccaggagaccagcgtgttcaacgagaccctgagaatcgagagaatcgccagaacccagggcggcagatactactgcaaggccgagaacggcgtgggcgtgcccgccatcaagagcatcagagtggacgtgcagtacctggacgagcccatgctgaccgtgcaccagaccgtgagcgacgtgagaggcaacttctaccaggagaagaccgtgttcctgagatgcaccgtgaacagcaacccccccgccagattcatctggaagagaggcagcgacaccctgagccacagccaggacaacggcgtggacatctacgagcccctgtacacccagggcgagaccaaggtgctgaagctgaagaacctgagaccccaggactacgccagctacacctgccaggtgagcgtgagaaacgtgtgcggcatccccgacaaggccatcaccttcagactgaccaacaccaccgccccccccgccctgaagctgagcgtgaacgagaccctggtggtgaaccccggcgagaacgtgaccgtgcagtgcctgctgaccggcggcgaccccctgccccagctgcagtggagccacggccccggccccctgcccctgggcgccctggcccagggcggcaccctgagcatccccagcgtgcaggccagagacagcggctactacaactgcaccgccaccaacaacgtgggcaaccccgccaagaagaccgtgaacctgctggtgagaagcatgaagaacgccaccttccagatcacccccgacgtgatcaaggagagcgagaacatccagctgggccaggacctgaagctgagctgccacgtggacgccgtgccccaggagaaggtgacctaccagtggttcaagaacggcaagcccgccagaatgagcaagagactgctggtgaccagaaacgaccccgagctgcccgccgtgaccagcagcctggagctgatcgacctgcacttcagcgactacggcacctacctgtgcatggccagcttccccggcgcccccgtgcccgacctgagcgtggaggtgaacatcagcagcgagaccgtgccccccaccatcagcgtgcccaagggcagagccgtggtgaccgtgagagagggcagccccgccgagctgcagtgcgaggtgagaggcaagcccagaccccccgtgctgtggagcagagtggacaaggaggccgccctgctgcccagcggcctgcccctggaggagacccccgacggcaagctgagactggagagagtgagcagagacatgagcggcacctacagatgccagaccgccagatacaacggcttcaacgtgagacccagagaggcccaggtgcagctgaacgtgcagagcccctgcttcccccccgaggtggagcccagcagccaggacgtgagacaggccctgggcagacccgtgctgctgagatgcagcctgctgagaggcagcccccagagaatcgccagcgccgtgtggagattcaagggccagctgctgccccccccccccgtggtgcccgccgccgccgaggcccccgaccacgccgagctgagactggacgccgtgaccagagacagcagcggcagctacgagtgcagcgtgagcaacgacgtgggcagcgccgcctgcctgttccaggtgagcgccaaggcctacagccccgagttctacttcgacacccccaaccccaccagaagccacaagctgagcaagaactacagctacgtgctgcagtggacccagagagagcccgacgccgtggaccccgtgctgaactacagactgagcatcagacagctgaaccagcacaacgccgtggtgaaggccatccccgtgagaagagtggagaagggccagctgctggagtacatcctgaccgacctgagagtgccccacagctacgaggtgagactgaccccctacaccaccttcggcgccggcgacatggccagcagaatcatccactacaccgagctgctggccctgagaaccctgagcagcgacaacacctgccacttcgaggacgagaagatctgcggctacacccaggacctgaccgacaacttcgactggaccagacagaacgccctgacccagaaccccaagagaagccccaacaccggcccccccaccgacatcagcggcacccccgagggctactacatgttcatcgagaccagcagacccagagagctgggcgacagagccagactggtgagccccctgtacaacgccagcgccaagttctactgcgtgagcttcttctaccacatgtacggcaagcacatcggcagcctgaacctgctggtgagaagcagaaacaagggcgccctggacacccacgcctggagcctgagcggcaacaagggcaacgtgtggcagcaggcccacgtgcccatcagccccagcggccccttccagatcatcttcgagggcgtgagaggccccggctacctgggcgacatcgccatcgacgacgtgaccctgaagaagggcgagtgccccagaaagcagaccgaccccaacaaggtggtggtgatgcccggcagcggcgccccctgccagagcagcccccagctgtggggccccatggccatcttcctgctggccctgcagagatag

SEQ ID NO: 87896 - DNA, 2868 bp, synthetic construct
  misc_feature 1..2868: note = Description of Artificial Sequence: Synthetic coding sequence
  source 1..2868: mol_type = other DNA
atggaggtgacctgcctgctgctgctggccctgatccccttccactgcagaggccagggcgtgtacgcccccgcccaggcccagatcgtgcacgccggccaggcctgcgtggtgaaggaggacaacatcagcgagagagtgtacaccatcagagagggcgacaccctgatgctgcagtgcctggtgaccggccaccccagaccccaggtgagatggaccaagaccgccggcagcgccagcgacaagttccaggagaccagcgtgttcaacgagaccctgagaatcgagagaatcgccagaacccagggcggcagatactactgcaaggccgagaacggcgtgggcgtgcccgccatcaagagcatcagagtggacgtgcagtacctggacgagcccatgctgaccgtgcaccagaccgtgagcgacgtgagaggcaacttctaccaggagaagaccgtgttcctgagatgcaccgtgaacagcaacccccccgccagattcatctggaagagaggcagcgacaccctgagccacagccaggacaacggcgtggacatctacgagcccctgtacacccagggcgagaccaaggtgctgaagctgaagaacctgagaccccaggactacgccagctacacctgccaggtgagcgtgagaaacgtgtgcggcatccccgacaaggccatcaccttcagactgaccaacaccaccgccccccccgccctgaagctgagcgtgaacgagaccctggtggtgaaccccggcgagaacgtgaccgtgcagtgcctgctgaccggcggcgaccccctgccccagctgcagtggagccacggccccggccccctgcccctgggcgccctggcccagggcggcaccctgagcatccccagcgtgcaggccagagacagcggctactacaactgcaccgccaccaacaacgtgggcaaccccgccaagaagaccgtgaacctgctggtgagaagcatgaagaacgccaccttccagatcacccccgacgtgatcaaggagagcgagaacatccagctgggccaggacctgaagctgagctgccacgtggacgccgtgccccaggagaaggtgacctaccagtggttcaagaacggcaagcccgccagaatgagcaagagactgctggtgaccagaaacgaccccgagctgcccgccgtgaccagcagcctggagctgatcgacctgcacttcagcgactacggcacctacctgtgcatggccagcttccccggcgcccccgtgcccgacctgagcgtggaggtgaacatcagcagcgagaccgtgccccccaccatcagcgtgcccaagggcagagccgtggtgaccgtgagagagggcagccccgccgagctgcagtgcgaggtgagaggcaagcccagaccccccgtgctgtggagcagagtggacaaggaggccgccctgctgcccagcggcctgcccctggaggagacccccgacggcaagctgagactggagagagtgagcagagacatgagcggcacctacagatgccagaccgccagatacaacggcttcaacgtgagacccagagaggcccaggtgcagctgaacgtgcagttcccccccgaggtggagcccagcagccaggacgtgagacaggccctgggcagacccgtgctgctgagatgcagcctgctgagaggcagcccccagagaatcgccagcgccgtgtggagattcaagggccagctgctgccccccccccccgtggtgcccgccgccgccgaggcccccgaccacgccgagctgagactggacgccgtgaccagagacagcagcggcagctacgagtgcagcgtgagcaacgacgtgggcagcgccgcctgcctgttccaggtgagcgccaaggcctacagccccgagttctacttcgacacccccaaccccaccagaagccacaagctgagcaagaactacagctacgtgctgcagtggacccagagagagcccgacgccgtggaccccgtgctgaactacagactgagcatcagacagctgaaccagcacaacgccgtggtgaaggccatccccgtgagaagagtggagaagggccagctgctggagtacatcctgaccgacctgagagtgccccacagctacgaggtgagactgaccccctacaccaccttcggcgccggcgacatggccagcagaatcatccactacaccgagcccatcaacagccccaacctgagcgacaacacctgccacttcgaggacgagaagatctgcggctacacccaggacctgaccgacaacttcgactggaccagacagaacgccctgacccagaaccccaagagaagccccaacaccggcccccccaccgacatcagcggcacccccgagggctactacatgttcatcgagaccagcagacccagagagctgggcgacagagccagactggtgagccccctgtacaacgccagcgccaagttctactgcgtgagcttcttctaccacatgtacggcaagcacatcggcagcctgaacctgctggtgagaagcagaaacaagggcgccctggacacccacgcctggagcctgagcggcaacaagggcaacgtgtggcagcaggcccacgtgcccatcagccccagcggccccttccagatcatcttcgagggcgtgagaggccccggctacctgggcgacatcgccatcgacgacgtgaccctgaagaagggcgagtgccccagaaagcagaccgaccccaacaaggtggtggtgatgcccggcagcggcgccccctgccagagcagcccccagctgtggggccccatggccatcttcctgctggccctgcagagatag

SEQ ID NO: 87897 - DNA, 2922 bp, synthetic construct
  misc_feature 1..2922: note = Description of Artificial Sequence: Synthetic coding sequence
  source 1..2922: mol_type = other DNA
atggaggtgacctgcctgctgctgctggccctgatccccttccactgcagaggccagggcgtgtacgcccccgcccaggcccagatcgtgcacgccggccaggcctgcgtggtgaaggaggacaacatcagcgagagagtgtacaccatcagagagggcgacaccctgatgctgcagtgcctggtgaccggccaccccagaccccaggtgagatggaccaagaccgccggcagcgccagcgacaagttccaggagaccagcgtgttcaacgagaccctgagaatcgagagaatcgccagaacccagggcggcagatactactgcaaggccgagaacggcgtgggcgtgcccgccatcaagagcatcagagtggacgtgcagtacctggacgagcccatgctgaccgtgcaccagaccgtgagcgacgtgagaggcaacttctaccaggagaagaccgtgttcctgagatgcaccgtgaacagcaacccccccgccagattcatctggaagagaggcagcgacaccctgagccacagccaggacaacggcgtggacatctacgagcccctgtacacccagggcgagaccaaggtgctgaagctgaagaacctgagaccccaggactacgccagctacacctgccaggtgagcgtgagaaacgtgtgcggcatccccgacaaggccatcaccttcagactgaccaacaccaccgccccccccgccctgaagctgagcgtgaacgagaccctggtggtgaaccccggcgagaacgtgaccgtgcagtgcctgctgaccggcggcgaccccctgccccagctgcagtggagccacggccccggccccctgcccctgggcgccctggcccagggcggcaccctgagcatccccagcgtgcaggccagagacagcggctactacaactgcaccgccaccaacaacgtgggcaaccccgccaagaagaccgtgaacctgctggtgagaagcatgaagaacgccaccttccagatcacccccgacgtgatcaaggagagcgagaacatccagctgggccaggacctgaagctgagctgccacgtggacgccgtgccccaggagaaggtgacctaccagtggttcaagaacggcaagcccgccagaatgagcaagagactgctggtgaccagaaacgaccccgagctgcccgccgtgaccagcagcctggagctgatcgacctgcacttcagcgactacggcacctacctgtgcatggccagcttccccggcgcccccgtgcccgacctgagcgtggaggtgaacatcagcagcgagaccgtgccccccaccatcagcgtgcccaagggcagagccgtggtgaccgtgagagagggcagccccgccgagctgcagtgcgaggtgagaggcaagcccagaccccccgtgctgtggagcagagtggacaaggaggccgccctgctgcccagcggcctgcccctggaggagacccccgacggcaagctgagactggagagagtgagcagagacatgagcggcacctacagatgccagaccgccagatacaacggcttcaacgtgagacccagagaggcccaggtgcagctgaacgtgcagttcccccccgaggtggagcccagcagccaggacgtgagacaggccctgggcagacccgtgctgctgagatgcagcctgctgagaggcagcccccagagaatcgccagcgccgtgtggagattcaagggccagctgctgccccccccccccgtggtgcccgccgccgccgaggcccccgaccacgccgagctgagactggacgccgtgaccagagacagcagcggcagctacgagtgcagcgtgagcaacgacgtgggcagcgccgcctgcctgttccaggtgagcgccaaggcctacagccccgagttctacttcgacacccccaaccccaccagaagccacaagctgagcaagaactacagctacgtgctgcagtggacccagagagagcccgacgccgtggaccccgtgctgaactacagactgagcatcagacagctgaaccagcacaacgccgtggtgaaggccatccccgtgagaagagtggagaagggccagctgctggagtacatcctgaccgacctgagagtgccccacagctacgaggtgagactgaccccctacaccaccttcggcgccggcgacatggccagcagaatcatccactacaccgagcccatcaacagccccaacctgagcgacaacacctgccacttcgaggacgagaagatctgcggctacacccaggacctgaccgacaacttcgactggaccagacagaacgccctgacccagaaccccaagagaagccccaacaccggcccccccaccgacatcagcggcacccccgagggctactacatgttcatcgagaccagcagacccagagagctgggcgacagagccagactggtgagccccctgtacaacgccagcgccaagttctactgcgtgagcttcttctaccacatgtacggcaagcacatcggcagcctgaacctgctggtgagaagcagaaacaagggcgccctggacacccacgcctggagcctgagcggcaacaagggcaacgtgtggcagcaggcccacgtgcccatcagccccagcggccccttccagatcatcttcgagggcgtgagaggccccggctacctgggcgacatcgccatcgacgacgtgaccctgaagaagggcgagtgccccagaaagcagaccgaccccaacaagggcgccagaagagagggcggcggcggcgccgagagcggcggcagctgcgcctggagaggcttcctgagcgtggagggcggctgcctgggcctgaacagaggcagcgagtgcctgagcgacggcaaccacgtggccctgaccgtgtag

SEQ ID NO: 87898 - DNA, 2184 bp, synthetic construct
  misc_feature 1..2184: note = Description of Artificial Sequence: Synthetic coding sequence
  source 1..2184: mol_type = other DNA
atggtgagcttcagactgagcaacaagaccgccagccccagcatcaagctgctggtggacgaccccatcgtggtgaaccccggcgaggccatcaccctggtgtgcgtgaccaccggcggcgagcccgcccccagcctgacctgggtgagaagcttcggcaccctgcccgagaagaccgtgctgaacggcggcaccctgaccatccccgccatcaccagcgacgacgccggcacctacagctgcatcgccaacaacaacgtgggcaaccccgccaagaagagcaccaacatcatcgtgagagccctgaagaagggcagattctggatcacccccgacccctaccacaaggacgacaacatccagatcggcagagaggtgaagatcagctgccaggtggaggccgtgcccagcgaggagctgaccttcagctggttcaagaacggcagacccctgagaagcagcgagagaatggtgatcacccagaccgaccccgacgtgagccccggcaccaccaacctggacatcatcgacctgaagttcaccgacttcggcacctacacctgcgtggccagcctgaagggcggcggcatcagcgacatcagcatcgacgtgaacatcagcagcagcaccgtgccccccaacctgaccgtgccccaggagaagagccccctggtgaccagagagggcgacaccatcgagctgcagtgccaggtgaccggcaagcccaagcccatcatcctgtggagcagagccgacaaggaggtggccatgcccgacggcagcatgcagatggagagctacgacggcaccctgagaatcgtgaacgtgagcagagagatgagcggcatgtacagatgccagaccagccagtacaacggcttcaacgtgaagcccagagaggccctggtgcagctgatcgtgcagtacccccccgccgtggagcccgccttcctggagatcagacagggccaggacagaagcgtgaccatgagctgcagagtgctgagagcctaccccatcagagtgctgacctacgagtggagactgggcaacaagctgctgagaaccggccagttcgacagccaggagtacaccgagtacgccgtgaagagcctgagcaacgagaactacggcgtgtacaactgcagcatcatcaacgaggccggcgccggcagatgcagcttcctggtgaccggcaaggcctacgcccccgagttctactacgacacctacaaccccgtgtggcagaacagacacagagtgtacagctacagcctgcagtggacccagatgaaccccgacgccgtggacagaatcgtggcctacagactgggcatcagacaggccggccagcagagatggtgggagcaggagatcaagatcaacggcaacatccagaagggcgagctgatcacctacaacctgaccgagctgatcaagcccgaggcctacgaggtgagactgacccccctgaccaagttcggcgagggcgacagcaccatcagagtgatcaagtacagcgcccccgtgaacccccacctgagagagttccactgcggcttcgaggacggcaacatctgcctgttcacccaggacgacaccgacaacttcgactggaccaagcagagcaccgccaccagaaacaccaagtacacccccaacaccggccccaacgccgacagaagcggcagcaaggagggcttctacatgtacatcgagaccagcagacccagactggagggcgagaaggccagactgctgagccccgtgttcagcatcgcccccaagaacccctacggccccaccaacaccgcctactgcttcagcttcttctaccacatgtacggccagcacatcggcgtgctgaacgtgtacctgagactgaagggccagaccaccatcgagaaccccctgtggagcagcagcggcaacaagggccagagatggaacgaggcccacgtgaacatctaccccatcaccagcttccagctgatcttcgagggcatcagaggccccggcatcgagggcgacatcgccatcgacgacgtgagcatcgccgagggcgagtgcgccaagcaggacctggccaccaagaacagcgtggacggcgccgtgggcatcctggtgcacatctggctgttccccatcatcgtgctgatcagcatcctgagccccagaagatag

SEQ ID NO: 87899 - DNA, 477 bp, synthetic construct
  misc_feature 1..477: note = Description of Artificial Sequence: Synthetic coding sequence
  source 1..477: mol_type = other DNA
atgtacatcgagaccagcagacccagactggagggcgagaaggccagactgctgagccccgtgttcagcatcgcccccaagaacccctacggccccaccaacaccgcctactgcttcagcttcttctaccacatgtacggccagcacatcggcgtgctgaacgtgtacctgagactgaagggccagaccaccatcgagaaccccctgtggagcagcagcggcaacaagggccagagatggaacgaggcccacgtgaacatctaccccatcaccagcttccagctgatcttcgagggcatcagaggccccggcatcgagggcgacatcgccatcgacgacgtgagcatcgccgagggcgagtgcgccaagcaggacctggccaccaagaacagcgtggacggcgccgtgggcatcctggtgcacatctggctgttccccatcatcgtgctgatcagcatcctgagccccagaagatag

SEQ ID NO: 87900 - DNA, 3078 bp, synthetic construct
  misc_feature 1..3078: note = Description of Artificial Sequence: Synthetic coding sequence
  source 1..3078: mol_type = other DNA
atgagcgtgtggagcgccggcctgctgagaagcgccagaagaagaagaagaggcagaaccgacggcagaagattcctgctgagaagagccgtgcccggccacctgggcctggccagagccagagtggagagagcctggctggccgccggcctgctgaaggtgcccctgagaaccccctgggccggctacgtgcacgtgcacgtgaagatggacctgctgtacggcctggtgtggctgctgaccgtgctgctggagggcatcagcggccagggcgtgtacgccccccccaccgtgagaatcgtgcacagcggcctggcctgcaacatcgaggaggagagatacagcgagagagtgtacaccatcagagagggcgagaccctggagctgacctgcctggtgaccggccaccccagaccccagatcagatggaccaagaccgccggcagcgccagcgacagattccaggacagcagcgtgttcaacgagaccctgagaatcaccaacatccagagacaccagggcggcagatactactgcaaggccgagaacggcctgggcagccccgccatcaagagcatcagagtggacgtgtactacctggacgaccccgtggtgaccgtgcaccagagcatcggcgaggccaaggagcagttctactacgagagaaccgtgttcctgagatgcgtggccaacagcaacccccccgtgagatacagctggagaagaggccaggaggtgctgctgcagggcagcgacaagggcgtggagatctacgagcccttcttcacccagggcgagaccaagatcctgaagctgaagaacctgagaccccaggactacgccaactacagctgcatcgccagcgtgagaaacgtgtgcaacatccccgacaagatggtgagcttcagactgagcaacaagaccgccagccccagcatcaagctgctggtggacgaccccatcgtggtgaaccccggcgaggccatcaccctggtgtgcgtgaccaccggcggcgagcccgcccccagcctgacctgggtgagaagcttcggcaccctgcccgagaagaccgtgctgaacggcggcaccctgaccatccccgccatcaccagcgacgacgccggcacctacagctgcatcgccaacaacaacgtgggcaaccccgccaagaagagcaccaacatcatcgtgagagccctgaagaagggcagattctggatcacccccgacccctaccacaaggacgacaacatccagatcggcagagaggtgaagatcagctgccaggtggaggccgtgcccagcgaggagctgaccttcagctggttcaagaacggcagacccctgagaagcagcgagagaatggtgatcacccagaccgaccccgacgtgagccccggcaccaccaacctggacatcatcgacctgaagttcaccgacttcggcacctacacctgcgtggccagcctgaagggcggcggcatcagcgacatcagcatcgacgtgaacatcagcagcagcaccgtgccccccaacctgaccgtgccccaggagaagagccccctggtgaccagagagggcgacaccatcgagctgcagtgccaggtgaccggcaagcccaagcccatcatcctgtggagcagagccgacaaggaggtggccatgcccgacggcagcatgcagatggagagctacgacggcaccctgagaatcgtgaacgtgagcagagagatgagcggcatgtacagatgccagaccagccagtacaacggcttcaacgtgaagcccagagaggccctggtgcagctgatcgtgcagtacccccccgccgtggagcccgccttcctggagatcagacagggccaggacagaagcgtgaccatgagctgcagagtgctgagagcctaccccatcagagtgctgacctacgagtggagactgggcaacaagctgctgagaaccggccagttcgacagccaggagtacaccgagtacgccgtgaagagcctgagcaacgagaactacggcgtgtacaactgcagcatcatcaacgaggccggcgccggcagatgcagcttcctggtgaccggcaaggcctacgcccccgagttctactacgacacctacaaccccgtgtggcagaacagacacagagtgtacagctacagcctgcagtggacccagatgaaccccgacgccgtggacagaatcgtggcctacagactgggcatcagacaggccggccagcagagatggtgggagcaggagatcaagatcaacggcaacatccagaagggcgagctgatcacctacaacctgaccgagctgatcaagcccgaggcctacgaggtgagactgacccccctgaccaagttcggcgagggcgacagcaccatcagagtgatcaagtacagcgcccccgtgaacccccacctgagagagttccactgcggcttcgaggacggcaacatctgcctgttcacccaggacgacaccgacaacttcgactggaccaagcagagcaccgccaccagaaacaccaagtacacccccaacaccggccccaacgccgacagaagcggcagcaaggagggcttctacatgtacatcgagaccagcagacccagactggagggcgagaaggccagactgctgagccccgtgttcagcatcgcccccaagaacccctacggccccaccaacaccgcctactgcttcagcttcttctaccacatgtacggccagcacatcggcgtgctgaacgtgtacctgagactgaagggccagaccaccatcgagaaccccctgtggagcagcagcggcaacaagggccagagatggaacgaggcccacgtgaacatctaccccatcaccagcttccagctgatcttcgagggcatcagaggccccggcatcgagggcgacatcgccatcgacgacgtgagcatcgccgagggcgagtgcgccaagcaggacctggccaccaagaacagcgtggacggcgccgtgggcatcctggtgcacatctggctgttccccatcatcgtgctgatcagcatcctgagccccagaagatag

SEQ ID NO: 87901 - DNA, 2184 bp, synthetic construct; identical to SEQ ID NO: 87898
  misc_feature 1..2184: note = Description of Artificial Sequence: Synthetic coding sequence
  source 1..2184: mol_type = other DNA

SEQ ID NO: 87902 - DNA, 2871 bp, synthetic construct
  misc_feature 1..2871: note = Description of Artificial Sequence: Synthetic coding sequence
  source 1..2871: mol_type = other DNA
atggacctgctgtacggcctggtgtggctgctgaccgtgctgctggagggcatcagcggccagggcgtgtacgccccccccaccgtgagaatcgtgcacagcggcctggcctgcaacatcgaggaggagagatacagcgagagagtgtacaccatcagagagggcgagaccctggagctgacctgcctggtgaccggccaccccagaccccagatcagatggaccaagaccgccggcagcgccagcgacagattccaggacagcagcgtgttcaacgagaccctgagaatcaccaacatccagagacaccagggcggcagatactactgcaaggccgagaacggcctgggcagccccgccatcaagagcatcagagtggacgtgtactacctggacgaccccgtggtgaccgtgcaccagagcatcggcgaggccaaggagcagttctactacgagagaaccgtgttcctgagatgcgtggccaacagcaacccccccgtgagatacagctggagaagaggccaggaggtgctgctgcagggcagcgacaagggcgtggagatctacgagcccttcttcacccagggcgagaccaagatcctgaagctgaagaacctgagaccccaggactacgccaactacagctgcatcgccagcgtgagaaacgtgtgcaacatccccgacaagatggtgagcttcagactgagcaacaagaccgccagccccagcatcaagctgctggtggacgaccccatcgtggtgaaccccggcgaggccatcaccctggtgtgcgtgaccaccggcggcgagcccgcccccagcctgacctgggtgagaagcttcggcaccctgcccgagaagaccgtgctgaacggcggcaccctgaccatccccgccatcaccagcgacgacgccggcacctacagctgcatcgccaacaacaacgtgggcaaccccgccaagaagagcaccaacatcatcgtgagagccctgaagaagggcagattctggatcacccccgacccctaccacaaggacgacaacatccagatcggcagagaggtgaagatcagctgccaggtggaggccgtgcccagcgaggagctgaccttcagctggttcaagaacggcagacccctgagaagcagcgagagaatggtgatcacccagaccgaccccgacgtgagccccggcaccaccaacctggacatcatcgacctgaagttcaccgacttcggcacctacacctgcgtggccagcctgaagggcggcggcatcagcgacatcagcatcgacgtgaacatcagcagcagcaccgtgccccccaacctgaccgtgccccaggagaagagccccctggtgaccagagagggcgacaccatcgagctgcagtgccaggtgaccggcaagcccaagcccatcatcctgtggagcagagccgacaaggaggtggccatgcccgacggcagcatgcagatggagagctacgacggcaccctgagaatcgtgaacgtgagcagagagatgagcggcatgtacagatgccagaccagccagtacaacggcttcaacgtgaagcccagagaggccctggtgcagctgatcgtgcagtacccccccgccgtggagcccgccttcctggagatcagacagggccaggacagaagcgtgaccatgagctgcagagtgctgagagcctaccccatcagagtgctgacctacgagtggagactgggcaacaagctgctgagaaccggccagttcgacagccaggagtacaccgagtacgccgtgaagagcctgagcaacgagaactacggcgtgtacaactgcagcatcatcaacgaggccggcgccggcagatgcagcttcctggtgaccggcaaggcctacgcccccgagttctactacgacacctacaaccccgtgtggcagaacagacacagagtgtacagctacagcctgcagtggacccagatgaaccccgacgccgtggacagaatcgtggcctacagactgggcatcagacaggccggccagcagagatggtgggagcaggagatcaagatcaacggcaacatccagaagggcgagctgatcacctacaacctgaccgagctgatcaagcccgaggcctacgaggtgagactgacccccctgaccaagttcggcgagggcgacagcaccatcagagtgatcaagtacagcgcccccgtgaacccccacctgagagagttccactgcggcttcgaggacggcaacatctgcctgttcacccaggacgacaccgacaacttcgactggaccaagcagagcaccgccaccagaaacaccaagtacacccccaacaccggccccaacgccgacagaagcggcagcaaggagggcttctacatgtacatcgagaccagcagacccagactggagggcgagaaggccagactgctgagccccgtgttcagcatcgcccccaagaacccctacggccccaccaacaccgcctactgcttcagcttcttctaccacatgtacggccagcacatcggcgtgctgaacgtgtacctgagactgaagggccagaccaccatcgagaaccccctgtggagcagcagcggcaacaagggccagagatggaacgaggcccacgtgaacatctaccccatcaccagcttccagctgatcttcgagggcatcagaggccccggcatcgagggcgacatcgccatcgacgacgtgagcatcgccgagggcgagtgcgccaagcaggacctggccaccaagaacagcgtggacggcgccgtgggcatcctggtgcacatctggctgttccccatcatcgtgctgatcagcatcctgagccccagaagatag

SEQ ID NO: 87903 - DNA, 1143 bp, synthetic construct
  misc_feature 1..1143: note = Description of Artificial Sequence: Synthetic coding sequence
  source 1..1143: mol_type = other DNA
atgagatggctgctgctgtactacgccctgtgcttcagcctgagcaaggccagcgcccacaccgtggagctgaacaacatgttcggccagatccagagccccggctaccccgacagctaccccagcgacagcgaggtgacctggaacatcaccgtgcccgacggcttcagaatcaagctgtacttcatgcacttcaacctggagagcagctacctgtgcgagtacgactacgtgaaggtggagaccgaggaccaggtgctggccaccttctgcggcagagagaccaccgacaccgagcagacccccggccaggaggtggtgctgagccccggcagcttcatgagcatcaccttcagaagcgacttcagcaacgaggagagattcaccggcttcgacgcccactacatggccgtggacgtggacgagtgcaaggagagagaggacgaggagctgagctgcgaccactactgccacaactacatcggcggctactactgcagctgcagattcggctacatcctgcacaccgacaacagaacctgcagagtggagtgcagcgacaacctgttcacccagagaaccggcgtgatcaccagccccgacttccccaacccctaccccaagagcagcgagtgcctgtacaccatcgagctggaggagggcttcatggtgaacctgcagttcgaggacatcttcgacatcgaggaccaccccgaggtgccctgcccctacgactacatcaagatcaaggtgggccccaaggtgctgggccccttctgcggcgagaaggcccccgagcccatcagcacccagagccacagcgtgctgatcctgttccacagcgacaacagcggcgagaacagaggctggagactgagctacagagccgccggcaacgagtgccccgagctgcagccccccgtgcacggcaagatcgagcccagccaggccaagtacttcttcaaggaccaggtgctggtgagctgcgacaccggctacaaggtgctgaaggacaacgtggagatggacaccttccagatcgagtgcctgaaggacggcacctggagcaacaagatccccacctgcaagaagaacgagatcgacctggagagcgagctgaagagcgagcaggtgaccgagtag

SEQ ID NO: 87904 - DNA, 2187 bp, synthetic construct
  misc_feature 1..2187: note = Description of Artificial Sequence: Synthetic coding sequence
  source 1..2187: mol_type = other DNA
atgagatggctgctgctgtactacgccctgtgcttcagcctgagcaaggccagcgcccacaccgtggagctgaacaacatgttcggccagatccagagccccggctaccccgacagctaccccagcgacagcgaggtgacctggaacatcaccgtgcccgacggcttcagaatcaagctgtacttcatgcacttcaacctggagagcagctacctgtgcgagtacgactacgtgaaggtggagaccgaggaccaggtgctggccaccttctgcggcagagagaccaccgacaccgagcagacccccggccaggaggtggtgctgagccccggcagcttcatgagcatcaccttcagaagcgacttcagcaacgaggagagattcaccggcttcgacgcccactacatggccgtggacgtggacgagtgcaaggagagagaggacgaggagctgagctgcgaccactactgccacaactacatcggcggctactactgcagctgcagattcggctacatcctgcacaccgacaacagaacctgcagagtggagtgcagcgacaacctgttcacccagagaaccggcgtgatcaccagccccgacttccccaacccctaccccaagagcagcgagtgcctgtacaccatcgagctggaggagggcttcatggtgaacctgcagttcgaggacatcttcgacatcgaggaccaccccgaggtgccctgcccctacgactacatcaagatcaaggtgggccccaaggtgctgggccccttctgcggcgagaaggcccccgagcccatcagcacccagagccacagcgtgctgatcctgttccacagcgacaacagcggcgagaacagaggctggagactgagctacagagccgccggcaacgagtgccccgagctgcagccccccgtgcacggcaagatcgagcccagccaggccaagtacttcttcaaggaccaggtgctggtgagctgcgacaccggctacaaggtgctgaaggacaacgtggagatggacaccttccagatcgagtgcctgaaggacggcacctggagcaacaagatccccacctgcaagatcgtggactgcagagcccccggcgagctggagcacggcctgatcaccttcagcaccagaaacaacctgaccacctacaagagcgagatcaagtacagctgccaggagccctactacaagatgctgaacaacaacaccggcatctacacctgcagcgcccagggcgtgtggatgaacaaggtgctgggcagaagcctgcccacctgcctgcccgagtgcggccagcccagcagaagcctgcccagcctggtgaagagaatcatcggcggcagaaacgccgagcccggcctgttcccctggcaggccctgatcgtggtggaggacaccagcagagtgcccaacgacaagtggttcggcagcggcgccctgctgagcgccagctggatcctgaccgccgcccacgtgctgagaagccagagaagagacaccaccgtgatccccgtgagcaaggagcacgtgaccgtgtacctgggcctgcacgacgtgagagacaagagcggcgccgtgaacagcagcgccgccagagtggtgctgcaccccgacttcaacatccagaactacaaccacgacatcgccctggtgcagctgcaggagcccgtgcccctgggcccccacgtgatgcccgtgtgcctgcccagactggagcccgagggccccgccccccacatgctgggcctggtggccggctggggcatcagcaaccccaacgtgaccgtggacgagatcatcagcagcggcaccagaaccctgagcgacgtgctgcagtacgtgaagctgcccgtggtgccccacgccgagtgcaagaccagctacgagagcagaagcggcaactacagcgtgaccgagaacatgttctgcgccggctactacgagggcggcaaggacacctgcctgggcgacagcggcggcgccttcgtgatcttcgacgacctgagccagagatgggtggtgcagggcctggtgagctggggcggccccgaggagtgcggcagcaagcaggtgtacggcgtgtacaccaaggtgagcaactacgtggactgggtgtgggagcagatgggcctgccccagagcgtggtggagccccaggtggagagatag

SEQ ID NO: 87905 - DNA, 2100 bp, synthetic construct
  misc_feature 1..2100: note = Description of Artificial Sequence: Synthetic coding sequence
  source 1..2100: mol_type = other DNA
atgagatggctgctgctgtactacgccctgtgcttcagcctgagcaaggccagcgcccacaccgtggagctgaacaacatgttcggccagatccagagccccggctaccccgacagctaccccagcgacagcgaggtgacctggaacatcaccgtgcccgacggcttcagaatcaagctgtacttcatgcacttcaacctggagagcagctacctgtgcgagtacgactacgtgaaggtggagaccgaggaccaggtgctggccaccttctgcggcagagagaccaccgacaccgagcagacccccggccaggaggtggtgctgagccccggcagcttcatgagcatcaccttcagaagcgacttcagcaacgaggagagattcaccggcttcgacgcccactacatggccgtggacgtggacgagtgcaaggagagagaggacgaggagctgagctgcgaccactactgccacaactacatcggcggctactactgcagctgcagattcggctacatcctgcacaccgacaacagaacctgcagagtggagtgcagcgacaacctgttcacccagagaaccggcgtgatcaccagccccgacttccccaacccctaccccaagagcagcgagtgcctgtacaccatcgagctggaggagggcttcatggtgaacctgcagttcgaggacatcttcgacatcgaggaccaccccgaggtgccctgcccctacgactacatcaagatcaaggtgggccccaaggtgctgggccccttctgcggcgagaaggcccccgagcccatcagcacccagagccacagcgtgctgatcctgttccacagcgacaacagcggcgagaacagaggctggagactgagctacagagccgccggcaacgagtgccccgagctgcagccccccgtgcacggcaagatcgagcccagccaggccaagtacttcttcaaggaccaggtgctggtgagctgcgacaccggctacaaggtgctgaaggacaacgtggagatggacaccttccagatcgagtgcctgaaggacggcacctggagcaacaagatccccacctgcaagatcgtggactgcagagcccccggcgagctggagcacggcctgatcaccttcagcaccagaaacaacctgaccacctacaagagcgagatcaagtacagctgccaggagccctactacaagatgctgaacaacaacaccggcatctacacctgcagcgcccagggcgtgtggatgaacaaggtgctgggcagaagcctgcccacctgcctgcccgtgtgcggcctgcccaagttcagcagaaagctgatggccagaatcttcaacggcagacccgcccagaagggcaccaccccctggatcgccatgctgagccacctgaacggccagcccttctgcggcggcagcctgctgggcagcagctggatcgtgaccgccgcccactgcctgcaccagagcctggaccccgaggaccccaccctgagagacagcgacctgctgagccccagcgacttcaagatcatcctgggcaagcactggagactgagaagcgacgagaacgagcagcacctgggcgtgaagcacaccaccctgcacccccagtacgaccccaacaccttcgagaacgacgtggccctggtggagctgctggagagccccgtgctgaacgccttcgtgatgcccatctgcctgcccgagggcccccagcaggagggcgccatggtgatcgtgagcggctggggcaagcagttcctgcagagattccccgagaccctgatggagatcgagatccccatcgtggaccacagcacctgccagaaggcctacgcccccctgaagaagaaggtgaccagagacatgatctgcgccggcgagaaggagggcggcaaggacgcctgcgccggcgacagcggcggccccatggtgaccctgaacagagagagaggccagtggtacctggtgggcaccgtgagctggggcgacgactgcggcaagaaggacagatacggcgtgtacagctacatccaccacaacaaggactggatccagagagtgaccggcgtgagaaactag

SEQ ID NO: 87906 - DNA, 1848 bp, synthetic construct
  misc_feature 1..1848: note = Description of Artificial Sequence: Synthetic coding sequence
  source 1..1848: mol_type = other DNA
atgagcatcaccttcagaagcgacttcagcaacgaggagagattcaccggcttcgacgcccactacatggccgtggacgtggacgagtgcaaggagagagaggacgaggagctgagctgcgaccactactgccacaactacatcggcggctactactgcagctgcagattcggctacatcctgcacaccgacaacagaacctgcagagtggagtgcagcgacaacctgttcacccagagaaccggcgtgatcaccagccccgacttccccaacccctaccccaagagcagcgagtgcctgtacaccatcgagctggaggagggcttcatggtgaacctgcagttcgaggacatcttcgacatcgaggaccaccccgaggtgccctgcccctacgactacatcaagatcaaggtgggccccaaggtgctgggccccttctgcggcgagaaggcccccgagcccatcagcacccagagccacagcgtgctgatcctgttccacagcgacaacagcggcgagaacagaggctggagactgagctacagagccgccggcaacgagtgccccgagctgcagccccccgtgcacggcaagatcgagcccagccaggccaagtacttcttcaaggaccaggtgctggtgagctgcgacaccggctacaaggtgctgaaggacaacgtggagatggacaccttccagatcgagtgcctgaaggacggcacctggagcaacaagatccccacctgcaagatcgtggactgcagagcccccggcgagctggagcacggcctgatcaccttcagcaccagaaacaacctgaccacctacaagagcgagatcaagtacagctgccaggagccctactacaagatgctgaacaacaacaccggcatctacacctgcagcgcccagggcgtgtggatgaacaaggtgctgggcagaagcctgcccacctgcctgcccgagtgcggccagcccagcagaagcctgcccagcctggtgaagagaatcatcggcggcagaaacgccgagcccggcctgttcccctggcaggccctgatcgtggtggaggacaccagcagagtgcccaacgacaagtggttcggcagcggcgccctgctgagcgccagctggatcctgaccgccgcccacgtgctgagaagccagagaagagacaccaccgtgatccccgtgagcaaggagcacgtgaccgtgtacctgggcctgcacgacgtgagagacaagagcggcgccgtgaacagcagcgccgccagagtggtgctgcaccccgacttcaacatccagaactacaaccacgacatcgccctggtgcagctgcaggagcccgtgcccctgggcccccacgtgatgcccgtgtgcctgcccagactggagcccgagggccccgccccccacatgctgggcctggtggccggctggggcatcagcaaccccaacgtgaccgtggacgagatcatcagcagcggcaccagaaccctgagcgacgtgctgcagtacgtgaagctgcccgtggtgccccacgccgagtgcaagaccagctacgagagcagaagcggcaactacagcgtgaccgagaacatgttctgcgccggctactacgagggcggcaaggacacctgcctgggcgacagcggcggcgccttcgtgatcttcgacgacctgagccagagatgggtggtgcagggcctggtgagctggggcggccccgaggagtgcggcagcaagcaggtgtacggcgtgtacaccaaggtgagcaactacgtggactgggtgtgggagcagatgggcctgccccagagcgtggtggagccccaggtggagagatag

SEQ ID NO: 87907 - DNA, 249 bp, synthetic construct
  misc_feature 1..249: note = Description of Artificial Sequence: Synthetic coding sequence
  source 1..249: mol_type = other DNA
atgttctgcgccggctactacgagggcggcaaggacacctgcctgggcgacagcggcggcgccttcgtgatcttcgacgacctgagccagagatgggtggtgcagggcctggtgagctggggcggccccgaggagtgcggcagcaagcaggtgtacggcgtgtacaccaaggtgagcaactacgtggactgggtgtgggagcagatgggcctgccccagagcgtggtggagccccaggtggagagatag

SEQ ID NO: 87908 - DNA, 1443 bp, synthetic construct
  misc_feature 1..1443: note = Description of Artificial Sequence: Synthetic coding sequence
  source 1..1443: mol_type = other DNA
atgagcatcaccttcagaagcgacttcagcaacgaggagagattcaccggcttcgacgcccactacatggccgtggacgtggacgagtgcaaggagagagaggacgaggagctgagctgcgaccactactgccacaactacatcggcggctactactgcagctgcagattcggctacatcctgcacaccgacaacagaacctgcagagtggagtgcagcgacaacctgttcacccagagaaccggcgtgatcaccagccccgacttccccaacccctaccccaagagcagcgagtgcctgtacaccatcgagctggaggagggcttcatggtgaacctgcagttcgaggacatcttcgacatcgaggaccaccccgaggtgccctgcccctacgactacatcaagatcaaggtgggccccaaggtgctgggccccttctgcggcgagaaggcccccgagcccatcagcacccagagccacagcgtgctgatcctgttccacagcgacaacagcggcgagaacagaggctggagactgagctacagagccgccggcaacgagtgccccgagctgcagccccccgtgcacggcaagatcgagcccagccaggccaagtacttcttcaaggaccaggtgctggtgagctgcgacaccggctacaaggtgctgaaggacaacgtggagatggacaccttccagatcgagtgcctgaaggacggcacctggagcaacaagatccccacctgcaagatcgtggactgcagagcccccggcgagctggagcacggcctgatcaccttcagcaccagaaacaacctgaccacctacaagagcgagatcaagtacagctgccaggagccctactacaagatgctgaacaacaacaccggcatctacacctgcagcgcccagggcgtgtggatgaacaaggtgctgggcagaagcctgcccacctgcctgcccgagtgcggccagcccagcagaagcctgcccagcctggtgaagagaatcatcggcggcagaaacgccgagcccggcctgttcccctggcaggccctgatcgtggtggaggacaccagcagagtgcccaacgacaagtggttcggcagcggcgccctgctgagcgccagctggatcctgaccgccgcccacgtgctgagaagccagagaagagacaccaccgtgatccccgtgagcaaggagcacgtgaccgtgtacctgggcctgcacgacgtgagagacaagagcggcgccgtgaacagcagcgccgccagagtggtgctgcaccccgacttcaacatccagaactacaaccacgacatcgccctggtgcagctgcaggagcccgtgcccctgggcccccacgtgatgcccgtgtgcctgcccagactggagccccccggcggcagactgggccacctgcagagccagtgcgacagctag

SEQ ID NO: 87909 - DNA, 2061 bp, synthetic construct
  misc_feature 1..2061: note = Description of Artificial Sequence: Synthetic coding sequence
  source 1..2061: mol_type = other DNA
atgagactgctgaccctgctgggcctgctgtgcggcagcgtggccacccccctgggccccaagtggcccgagcccgtgttcggcagactggccagccccggcttccccggcgagtacgccaacgaccaggagagaagatggaccctgaccgccccccccggctacagactgagactgtacttcacccacttcgacctggagctgagccacctgtgcgagtacgacttcgtgaagctgagcagcggcgccaaggtgctggccaccctgtgcggccaggagagcaccgacaccgagagagcccccggcaaggacaccttctacagcctgggcagcagcctggacatcaccttcagaagcgactacagcaacgagaagcccttcaccggcttcgaggccttctacgccgccgaggacatcgacgagtgccaggtggcccccggcgaggcccccacctgcgaccaccactgccacaaccacctgggcggcttctactgcagctgcagagccggctacgtgctgcacagaaacaagagaacctgcagcgccctgtgcagcggccaggtgttcacccagagaagcggcgagctgagcagccccgagtaccccagaccctaccccaagctgagcagctgcacctacagcatcagcctggaggagggcttcagcgtgatcctggacttcgtggagagcttcgacgtggagacccaccccgagaccctgtgcccctacgacttcctgaagatccagaccgacagagaggagcacggccccttctgcggcaagaccctgccccacagaatcgagaccaagagcaacaccgtgaccatcaccttcgtgaccgacgagagcggcgaccacaccggctggaagatccactacaccagcaccgcccagccctgcccctaccccatggccccccccaacggccacgtgagccccgtgcaggccaagtacatcctgaaggacagcttcagcatcttctgcgagaccggctacgagctgctgcagggccacctgcccctgaagagcttcaccgccgtgtgccagaaggacggcagctgggacagacccatgcccgcctgcagcatcgtggactgcggcccccccgacgacctgcccagcggcagagtggagtacatcaccggccccggcgtgaccacctacaaggccgtgatccagtacagctgcgaggagaccttctacaccatgaaggtgaacgacggcaagtacgtgtgcgaggccgacggcttctggaccagcagcaagggcgagaagagcctgcccgtgtgcgagcccgtgtgcggcctgagcgccagaaccaccggcggcagaatctacggcggccagaaggccaagcccggcgacttcccctggcaggtgctgatcctgggcggcaccaccgccgccggcgccctgctgtacgacaactgggtgctgaccgccgcccacgccgtgtacgagcagaagcacgacgccagcgccctggacatcagaatgggcaccctgaagagactgagcccccactacacccaggcctggagcgaggccgtgttcatccacgagggctacacccacgacgccggcttcgacaacgacatcgccctgatcaagctgaacaacaaggtggtgatcaacagcaacatcacccccatctgcctgcccagaaaggaggccgagagcttcatgagaaccgacgacatcggcaccgccagcggctggggcctgacccagagaggcttcctggccagaaacctgatgtacgtggacatccccatcgtggaccaccagaagtgcaccgccgcctacgagaagcccccctaccccagaggcagcgtgaccgccaacatgctgtgcgccggcctggagagcggcggcaaggacagctgcagaggcgacagcggcggcgccctggtgttcctggacagcgagaccgagagatggttcgtgggcggcatcgtgagctggggcagcatgaactgcggcgaggccggccagtacggcgtgtacaccaaggtgatcaactacatcccctggatcgagaacatcatcagcgacttctag

SEQ ID NO: 87910 - DNA, 558 bp, synthetic construct
  misc_feature 1..558: note = Description of Artificial Sequence: Synthetic coding sequence
  source 1..558: mol_type = other DNA
atgagactgctgaccctgctgggcctgctgtgcggcagcgtggccacccccctgggccccaagtggcccgagcccgtgttcggcagactggccagccccggcttccccggcgagtacgccaacgaccaggagagaagatggaccctgaccgccccccccggctacagactgagactgtacttcacccacttcgacctggagctgagccacctgtgcgagtacgacttcgtgaagctgagcagcggcgccaaggtgctggccaccctgtgcggccaggagagcaccgacaccgagagagcccccggcaaggacaccttctacagcctgggcagcagcctggacatcaccttcagaagcgactacagcaacgagaagcccttcaccggcttcgaggccttctacgccgccgaggacatcgacgagtgccaggtggcccccggcgaggcccccacctgcgaccaccactgccacaaccacctgggcggcttctactgcagctgcagagccggctacgtgctgcacagaaacaagagaacctgcagcgagcagagcctgtag

SEQ ID NO: 87911 - DNA, 1089 bp, synthetic construct
  misc_feature 1..1089: note = Description of Artificial Sequence: Synthetic coding sequence
  source 1..1089: mol_type = other DNA
atggccgcccccagagtgttccccctgagctgcgccgtgcagcagtacgcctggggcaagatgggcagcaacagcgaggtggccagactgctggccagcagcgaccccctggcccagatcgccgaggacaagccctacgccgagctgtggatgggcacccaccccagaggcgacgccaagatcctggacaacagaatcagccagaagaccctgagccagtggatcgccgagaaccaggacagcctgggcagcaaggtgaaggacaccttcaacggcaacctgcccttcctgttcaaggtgctgagcgtggagacccccctgagcatccaggcccaccccaacaaggagctggccgagaagctgcacctgcaggccccccagcactaccccgacgccaaccacaagcccgagatggccatcgccctgacccccttccagggcctgtgcggcttcagacccgtggaggagatcgtgaccttcctgaagaccgccgccggcaacaacatggaggacatcttcggcgagctgctgctgcagctgcaccagcagtaccccggcgacatcggctgcttcgccatctacttcctgaacctgctgaccctgaagcccggcgaggccatgttcctggaggccaacgtgccccacgcctacctgaagggcgactgcgtggagtgcatggcctgcagcgacaacaccgtgagagccggcctgacccccaagttcatcgacgtgcccaccctgtgcgagatgctgagctacacccccagcagcagcaaggacagactgttcctgcccaccagaagccaggaggacccctacctgagcatctacgacccccccgtgcccgacttcaccatcatgaagaccgaggtgcccggcagcgtgaccgagtacaaggtgctggccctggacagcgccagcatcctgctgatggtgcagggcaccgtgatcgccagcacccccaccacccagacccccatccccctgcagagaggcggcgtgctgttcatcggcgccaacgagagcgtgagcctgaagctgaccgagcccaaggacctgctgatcttcagagcctgctgcctgctgtag

SEQ ID NO: 87912 - DNA, 1272 bp, synthetic construct
  misc_feature 1..1272: note = Description of Artificial Sequence: Synthetic coding sequence
  source 1..1272: mol_type = other DNA
atggccgcccccagagtgttccccctgagctgcgccgtgcagcagtacgcctggggcaagatgggcagcaacagcgaggtggccagactgctggccagcagcgaccccctggcccagatcgccgaggacaagccctacgccgagctgtggatgggcacccaccccagaggcgacgccaagatcctggacaacagaatcagccagaagaccctgagccagtggatcgccgagaaccaggacagcctgggcagcaaggtgaaggacaccttcaacggcaacctgcccttcctgttcaaggtgctgagcgtggagacccccctgagcatccaggcccaccccaacaaggagctggccgagaagctgcacctgcaggccccccagcactaccccgacgccaaccacaagcccgagatggccatcgccctgacccccttccagggcctgtgcggcttcagacccgtggaggagatcgtgaccttcctgaagaaggtgcccgagttccagttcctgatcggcgacgaggccgccacccacctgaagcagaccatgagccacgacagccaggccgtggccagcagcctgcagagctgcttcagccacctgatgaagagcgagaagaaggtggtggtggagcagctgaacctgctggtgaagagaatcagccagcaggccgccgccggcaacaacatggaggacatcttcggcgagctgctgctgcagctgcaccagcagtaccccggcgacatcggctgcttcgccatctacttcctgaacctgctgaccctgaagcccggcgaggccatgttcctggaggccaacgtgccccacgcctacctgaagggcgactgcgtggagtgcatggcctgcagcgacaacaccgtgagagccggcctgacccccaagttcatcgacgtgcccaccctgtgcgagatgctgagctacacccccagcagcagcaaggacagactgttcctgcccaccagaagccaggaggacccctacctgagcatctacgacccccccgtgcccgacttcaccatcatgaagaccgaggtgcccggcagcgtgaccgagtacaaggtgctggccctggacagcgccagcatcctgctgatggtgcagggcaccgtgatcgccagcacccccaccacccagacccccatccccctgcagagaggcggcgtgctgttcatcggcgccaacgagagcgtgagcctgaagctgaccgagcccaaggacctgctgatcttcagagcctgctgcctgctgtag

SEQ ID NO: 87913 - DNA, 804 bp, synthetic construct
  misc_feature 1..804: note = Description of Artificial Sequence: Synthetic coding sequence
  source 1..804: mol_type = other DNA
atgggcagcaacagcgaggtggccagactgctggccagcagcgaccccctggcccagatcgccgaggacaagccctacgccgagctgtggatgggcacccaccccagaggcgacgccaagatcctggacaacagaatcagccagaagaccctgagccagtggatcgccgagaaccaggacagcctgggcagcaaggtgaaggacaccttcaacggcaacctgcccttcctgttcaaggtgctgagcgtggagacccccctgagcatccaggcccaccccaacaaggagctggccgagaagctgcacctgcaggccccccagcactaccccgacgccaaccacaagcccgagatggccatcgccctgacccccttccagggcctgtgcggcttcagacccgtggaggagatcgtgaccttcctgaagaaggtgcccgagttccagttcctgatcggcgacgaggccgccacccacctgaagcagaccatgagccacgacagccaggccgtggccagcagcctgcagagctgcttcagccacctgatgaagagcgagaagaaggtggtggtggagcagctgaacctgctggtgaagagaatcagccagcaggccgccgccggcaacaacatggaggacatcttcggcgagctgctgctgcagctgcaccagcagtaccccggcgacatcggctgcttcgccatctacttcctgaacctgctgaccctgaagcccggcgaggccatgttcctggaggccaacgtgccccacgcctacctgaagggcggcccctggctgtgccactag

SEQ ID NO: 87914 - DNA, 1122 bp, synthetic construct
  misc_feature 1..1122: note = Description of Artificial Sequence: Synthetic coding sequence
  source 1..1122: mol_type = other DNA
atgggcacccaccccagaggcgacgccaagatcctggacaacagaatcagccagaagaccctgagccagtggatcgccgagaaccaggacagcctgggcagcaaggtgaaggacaccttcaacggcaacctgcccttcctgttcaaggtgctgagcgtggagacccccctgagcatccaggcccaccccaacaaggagctggccgagaagctgcacctgcaggccccccagcactaccccgacgccaaccacaagcccgagatggccatcgccctgacccccttccagggcctgtgcggcttcagacccgtggaggagatcgtgaccttcctgaagaaggtgcccgagttccagttcctgatcggcgacgaggccgccacccacctgaagcagaccatgagccacgacagccaggccgtggccagcagcctgcagagctgcttcagccacctgatgaagagcgagaagaaggtggtggtggagcagctgaacctgctggtgaagagaatcagccagcaggccgccgccggcaacaacatggaggacatcttcggcgagctgctgctgcagctgcaccagcagtaccccggcgacatcggctgcttcgccatctacttcctgaacctgctgaccctgaagcccggcgaggccatgttcctggaggccaacgtgccccacgcctacctgaagggcgactgcgtggagtgcatggcctgcagcgacaacaccgtgagagccggcctgacccccaagttcatcgacgtgcccaccctgtgcgagatgctgagctacacccccagcagcagcaaggacagactgttcctgcccaccagaagccaggaggacccctacctgagcatctacgacccccccgtgcccgacttcaccatcatgaagaccgaggtgcccggcagcgtgaccgagtacaaggtgctggccctggacagcgccagcatcctgctgatggtgcagggcaccgtgatcgccagcacccccaccacccagacccccatccccctgcagagaggcggcgtgctgttcatcggcgccaacgagagcgtgagcctgaagctgaccgagcccaaggacctgctgatcttcagagcctgctgcctgctgtag

SEQ ID NO: 87915 - DNA, 4371 bp, synthetic construct
  misc_feature 1..4371: note = Description of Artificial Sequence: Synthetic coding sequence
  source 1..4371: mol_type = other DNA
atgagactgcccctgctgctggtgttcgccagcgtgatccccggcgccgtgctgctgctggacaccagacagttcctgatctacaacgaggaccacaagagatgcgtggacgccgtgagccccagcgccgtgcagaccgccgcctgcaaccaggacgccgagagccagaagttcagatgggtgagcgagagccagatcatgagcgtggccttcaagctgtgcctgggcgtgcccagcaagaccgactgggtggccatcaccctgtacgcctgcgacagcaagagcgagttccagaagtgggagtgcaagaacgacaccctgctgggcatcaagggcgaggacctgttcttcaactacggcaacagacaggagaagaacatcatgctgtacaagggcagcggcctgtggagcagatggaagatctacggcaccaccgacaacctgtgcagcagaggctacgaggccatgtacaccctgctgggcaacgccaacggcgccacctgcgccttccccttcaagttcgagaacaagtggtacgccgactgcaccagcgccggcagaagcgacggctggctgtggtgcggcaccaccaccgactacgacaccgacaagctgttcggctactgccccctgaagttcgagggcagcgagagcctgtggaacaaggaccccctgaccagcgtgagctaccagatcaacagcaagagcgccctgacctggcaccaggccagaaagagctgccagcagcagaacgccgagctgctgagcatcaccgagatccacgagcagacctacctgaccggcctgaccagcagcctgaccagcggcctgtggatcggcctgaacagcctgagcttcaacagcggctggcagtggagcgacagaagccccttcagatacctgaactggctgcccggcagccccagcgccgagcccggcaagagctgcgtgagcctgaaccccggcaagaacgccaagtgggagaacctggagtgcgtgcagaagctgggctacatctgcaagaagggcaacaccaccctgaacagcttcgtgatccccagcgagagcgacgtgcccacccactgccccagccagtggtggccctacgccggccactgctacaagatccacagagacgagaagaagatccagagagacgccctgaccacctgcagaaaggagggcggcgacctgaccagcatccacaccatcgaggagctggacttcatcatcagccagctgggctacgagcccaacgacgagctgtggatcggcctgaacgacatcaagatccagatgtacttcgagtggagcgacggcacccccgtgaccttcaccaagtggctgagaggcgagcccagccacgagaacaacagacaggaggactgcgtggtgatgaagggcaaggacggctactgggccgacagaggctgcgagtggcccctgggctacatctgcaagatgaagagcagaagccagggccccgagatcgtggaggtggagaagggctgcagaaagggctggaagaagcaccacttctactgctacatgatcggccacaccctgagcaccttcgccgaggccaaccagacctgcaacaacgagaacgcctacctgaccaccatcgaggacagatacgagcaggccttcctgaccagcttcgtgggcctgagacccgagaagtacttctggaccggcctgagcgacatccagaccaagggcaccttccagtggaccatcgaggaggaggtgagattcacccactggaacagcgacatgcccggcagaaagcccggctgcgtggccatgagaaccggcatcgccggcggcctgtgggacgtgctgaagtgcgacgagaaggccaagttcgtgtgcaagcactgggccgagggcgtgacccacccccccaagcccaccaccacccccgagcccaagtgccccgaggactggggcgccagcagcagaaccagcctgtgcttcaagctgtacgccaagggcaagcacgagaagaagacctggttcgagagcagagacttctgcagagccctgggcggcgacctggccagcatcaacaacaaggaggagcagcagaccatctggagactgatcaccgccagcggcagctaccacaagctgttctggctgggcctgacctacggcagccccagcgagggcttcacctggagcgacggcagccccgtgagctacgagaactgggcctacggcgagcccaacaactaccagaacgtggagtactgcggcgagctgaagggcgaccccaccatgagctggaacgacatcaactgcgagcacctgaacaactggatctgccagatccagaagggccagacccccaagcccgagcccacccccgccccccaggacaacccccccgtgaccgaggacggctgggtgatctacaaggactaccagtactacttcagcaaggagaaggagaccatggacaacgccagagccttctgcaagagaaacttcggcgacctggtgagcatccagagcgagagcgagaagaagttcctgtggaagtacgtgaacagaaacgacgcccagagcgcctacttcatcggcctgctgatcagcctggacaagaagttcgcctggatggacggcagcaaggtggactacgtgagctgggccaccggcgagcccaacttcgccaacgaggacgagaactgcgtgaccatgtacagcaacagcggcttctggaacgacatcaactgcggctaccccaacgccttcatctgccagagacacaacagcagcatcaacgccaccaccgtgatgcccaccatgcccagcgtgcccagcggctgcaaggagggctggaacttctacagcaacaagtgcttcaagatcttcggcttcatggaggaggagagaaagaactggcaggaggccagaaaggcctgcatcggcttcggcggcaacctggtgagcatccagaacgagaaggagcaggccttcctgacctaccacatgaaggacagcaccttcagcgcctggaccggcctgaacgacgtgaacagcgagcacaccttcctgtggaccgacggcagaggcgtgcactacaccaactggggcaagggctaccccggcggcagaagaagcagcctgagctacgaggacgccgactgcgtggtgatcatcggcggcgccagcaacgaggccggcaagtggatggacgacacctgcgacagcaagagaggctacatctgccagaccagaagcgaccccagcctgaccaacccccccgccaccatccagaccgacggcttcgtgaagtacggcaagagcagctacagcctgatgagacagaagttccagtggcacgaggccgagacctactgcaagctgcacaacagcctgatcgccagcatcctggacccctacagcaacgccttcgcctggctgcagatggagaccagcaacgagagagtgtggatcgccctgaacagcaacctgaccgacaaccagtacacctggaccgacaagtggagagtgagatacaccaactgggccgccgacgagcccaagctgaagagcgcctgcgtgtacctggacctggacggctactggaagaccgcccactgcaacgagagcttctacttcctgtgcaagagaagcgacgagatccccgccaccgagcccccccagctgcccggcagatgccccgagagcgaccacaccgcctggatccccttccacggccactgctactacatcgagagcagctacaccagaaactggggccaggccagcctggagtgcctgagaatgggcagcagcctggtgagcatcgagagcgccgccgagagcagcttcctgagctacagagtggagcccctgaagagcaagaccaacttctggatcggcctgttcagaaacgtggagggcacctggctgtggatcaacaacagccccgtgagcttcgtgaactggaacaccggcgaccccagcggcgagagaaacgactgcgtggccctgcacgccagcagcggcttctggagcaacatccactgcagcagctacaagggctacatctgcaagagacccaagatcatcgacgccaagcccacccacgagctgctgaccaccaaggccgacaccagaaagatggaccccagcaagcccagcagcaacgtggccggcgtggtgatcatcgtgatcctgctgatcctgaccggcgccggcctggccgcctacttcttctacaagaagagaagagtgcacctgccccaggagggcgccttcgagaacaccctgtacttcaacagccagagcagccccggcaccagcgacatgaaggacctggtgggcaacatcgagcagaacgagcacagcgtgatctag

SEQ ID NO: 87916 - DNA, 4440 bp, synthetic construct
  misc_feature 1..4440: note = Description of Artificial Sequence: Synthetic coding sequence
  source 1..4440: mol_type = other DNA
atgggccccggcagacccgcccccgccccctggcccagacacctgctgagatgcgtgctgctgctgggctgcctgcacctgggcagacccggcgcccccggcgacgccgccctgcccgagcccaacgtgttcctgatcttcagccacggcctgcagggctgcctggaggcccagggcggccaggtgagagtgacccccgcctgcaacaccagcctgcccgcccagagatggaagtgggtgagcagaaacagactgttcaacctgggcaccatgcagtgcctgggcaccggctggcccggcaccaacaccaccgccagcctgggcatgtacgagtgcgacagagaggccctgaacctgagatggcactgcagaaccctgggcgaccagctgagcctgctgctgggcgccagaaccagcaacatcagcaagcccggcaccctggagagaggcgaccagaccagaagcggccagtggagaatctacggcagcgaggaggacctgtgcgccctgccctaccacgaggtgtacaccatccagggcaacagccacggcaagccctgcaccatccccttcaagtacgacaaccagtggttccacggctgcaccagcaccggcagagaggacggccacctgtggtgcgccaccacccaggactacggcaaggacgagagatggggcttctgccccatcaagagcaacgactgcgagaccttctgggacaaggaccagctgaccgacagctgctaccagttcaacttccagagcaccctgagctggagagaggcctgggccagctgcgagcagcagggcgccgacctgctgagcatcaccgagatccacgagcagacctacatcaacggcctgctgaccggctacagcagcaccctgtggatcggcctgaacgacctggacaccagcggcggctggcagtggagcgacaacagccccctgaagtacctgaactgggagagcgaccagcccgacaaccccagcgaggagaactgcggcgtgatcagaaccgagagcagcggcggctggcagaacagagactgcagcatcgccctgccctacgtgtgcaagaagaagcccaacgccaccgccgagcccaccccccccgacagatgggccaacgtgaaggtggagtgcgagcccagctggcagcccttccagggccactgctacagactgcaggccgagaagagaagctggcaggagagcaagaaggcctgcctgagaggcggcggcgacctggtgagcatccacagcatggccgagctggagttcatcaccaagcagatcaagcaggaggtggaggagctgtggatcggcctgaacgacctgaagctgcagatgaacttcgagtggagcgacggcagcctggtgagcttcacccactggcaccccttcgagcccaacaacttcagagacagcctggaggactgcgtgaccatctggggccccgagggcagatggaacgacagcccctgcaaccagagcctgcccagcatctgcaagaaggccggccagctgagccagggcgccgccgaggaggaccacggctgcagaaagggctggacctggcacagccccagctgctactggctgggcgaggaccaggtgacctacagcgaggccagaagactgtgcaccgaccacggcagccagctggtgaccatcaccaacagattcgagcaggccttcgtgagcagcctgatctacaactgggagggcgagtacttctggaccgccctgcaggacctgaacagcaccggcagcttcttctggctgagcggcgacgaggtgatgtacacccactggaacagagaccagcccggctacagcagaggcggctgcgtggccctggccaccggcagcgccatgggcctgtgggaggtgaagaactgcaccagcttcagagccagatacatctgcagacagagcctgggcacccccgtgacccccgagctgcccggccccgaccccacccccagcctgaccggcagctgcccccagggctgggccagcgacaccaagctgagatactgctacaaggtgttcagcagcgagagactgcaggacaagaagagctgggtgcaggcccagggcgcctgccaggagctgggcgcccagctgctgagcctggccagctacgaggaggagcacttcgtggccaacatgctgaacaagatcttcggcgagagcgagcccgagatccacgagcagcactggttctggatcggcctgaacagaagagaccccagaggcggccagagctggagatggagcgacggcgtgggcttcagctaccacaacttcgacagaagcagacacgacgacgacgacatcagaggctgcgccgtgctggacctggccagcctgcagtgggtggccatgcagtgcgacacccagctggactggatctgcaagatccccagaggcaccgacgtgagagagcccgacgacagcccccagggcagaagagagtggctgagattccaggaggccgagtacaagttcttcgagcaccacagcacctgggcccaggcccagagaatctgcacctggttccaggccgagctgaccagcgtgcacagccaggccgagctggacttcctgagccacaacctgcagaagttcagcagagcccaggagcagcactggtggatcggcctgcacaccagcgagagcgacggcagattcagatggaccgacggcagcatcatcaacttcatcagctgggcccccggcaagcccagacccgtgggcaaggacaagaagtgcgtgtacatgaccgccagcagagaggactggggcgaccagagatgcctgaccgccctgccctacatctgcaagagaagcaacgtgaccaaggagacccagccccccgacctgcccaccaccgccctgggcggctgccccagcgactggatccagttcctgaacaagtgcttccaggtgcagggccaggagccccagagcagagtgaagtggagcgaggcccagttcagctgcgagcagcaggaggcccagctggtgaccatcaccaaccccctggagcaggccttcatcaccgccagcctgcccaacgtgaccttcgacctgtggatcggcctgcacgccagccagagagacttccagtgggtggagcaggagcccctgatgtacgccaactgggcccccggcgagcccagcggccccagccccgcccccagcggcaacaagcccaccagctgcgccgtggtgctgcacagccccagcgcccacttcaccggcagatgggacgacagaagctgcaccgaggagacccacggcttcatctgccagaagggcaccgaccccagcctgagccccagccccgccgccctgccccccgcccccggcaccgagctgagctacctgaacggcaccttcagactgctgcagaagcccctgagatggcacgacgccctgctgctgtgcgagagcagaaacgccagcctggcctacgtgcccgacccctacacccaggccttcctgacccaggccgccagaggcctgagaacccccctgtggatcggcctggccggcgaggagggcagcagaagatacagctgggtgagcgaggagcccctgaactacgtgggctggcaggacggcgagccccagcagcccggcggctgcacctacgtggacgtggacggcgcctggagaaccaccagctgcgacaccaagctgcagggcgccgtgtgcggcgtgagcagcggcccccccccccccagaagaatcagctaccacggcagctgcccccagggcctggccgacagcgcctggatccccttcagagagcactgctacagcttccacatggagctgctgctgggccacaaggaggccagacagagatgccagagagccggcggcgccgtgctgagcatcctggacgagatggagaacgtgttcgtgtgggagcacctgcagagctacgagggccagagcagaggcgcctggctgggcatgaacttcaaccccaagggcggcaccctggtgtggcaggacaacaccgccgtgaactacagcaactggggcccccccggcctgggccccagcatgctgagccacaacagctgctactggatccagagcaacagcggcctgtggagacccggcgcctgcaccaacatcaccatgggcgtggtgtgcaagctgcccagagccgagcagagcagcttcagccccagcgccctgcccgagaaccccgccgccctggtggtggtgctgatggccgtgctgctgctgctggccctgctgaccgccgccctgatcctgtacagaagaagacagagcatcgagagaggcgccttcgagggcgccagatacagcagaagcagcagcagccccaccgaggccaccgagaagaacatcctggtgagcgacatggagatgaacgagcagcaggagtag

SEQ ID NO: 87917 - DNA, 1038 bp, synthetic construct
  misc_feature 1..1038: note = Description of Artificial Sequence: Synthetic coding sequence
  source 1..1038: mol_type = other DNA
atgcccaccggccacctgggcagccccctggccctggccctgctgcccgtggccaccaacagacccgccgtgcagtggagctgcaccgccccccagcccaccagcctggccgccggcaccatcggcgccgccagaagaagacccatggccagcagcgccagaagagccagaggcagcagaagatacagctgggtgagcgaggagcccctgaactacgtgggctggcaggacggcgagccccagcagcccggcggctgcacctacgtggacgtggacggcgcctggagaaccaccagctgcgacaccaagctgcagggcgccgtgtgcggcgtgagcagcggcccccccccccccagaagaatcagctaccacggcagctgcccccagggcctggccgacagcgcctggatccccttcagagagcactgctacagcttccacatggagctgctgctgggccacaaggaggccagacagagatgccagagagccggcggcgccgtgctgagcatcctggacgagatggagaacgtgttcgtgtgggagcacctgcagagctacgagggccagagcagaggcgcctggctgggcatgaacttcaaccccaagggcggcaccctggtgtggcaggacaacaccgccgtgaactacagcaactggggcccccccggcctgggccccagcatgctgagccacaacagctgctactggatccagagcaacagcggcctgtggagacccggcgcctgcaccaacatcaccatgggcgtggtgtgcaagctgcccagagccgagcagagcagcttcagccccagcgccctgcccgagaaccccgccgccctggtggtggtgctgatggccgtgctgctgctgctggccctgctgaccgccgccctgatcctgtacagaagaagacagagcatcgagagaggcgccttcgagggcgccagatacagcagaagcagcagcagccccaccgaggccaccgagaagaacatcctggtgagcgacatggagatgaacgagcagcaggagtag

SEQ ID NO: 87918 - DNA, 834 bp, synthetic construct
  misc_feature 1..834: note = Description of Artificial Sequence: Synthetic coding sequence
  source 1..834: mol_type = other DNA
atgttccccttctacagctgctggagaaccggcctgctgctgctgctgctggccgtggccgtgagagagagctggcagaccgaggagaagacctgcgacctggtgggcgagaagggcaaggagagcgagaaggagctggccctggtgaagagactgaagcccctgttcaacaagagcttcgagagcaccgtgggccagggcagcgacacctacatctacatcttcagagtgtgcagagaggccggcaaccacaccagcggcgccggcctggtgcagatcaacaagagcaacggcaaggagaccgtggtgggcagactgaacgagacccacatcttcaacggcagcaactggatcatgctgatctacaagggcggcgacgagtacgacaaccactgcggcaaggagcagagaagagccgtggtgatgatcagctgcaacagacacaccctggccgacaacttcaaccccgtgagcgaggagagaggcaaggtgcaggactgcttctacctgttcgagatggacagcagcctggcctgcagccccgagatcagccacctgagcgtgggcagcatcctgctggtgaccttcgccagcctggtggccgtgtacgtggtgggcggcttcctgtaccagagactggtggtgggcgccaagggcatggagcagttcccccacctggccttctggcaggacctgggcaacctggtggccgacggctgcgacttcgtgtgcagaagcaagcccagaaacgtgcccgccgcctacagaggcgtgggcgacgaccagctgggcgaggagagcgaggagagagacgaccacctgctgcccatgtag

SEQ ID NO: 87919 - DNA, 279 bp, synthetic construct
  misc_feature 1..279: note = Description of Artificial Sequence: Synthetic coding sequence
  source 1..279: mol_type = other DNA
atgttccccttctacagctgctggagaaccggcctgctgctgctgctgctggccgtggccgtgagagagagctggcagaccgaggagaagacctgcgacctggtgggcgagaagggcaaggagagcgagaaggagctggccctggtgaagagactgaagcccctgttcaacaagagcttcgagagcaccgtgggccagggcagcgacacctacatctacatcttcagagtgtgcagagaggccggcaaccacaccagcggcgccggcctggtgcagtag

SEQ ID NO: 87920 - DNA, 330 bp, synthetic construct
  misc_feature 1..330: note = Description of Artificial Sequence: Synthetic coding sequence
  source 1..330: mol_type = other DNA
atgttccccttctacagctgctggagaaccggcctgctgctgctgctgctggccgtggccgtgagagagagctggcagaccgaggagaagacctgcgacctggtgggcgagaagggcaaggagagcgagaaggagctggccctggtgaagagactgaagcccctgttcaacaagagcttcgagagcaccgtgggccagggcagcgacacctacatctacatcttcagagtgtgcagagaggccggcaaccacaccagcggcgccggcctggtgcagatcaacaagagcaacggcaaggagaccgtggtgggcagactgaacgagacctag

SEQ ID NO: 87921 - DNA, 747 bp, synthetic construct
  misc_feature 1..747: note = Description of Artificial Sequence: Synthetic coding sequence
  source 1..747: mol_type = other DNA
atgagcctgttccccagcctgcccctgctgctgctgagcatggtggccgccagctacagcgagaccgtgacctgcgaggacgcccagaagacctgccccgccgtgatcgcctgcagcagccccggcatcaacggcttccccggcaaggacggcagagacggcaccaagggcgagaagggcgagcccggccagggcctgagaggcctgcagggcccccccggcaagctgggcccccccggcaaccccggccccagcggcagccccggccccaagggccagaagggcgaccccggcaagagccccgacggcgacagcagcctggccgccagcgagagaaaggccctgcagaccgagatggccagaatcaagaagtggctgaccttcagcctgggcaagcaggtgggcaacaagttcttcctgaccaacggcgagatcatgaccttcgagaaggtgaaggccctgtgcgtgaagttccaggccagcgtggccacccccagaaacgccgccgagaacggcgccatccagaacctgatcaaggaggaggccttcctgggcatcaccgacgagaagaccgagggccagttcgtggacctgaccggcaacagactgacctacaccaactggaacgagggcgagcccaacaacgccggcagcgacgaggactgcgtgctgctgctgaagaacggccagtggaacgacgtgccctgcagcaccagccacctggccgtgtgcgagttccccatctag

SEQ ID NO: 87922 - DNA, 744 bp, synthetic construct
  misc_feature 1..744: note = Description of Artificial Sequence: Synthetic coding sequence
  source 1..744: mol_type = other DNA
atggccgccgaggccgacggccccctgaagagactgctggtgcccatcctgctgcccgagaagtgctacgaccagctgttcgtgcagtgggacctgctgcacgtgccctgcctgaagatcctgctgagcaagggcctgggcctgggcatcgtggccggcagcctgctggtgaagctgccccaggtgttcaagatcctgggcgccaagagcgccgagggcctgagcctgcagagcgtgatgctggagctggtggccctgaccggcaccatggtgtacagcatcaccaacaacttccccttcagcagctggggcgaggccctgttcctgatgctgcagaccatcaccatctgcttcctggtgatgcactacagaggccagaccgtgaagggcgtggccttcctggcctgctacggcctggtgctgctggtgctgctgagccccctgacccccctgaccgtggtgaccctgctgcaggccagcaacgtgcccgccgtggtggtgggcagactgctgcaggccgccaccaactaccacaacggccacaccggccagctgagcgccatcaccgtgttcctgctgttcggcggcagcctggccagaatcttcaccagcatccaggagaccggcgaccccctgatggccggcaccttcgtggtgagcagcctgtgcaacggcctgatcgccgcccagctgctgttctactggaacgccaagcccccccacaagcagaagaaggcccagtag

SEQ ID NO: 87923 - DNA, 381 bp, synthetic construct
  misc_feature 1..381: note = Description of Artificial Sequence: Synthetic coding sequence
  source 1..381: mol_type = other DNA
atggccgccgaggccgacggccccctgaagagactgctggtgcccatcctgctgcccgagaagtgctacgaccagctgttcgtgcagtgggacctgctgcacgtgccctgcctgaagatcctgctgagcaagggcctgggcctgggcatcgtggccggcagcctgctggtgaagctgccccaggtgttcaagatcctgggcgccaagagcgccgccggcctgaagaaggaggacgaggccagacccgtgagaagcgccagcatgagagtgagaggcggcctgggcgcctggggccaccagcagggcgagggctgcatggagtgggagagccagggcgccggcagcggctacagatgggccgccgtgccccccggcgcctag

SEQ ID NO: 87924 - DNA, 900 bp, synthetic construct
  misc_feature 1..900: note = Description of Artificial Sequence: Synthetic coding sequence
  source 1..900: mol_type = other DNA
atggccgccgaggccgacggccccctgaagagactgctggtgcccatcctgctgcccgagaagtgctacgaccagctgttcgtgcagtgggacctgctgcacgtgccctgcctgaagatcctgctgagcaagggcctgggcctgggcatcgtggccggcagcctgctggtgaagctgccccaggtgttcaagatcctgggcgccaagagcgccgagggcctgagcctgcagagcgtgatgctggagctggtggccctgaccggcaccatggtgtacagcatcaccaacaacttccccttcagcagctggggcgaggccctgttcctgatgctgcagaccatcaccatctgcttcctggtgatgcactacagaggccagaccgtgaagggcgtggccttcctggcctgctacggcctggtgctgctggtgctgctgagccccctgacccccctgaccgtggtgccctgcagcggcctgcagtgcgcctgctgcggcggcggcgaggccagccccggcagccaccagctgccccagagagcccacagacccgccctgagccaccacagcctgcccgccgtgtggggcctgcccggccccaacctgcacttccacagcggcaacagaagaagccccgacggctgggacctgtgcggcctgctgagcctgcagagaccccacagaagacccgccgccctgctgctggagtgcaaggccagcccccaggccgagaagggcgccgtggagcccgccaccggcgtgatccccttccccctgatccaccccaccagcggcttcagccccagcgagcccgcctgctggtgcgacctgctgatcctgcacagcagcgccctggccgacttcctgagccagggcttcctgctggtggagaccaacggctag

SEQ ID NO: 87925 - DNA, 636 bp, synthetic construct
  misc_feature 1..636: note = Description of Artificial Sequence: Synthetic coding sequence
  source 1..636: mol_type = other DNA
atggccgccgaggccgacggccccctgaagagactgctggtgcccatcctgctgcccgagaagtgctacgaccagctgttcgtgcagtgggacctgctgcacgtgccctgcctgaagatcctgctgagcaagggcctgggcctgggcatcgtggccggcagcctgctggtgaagctgccccaggtgttcaagatcctgggcgccaagagcgccgagggcctgagcctgcagagcgtgatgctggagctggtggccctgaccggcaccatggtgtacagcatcaccaacaacttccccttcagcagctggggcgaggccctgttcctgatgctgcagaccatcaccatctgcttcctggtgatgcactacagaggccagaccgtgaagggcgtggccttcctggcctgctacggcctggtgctgctggtgctgctgagccccctgacccccctgaccgtggtgaccctgctgcaggccagcaacgtgcccgccgtggtggtgggcagactgctgcaggccgccaccaacaccaccaccggcacccaggccagcagccagcccagccagagcagctgctgcctgggcgccccctggcccgagagcagcctgcccttcagaaagcccgagatcccctag

SEQ ID NO: 87926 - DNA, 561 bp, synthetic construct
  misc_feature 1..561: note = Description of Artificial Sequence: Synthetic coding sequence
  source 1..561: mol_type = other DNA
atggccgccgaggccgacggccccctgaagagactgctggtgcccatcctgctgcccgagaagtgctacgaccagctgttcgtgcagtgggacctgctgcacgtgccctgcctgaagatcctgctgagcaagggcctgggcctgggcatcgtggccggcagcctgctggtgaagctgccccaggtgttcaagatcctgggcgccaagagcgccgagggcctgagcctgcagagcgtgatgctggagctggtggccctgaccggcaccatggtgtacagcatcaccaacaacttccccttcagatgcagattccccagactgctgagacccggccccgccggcgccagcctgaccagcgacgccctggactgcagccaccccgcccccggcctgcagtgcgcctgctgcggcggcggcgaggccagccccggcagccaccagctgccccagagagcccacagacccgccctgagccaccacagcctgcccgccgtgtggggcctgcccggccccaacctgcacttccacagcggcgtgagcatccccttcagccagctgtag

SEQ ID NO: 87927 - DNA, 2826 bp, synthetic construct
  misc_feature 1..2826: note = Description of Artificial Sequence: Synthetic coding sequence
  source 1..2826: mol_type = other DNA
atggccgccgcccccgccctgaagcactggagaaccaccctggagagagtggagaagttcgtgagccccctgtacttcaccgactgcaacctgagaggcagactgttcggcgccagctgccccgtggccgtgctgagcagcttcctgacccccgagagactgccctaccaggaggccgtgcagagagacttcagacccgcccaggtgggcgacagcttcggccccacctggtggacctgctggttcagagtggagctgaccatccccgaggcctgggtgggccaggaggtgcacctgtgctgggagagcgacggcgagggcctggtgtggagagacggcgagcccgtgcagggcctgaccaaggagggcgagaagaccagctacgtgctgaccgacagactgggcgagagagaccccagaagcctgaccctgtacgtggaggtggcctgcaacggcctgctgggcgccggcaagggcagcatgatcgccgcccccgaccccgagaagatgttccagctgagcagagccgagctggccgtgttccacagagacgtgcacatgctgctggtggacctggagctgctgctgggcatcgccaaggcccagcagctggagtgggtgaagagcagataccccggcctgtacagcagaatccaggagttcgcctgcagaggccagttcgtgcccgtgggcggcacctgggtggagatggacggcaacctgcccagcggcgaggccatggtgagacagttcctgcagggccagaacttcttcctgcaggagttcggcaagatgtgcagcgagttctggctgcccgacaccttcggctacagcgcccagctgccccagatcatgcacggctgcggcatcagaagattcctgacccagaagctgagctggaacctggtgaacagcttcccccaccacaccttcttctgggagggcctggacggcagcagagtgctggtgcacttcccccccggcgacagctacggcatgcagggcagcgtggaggaggtgctgaagaccgtggccaacaacagagacaagggcagagccaaccacagcgccttcctgttcggcttcggcgacggcggcggcggccccacccagaccatgctggacagactgaagagactgagcaacaccgacggcctgcccagagtgcagctgagcagccccagacagctgttcagcgccctggagagcgacagcgagcagctgtgcacctgggtgggcgagctgttcctggagctgcacaacggcacctacaccacccacgcccagatcaagaagggcaacagagagtgcgagagaatcctgcacgacgtggagctgctgagcagcctggccctggccagaagcgcccagttcctgtaccccgccgcccagctgcagcacctgtggagactgctgctgctgaaccagttccacgacgtggtgaccggcagctgcatccagatggtggccgaggaggccatgtgccactacgaggacatcagaagccacggcaacaccctgctgagcgccgccgccgccgccctgtgcgccggcgagcccggccccgagggcctgctgatcgtgaacaccctgccctggaagagaatcgaggtgatggccctgcccaagcccggcggcgcccacagcctggccctggtgaccgtgcccagcatgggctacgcccccgtgcccccccccaccagcctgcagcccctgctgccccagcagcccgtgttcgtggtgcaggagaccgacggcagcgtgaccctggacaacggcatcatcagagtgaagctggaccccaccggcagactgaccagcctggtgctggtggccagcggcagagaggccatcgccgagggcgccgtgggcaaccagttcgtgctgttcgacgacgtgcccctgtactgggacgcctgggacgtgatggactaccacctggagaccagaaagcccgtgctgggccaggccggcaccctggccgtgggcaccgagggcggcctgagaggcagcgcctggttcctgctgcagatcagccccaacagcagactgagccaggaggtggtgctggacgtgggctgcccctacgtgagattccacaccgaggtgcactggcacgaggcccacaagttcctgaaggtggagttccccgccagagtgagaagcagccaggccacctacgagatccagttcggccacctgcagagacccacccactacaacaccagctgggactgggccagattcgaggtgtgggcccacagatggatggacctgagcgagcacggcttcggcctggccctgctgaacgactgcaagtacggcgccagcgtgagaggcagcatcctgagcctgagcctgctgagagcccccaaggcccccgacgccaccgccgacaccggcagacacgagttcacctacgccctgatgccccacaagggcagcttccaggacgccggcgtgatccaggccgcctacagcctgaacttccccctgctggccctgcccgcccccagccccgcccccgccaccagctggagcgccttcagcgtgagcagccccgccgtggtgctggagaccgtgaagcaggccgagagcagcccccagagaagaagcctggtgctgagactgtacgaggcccacggcagccacgtggactgctggctgcacctgagcctgcccgtgcaggaggccatcctgtgcgacctgctggagagacccgaccccgccggccacctgaccctgagagacaacagactgaagctgaccttcagccccttccaggtgctgagcctgctgctggtgctgcagccccccccccactag

SEQ ID NO: 87928 - DNA, 3174 bp, synthetic construct
  misc_feature 1..3174: note = Description of Artificial Sequence: Synthetic coding sequence
  source 1..3174: mol_type = other DNA
atggccgccgcccccgccctgaagcactggagaaccaccctggagagagtggagaagttcgtgagccccctgtacttcaccgactgcaacctgagaggcagactgttcggcgccagctgccccgtggccgtgctgagcagcttcctgacccccgagagactgccctaccaggaggccgtgcagagagacttcagacccgcccaggtgggcgacagcttcggccccacctggtggacctgctggttcagagtggagctgaccatccccgaggcctgggtgggccaggaggtgcacctgtgctgggagagcgacggcgagggcctggtgtggagagacggcgagcccgtgcagggcctgaccaaggagggcgagaagaccagctacgtgctgaccgacagactgggcgagagagaccccagaagcctgaccctgtacgtggaggtggcctgcaacggcctgctgggcgccggcaagggcagcatgatcgccgcccccgaccccgagaagatgttccagctgagcagagccgagctggccgtgttccacagagacgtgcacatgctgctggtggacctggagctgctgctgggcatcgccaagggcctgggcaaggacaaccagagaagcttccaggccctgtacaccgccaaccagatggtgaacgtgtgcgaccccgcccagcccgagaccttccccgtggcccaggccctggccagcagattcttcggccagcacggcggcgagagccagcacaccatccacgccaccggccactgccacatcgacaccgcctggctgtggcccttcaaggagaccgtgagaaagtgcgccagaagctgggtgaccgccctgcagctgatggagagaaaccccgagttcatcttcgcctgcagccaggcccagcagctggagtgggtgaagagcagataccccggcctgtacagcagaatccaggagttcgcctgcagaggccagttcgtgcccgtgggcggcacctgggtggagatggacggcaacctgcccagcggcgaggccatggtgagacagttcctgcagggccagaacttcttcctgcaggagttcggcaagatgtgcagcgagttctggctgcccgacaccttcggctacagcgcccagctgccccagatcatgcacggctgcggcatcagaagattcctgacccagaagctgagctggaacctggtgaacagcttcccccaccacaccttcttctgggagggcctggacggcagcagagtgctggtgcacttcccccccggcgacagctacggcatgcagggcagcgtggaggaggtgctgaagaccgtggccaacaacagagacaagggcagagccaaccacagcgccttcctgttcggcttcggcgacggcggcggcggccccacccagaccatgctggacagactgaagagactgagcaacaccgacggcctgcccagagtgcagctgagcagccccagacagctgttcagcgccctggagagcgacagcgagcagctgtgcacctgggtgggcgagctgttcctggagctgcacaacggcacctacaccacccacgcccagatcaagaagggcaacagagagtgcgagagaatcctgcacgacgtggagctgctgagcagcctggccctggccagaagcgcccagttcctgtaccccgccgcccagctgcagcacctgtggagactgctgctgctgaaccagttccacgacgtggtgaccggcagctgcatccagatggtggccgaggaggccatgtgccactacgaggacatcagaagccacggcaacaccctgctgagcgccgccgccgccgccctgtgcgccggcgagcccggccccgagggcctgctgatcgtgaacaccctgccctggaagagaatcgaggtgatggccctgcccaagcccggcggcgcccacagcctgggcctgacccccagccccggcgacagcgcccagcacggcctgtgcagctgcagcagcccccacctgaccgccgcccccgccgcccccgccgcctgcgtgagaagcgccagagcccccaccgacagcgccagcagacccccccccaccaagaccgacggcagcgtgaccctggacaacggcatcatcagagtgaagctggaccccaccggcagactgaccagcctggtgctggtggccagcggcagagaggccatcgccgagggcgccgtgggcaaccagttcgtgctgttcgacgacgtgcccctgtactgggacgcctgggacgtgatggactaccacctggagaccagaaagcccgtgctgggccaggccggcaccctggccgtgggcaccgagggcggcctgagaggcagcgcctggttcctgctgcagatcagccccaacagcagactgagccaggaggtggtgctggacgtgggctgcccctacgtgagattccacaccgaggtgcactggcacgaggcccacaagttcctgaaggtggagttccccgccagagtgagaagcagccaggccacctacgagatccagttcggccacctgcagagacccacccactacaacaccagctgggactgggccagattcgaggtgtgggcccacagatggatggacctgagcgagcacggcttcggcctggccctgctgaacgactgcaagtacggcgccagcgtgagaggcagcatcctgagcctgagcctgctgagagcccccaaggcccccgacgccaccgccgacaccggcagacacgagttcacctacgccctgatgccccacaagggcagcttccaggacgccggcgtgatccaggccgcctacagcctgaacttccccctgctggccctgcccgcccccagccccgcccccgccaccagctggagcgccttcagcgtgagcagccccgccgtggtgctggagaccgtgaagcaggccgagagcagcccccagagaagaagcctggtgctgagactgtacgaggcccacggcagccacgtggactgctggctgcacctgagcctgcccgtgcaggaggccatcctgtgcgacctgctggagagacccgaccccgccggccacctgaccctgagagacaacagactgaagctgaccttcagccccttccaggtgctgagcctgctgctggtgctgcagccccccccccactag

SEQ ID NO: 87929 - DNA, 3054 bp, synthetic construct
  misc_feature 1..3054: note = Description of Artificial Sequence: Synthetic coding sequence
  source 1..3054: mol_type = other DNA
atggccgccgcccccgccctgaagcactggagaaccaccctggagagagtggagaagttcgtgagccccctgtacttcaccgactgcaacctgagaggcagactgttcggcgccagctgccccgtggccgtgctgagcagcttcctgacccccgagagactgccctaccaggaggccgtgcagagagacttcagacccgcccaggtgggcgacagcttcggccccacctggtggacctgctggttcagagtggagctgaccatccccgaggcctgggtgggccaggaggtgcacctgtgctgggagagcgacggcgagggcctggtgtggagagacggcgagcccgtgcagggcctgaccaaggagggcgagaagaccagctacgtgctgaccgacagactgggcgagagagaccccagaagcctgaccctgtacgtggaggtggcctgcaacggcctgctgggcgccggcaagggcagcatgatcgccgcccccgaccccgagaagatgttccagctgagcagagccgagctggccgtgttccacagagacgtgcacatgctgctggtggacctggagctgctgctgggcatcgccaagggcctgggcaaggacaaccagagaagcttccaggccctgtacaccgccaaccagatggtgaacgtgtgcgaccccgcccagcccgagaccttccccgtggcccaggccctggccagcagattcttcggccagcacggcggcgagagccagcacaccatccacgccaccggccactgccacatcgacaccgcctggctgtggcccttcaaggagaccgtgagaaagtgcgccagaagctgggtgaccgccctgcagctgatggagagaaaccccgagttcatcttcgcctgcagccaggcccagcagctggagtgggtgaagagcagataccccggcctgtacagcagaatccaggagttcgcctgcagaggccagttcgtgcccgtgggcggcacctgggtggagatggacggcaacctgcccagcggcgaggccatggtgagacagttcctgcagggccagaacttcttcctgcaggagttcggcaagatgtgcagcgagttctggctgcccgacaccttcggctacagcgcccagctgccccagatcatgcacggctgcggcatcagaagattcctgacccagaagctgagctggaacctggtgaacagcttcccccaccacaccttcttctgggagggcctggacggcagcagagtgctggtgcacttcccccccggcgacagctacggcatgcagggcagcgtggaggaggtgctgaagaccgtggccaacaacagagacaagggcagagccaaccacagcgccttcctgttcggcttcggcgacggcggcggcggccccacccagaccatgctggacagactgaagagactgagcaacaccgacggcctgcccagagtgcagctgagcagccccagacagctgttcagcgccctggagagcgacagcgagcagctgtgcacctgggtgggcgagctgttcctggagctgcacaacggcacctacaccacccacgcccagatcaagaagggcaacagagagtgcgagagaatcctgcacgacgtggagctgctgagcagcctggccctggccagaagcgcccagttcctgtaccccgccgcccagctgcagcacctgtggagactgctgctgctgaaccagttccacgacgtggtgaccggcagctgcatccagatggtggccgaggaggccatgtgccactacgaggacatcagaagccacggcaacaccctgctgagcgccgccgccgccgccctgtgcgccggcgagcccggccccgagggcctgctgatcgtgaacaccctgccctggaagagaatcgaggtgatggccctgcccaagcccggcggcgcccacagcctggccctggtgaccgtgcccagcatgggctacgcccccgtgcccccccccaccagcctgcagcccctgctgccccagcagcccgtgttcgtggtgcaggagaccgacggcagcgtgaccctggacaacggcatcatcagagtgaagctggaccccaccggcagactgaccagcctggtgctggtggccagcggcagagaggccatcgccgagggcgccgtgggcaaccagttcgtgctgttcgacgacgtgcccctgtactgggacgcctgggacgtgatggactaccacctggagaccagaaagcccgtgctgggccaggccggcaccctggccgtgggcaccgagggcggcctgagaggcagcgcctggttcctgctgcagatcagccccaacagcagactgagccaggaggtggtgctggacgtgggctgcccctacgtgagattccacaccgaggtgcactggcacgaggcccacaagttcctgaaggtggagttccccgccagagtgagaagcagccaggccacctacgagatccagttcggccacctgcagagacccacccactacaacaccagctgggactgggccagattcgaggtgtgggcccacagatggatggacctgagcgagcacggcttcggcctggccctgctgaacgactgcaagtacggcgccagcgtgagaggcagcatcctgagcctgagcctgctgagagcccccaaggcccccgacgccaccgccgacaccggcagacacgagttcacctacgccctgatgccccacaaggcccccagccccgcccccgccaccagctggagcgccttcagcgtgagcagccccgccgtggtgctggagaccgtgaagcaggccgagagcagcccccagagaagaagcctggtgctgagactgtacgaggcccacggcagccacgtggactgctggctgcacctgagcctgcccgtgcaggaggccatcctgtgcgacctgctggagagacccgaccccgccggccacctgaccctgagagacaacagactgaagctgaccttcagccccttccaggtgctgagcctgctgctggtgctgcagccccccccccactag

SEQ ID NO: 87930 - DNA, 1104 bp, synthetic construct
  misc_feature 1..1104: note = Description of Artificial Sequence: Synthetic coding sequence
  source 1..1104: mol_type = other DNA
atgcccgtgggcggcctgctgcccctgttcagcagccccgccggcggcgtgctgggcggcggcctgggcggcggcggcggcagaaagggcagcggccccgccgccctgagactgaccgagaagttcgtgctgctgctggtgttcagcgccttcatcaccctgtgcttcggcgccatcttcttcctgcccgacagcagcaagctgctgagcggcgtgctgttccacagcagccccgccctgcagcccgccgccgaccacaagcccggccccggcgccagagccgaggacgccgccgagggcagagccagaagaagagaggagggcgcccccggcgaccccgaggccgccctggaggacaacctggccagaatcagagagaaccacgagagagccctgagagaggccaaggagaccctgcagaagctgcccgaggagatccagagagacatcctgctggagaagaagaaggtggcccaggaccagctgagagacaaggcccccttcagaggcctgccccccgtggacttcgtgccccccatcggcgtggagagcagagagcccgccgacgccgccatcagagagaagagagccaagatcaaggaggagatcgaggccagaaagggccaggccaactgccccggcagcagcagcagctgcgaggtggagatccagatgatgaagcacgcctggaacaactacaagggctacgcctggggcctgaacgagctgaagcccatcagcaagggcggccacagcagcagcctgttcggcaacatcaagggcgccaccatcgtggacgccctggacaccctgttcatcatggagatgaagcacgagttcgaggaggccaagagctgggtggaggagaacctggacttcaacgtgaacgccgagatcagcgtgttcgaggtgaacatcagattcgtgggcggcctgctgagcgcctactacctgagcggcgaggagatcttcagaaagaaggccgtggagctgggcgtgaagctgctgcccgccttccacacccccagcggcatcccctgggccctgctgaacatgaagagatggatgtgcaacatccccagagccatggaggccaccatctag

SEQ ID NO: 87931 - DNA, 1962 bp, synthetic construct
  misc_feature 1..1962: note = Description of Artificial Sequence: Synthetic coding sequence
  source 1..1962: mol_type = other DNA
atgcccgtgggcggcctgctgcccctgttcagcagccccgccggcggcgtgctgggcggcggcctgggcggcggcggcggcagaaagggcagcggccccgccgccctgagactgaccgagaagttcgtgctgctgctggtgttcagcgccttcatcaccctgtgcttcggcgccatcttcttcctgcccgacagcagcaagctgctgagcggcgtgctgttccacagcagccccgccctgcagcccgccgccgaccacaagcccggccccggcgccagagccgaggacgccgccgagggcagagccagaagaagagaggagggcgcccccggcgaccccgaggccgccctggaggacaacctggccagaatcagagagaaccacgagagagccctgagagaggccaaggagaccctgcagaagctgcccgaggagatccagagagacatcctgctggagaagaagaaggtggcccaggaccagctgagagacaaggcccccttcagaggcctgccccccgtggacttcgtgccccccatcggcgtggagagcagagagcccgccgacgccgccatcagagagaagagagccaagatcaaggagatgatgaagcacgcctggaacaactacaagggctacgcctggggcctgaacgagctgaagcccatcagcaagggcggccacagcagcagcctgttcggcaacatcaagggcgccaccatcgtggacgccctggacaccctgttcatcatggagatgaagcacgagttcgaggaggccaagagctgggtggaggagaacctggacttcaacgtgaacgccgagatcagcgtgttcgaggtgaacatcagattcgtgggcggcctgctgagcgcctactacctgagcggcgaggagatcttcagaaagaaggccgtggagctgggcgtgaagctgctgcccgccttccacacccccagcggcatcccctgggccctgctgaacatgaagagcggcatcggcagaaactggccctgggccagcggcggcagcagcatcctggccgagttcggcaccctgcacctggagttcatgcacctgagccacctgagcggcaaccccatcttcgccgagaaggtgatgaacatcagaaccgtgctgaacaagctggagaagccccagggcctgtaccccaactacctgaaccccagcagcggccagtggggccagcaccacgtgagcgtgggcggcctgggcgacagcttctacgagtacctgctgaaggcctggctgatgagcgacaagaccgacctggaggccaagaagatgtacttcgacgccgtgcaggccatcgagacccacctgatcagaaagagcagcagcggcctgacctacatcgccgagtggaagggcggcctgctggagcacaagatgggccacctgacctgcttcgccggcggcatgttcgccctgggcgccgacgccgcccccgagggcatggcccagcactacctggagctgggcgccgagatcgccagaacctgccacgagagctacaacagaaccttcatgaagctgggccccgaggccttcagattcgacggcggcgtggaggccatcgccaccagacagaacgagaagtactacatcctgagacccgaggtgatggagacctacatgtacatgtggagactgacccacgaccccaagtacagaaagtgggcctgggaggccgtggaggccctggagaaccactgcagagtgaacggcggctacagcggcctgagagacgtgtacctgctgcacgagagctacgacgacgtgcagcagagcttcttcctggccgagaccctgaagtacctgtacctgatcttcagcgacgacgacctgctgcccctggagcactggatcttcaacagcgaggcccacctgctgcccatcctgcccaaggacaagaaggaggtggagatcagagaggagtag

SEQ ID NO: 87932 - DNA, 579 bp, synthetic construct
  misc_feature 1..579: note = Description of Artificial Sequence: Synthetic coding sequence
  source 1..579: mol_type = other DNA
atgttcgccctgggcgccgacggcagcagagccgacaaggccggccactacctggagctgggcgccgagatcgccagaacctgccacgagagctacgacagaaccgccctgaagctgggccccgagagcttcaagttcgacggcgccgtggaggccgtggccgtgagacaggccgagaagtactacatcctgagacccgaggtgatcgagacctactggtacctgtggagattcacccacgaccccagatacagacagtggggctgggaggccgccctggccatcgagaagtactgcagagtgaacggcggcttcagcggcgtgaaggacgtgtacagcagcacccccacccacgacgacgtgcagcagagcttcttcctggccgagaccctgaagtacctgtacctgctgttcagcggcgacgacctgctgcccctggaccactgggtgttcaacaccgaggcccaccccctgcccgtgctgcacctggccaacaccaccctgagcggcaccagccagggcatgagaagacagaacccctacttccaggtgctgtacctgtactaccccgacgactag

SEQ ID NO: 87933 - DNA, 1926 bp, synthetic construct
  misc_feature 1..1926: note = Description of Artificial Sequence: Synthetic coding sequence
  source 1..1926: mol_type = other DNA
atgaccacccccgccctgctgcccctgagcggcagaagaatcccccccctgaacctgggcccccccagcttcccccaccacagagccaccctgagactgagcgagaagttcatcctgctgctgatcctgagcgccttcatcaccctgtgcttcggcgccttcttcttcctgcccgacagcagcaagcacaagagattcgacctgggcctggaggacgtgctgatcccccacgtggacgccggcaagggcgccaagaaccccggcgtgttcctgatccacggccccgacgagcacagacacagagaggaggaggagagactgagaaacaagatcagagccgaccacgagaaggccctggaggaggccaaggagaagctgagaaagagcagagaggagatcagagccgagatccagaccgagaagaacaaggtggtgcaggagatgaagatcaaggagaacaagcccctgccccccgtgcccatccccaacctggtgggcatcagaggcggcgaccccgaggacaacgacatcagagagaagagagagaagatcaaggagatgatgaagcacgcctgggacaactacagaacctacggctggggccacaacgagctgagacccatcgccagaaagggccacagccccaacatcttcggcagcagccagatgggcgccaccatcgtggacgccctggacaccctgtacatcatgggcctgcacgacgagttcctggacggccagagatggatcgaggacaacctggacttcagcgtgaacagcgaggtgagcgtgttcgaggtgaacatcagattcatcggcggcctgctggccgcctactacctgagcggcgaggagatcttcaagatcaaggccgtgcagctggccgagaagctgctgcccgccttcaacacccccaccggcatcccctgggccatggtgaacctgaagagcggcgtgggcagaaactggggctgggccagcgccggcagcagcatcctggccgagttcggcaccctgcacatggagttcatccacctgagctacctgaccggcgacctgacctactacaagaaggtgatgcacatcagaaagctgctgcagaagatggacagacccaacggcctgtaccccaactacctgaaccccagaaccggcagatggggccagtaccacaccagcgtgggcggcctgggcgacagcttctacgagtacctgctgaaggcctggctgatgagcgacaagaccgaccacgaggccagaaagatgtacgacgacgccatcgaggccatcgagaagcacctgatcaagaagagcagaggcggcctgaccttcatcggcgagtggaagaacggccacctggagaagaagatgggccacctggcctgcttcgccggcggcatgttcgccctgggcgccgacggcagcagagccgacaaggccggccactacctggagctgggcgccgagatcgccagaacctgccacgagagctacgacagaaccgccctgaagctgggccccgagagcttcaagttcgacggcgccgtggaggccgtggccgtgagacaggccgagaagtactacatcctgagacccgaggtgatcgagacctactggtacctgtggagattcacccacgaccccagatacagacagtggggctgggaggccgccctggccatcgagaagtactgcagagtgaacggcggcttcagcggcgtgaaggacgtgtacagcagcacccccacccacgacgacgtgcagcagagcttcttcctggccgagaccctgaagtacctgtacctgctgttcagcggcgacgacctgctgcccctggaccactgggtgttcaacaccgaggcccaccccctgcccgtgctgcacctggccaacaccaccctgagcggcaaccccgccgtgagatag

SEQ ID NO: 87934 - DNA, 1128 bp, synthetic construct
  misc_feature 1..1128: note = Description of Artificial Sequence: Synthetic coding sequence
  source 1..1128: mol_type = other DNA
atgggcctgcacgacgagttcctggacggccagagatggatcgaggacaacctggacttcagcgtgaacagcgaggtgagcgtgttcgaggtgaacatcagattcatcggcggcctgctggccgcctactacctgagcggcgaggagatcttcaagatcaaggccgtgcagctggccgagaagctgctgcccgccttcaacacccccaccggcatcccctgggccatggtgaacctgaagagcggcgtgggcagaaactggggctgggccagcgccggcagcagcatcctggccgagttcggcaccctgcacatggagttcatccacctgagctacctgaccggcgacctgacctactacaagaaggtgatgcacatcagaaagctgctgcagaagatggacagacccaacggcctgtaccccaactacctgaaccccagaaccggcagatggggccagtaccacaccagcgtgggcggcctgggcgacagcttctacgagtacctgctgaaggcctggctgatgagcgacaagaccgaccacgaggccagaaagatgtacgacgacgccatcgaggccatcgagaagcacctgatcaagaagagcagaggcggcctgaccttcatcggcgagtggaagaacggccacctggagaagaagatgggccacctggcctgcttcgccggcggcatgttcgccctgggcgccgacggcagcagagccgacaaggccggccactacctggagctgggcgccgagatcgccagaacctgccacgagagctacgacagaaccgccctgaagctgggccccgagagcttcaagttcgacggcgccgtggaggccgtggccgtgagacaggccgagaagtactacatcctgagacccgaggtgatcgagacctactggtacctgtggagattcacccacgaccccagatacagacagtggggctgggaggccgccctggccatcgagaagtactgcagagtgaacggcggcttcagcggcgtgaaggacgtgtacagcagcacccccacccacgacgacgtgcagcagagcttcttcctggccgagaccctgaagctggccagctaccacgagagaaccgtgttccccgccggctag

SEQ ID NO: 87935 - DNA, 615 bp, synthetic construct
  misc_feature 1..615: note = Description of Artificial Sequence: Synthetic coding sequence
  source 1..615: mol_type = other DNA
tgaatcaagaagagcagaggcggcctgaccttcatcggcgagtggaagaacggccacctggagaagaagatgggccacctggcctgcttcgccggcggcatgttcgccctgggcgccgacggcagcagagccgacaaggccggccactacctggagctgggcgccgagatcgccagaacctgccacgagagctacgacagaaccgccctgaagctgggccccgagagcttcaagttcgacggcgccgtggaggccgtggccgtgagacaggccgagaagtactacatcctgagacccgaggtgatcgagacctactggtacctgtggagattcacccacgaccccagatacagacagtggggctgggaggccgccctggccatcgagaagtactgcagagtgaacggcggcttcagcggcgtgaaggacgtgtacagcagcacccccacccacgacgacgtgcagcagagcttcttcctggccgagaccctgaagtacctgtacctgctgttcagcggcgacgacctgctgcccctggaccactgggtgttcaacaccgaggcccaccccctgcccgtgctgcacctggccaacaccaccctgagcgagagctag

SEQ ID NO: 87936 - DNA, 294 bp, synthetic construct
  misc_feature 1..294: note = Description of Artificial Sequence: Synthetic coding sequence
  source 1..294: mol_type = other DNA
gagaagtactgcagagtgaacggcggcttcagcggcgtgaaggacgtgtacagcagcacccccacccacgacgacgtgcagcagagcttcttcctggccgagaccctgaagtacctgtacctgctgttcagcggcgacgacctgctgcccctggaccactgggtgttcaacaccgaggcccaccccctgcccgtgctgcacctggccaacaccaccctgagcggcaccagccagggcatgagaagacagaacccctacttccaggtgctgtacctgtactaccccgacgactag

SEQ ID NO: 87937 - DNA, 1035 bp, synthetic construct
  misc_feature 1..1035: note = Description of Artificial Sequence: Synthetic coding sequence
  source 1..1035: mol_type = other DNA
tgaatcagattcatcggcggcctgctggccgcctactacctgagcggcgaggagatcttcaagatcaaggccgtgcagctggccgagaagctgctgcccgccttcaacacccccaccggcatcccctgggccatggtgaacctgaagagcggcgtgggcagaaactggggctgggccagcgccggcagcagcatcctggccgagttcggcaccctgcacatggagttcatccacctgagctacctgaccggcgacctgacctactacaagaaggtgatgcacatcagaaagctgctgcagaagatggacagacccaacggcctgtaccccaactacctgaaccccagaaccggcagatggggccagtaccacaccagcgtgggcggcctgggcgacagcttctacgagtacctgctgaaggcctggctgatgagcgacaagaccgaccacgaggccagaaagatgtacgacgacgccatcgaggccatcgagaagcacctgatcaagaagagcagaggcggcctgaccttcatcggcgagtggaagaacggccacctggagaagaagatgggccacctggcctgcttcgccggcggcatgttcgccctgggcgccgacggcagcagagccgacaaggccggccactacctggagctgggcgccgagatcgccagaacctgccacgagagctacgacagaaccgccctgaagctgggccccgagagcttcaagttcgacggcgccgtggaggccgtggccgtgagacaggccgagaagtactacatcctgagacccgaggtgatcgagacctactggtacctgtggagattcacccacgaccccagatacagacagtggggctgggaggccgccctggccatcgagaagtactgcagagtgaacggcggcttcagcggcgtgaaggacgtgtacagcagcacccccacccacgacgacgtgcagcagagcttcttcctggccgagaccctgaagctggccagctaccacgagagaaccgtgttccccgccggctag

SEQ ID NO: 87938 - DNA, 2100 bp, synthetic construct
  misc_feature 1..2100: note = Description of Artificial Sequence: Synthetic coding sequence
  source 1..2100: mol_type = other DNA
atggccgcctgcgagggcagaagaagcggcgccctgggcagcagccagagcgacttcctgaccccccccgtgggcggcgccccctgggccgtggccaccaccgtggtgatgtacccccccccccccccccccccccacagagacttcatcagcgtgaccctgagcttcggcgagaactacgacaacagcaagagctggagaagaagaagctgctggagaaagtggaagcagctgagcagactgcagagaaacatgatcctgttcctgctggccttcctgctgttctgcggcctgctgttctacatcaacctggccgaccactggaaggccctggccttcagactggaggaggagcagaagatgagacccgagatcgccggcctgaagcccgccaacccccccgtgctgcccgccccccagaaggccgacaccgaccccgagaacctgcccgagatcagcagccagaagacccagagacacatccagagaggccccccccacctgcagatcagaccccccagccaggacctgaaggacggcacccaggaggaggccaccaagagacaggaggcccccgtggaccccagacccgagggcgacccccagagaaccgtgatcagctggagaggcgccgtgatcgagcccgagcagggcaccgagctgcccagcagaagagccgaggtgcccaccaagccccccctgccccccgccagaacccagggcacccccgtgcacctgaactacagacagaagggcgtgatcgacgtgttcctgcacgcctggaagggctacagaaagttcgcctggggccacgacgagctgaagcccgtgagcagaagcttcagcgagtggttcggcctgggcctgaccctgatcgacgccctggacaccatgtggatcctgggcctgagaaaggagttcgaggaggccagaaagtgggtgagcaagaagctgcacttcgagaaggacgtggacgtgaacctgttcgagagcaccatcagaatcctgggcggcctgctgagcgcctaccacctgagcggcgacagcctgttcctgagaaaggccgaggacttcggcaacagactgatgcccgccttcagaacccccagcaagatcccctacagcgacgtgaacatcggcaccggcgtggcccacccccccagatggaccagcgacagcaccgtggccgaggtgaccagcatccagctggagttcagagagctgagcagactgaccggcgacaagaagttccaggaggccgtggagaaggtgacccagcacatccacggcctgagcggcaagaaggacggcctggtgcccatgttcatcaacacccacagcggcctgttcacccacctgggcgtgttcaccctgggcgccagagccgacagctactacgagtacctgctgaagcagtggatccagggcggcaagcaggagacccagctgctggaggactacgtggaggccatcgagggcgtgagaacccacctgctgagacacagcgagcccagcaagctgaccttcgtgggcgagctggcccacggcagattcagcgccaagatggaccacctggtgtgcttcctgcccggcaccctggccctgggcgtgtaccacggcctgcccgccagccacatggagctggcccaggagctgatggagacctgctaccagatgaacagacagatggagaccggcctgagccccgagatcgtgcacttcaacctgtacccccagcccggcagaagagacgtggaggtgaagcccgccgacagacacaacctgctgagacccgagaccgtggagagcctgttctacctgtacagagtgaccggcgacagaaagtaccaggactggggctgggagatcctgcagagcttcagcagattcaccagagtgcccagcggcggctacagcagcatcaacaacgtgcaggacccccagaagcccgagcccagagacaagatggagagcttcttcctgggcgagaccctgaagtacctgttcctgctgttcagcgacgaccccaacctgctgagcctggacgcctacgtgttcaacaccgaggcccaccccctgcccatctggacccccgcctag

SEQ ID NO: 87939 - DNA, 1209 bp, synthetic construct
  misc_feature 1..1209: note = Description of Artificial Sequence: Synthetic coding sequence
  source 1..1209: mol_type = other DNA
atgtggatcctgggcctgagaaaggagttcgaggaggccagaaagtgggtgagcaagaagctgcacttcgagaaggacgtggacgtgaacctgttcgagagcaccatcagaatcctgggcggcctgctgagcgcctaccacctgagcggcgacagcctgttcctgagaaaggccgaggacttcggcaacagactgatgcccgccttcagaacccccagcaagatcccctacagcgacgtgaacatcggcaccggcgtggcccacccccccagatggaccagcgacagcaccgtggccgaggtgaccagcatccagctggagttcagagagctgagcagactgaccggcgacaagaagttccaggaggccgtggagaaggtgacccagcacatccacggcctgagcggcaagaaggacggcctggtgcccatgttcatcaacacccacagcggcctgttcacccacctgggcgtgttcaccctgggcgccagagccgacagctactacgagtacctgctgaagcagtggatccagggcggcaagcaggagacccagctgctggaggactacgtggaggccatcgagggcgtgagaacccacctgctgagacacagcgagcccagcaagctgaccttcgtgggcgagctggcccacggcagattcagcgccaagatggaccacctggtgtgcttcctgcccggcaccctggccctgggcgtgtaccacggcctgcccgccagccacatggagctggcccaggagctgatggagacctgctaccagatgaacagacagatggagaccggcctgagccccgagatcgtgcacttcaacctgtacccccagcccggcagaagagacgtggaggtgaagcccgccgacagacacaacctgctgagacccgagaccgtggagagcctgttctacctgtacagagtgaccggcgacagaaagtaccaggactggggctgggagatcctgcagagcttcagcagattcaccagagtgcccagcggcggctacagcagcatcaacaacgtgcaggacccccagaagcccgagcccagagacaagatggagagcttcttcctgggcgagaccctgaagtacctgttcctgctgttcagcgacgaccccaacctgctgagcctggacgcctacgtgttcaacaccgaggcccaccccctgcccatctggacccccgcctag

SEQ ID NO: 87940 - DNA, 2118 bp, synthetic construct
  misc_feature 1..2118: note = Description of Artificial Sequence: Synthetic coding sequence
  source 1..2118: mol_type = other DNA
tgaccctgggccgtggccaccaccgtggtgatgtacccccccccccccccccccccccacagagacttcatcagcgtgaccctgagcttcggcgagaactacgacaacagcaagagctggagaagaagaagctgctggagaaagtggaagcagctgagcagactgcagagaaacatgatcctgttcctgctggccttcctgctgttctgcggcctgctgttctacatcaacctggccgaccactggaaggccctggccttcagactggaggaggagcagaagatgagacccgagatcgccggcctgaagcccgccaacccccccgtgctgcccgccccccagaaggccgacaccgaccccgagaacctgcccgagatcagcagccagaagacccagagacacatccagagaggccccccccacctgcagatcagaccccccagccaggacctgaaggacggcacccaggaggaggccaccaagagacaggaggcccccgtggaccccagacccgagggcgacccccagagaaccgtgatcagctggagaggcgccgtgatcgagcccgagcagggcaccgagctgcccagcagaagagccgaggtgcccaccaagccccccctgccccccgccagaacccagggcacccccgtgcacctgaactacagacagaagggcgtgatcgacgtgttcctgcacgcctggaagggctacagaaagttcgcctggggccacgacgagctgaagcccgtgagcagaagcttcagcgagtggttcggcctgggcctgaccctgatcgacgccctggacaccatgtggatcctgggcctgagaaaggagttcgaggaggccagaaagtgggtgagcaagaagctgcacttcgagaaggacgtggacgtgaacctgttcgagagcaccatcagaatcctgggcggcctgctgagcgcctaccacctgagcggcgacagcctgttcctgagaaaggccgaggacttcggcaacagactgatgcccgccttcagaacccccagcaagatcccctacagcgacgtgaacatcggcaccggcgtggcccacccccccagatggaccagcgacagcaccgtggccgaggtgaccagcatccagctggagttcagagagctgagcagactgaccggcgacaagaagttccaggaggccgtggagaaggtgacccagcacatccacggcctgagcggcaagaaggacggcctggtgcccatgttcatcaacacccacagcggcctgttcacccacctgggcgtgttcaccctgggcgccagagccgacagctactacgagtacctgctgaagcagtggatccagggcggcaagcaggagacccagctgctggaggactacgtggaggccatcgagggcgtgagaacccacctgctgagacacagcgagcccagcaagctgaccttcgtgggcgagctggcccacggcagattcagcgccaagatggaccacctggtgtgcttcctgcccggcaccctggccctgggcgtgtaccacggcctgcccgccagccacatggagctggcccaggagctgatggagacctgctaccagatgaacagacagatggagaccggcctgagccccgagatcgtgcacttcaacctgtacccccagcccggcagaagagacgtggaggtgaagcccgccgacagacacaacctgctgagacccgagaccgtggagagcctgttctacctgtacagagtgaccggcgacagaaagtaccaggactggggctgggagatcctgcagagcttcagcagattcaccagagtgagcacctgccccagacccgcctggagcagaccccccggccacagacacggctgggccgtgggcctgagactggcccccctgctggtggtggccgtgacctggatcagagagggcagagcctgcagaagcctgggcgtggccaccctgcagctgggcggccccggcatccccatccccaccgagctgcacggctgcggcacccagagcacctggagaggctgggcccccctgatcttcatcagccagggcctgagcagagagggcctgtgctgcggccccagcatcccccccgtgtag

SEQ ID NO: 87941 - DNA, 3435 bp, synthetic construct
  misc_feature 1..3435: note = Description of Artificial Sequence: Synthetic coding sequence
  source 1..3435: mol_type = other DNA
atgaagctgagcagacagttcaccgtgttcggcagcgccatcttctgcgtggtgatcttcagcctgtacctgatgctggacagaggccacctggactaccccagaaaccccagaagagagggcagcttcccccagggccagctgagcatgctgcaggagaagatcgaccacctggagagactgctggccgagaacaacgagatcatcagcaacatcagagacagcgtgatcaacctgagcgagagcgtggaggacggccccaagagcagccagagcaacttcagccagggcgccggcagccacctgctgcccagccagctgagcctgagcgtggacaccgccgactgcctgttcgccagccagagcggcagccacaacagcgacgtgcagatgctggacgtgtacagcctgatcagcttcgacaaccccgacggcggcgtgtggaagcagggcttcgacatcacctacgagagcaacgagtgggacaccgagcccctgcaggtgttcgtggtgccccacagccacaacgaccccggctggctgaagaccttcaacgactacttcagagacaagacccagtacatcttcaacaacatggtgctgaagctgaaggaggacagcagaagaaagttcatctggagcgagatcagctacctgagcaagtggtgggacatcatcgacatccagaagaaggacgccgtgaagagcctgatcgagaacggccagctggagatcgtgaccggcggctgggtgatgcccgacgaggccaccccccactacttcgccctgatcgaccagctgatcgagggccaccagtggctggagaacaacatcggcgtgaagcccagaagcggctgggccatcgaccccttcggccacagccccaccatggcctacctgctgaacagagccggcctgagccacatgctgatccagagagtgcactacgccgtgaagaagcacttcgccctgcacaagaccctggagttcttctggagacagaactgggacctgggcagcgtgaccgacatcctgtgccacatgatgcccttctacagctacgacatcccccacacctgcggccccgaccccaagatctgctgccagttcgacttcaagagactgcccggcggcagattcggctgcccctggggcgtgccccccgagaccatccaccccggcaacgtgcagagcagagccagaatgctgctggaccagtacagaaagaagagcaagctgttcagaaccaaggtgctgctggcccccctgggcgacgacttcagatactgcgagtacaccgagtgggacctgcagttcaagaactaccagcagctgttcgactacatgaacagccagagcaagttcaaggtgaagatccagttcggcaccctgagcgacttcttcgacgccctggacaaggccgacgagacccagagagacaagggccagagcatgttccccgtgctgagcggcgacttcttcacctacgccgacagagacgaccactactggagcggctacttcaccagcagacccttctacaagagaatggacagaatcatggagagccacctgagagccgccgagatcctgtactacttcgccctgagacaggcccacaagtacaagatcaacaagttcctgagcagcagcctgtacaccgccctgaccgaggccagaagaaacctgggcctgttccagcaccacgacgccatcaccggcaccgccaaggactgggtggtggtggactacggcaccagactgttccacagcctgatggtgctggagaagatcatcggcaacagcgccttcctgctgatcctgaaggacaagctgacctacgacagctacagccccgacaccttcctggagatggacctgaagcagaagagccaggacagcctgccccagaagaacatcatcagactgagcgccgagcccagatacctggtggtgtacaaccccctggagcaggacagaatcagcctggtgagcgtgtacgtgagcagccccaccgtgcaggtgttcagcgccagcggcaagcccgtggaggtgcaggtgagcgccgtgtgggacaccgccaacaccatcagcgagaccgcctacgagatcagcttcagagcccacatcccccccctgggcctgaaggtgtacaagatcctggagagcgccagcagcaacagccacctggccgactacgtgctgtacaagaacaaggtggaggacagcggcatcttcaccatcaagaacatgatcaacaccgaggagggcatcaccctggagaacagcttcgtgctgctgagattcgaccagaccggcctgatgaagcagatgatgaccaaggaggacggcaagcaccacgaggtgaacgtgcagttcagctggtacggcaccaccatcaagagagacaagagcggcgcctacctgttcctgcccgacggcaacgccaagccctacgtgtacaccaccccccccttcgtgagagtgacccacggcagaatctacagcgaggtgacctgcttcttcgaccacgtgacccacagagtgagactgtaccacatccagggcatcgagggccagagcgtggaggtgagcaacatcgtggacatcagaaaggtgtacaacagagagatcgccatgaagatcagcagcgacatcaagagccagaacagattctacaccgacctgaacggctaccagatccagcccagaatgaccctgagcaagctgcccctgcaggccaacgtgtaccccatgaccaccatggcctacatccaggacgccaagcacagactgaccctgctgagcgcccagagcctgggcgtgagcagcctgaacagcggccagatcgaggtgatcatggacagaagactgatgcaggacgacaacagaggcctggagcagggcatccaggacaacaagatcaccgccaacctgttcagaatcctgctggagaagagaagcgccgtgaacaccgaggaggagaagaagagcgtgagctaccccagcctgctgagccacatcaccagcagcctgatgaaccaccccgtgatccccatggccaacaagttcagcagccccaccctggagctgcagggcgagttcagccccctgcagagcagcctgccctgcgacatccacctggtgaacctgagaaccatccagagcaaggtgggcaacggccacagcaacgaggccgccctgatcctgcacagaaagggcttcgactgcagattcagcagcaagggcaccggcctgttctgcagcaccacccagggcaagatcctggtgcagaagctgctgaacaagttcatcgtggagagcctgacccccagcagcctgagcctgatgcacagcccccccggcacccagaacatcagcgagatcaacctgagccccatggagatcagcaccttcagaatccagctgagatag

SEQ ID NO: 87942 - DNA, 3453 bp, synthetic construct
  misc_feature 1..3453: note = Description of Artificial Sequence: Synthetic coding sequence
  source 1..3453: mol_type = other DNA
atgaagctgaagaagcaggtgaccgtgtgcggcgccgccatcttctgcgtggccgtgttcagcctgtacctgatgctggacagagtgcagcacgaccccaccagacaccagaacggcggcaacttccccagaagccagatcagcgtgctgcagaacagaatcgagcagctggagcagctgctggaggagaaccacgagatcatcagccacatcaaggacagcgtgctggagctgaccgccaacgccgagggcccccccgccatgctgccctactacaccgtgaacggcagctgggtggtgccccccgagcccagacccagcttcttcagcatcagcccccaggactgccagttcgccctgggcggcagaggccagaagcccgagctgcagatgctgaccgtgagcgaggagctgcccttcgacaacgtggacggcggcgtgtggagacagggcttcgacatcagctacgacccccacgactgggacgccgaggacctgcaggtgttcgtggtgccccacagccacaacgaccccggctggatcaagaccttcgacaagtactacaccgagcagacccagcacatcctgaacagcatggtgagcaagctgcaggaggaccccagaagaagattcctgtgggccgaggtgagcttcttcgccaagtggtgggacaacatcaacgtgcagaagagagccgccgtgagaagactggtgggcaacggccagctggagatcgccaccggcggctgggtgatgcccgacgaggccaacagccactacttcgccctgatcgaccagctgatcgagggccaccagtggctggagagaaacctgggcgccacccccagaagcggctgggccgtggaccccttcggctacagcagcaccatgccctacctgctgagaagagccaacctgaccagcatgctgatccagagagtgcactacgccatcaagaagcacttcgccgccacccacagcctggagttcatgtggagacagacctgggacagcgacagcagcaccgacatcttctgccacatgatgcccttctacagctacgacgtgccccacacctgcggccccgaccccaagatctgctgccagttcgacttcaagagactgcccggcggcagaatcaactgcccctggaaggtgccccccagagccatcaccgaggccaacgtggccgagagagccgccctgctgctggaccagtacagaaagaagagccagctgttcagaagcaacgtgctgctggtgcccctgggcgacgacttcagatacgacaagccccaggagtgggacgcccagttcttcaactaccagagactgttcgacttcttcaacagcagacccaacctgcacgtgcaggcccagttcggcaccctgagcgactacttcgacgccctgtacaagagaaccggcgtggagcccggcgccagaccccccggcttccccgtgctgagcggcgacttcttcagctacgccgacagagaggaccactactggaccggctactacaccagcagacccttctacaagagcctggacagagtgctggaggcccacctgagaggcgccgaggtgctgtacagcctggccgccgcccacgccagaagaagcggcctggccggcagataccccctgagcgacttcaccctgctgaccgaggccagaagaaccctgggcctgttccagcaccacgacgccatcaccggcaccgccaaggaggccgtggtggtggactacggcgtgagactgctgagaagcctggtgaacctgaagcaggtgatcatccacgccgcccactacctggtgctgggcgacaaggagacctaccacttcgaccccgaggcccccttcctgcaggtggacgacaccagactgagccacgacgccctgcccgagagaaccgtgatccagctggacagcagccccagattcgtggtgctgttcaaccccctggagcaggagagattcagcatggtgagcctgctggtgaacagccccagagtgagagtgctgagcgaggagggccagcccctggccgtgcagatcagcgcccactggagcagcgccaccgaggccgtgcccgacgtgtaccaggtgagcgtgcccgtgagactgcccgccctgggcctgggcgtgctgcagctgcagctgggcctggacggccacagaaccctgcccagcagcgtgagaatctacctgcacggcagacagctgagcgtgagcagacacgaggccttccccctgagagtgatcgacagcggcaccagcgacttcgccctgagcaacagatacatgcaggtgtggttcagcggcctgaccggcctgctgaagagcatcagaagagtggacgaggagcacgagcagcaggtggacatgcaggtgctggtgtacggcaccagaaccagcaaggacaagagcggcgcctacctgttcctgcccgacggcgaggccaagccctacgtgcccaaggagccccccgtgctgagagtgaccgagggccccttcttcagcgaggtggtggcctactacgagcacatccaccaggccgtgagactgtacaacctgcccggcgtggagggcctgagcctggacatcagcagcctggtggacatcagagactacgtgaacaaggagctggccctgcacatccacaccgacatcgacagccagggcatcttcttcaccgacctgaacggcttccaggtgcagcccagaagatacctgaagaagctgcccctgcaggccaacttctaccccatgcccgtgatggcctacatccaggacgcccagaagagactgaccctgcacaccgcccaggccctgggcgtgagcagcctgaaggacggccagctggaggtgatcctggacagaagactgatgcaggacgacaacagaggcctgggccagggcctgaaggacaacaagagaacctgcaacagattcagactgctgctggagagaagaaccgtgggcagcgaggtgcaggacagccacagcaccagctaccccagcctgctgagccacctgaccagcatgtacctgaacgcccccgccctggccctgcccgtggccagaatgcagctgcccggccccggcctgagaagcttccaccccctggccagcagcctgccctgcgacttccacctgctgaacctgagaaccctgcaggccgaggaggacaccctgcccagcgccgagaccgccctgatcctgcacagaaagggcttcgactgcggcctggaggccaagaacctgggcttcaactgcaccaccagccagggcaaggtggccctgggcagcctgttccacggcctggacgtggtgttcctgcagcccaccagcctgaccctgctgtaccccctggccagccccagcaacagcaccgacgtgtacctggagcccatggagatcgccaccttcagactgagactgggctag

SEQ ID NO: 87943 - DNA, 1023 bp, synthetic construct
  misc_feature 1..1023: note = Description of Artificial Sequence: Synthetic coding sequence
  source 1..1023: mol_type = other DNA
atgcaggtgtggttcagcggcctgaccggcctgctgaagccctacgtgcccaaggagccccccgtgctgagagtgaccgagggccccttcttcagcgaggtggtggcctactacgagcacatccaccaggccgtgagactgtacaacctgcccggcgtggagggcctgagcctggacatcagcagcctggtggacatcagagactacgtgaacaaggagctggccctgcacatccacaccgacatcgacagccagggcatcttcttcaccgacctgaacggcttccaggtgcagcccagaagatacctgaagaagctgcccctgcaggccaacttctaccccatgcccgtgatggcctacatccaggacgcccagaagagactgaccctgcacaccgcccaggccctgggcgtgagcagcctgaaggacggccagctggaggtgatcctggacagaagactgatgcaggacgacaacagaggcctgggccagggcctgaaggacaacaagagaacctgcaacagattcagactgctgctggagagaagaaccgtgggcagcgaggtgcaggacagccacagcaccagctaccccagcctgctgagccacctgaccagcatgtacctgaacgcccccgccctggccctgcccgtggccagaatgcagctgcccggccccggcctgagaagcttccaccccctggccagcagcctgccctgcgacttccacctgctgaacctgagaaccctgcaggccgaggaggacaccctgcccagcgccgagaccgccctgatcctgcacagaaagggcttcgactgcggcctggaggccaagaacctgggcttcaactgcaccaccagccagggcaaggtggccctgggcagcctgttccacggcctggacgtggtgttcctgcagcccaccagcctgaccctgctgtaccccctggccagccccagcaacagcaccgacgtgtacctggagcccatggagatcgccaccttcagactgagactgggctag

SEQ ID NO: 87944 - DNA, 1977 bp, synthetic construct
  misc_feature 1..1977: note = Description of Artificial Sequence: Synthetic coding sequence
  source 1..1977: mol_type = other DNA
atgaccagcgacatgaccagccccagaagcggcatgcccagcagcagcaccaccaacggcagcctgaccagcagcaccgccggcctgaccagcatgtgcagaggcgccgaggtgctgtacagcctggccgccgcccacgccagaagaagcggcctggccggcagataccccctgagcgacttcaccctgctgaccgaggccagaagaaccctgggcctgttccagcaccacgacgccatcaccggcaccgccaaggaggccgtggtggtggactacggcgtgagactgctgagaagcctggtgaacctgaagcaggtgatcatccacgccgcccactacctggtgctgggcgacaaggagacctaccacttcgaccccgaggcccccttcctgcaggtggacgacaccagactgagccacgacgccctgcccgagagaaccgtgatccagctggacagcagccccagattcgtggtgctgttcaaccccctggagcaggagagattcagcatggtgagcctgctggtgaacagccccagagtgagagtgctgagcgaggagggccagcccctggccgtgcagatcagcgcccactggagcagcgccaccgaggccgtgcccgacgtgtaccaggtgagcgtgcccgtgagactgcccgccctgggcctgggcgtgctgcagctgcagctgggcctggacggccacagaaccctgcccagcagcgtgagaatctacctgcacggcagacagctgagcgtgagcagacacgaggccttccccctgagagtgatcgacagcggcaccagcgacttcgccctgagcaacagatacatgcaggtgtggttcagcggcctgaccggcctgctgaagagcatcagaagagtggacgaggagcacgagcagcaggtggacatgcaggtgctggtgtacggcaccagaaccagcaaggacaagagcggcgcctacctgttcctgcccgacggcgaggccaagccctacgtgcccaaggagccccccgtgctgagagtgaccgagggccccttcttcagcgaggtggtggcctactacgagcacatccaccaggccgtgagactgtacaacctgcccggcgtggagggcctgagcctggacatcagcagcctggtggacatcagagactacgtgaacaaggagctggccctgcacatccacaccgacatcgacagccagggcatcttcttcaccgacctgaacggcttccaggtgcagcccagaagatacctgaagaagctgcccctgcaggccaacttctaccccatgcccgtgatggcctacatccaggacgcccagaagagactgaccctgcacaccgcccaggccctgggcgtgagcagcctgaaggacggccagctggaggtgatcctggacagaagactgatgcaggacgacaacagaggcctgggccagggcctgaaggacaacaagagaacctgcaacagattcagactgctgctggagagaagaaccgtgggcagcgaggtgcaggacagccacagcaccagctaccccagcctgctgagccacctgaccagcatgtacctgaacgcccccgccctggccctgcccgtggccagaatgcagctgcccggccccggcctgagaagcttccaccccctggccagcagcctgccctgcgacttccacctgctgaacctgagaaccctgcaggccgaggaggacaccctgcccagcgccgagaccgccctgatcctgcacagaaagggcttcgactgcggcctggaggccaagaacctgggcttcaactgcaccaccagccagggcaaggtggccctgggcagcctgttccacggcctggacgtggtgttcctgcagcccaccagcctgaccctgctgtaccccctggccagccccagcaacagcaccgacgtgtacctggagcccatggagatcgccaccttcagactgagactgggctag

SEQ ID NO: 87945 - DNA, 219 bp, synthetic construct
  misc_feature 1..219: note = Description of Artificial Sequence: Synthetic coding sequence
  source 1..219: mol_type = other DNA
atgaagctgaagaagcaggtgaccgtgtgcggcgccgccatcttctgcgtggccgtgttcagcctgtacctgatgctggacagagtgcagcacgaccccaccagacaccagaacggcggcaacttccccagaagccagatcagcgtgctgcagaacagaatcgagcagctggagcagctgctggaggagaaccacgagatcatcagccacatcaagtag

SEQ ID NO: 87946 - DNA, 153 bp, synthetic construct
  misc_feature 1..153: note = Description of Artificial Sequence: Synthetic coding sequence
  source 1..153: mol_type = other DNA
atgaagctgaagaagcaggtgaccgtgtgcggcgccgccatcttctgcgtggccgtgttcagcctgtacctgatgctggacagagtgcagcacgaccccaccagacaccagaacggcggcaacttccccagaagccagatcagcgtgctgtag

SEQ ID NO: 87947 - DNA, 3192 bp, synthetic construct
  misc_feature 1..3192: note = Description of Artificial Sequence: Synthetic coding sequence
  source 1..3192: mol_type = other DNA
atgctgccctactacaccgtgaacggcagctgggtggtgccccccgagcccagacccagcttcttcagcatcagcccccaggactgccagttcgccctgggcggcagaggccagaagcccgagctgcagatgctgaccgtgagcgaggagctgcccttcgacaacgtggacggcggcgtgtggagacagggcttcgacatcagctacgacccccacgactgggacgccgaggacctgcaggtgttcgtggtgccccacagccacaacgaccccggctggatcaagaccttcgacaagtactacaccgagcagacccagcacatcctgaacagcatggtgagcaagctgcaggaggaccccagaagaagattcctgtgggccgaggtgagcttcttcgccaagtggtgggacaacatcaacgtgcagaagagagccgccgtgagaagactggtgggcaacggccagctggagatcgccaccggcggctgggtgatgcccgacgaggccaacagccactacttcgccctgatcgaccagctgatcgagggccaccagtggctggagagaaacctgggcgccacccccagaagcggctgggccgtggaccccttcggctacagcagcaccatgccctacctgctgagaagagccaacctgaccagcatgctgatccagagagtgcactacgccatcaagaagcacttcgccgccacccacagcctggagttcatgtggagacagacctgggacagcgacagcagcaccgacatcttctgccacatgatgcccttctacagctacgacgtgccccacacctgcggccccgaccccaagatctgctgccagttcgacttcaagagactgcccggcggcagaatcaactgcccctggaaggtgccccccagagccatcaccgaggccaacgtggccgagagagccgccctgctgctggaccagtacagaaagaagagccagctgttcagaagcaacgtgctgctggtgcccctgggcgacgacttcagatacgacaagccccaggagtgggacgcccagttcttcaactaccagagactgttcgacttcttcaacagcagacccaacctgcacgtgcaggcccagttcggcaccctgagcgactacttcgacgccctgtacaagagaaccggcgtggagcccggcgccagaccccccggcttccccgtgctgagcggcgacttcttcagctacgccgacagagaggaccactactggaccggctactacaccagcagacccttctacaagagcctggacagagtgctggaggcccacctgagaggcgccgaggtgctgtacagcctggccgccgcccacgccagaagaagcggcctggccggcagataccccctgagcgacttcaccctgctgaccgaggccagaagaaccctgggcctgttccagcaccacgacgccatcaccggcaccgccaaggaggccgtggtggtggactacggcgtgagactgctgagaagcctggtgaacctgaagcaggtgatcatccacgccgcccactacctggtgctgggcgacaaggagacctaccacttcgaccccgaggcccccttcctgcaggtggacgacaccagactgagccacgacgccctgcccgagagaaccgtgatccagctggacagcagccccagattcgtggtgctgttcaaccccctggagcaggagagattcagcatggtgagcctgctggtgaacagccccagagtgagagtgctgagcgaggagggccagcccctggccgtgcagatcagcgcccactggagcagcgccaccgaggccgtgcccgacgtgtaccaggtgagcgtgcccgtgagactgcccgccctgggcctgggcgtgctgcagctgcagctgggcctggacggccacagaaccctgcccagcagcgtgagaatctacctgcacggcagacagctgagcgtgagcagacacgaggccttccccctgagagtgatcgacagcggcaccagcgacttcgccctgagcaacagatacatgcaggtgtggttcagcggcctgaccggcctgctgaagagcatcagaagagtggacgaggagcacgagcagcaggtggacatgcaggtgctggtgtacggcaccagaaccagcaaggacaagagcggcgcctacctgttcctgcccgacggcgaggccaagccctacgtgcccaaggagccccccgtgctgagagtgaccgagggccccttcttcagcgaggtggtggcctactacgagcacatccaccaggccgtgagactgtacaacctgcccggcgtggagggcctgagcctggacatcagcagcctggtggacatcagagactacgtgaacaaggagctggccctgcacatccacaccgacatcgacagccagggcatcttcttcaccgacctgaacggcttccaggtgcagcccagaagatacctgaagaagctgcccctgcaggccaacttctaccccatgcccgtgatggcctacatccaggacgcccagaagagactgaccctgcacaccgcccaggccctgggcgtgagcagcctgaaggacggccagctggaggtgatcctggacagaagactgatgcaggacgacaacagaggcctgggccagggcctgaaggacaacaagagaacctgcaacagattcagactgctgctggagagaagaaccgtgggcagcgaggtgcaggacagccacagcaccagctaccccagcctgctgagccacctgaccagcatgtacctgaacgcccccgccctggccctgcccgtggccagaatgcagctgcccggccccggcctgagaagcttccaccccctggccagcagcctgccctgcgacttccacctgctgaacctgagaaccctgcaggccgaggaggacaccctgcccagcgccgagaccgccctgatcctgcacagaaagggcttcgactgcggcctggaggccaagaacctgggcttcaactgcaccaccagccagggcaaggtggccctgggcagcctgttccacggcctggacgtggtgttcctgcagcccaccagcctgaccctgctgtaccccctggccagccccagcaacagcaccgacgtgtacctggagcccatggagatcgccaccttcagactgagactgggctag

SEQ ID NO: 87948 - DNA, 231 bp, synthetic construct
  misc_feature 1..231: note = Description of Artificial Sequence: Synthetic coding sequence
  source 1..231: mol_type = other DNA
atgaagctgaagaagcaggtgaccgtgtgcggcgccgccatcttctgcgtggccgtgttcagcctgtacctgatgctggacagagtgcagcacgaccccaccagacaccagaacggcggcaacttccccagaagccagatcagcgtgctgcagaacagaatcgagcagctggagcagctgctggaggagaaccacgagatcatcagccacatcaaggacagcgtgctgtag

SEQ ID NO: 87949 - DNA, 363 bp, synthetic construct
  misc_feature 1..363: note = Description of Artificial Sequence: Synthetic coding sequence
  source 1..363: mol_type = other DNA
atgaagctgaagaagcaggtgaccgtgtgcggcgccgccatcttctgcgtggccgtgttcagcctgtacctgatgctggacagagtgcagcacgaccccaccagacaccagaacggcggcaacttccccagaagccagatcagcgtgctgcagaacagaatcgagcagctggagcagctgctggaggagaaccacgagatcatcagccacatcaaggacagcgtgctggagctgaccgccaacgccgagggcccccccgccatgctgccctactacaccgtgaacggcagctgggtggtgccccccgagcccagacccagcttcttcagcatcagcccccaggactgccagttcgccctgtag

SEQ ID NO: 87950 - DNA, 3123 bp, synthetic construct
  misc_feature 1..3123: note = Description of Artificial Sequence: Synthetic coding sequence
  source 1..3123: mol_type = other DNA
atggccgccgcccccgccctgaagcactggagaaccaccctggagagagtggagaagttcgtgagccccctgtacttcaccgactgcaacctgagaggcagactgttcggcgccagctgccccgtggccgtgctgagcagcttcctgacccccgagagactgccctaccaggaggccgtgcagagagacttcagacccgcccaggtgggcgacagcttcggccccacctggtggacctgctggttcagagtggagctgaccatccccgaggcctgggtgggccaggaggtgcacctgtgctgggagagcgacggcgagggcctggtgtggagagacggcgagcccgtgcagggcctgaccaaggagggcgagaagaccagctacgtgctgaccgacagactgggcgagagagaccccagaagcctgaccctgtacgtggaggtggcctgcaacggcctgctgggcgccggcaagggcagcatgatcgccgcccccgaccccgagaagatgttccagctgagcagagccgagctggccgtgttccacagagacgtgcacatgctgctggtggacctggagctgctgctgggcatcgccaagggcctgggcaaggacaaccagagaagcttccaggccctgtacaccgccaaccagatggtgaacgtgtgcgaccccgcccagcccgagaccttccccgtggcccaggccctggccagcagattcttcggccagcacggcggcgagagccagcacaccatccacgccaccggccactgccacatcgacaccgcctggctgtggcccttcaaggagaccgtgagaaagtgcgccagaagctgggtgaccgccctgcagctgatggagagaaaccccgagttcatcttcgcctgcagccaggcccagcagctggagtgggtgaagagcagataccccggcctgtacagcagaatccaggagttcgcctgcagaggccagttcgtgcccgtgggcggcacctgggtggagatggacggcaacctgcccagcggcgaggccatggtgagacagttcctgcagggccagaacttcttcctgcaggagttcggcaagatgtgcagcgagttctggctgcccgacaccttcggctacagcgcccagctgccccagatcatgcacggctgcggcatcagaagattcctgacccagaagctgagctggaacctggtgaacagcttcccccaccacaccttcttctgggagggcctggacggcagcagagtgctggtgcacttcccccccggcgacagctacggcatgcagggcagcgtggaggaggtgctgaagaccgtggccaacaacagagacaagggcagagccaaccacagcgccttcctgttcggcttcggcgacggcggcggcggccccacccagaccatgctggacagactgaagagactgagcaacaccgacggcctgcccagagtgcagctgagcagccccagacagctgttcagcgccctggagagcgacagcgagcagctgtgcacctgggtgggcgagctgttcctggagctgcacaacggcacctacaccacccacgcccagatcaagaagggcaacagagagtgcgagagaatcctgcacgacgtggagctgctgagcagcctggccctggccagaagcgcccagttcctgtaccccgccgcccagctgcagcacctgtggagactgctgctgctgaaccagttccacgacgtggtgaccggcagctgcatccagatggtggccgaggaggccatgtgccactacgaggacatcagaagccacggcaacaccctgctgagcgccgccgccgccgccctgtgcgccggcgagcccggccccgagggcctgctgatcgtgaacaccctgccctggaagagaatcgaggtgatggccctgcccaagcccggcggcgcccacagcctggccctggtgaccgtgcccagcatgggctacgcccccgtgcccccccccaccagcctgcagcccctgctgccccagcagcccgtgttcgtggtgcaggagaccgacggcagcgtgaccctggacaacggcatcatcagagtgaagctggaccccaccggcagactgaccagcctggtgctggtggccagcggcagagaggccatcgccgagggcgccgtgggcaaccagttcgtgctgttcgacgacgtgcccctgtactgggacgcctgggacgtgatggactaccacctggagaccagaaagcccgtgctgggccaggccggcaccctggccgtgggcaccgagggcggcctgagaggcagcgcctggttcctgctgcagatcagccccaacagcagactgagccaggaggtggtgctggacgtgggctgcccctacgtgagattccacaccgaggtgcactggcacgaggcccacaagttcctgaaggtggagttccccgccagagtgagaagcagccaggccacctacgagatccagttcggccacctgcagagacccacccactacaacaccagctgggactgggccagattcgaggtgtgggcccacagatggatggacctgagcgagcacggcttcggcctggccctgctgaacgactgcaagtacggcgccagcgtgagaggcagcatcctgagcctgagcctgctgagagcccccaaggcccccgacgccaccgccgacaccggcagacacgagttcacctacgccctgatgccccacaagggcagcttccaggacgccggcgtgatccaggccgcctacagcctgaacttccccctgctggccctgcccgcccccagccccgcccccgccaccagctggagcgccttcagcgtgagcagccccgccgtggtgctggagaccgtgaagcaggccgagagcagcccccagagaagaagcctggtgctgagactgtacgaggcccacggcagccacgtggactgctggctgcacctgagcctgcccgtgcaggaggccatcctgtgcgacctgctggagagacccgaccccgccggccacctgaccctgagagacaacagactgaagctgaccttcagccccttccaggtgctgagcctgctgctggtgctgcagccccccccccactag

SEQ ID NO: 87951 - DNA, 630 bp, synthetic construct
  misc_feature 1..630: note = Description of Artificial Sequence: Synthetic coding sequence
  source 1..630: mol_type = other DNA
atggccgccgcccccgccctgaagcactggagaaccaccctggagagagtggagaagttcgtgagccccctgtacttcaccgactgcaacctgagaggcagactgttcggcgccagctgccccgtggccgtgctgagcagcttcctgacccccgagagactgccctaccaggaggccgtgcagagagacttcagacccgcccaggtgggcgacagcttcggccccacctggtggacctgctggttcagagtggagctgaccatccccgaggcctgggtgggccaggaggtgcacctgtgctgggagagcgacggcgagggcctggtgtggagagacggcgagcccgtgcagggcctgaccaaggagggcgagaagaccagctacgtgctgaccgacagactgggcgagagagaccccagaagcctgaccctgtacgtggaggtggcctgcaacggcctgctgggcgccggcaagggcagcatgatcgccgcccccgaccccgagaagatgttccagctgagcagagccgagctggccgtgttccacagagacgtgcacatgctgctggtggacctggagctgctgctgggcatcgccaagcccggcttcggccccagcaagagactgtag

SEQ ID NO: 87952 - DNA, 2910 bp, synthetic construct
  misc_feature 1..2910: note = Description of Artificial Sequence: Synthetic coding sequence
  source 1..2910: mol_type = other DNA
atggccgaggacgacccctacctgggcagacccgagcagatgttccacctggaccccagcctgacccacaccatcttcaaccccgaggtgttccagccccagatggccctgcccaccgccgacggcccctacctgcagatcctggagcagcccaagcagagaggcttcagattcagatacgtgtgcgagggccccagccacggcggcctgcccggcgccagcagcgagaagaacaagaagagctacccccaggtgaagatctgcaactacgtgggccccgccaaggtgatcgtgcagctggtgaccaacggcaagaacatccacctgcacgcccacagcctggtgggcaagcactgcgaggacggcatctgcaccgtgaccgccggccccaaggacatggtggtgggcttcgccaacctgggcatcctgcacgtgaccaagaagaaggtgttcgagaccctggaggccagaatgaccgaggcctgcatcagaggctacaaccccggcctgctggtgcaccccgacctggcctacctgcaggccgagggcggcggcgacagacagctgggcgacagagagaaggagctgatcagacaggccgccctgcagcagaccaaggagatggacctgagcgtggtgagactgatgttcaccgccttcctgcccgacagcaccggcagcttcaccagaagactggagcccgtggtgagcgacgccatctacgacagcaaggcccccaacgccagcaacctgaagatcgtgagaatggacagaaccgccggctgcgtgaccggcggcgaggagatctacctgctgtgcgacaaggtgcagaaggacgacatccagatcagattctacgaggaggaggagaacggcggcgtgtgggagggcttcggcgacttcagccccaccgacgtgcacagacagttcgccatcgtgttcaagacccccaagtacaaggacatcaacatcaccaagcccgccagcgtgttcgtgcagctgagaagaaagagcgacctggagaccagcgagcccaagcccttcctgtactaccccgagatcaaggacaaggaggaggtgcagagaaagagacagaagctgatgcccaacttcagcgacagcttcggcggcggcagcggcgccggcgccggcggcggcggcatgttcggcagcggcggcggcggcggcggcaccggcagcaccggccccggctacagcttcccccactacggcttccccacctacggcggcatcaccttccaccccggcaccaccaagagcaacgccggcatgaagcacggcaccatggacaccgagagcaagaaggaccccgagggctgcgacaagagcgacgacaagaacaccgtgaacctgttcggcaaggtgatcgagaccaccgagcaggaccaggagcccagcgaggccaccgtgggcaacggcgaggtgaccctgacctacgccaccggcaccaaggaggagagcgccggcgtgcaggacaacctgttcctggagaaggccatgcagctggccaagagacacgccaacgccctgttcgactacgccgtgaccggcgacgtgaagatgctgctggccgtgcagagacacctgaccgccgtgcaggacgagaacggcgacagcgtgctgcacctggccatcatccacctgcacagccagctggtgagagacctgctggaggtgaccagcggcctgatcagcgacgacatcatcaacatgagaaacgacctgtaccagacccccctgcacctggccgtgatcaccaagcaggaggacgtggtggaggacctgctgagagccggcgccgacctgagcctgctggacagactgggcaacagcgtgctgcacctggccgccaaggagggccacgacaaggtgctgagcatcctgctgaagcacaagaaggccgccctgctgctggaccaccccaacggcgacggcctgaacgccatccacctggccatgatgagcaacagcctgccctgcctgctgctgctggtggccgccggcgccgacgtgaacgcccaggagcagaagagcggcagaaccgccctgcacctggccgtggagcacgacaacatcagcctggccggctgcctgctgctggagggcgacgcccacgtggacagcaccacctacgacggcaccacccccctgcacatcgccgccggcagaggcagcaccagactggccgccctgctgaaggccgccggcgccgaccccctggtggagaacttcgagcccctgtacgacctggacgacagctgggagaacgccggcgaggacgagggcgtggtgcccggcaccacccccctggacatggccaccagctggcaggtgttcgacatcctgaacggcaagccctacgagcccgagttcaccagcgacgacctgctggcccagggcgacatgaagcagctggccgaggacgtgaagctgcagctgtacaagctgctggagatccccgaccccgacaagaactgggccaccctggcccagaagctgggcctgggcatcctgaacaacgccttcagactgagccccgcccccagcaagaccctgatggacaactacgaggtgagcggcggcaccgtgagagagctggtggaggccctgagacagatgggctacaccgaggccatcgaggtgatccaggccgccagcagccccgtgaagaccaccagccaggcccacagcctgcccctgagccccgccagcaccagacagcagatcgacgagctgagagacagcgacagcgtgtgcgacagcggcgtggagaccagcttcagaaagctgagcttcaccgagagcctgaccagcggcgccagcctgctgaccctgaacaagatgccccacgactacggccaggagggccccctggagggcaagatctag

SEQ ID NO: 87953 - DNA, 1389 bp, synthetic construct
  misc_feature 1..1389: note = Description of Artificial Sequence: Synthetic coding sequence
  source 1..1389: mol_type = other DNA
atggccaagttcagaagaagaacctgcatcatcctggccctgttcatcctgttcatcttcagcctgatgatgggcctgaagatgctgagacccaacaccgccaccttcggcgcccccttcggcctggacctgctgcccgagctgcaccagagaaccatccacctgggcaagaacttcgacttccagaagagcgacagaatcaacagcgagaccaacaccaagaacctgaagagcgtggagatcaccatgaagcccagcaaggccagcgagctgaacctggacgagctgccccccctgaacaactacctgcacgtgttctactacagctggtacggcaacccccagttcgacggcaagtacatccactggaaccaccccgtgctggagcactgggaccccagaatcgccaagaactacccccagggcagacacaacccccccgacgacatcggcagcagcttctaccccgagctgggcagctacagcagcagagaccccagcgtgatcgagacccacatgagacagatgagaagcgccagcatcggcgtgctggccctgagctggtacccccccgacgtgaacgacgagaacggcgagcccaccgacaacctggtgcccaccatcctggacaaggcccacaagtacaacctgaaggtgaccttccacatcgagccctacagcaacagagacgaccagaacatgtacaagaacgtgaagtacatcatcgacaagtacggcaaccaccccgccttctacagatacaagaccaagaccggcaacgccctgcccatgttctacgtgtacgacagctacatcaccaagcccgagaagtgggccaacctgctgaccaccagcggcagcagaagcatcagaaacagcccctacgacggcctgttcatcgccctgctggtggaggagaagcacaagtacgacatcctgcagagcggcttcgacggcatctacacctacttcgccaccaacggcttcacctacggcagcagccaccagaactgggccagcctgaagctgttctgcgacaagtacaacctgatcttcatccccagcgtgggccccggctacatcgacaccagcatcagaccctggaacacccagaacaccagaaacagaatcaacggcaagtactacgagatcggcctgagcgccgccctgcagaccagacccagcctgatcagcatcaccagcttcaacgagtggcacgagggcacccagatcgagaaggccgtgcccaagagaaccagcaacaccgtgtacctggactacagaccccacaagcccggcctgtacctggagctgaccagaaagtggagcgagaagtacagcaaggagagagccacctacgccctggacagacagctgcccgtgagctag

SEQ ID NO: 87954 - DNA, 597 bp, synthetic construct
  misc_feature 1..597: note = Description of Artificial Sequence: Synthetic coding sequence
  source 1..597: mol_type = other DNA
atggccaagttcagaagaagaacctgcatcatcctggccctgttcatcctgttcatcttcagcctgatgatgggcctgaagatgctgagacccaacaccgccaccttcggcgcccccttcggcctggacctgctgcccgagctgcaccagagaaccatccacctgggcaagaacttcgacttccagaagagcgacagaatcaacagcgagaccaacaccaagaacctgaagagcgtggagatcaccatgaagcccagcaaggccagcgagctgaacctggacgagctgccccccctgaacaactacctgcacgtgttctactacagctggtacggcaacccccagttcgacggcaagtacatccactggaaccaccccgtgctggagcactgggaccccagaatcgccaagaactacccccagggcagacacaacccccccgacgacatcggcagcagcttctaccccgagctgggcagctacagcagcagagaccccagcgtgatcgagacccacatgagacagatgagaagcgccagcatcggcaactactgcatctacatctacgtgtgcctgtgcctgtacatctgcatctag

SEQ ID NO: 87955 - DNA, 624 bp, synthetic construct
  misc_feature 1..624: note = Description of Artificial Sequence: Synthetic coding sequence
  source 1..624: mol_type = other DNA
atggccaagttcagaagaagaacctgcatcatcctggccctgttcatcctgttcatcttcagcctgatgatgggcctgaagatgctgagacccaacaccgccaccttcggcgcccccttcggcctggacctgctgcccgagctgcaccagagaaccatccacctgggcaagaacttcgacttccagaagagcgacagaatcaacagcgagaccaacaccaagaacctgaagagcgtggagatcaccatgaagcccagcaaggccagcgagctgaacctggacgagctgccccccctgaacaactacctgcacgtgttctactacagctggtacggcaacccccagttcgacggcaagtacatccactggaaccaccccgtgctggagcactgggaccccagaatcgccaagaactacccccagggcagacacaacccccccgacgacatcggcagcagcttctaccccgagctgggcagctacagcagcagagaccccagcgtgatcgagacccacatgagacagatgagaagcgccagcatcggcaactactgcatctacatctgcgtgttcgtgagcgtgtacatgcacatcaacgacttcctgtgcaacttcaccagctag

SEQ ID NO: 87956 - DNA, 2379 bp, synthetic construct
  misc_feature 1..2379: note = Description of Artificial Sequence: Synthetic coding sequence
  source 1..2379: mol_type = other DNA
atgatcaccgtgaaccccgacggcaagatcatggtgagaagatgcctggtgaccctgagacccttcagactgttcgtgctgggcatcggcttcttcaccctgtgcttcctgatgaccagcctgggcggccagttcagcgccagaagactgggcgacagccccttcaccatcagaaccgaggtgatgggcggccccgagagcagaggcgtgctgagaaagatgagcgacctgctggagctgatggtgaagagaatggacgccctggccagactggagaacagcagcgagctgcacagagccggcggcgacctgcacttccccgccgacagaatgccccccggcgccggcctgatggagagaatccaggccatcgcccagaacgtgagcgacatcgccgtgaaggtggaccagatcctgagacacagcctgctgctgcacagcaaggtgagcgagggcagaagagaccagtgcgaggcccccagcgaccccaagttccccgactgcagcggcaaggtggagtggatgagagccagatggaccagcgacccctgctacgccttcttcggcgtggacggcaccgagtgcagcttcctgatctacctgagcgaggtggagtggttctgcccccccctgccctggagaaaccagaccgccgcccagagagcccccaagcccctgcccaaggtgcaggccgtgttcagaagcaacctgagccacctgctggacctgatgggcagcggcaaggagagcctgatcttcatgaagaagagaaccaagagactgaccgcccagtgggccctggccgcccagagactggcccagaagctgggcgccacccagagagaccagaagcagatcctggtgcacatcggcttcctgaccgaggagagcggcgacgtgttcagccccagagtgctgaagggcggccccctgggcgagatggtgcagtgggccgacatcctgaccgccctgtacgtgctgggccacggcctgagagtgaccgtgagcctgaaggagctgcagagcaacctgggcgtgccccccggcagaggcagctgccccctgaccatgcccctgcccttcgacctgatctacaccgactaccacggcctgcagcagatgaagagacacatgggcctgagcttcaagaagtacagatgcagaatcagagtgatcgacaccttcggcaccgagcccgcctacaaccacgaggagtacgccaccctgcacggctacagaaccaactggggctactggaacctgaaccccaagcagttcatgaccatgttcccccacacccccgacaacagcttcatgggcttcgtgagcgaggagctgaacgagaccgagaagagactgatcaagggcggcaaggccagcaacatggccgtggtgtacggcaaggaggccagcatctggaagctgcagggcaaggagaagttcctgggcatcctgaacaagtacatggagatccacggcaccgtgtactacgagagccagagaccccccgaggtgcccgccttcgtgaagaaccacggcctgctgccccagcccgagttccagcagctgctgagaaaggccaagctgttcatcggcttcggcttcccctacgagggccccgcccccctggaggccatcgccaacggctgcatcttcctgcagagcagattcagccccccccacagcagcctgaaccacgagttcttcagaggcaagcccaccagcagagaggtgttcagccagcacccctacgccgagaacttcatcggcaagccccacgtgtggaccgtggactacaacaacagcgaggagttcgaggccgccatcaaggccatcatgagaacccaggtggacccctacctgccctacgagtacacctgcgagggcatgctggagagaatccacgcctacatccagcaccaggacttctgcagagcccccgaccccgccctgcccgaggcccacgccccccagagccccttcgtgctggcccccaacgccacccacctggagtgggccagaaacaccagcctggcccccggcgcctggccccccgcccacgccctgagagcctggctggccgtgcccggcagagcctgcaccgacacctgcctggaccacggcctgatctgcgagcccagcttcttccccttcctgaacagccaggacgccttcctgaagctgcaggtgccctgcgacagcaccgagagcgagatgaaccacctgtaccccgccttcgcccagcccggccaggagtgctacctgcagaaggagcccctgctgttcagctgcgccggcagcaacaccaagtacagaagactgtgcccctgcagagacttcagaaagggccaggtggccctgtgccagggctgcctgtag

SEQ ID NO: 87957 - DNA, 1338 bp, synthetic construct
  misc_feature 1..1338: note = Description of Artificial Sequence: Synthetic coding sequence
  source 1..1338: mol_type = other DNA
atgctgaagaagcagagcgccggcctggtgctgtggggcgccatcctgttcgtggcctggaacgccctgctgctgctgttcttctggaccagacccgcccccggcagaccccccagcgtgagcgccctggacggcgaccccgccagcctgaccagagaggtgatcagactggcccaggacgccgaggtggagctggagagacagagaggcctgctgcagcagatcggcgacgccctgagcagccagagaggcagagtgcccaccgccgccccccccgcccagcccagagtgcccgtgacccccgcccccgccgtgatccccatcctggtgatcgcctgcgacagaagcaccgtgagaagatgcctggacaagctgctgcactacagacccagcgccgagctgttccccatcatcgtgagccaggactgcggccacgaggagaccgcccaggccatcgccagctacggcagcgccgtgacccacatcagacagcccgacctgagcagcatcgccgtgccccccgaccacagaaagttccagggctactacaagatcgccagacactacagatgggccctgggccaggtgttcagacagttcagattccccgccgccgtggtggtggaggacgacctggaggtggcccccgacttcttcgagtacttcagagccacctaccccctgctgaaggccgaccccagcctgtggtgcgtgagcgcctggaacgacaacggcaaggagcagatggtggacgccagcagacccgagctgctgtacagaaccgacttcttccccggcctgggctggctgctgctggccgagctgtgggccgagctggagcccaagtggcccaaggccttctgggacgactggatgagaagacccgagcagagacagggcagagcctgcatcagacccgagatcagcagaaccatgaccttcggcagaaagggcgtgagccacggccagttcttcgaccagcacctgaagttcatcaagctgaaccagcagttcgtgcacttcacccagctggacctgagctacctgcagagagaggcctacgacagagacttcctggccagagtgtacggcgccccccagctgcaggtggagaaggtgagaaccaacgacagaaaggagctgggcgaggtgagagtgcagtacaccggcagagacagcttcaaggccttcgccaaggccctgggcgtgatggacgacctgaagagcggcgtgcccagagccggctacagaggcatcgtgaccttccagttcagaggcagaagagtgcacctggccccccccctgacctgggagggctacgaccccagctggaactag

SEQ ID NO: 87958 - DNA, 1338 bp, synthetic construct; identical to SEQ ID NO: 87957
  misc_feature 1..1338: note = Description of Artificial Sequence: Synthetic coding sequence
  source 1..1338: mol_type = other DNA

SEQ ID NO: 87959 - DNA, 1338 bp, synthetic construct; identical to SEQ ID NO: 87957
  misc_feature 1..1338: note = Description of Artificial Sequence: Synthetic coding sequence
  source 1..1338: mol_type = other DNA

SEQ ID NO: 87960 - DNA, 1338 bp, synthetic construct; identical to SEQ ID NO: 87957
  misc_feature 1..1338: note = Description of Artificial Sequence: Synthetic coding sequence
  source 1..1338: mol_type = other DNA

SEQ ID NO: 87961 - DNA, 1338 bp, synthetic construct; identical to SEQ ID NO: 87957
  misc_feature 1..1338: note = Description of Artificial Sequence: Synthetic coding sequence
  source 1..1338: mol_type = other DNA

SEQ ID NO: 87962 - DNA, 909 bp, synthetic construct
  misc_feature 1..909: note = Description of Artificial Sequence: Synthetic coding sequence
  source 1..909: mol_type = other DNA
atgctgaagaagcagagcgccggcctggtgctgtggggcgccatcctgttcgtggcctggaacgccctgctgctgctgttcttctggaccagacccgcccccggcagaccccccagcgtgagcgccctggacggcgaccccgccagcctgaccagagtgttcagacagttcagattccccgccgccgtggtggtggaggacgacctggaggtggcccccgacttcttcgagtacttcagagccacctaccccctgctgaaggccgaccccagcctgtggtgcgtgagcgcctggaacgacaacggcaaggagcagatggtggacgccagcagacccgagctgctgtacagaaccgacttcttccccggcctgggctggctgctgctggccgagctgtgggccgagctggagcccaagtggcccaaggccttctgggacgactggatgagaagacccgagcagagacagggcagagcctgcatcagacccgagatcagcagaaccatgaccttcggcagaaagggcgtgagccacggccagttcttcgaccagcacctgaagttcatcaagctgaaccagcagttcgtgcacttcacccagctggacctgagctacctgcagagagaggcctacgacagagacttcctggccagagtgtacggcgccccccagctgcaggtggagaaggtgagaaccaacgacagaaaggagctgggcgaggtgagagtgcagtacaccggcagagacagcttcaaggccttcgccaaggccctgggcgtgatggacgacctgaagagcggcgtgcccagagccggctacagaggcatcgtgaccttccagttcagaggcagaagagtgcacctggccccccccctgacctgggagggctacgaccccagctggaactag

SEQ ID NO: 87963 - DNA, 312 bp, synthetic construct
  misc_feature 1..312: note = Description of Artificial Sequence: Synthetic coding sequence
  source 1..312: mol_type = other DNA
atgctgaagaagcagagcgccggcctggtgctgtggggcgccatcctgttcgtggcctggaacgccctgctgctgctgttcttctggaccagacccgcccccggcagaccccccagcgtgagcgccctggacggcgaccccgccagcctgaccagagaggtgatcagactggcccaggacgccgaggtggagctggagagacagagaggcctgctgcagcagatcggcgacgccctgagcagccagagaggcagagtgcccaccgccgccccccccgcccagcccagagtgcccgtgacccccgccccctag

SEQ ID NO: 87964 - DNA, 600 bp, synthetic construct
  misc_feature 1..600: note = Description of Artificial Sequence: Synthetic coding sequence
  source 1..600: mol_type = other DNA
atgctgaagaagcagagcgccggcctggtgctgtggggcgccatcctgttcgtggcctggaacgccctgctgctgctgttcttctggaccagacccgcccccggcagaccccccagcgtgagcgccctggacggcgaccccgccagcctgaccagagaggtgatcagactggcccaggacgccgaggtggagctggagagacagagaggcctgctgcagcagatcggcgacgccctgagcagccagagaggcagagtgcccaccgccgccccccccgcccagcccagagtgcccgtgacccccgcccccgccgtgatccccatcctggtgatcgcctgcgacagaagcaccgtgagaagatgcctggacaagctgctgcactacagacccagcgccgagctgttccccatcatcgtgagccaggactgcggccacgaggagaccgcccaggccatcgccagctacggcagcgccgtgacccacatcagacagcccgacctgagcagcatcgccgtgccccccgaccacagaaagttccagggctactacaagatcgccagacactacagatgggccctgggccaggtgttcagacagtag

SEQ ID NO: 87965 - DNA, 336 bp, synthetic construct
  misc_feature 1..336: note = Description of Artificial Sequence: Synthetic coding sequence
  source 1..336: mol_type = other DNA
atgctgaagaagcagagcgccggcctggtgctgtggggcgccatcctgttcgtggcctggaacgccctgctgctgctgttcttctggaccagacccgcccccggcagaccccccagcgtgagcgccctggacggcgaccccgccagcctgaccagagaggtgatcagactggcccaggacgccgaggtggagctggagagacagagaggcctgctgcagcagatcggcgacgccctgagcagccagagaggcagagtgcccaccgccgccccccccgcccagcccagagtgcccgtgacccccgcccccgccgtgatccccatcctggtgatctag

SEQ ID NO: 87966 - DNA, 465 bp, synthetic construct
  misc_feature 1..465: note = Description of Artificial Sequence: Synthetic coding sequence
  source 1..465: mol_type = other DNA
atgctgaagaagcagagcgccggcctggtgctgtggggcgccatcctgttcgtggcctggaacgccctgctgctgctgttcttctggaccagacccgcccccggcagaccccccagcgtgagcgccctggacggcgaccccgccagcctgaccagagaggtgatcagactggcccaggacgccgaggtggagctggagagacagagaggcctgctgcagcagatcggcgacgccctgagcagccagagaggcagagtgcccaccgccgccccccccgcccagcccagagtgcccgtgacccccgcccccgccgtgatccccatcctggtgatcgcctgcgacagaagcaccgtgagaagatgcctggacaagctgctgcactacagacccagcgccgagctgttccccatcatcgtgagccaggactgcggccacgaggagaccgcccaggccatcgccagctag

SEQ ID NO: 87967 - DNA, 105 bp, synthetic construct
  misc_feature 1..105: note = Description of Artificial Sequence: Synthetic coding sequence
  source 1..105: mol_type = other DNA
atgctgaagaagcagagcgccggcctggtgctgtggggcgccatcctgttcgtggcctggaacgccctgctgctgctgttcttctggaccagacccgccccctag

SEQ ID NO: 87968 - DNA, 348 bp, synthetic construct
  misc_feature 1..348: note = Description of Artificial Sequence: Synthetic coding sequence
  source 1..348: mol_type = other DNA
atgctgaagaagcagagcgccggcctggtgctgtggggcgccatcctgttcgtggcctggaacgccctgctgctgctgttcttctggaccagacccgcccccggcagaccccccagcgtgagcgccctggacggcgaccccgccagcctgaccagagaggtgatcagactggcccaggacgccgaggtggagctggagagacagagaggcctgctgcagcagatcggcgacgccctgagcagccagagaggcagagtgcccaccgccgccccccccgcccagcccagagtgcccgtgacccccgcccccgccgtgatccccatcctggtgatcgcctgcgacagatag

SEQ ID NO: 87969 - DNA, 288 bp, synthetic construct
  misc_feature 1..288: note = Description of Artificial Sequence: Synthetic coding sequence
  source 1..288: mol_type = other DNA
atgctgaagaagcagagcgccggcctggtgctgtggggcgccatcctgttcgtggcctggaacgccctgctgctgctgttcttctggaccagacccgcccccggcagaccccccagcgtgagcgccctggacggcgaccccgccagcctgaccagagaggtgatcagactggcccaggacgccgaggtggagctggagagacagagaggcctgctgcagcagatcggcgacgccctgagcagccagagaggcagagtgcccaccgccgccccccccgcccagccctag

SEQ ID NO: 87970 - DNA, 384 bp, synthetic construct
  misc_feature 1..384: note = Description of Artificial Sequence: Synthetic coding sequence
  source 1..384: mol_type = other DNA
atgctgaagaagcagagcgccggcctggtgctgtggggcgccatcctgttcgtggcctggaacgccctgctgctgctgttcttctggaccagacccgcccccggcagaccccccagcgtgagcgccctggacggcgaccccgccagcctgaccagagaggtgatcagactggcccaggacgccgaggtggagctggagagacagagaggcctgctgcagcagatcggcgacgccctgagcagccagagaggcagagtgcccaccgccgccccccccgcccagcccagagtgcccgtgacccccgcccccgccgtgatccccatcctggtgatcgcctgcgacagaagcaccgtgagaagatgcctggacaagctgctgcactag

SEQ ID NO: 87971 - DNA, 318 bp, synthetic construct
  misc_feature 1..318: note = Description of Artificial Sequence: Synthetic coding sequence
  source 1..318: mol_type = other DNA
atgctgaagaagcagagcgccggcctggtgctgtggggcgccatcctgttcgtggcctggaacgccctgctgctgctgttcttctggaccagacccgcccccggcagaccccccagcgtgagcgccctggacggcgaccccgccagcctgaccagagaggtgatcagactggcccaggacgccgaggtggagctggagagacagagaggcctgctgcagcagatcggcgacgccctgagcagccagagaggcagagtgcccaccgccgccccccccgcccagcccagagtgcccgtgacccccgcccccgccgtgtag

SEQ ID NO: 87972 - DNA, 1608 bp, synthetic construct
  misc_feature 1..1608: note = Description of Artificial Sequence: Synthetic coding sequence
  source 1..1608: mol_type = other DNA
atgagactgagaaacggcaccgtggccaccgccctggccttcatcaccagcttcctgaccctgagctggtacaccacctggcagaacggcaaggagaagctgatcgcctaccagagagagttcctggccctgaaggagagactgagaatcgccgagcacagaatcagccagagaagcagcgagctgaacaccatcgtgcagcagttcaagagagtgggcgccgagaccaacggcagcaaggacgccctgaacaagttcagcgacaacaccctgaagctgctgaaggagctgaccagcaagaagagcctgcaggtgcccagcatctactaccacctgccccacctgctgaagaacgagggcagcctgcagcccgccgtgcagatcggcaacggcagaaccggcgtgagcatcgtgatgggcatccccaccgtgaagagagaggtgaagagctacctgatcgagaccctgcacagcctgatcgacaacctgtaccccgaggagaagctggactgcgtgatcgtggtgttcatcggcgagaccgacatcgactacgtgcacggcgtggtggccaacctggagaaggagttcagcaaggagatcagcagcggcctggtggaggtgatcagcccccccgagagctactaccccgacctgaccaacctgaaggagaccttcggcgacagcaaggagagagtgagatggagaaccaagcagaacctggactactgcttcctgatgatgtacgcccaggagaagggcatctactacatccagctggaggacgacatcatcgtgaagcagaactacttcaacaccatcaagaacttcgccctgcagctgagcagcgaggagtggatgatcctggagttcagccagctgggcttcatcggcaagatgttccaggcccccgacctgaccctgatcgtggagttcatcttcatgttctacaaggagaagcccatcgactggctgctggaccacatcctgtgggtgaaggtgtgcaaccccgagaaggacgccaagcactgcgacagacagaaggccaacctgagaatcagattcagacccagcctgttccagcacgtgggcctgcacagcagcctgagcggcaagatccagaagctgaccgacaaggactacatgaagcccctgctgctgaagatccacgtgaacccccccgccgaggtgagcaccagcctgaaggtgtaccagggccacaccctggagaagacctacatgggcgaggacttcttctgggccatcacccccatcgccggcgactacatcctgttcaagttcgacaagcccgtgaacgtggagagctacctgttccacagcggcaaccaggagcaccccggcgacatcctgctgaacaccaccgtggaggtgctgcccttcaagagcgagggcctggagatcagcaaggagaccaaggacaagagactggaggacggctacttcagaatcggcaagttcgagaacggcgtggccgagggcatggtggaccccagcctgaaccccatcagcgccttcagactgagcgtgatccagaacagcgccgtgtgggccatcctgaacgagatccacatcaagaaggccaccaactag

SEQ ID NO: 87973 - DNA, 1608 bp, synthetic construct; identical to SEQ ID NO: 87972
  misc_feature 1..1608: note = Description of Artificial Sequence: Synthetic coding sequence
  source 1..1608: mol_type = other DNA

SEQ ID NO: 87974 - DNA, 1608 bp, synthetic construct; identical to SEQ ID NO: 87972
  misc_feature 1..1608: note = Description of Artificial Sequence: Synthetic coding sequence
  source 1..1608: mol_type = other DNA

SEQ ID NO: 87975 - DNA, 1272 bp, synthetic construct
  misc_feature 1..1272: note = Description of Artificial Sequence: Synthetic coding sequence
  source 1..1272: mol_type = other DNA
atgaactacagcatcaccgtgagcatcgtgatgggcatccccaccgtgaagagagaggtgaagagctacctgatcgagaccctgcacagcctgatcgacaacctgtaccccgaggagaagctggactgcgtgatcgtggtgttcatcggcgagaccgacatcgactacgtgcacggcgtggtggccaacctggagaaggagttcagcaaggagatcagcagcggcctggtggaggtgatcagcccccccgagagctactaccccgacctgaccaacctgaaggagaccttcggcgacagcaaggagagagtgagatggagaaccaagcagaacctggactactgcttcctgatgatgtacgcccaggagaagggcatctactacatccagctggaggacgacatcatcgtgaagcagaactacttcaacaccatcaagaacttcgccctgcagctgagcagcgaggagtggatgatcctggagttcagccagctgggcttcatcggcaagatgttccaggcccccgacctgaccctgatcgtggagttcatcttcatgttctacaaggagaagcccatcgactggctgctggaccacatcctgtgggtgaaggtgtgcaaccccgagaaggacgccaagcactgcgacagacagaaggccaacctgagaatcagattcagacccagcctgttccagcacgtgggcctgcacagcagcctgagcggcaagatccagaagctgaccgacaaggactacatgaagcccctgctgctgaagatccacgtgaacccccccgccgaggtgagcaccagcctgaaggtgtaccagggccacaccctggagaagacctacatgggcgaggacttcttctgggccatcacccccatcgccggcgactacatcctgttcaagttcgacaagcccgtgaacgtggagagctacctgttccacagcggcaaccaggagcaccccggcgacatcctgctgaacaccaccgtggaggtgctgcccttcaagagcgagggcctggagatcagcaaggagaccaaggacaagagactggaggacggctacttcagaatcggcaagttcgagaacggcgtggccgagggcatggtggaccccagcctgaaccccatcagcgccttcagactgagcgtgatccagaacagcgccgtgtgggccatcctgaacgagcagagagtgttcagcggctggtggcagaagagcagagacaaggccgagggcccccaggcccccctgctgttctag

SEQ ID NO: 87976 - DNA, 1647 bp, synthetic construct
  misc_feature 1..1647: note = Description of Artificial Sequence: Synthetic coding sequence
  source 1..1647: mol_type = other DNA
atgagactgagaaacggcaccttcctgaccctgctgctgttctgcctgtgcgccttcctgagcctgagctggtacgccgccctgagcggccagaagggcgacgtggtggacgtgtaccagagagagttcctggccctgagagacagactgcacgccgccgagcaggagagcctgaagagaagcaaggagctgaacctggtgctggacgagatcaagagagccgtgagcgagagacaggccctgagagacggcgacggcaacagaacctggggcagactgaccgaggaccccagactgaagccctggaacggcagccacagacacgtgctgcacctgcccaccgtgttccaccacctgccccacctgctggccaaggagagcagcctgcagcccgccgtgagagtgggccagggcagaaccggcgtgagcgtggtgatgggcatccccagcgtgagaagagaggtgcacagctacctgaccgacaccctgcacagcctgatcagcgagctgagcccccaggagaaggaggacagcgtgatcgtggtgctgatcgccgagaccgacagccagtacaccagcgccgtgaccgagaacatcaaggccctgttccccaccgagatccacagcggcctgctggaggtgatcagccccagcccccacttctaccccgacttcagcagactgagagagagcttcggcgaccccaaggagagagtgagatggagaaccaagcagaacctggactactgcttcctgatgatgtacgcccagagcaagggcatctactacgtgcagctggaggacgacatcgtggccaagcccaactacctgagcaccatgaagaacttcgccctgcagcagcccagcgaggactggatgatcctggagttcagccagctgggcttcatcggcaagatgttcaagagcctggacctgagcctgatcgtggagttcatcctgatgttctacagagacaagcccatcgactggctgctggaccacatcctgtgggtgaaggtgtgcaaccccgagaaggacgccaagcactgcgacagacagaaggccaacctgagaatcagattcaagcccagcctgttccagcacgtgggcacccacagcagcctggccggcaagatccagaagctgaaggacaaggacttcggcaagcaggccctgagaaaggagcacgtgaacccccccgccgaggtgagcaccagcctgaagacctaccagcacttcaccctggagaaggcctacctgagagaggacttcttctgggccttcacccccgccgccggcgacttcatcagattcagattcttccagcccctgagactggagagattcttcttcagaagcggcaacatcgagcaccccgaggacaagctgttcaacaccagcgtggaggtgctgcccttcgacaacccccagagcgacaaggaggccctgcaggagggcagaaccgccaccctgagataccccagaagccccgacggctacctgcagatcggcagcttctacaagggcgtggccgagggcgaggtggaccccgccttcggccccctggaggccctgagactgagcatccagaccgacagccccgtgtgggtgatcctgagcgagatcttcctgaagaaggccgactag

SEQ ID NO: 87977 - DNA, 1692 bp, synthetic construct
  misc_feature 1..1692: note = Description of Artificial Sequence: Synthetic coding sequence
  source 1..1692: mol_type = other DNA
atgagcagagtggccggcaccagaaccgacgtgaacgagctgctgcagagatggacccccagatgcgtgagatggcacaccggcggcgccagaagagtggccctggacagacccctggtgaccgcctgcctgccccccgccggcgacgtggtggacgtgtaccagagagagttcctggccctgagagacagactgcacgccgccgagcaggagagcctgaagagaagcaaggagctgaacctggtgctggacgagatcaagagagccgtgagcgagagacaggccctgagagacggcgacggcaacagaacctggggcagactgaccgaggaccccagactgaagccctggaacggcagccacagacacgtgctgcacctgcccaccgtgttccaccacctgccccacctgctggccaaggagagcagcctgcagcccgccgtgagagtgggccagggcagaaccggcgtgagcgtggtgatgggcatccccagcgtgagaagagaggtgcacagctacctgaccgacaccctgcacagcctgatcagcgagctgagcccccaggagaaggaggacagcgtgatcgtggtgctgatcgccgagaccgacagccagtacaccagcgccgtgaccgagaacatcaaggccctgttccccaccgagatccacagcggcctgctggaggtgatcagccccagcccccacttctaccccgacttcagcagactgagagagagcttcggcgaccccaaggagagagtgagatggagaaccaagcagaacctggactactgcttcctgatgatgtacgcccagagcaagggcatctactacgtgcagctggaggacgacatcgtggccaagcccaactacctgagcaccatgaagaacttcgccctgcagcagcccagcgaggactggatgatcctggagttcagccagctgggcttcatcggcaagatgttcaagagcctggacctgagcctgatcgtggagttcatcctgatgttctacagagacaagcccatcgactggctgctggaccacatcctgtgggtgaaggtgtgcaaccccgagaaggacgccaagcactgcgacagacagaaggccaacctgagaatcagattcaagcccagcctgttccagcacgtgggcacccacagcagcctggccggcaagatccagaagctgaaggacaaggacttcggcaagcaggccctgagaaaggagcacgtgaacccccccgccgaggtgagcaccagcctgaagacctaccagcacttcaccctggagaaggcctacctgagagaggacttcttctgggccttcacccccgccgccggcgacttcatcagattcagattcttccagcccctgagactggagagattcttcttcagaagcggcaacatcgagcaccccgaggacaagctgttcaacaccagcgtggaggtgctgcccttcgacaacccccagagcgacaaggaggccctgcaggagggcagaaccgccaccctgagataccccagaagccccgacggctacctgcagatcggcagcttctacaagggcgtggccgagggcgaggtggaccccgccttcggccccctggaggccctgagactgagcatccagaccgacagccccgtgtgggtgatcctgagcgagatcttcctgaagaaggccgactag

SEQ ID NO: 87978 - DNA, 1344 bp, synthetic construct
  misc_feature 1..1344: note = Description of Artificial Sequence: Synthetic coding sequence
  source 1..1344: mol_type = other DNA
atgagattcagaatctacaagagaaaggtgctgatcctgaccctggtggtggccgcctgcggcttcgtgctgtggagcagcaacggcagacagagaaagaacgaggccctggccccccccctgctggacgccgagcccgccagaggcgccggcggcagaggcggcgaccaccccagcgtggccgtgggcatcagaagagtgagcaacgtgagcgccgccagcctggtgcccgccgtgccccagcccgaggccgacaacctgaccctgagatacagaagcctggtgtaccagctgaacttcgaccagaccctgagaaacgtggacaaggccggcacctgggcccccagagagctggtgctggtggtgcaggtgcacaacagacccgagtacctgagactgctgctggacagcctgagaaaggcccagggcatcgacaacgtgctggtgatcttcagccacgacttctggagcaccgagatcaaccagctgatcgccggcgtgaacttctgccccgtgctgcaggtgttcttccccttcagcatccagctgtaccccaacgagttccccggcagcgaccccagagactgccccagagacctgcccaagaacgccgccctgaagctgggctgcatcaacgccgagtaccccgacagcttcggccactacagagaggccaagttcagccagaccaagcaccactggtggtggaagctgcacttcgtgtgggagagagtgaagatcctgagagactacgccggcctgatcctgttcctggaggaggaccactacctggcccccgacttctaccacgtgttcaagaagatgtggaagctgaagcagcaggagtgccccgagtgcgacgtgctgagcctgggcacctacagcgccagcagaagcttctacggcatggccgacaaggtggacgtgaagacctggaagagcaccgagcacaacatgggcctggccctgaccagaaacgcctaccagaagctgatcgagtgcaccgacaccttctgcacctacgacgactacaactgggactggaccctgcagtacctgaccgtgagctgcctgcccaagttctggaaggtgctggtgccccagatccccagaatcttccacgccggcgactgcggcatgcaccacaagaagacctgcagacccagcacccagagcgcccagatcgagagcctgctgaacaacaacaagcagtacatgttccccgagaccctgaccatcagcgagaagttcaccgtggtggccatcagcccccccagaaagaacggcggctggggcgacatcagagaccacgagctgtgcaagagctacagaagactgcagtag

SEQ ID NO: 87979 - DNA, 1362 bp, synthetic construct
  misc_feature 1..1362: note = Description of Artificial Sequence: Synthetic coding sequence
  source 1..1362: mol_type = other DNA
atggagagaaccgagaccatgagattcagaatctacaagagaaaggtgctgatcctgaccctggtggtggccgcctgcggcttcgtgctgtggagcagcaacggcagacagagaaagaacgaggccctggccccccccctgctggacgccgagcccgccagaggcgccggcggcagaggcggcgaccaccccagcgtggccgtgggcatcagaagagtgagcaacgtgagcgccgccagcctggtgcccgccgtgccccagcccgaggccgacaacctgaccctgagatacagaagcctggtgtaccagctgaacttcgaccagaccctgagaaacgtggacaaggccggcacctgggcccccagagagctggtgctggtggtgcaggtgcacaacagacccgagtacctgagactgctgctggacagcctgagaaaggcccagggcatcgacaacgtgctggtgatcttcagccacgacttctggagcaccgagatcaaccagctgatcgccggcgtgaacttctgccccgtgctgcaggtgttcttccccttcagcatccagctgtaccccaacgagttccccggcagcgaccccagagactgccccagagacctgcccaagaacgccgccctgaagctgggctgcatcaacgccgagtaccccgacagcttcggccactacagagaggccaagttcagccagaccaagcaccactggtggtggaagctgcacttcgtgtgggagagagtgaagatcctgagagactacgccggcctgatcctgttcctggaggaggaccactacctggcccccgacttctaccacgtgttcaagaagatgtggaagctgaagcagcaggagtgccccgagtgcgacgtgctgagcctgggcacctacagcgccagcagaagcttctacggcatggccgacaaggtggacgtgaagacctggaagagcaccgagcacaacatgggcctggccctgaccagaaacgcctaccagaagctgatcgagtgcaccgacaccttctgcacctacgacgactacaactgggactggaccctgcagtacctgaccgtgagctgcctgcccaagttctggaaggtgctggtgccccagatccccagaatcttccacgccggcgactgcggcatgcaccacaagaagacctgcagacccagcacccagagcgcccagatcgagagcctgctgaacaacaacaagcagtacatgttccccgagaccctgaccatcagcgagaagttcaccgtggtggccatcagcccccccagaaagaacggcggctggggcgacatcagagaccacgagctgtgcaagagctacagaagactgcagtag

SEQ ID NO: 87980 - DNA, 2373 bp, synthetic construct
  misc_feature 1..2373: note = Description of Artificial Sequence: Synthetic coding sequence
  source 1..2373: mol_type = other DNA
atgatcaccgtgaaccccgacggcaagatcatggtgagaagatgcctggtgaccctgagacccttcagactgttcgtgctgggcatcggcttcttcaccctgtgcttcctgatgaccagcctgggcggccagttcagcgccagaagactgggcgacagccccttcaccatcagaaccgaggtgatgggcggccccgagagcagaggcgtgctgagaaagatgagcgacctgctggagctgatggtgaagagaatggacgccctggccagactggagaacagcagcgagctgcacagagccggcggcgacctgcacttccccgccgacagaatgccccccggcgccggcctgatggagagaatccaggccatcgcccagaacgtgagcgacatcgccgtgaaggtggaccagatcctgagacacagcctgctgctgcacagcaaggtgagcgagggcagaagagaccagtgcgaggcccccagcgaccccaagttccccgactgcagcggcaaggtggagtggatgagagccagatggaccagcgacccctgctacgccttcttcggcgtggacggcaccgagtgcagcttcctgatctacctgagcgaggtggagtggttctgcccccccctgccctggagaaaccagaccgccgcccagagagcccccaagcccctgcccaaggtgcaggccgtgttcagaagcaacctgagccacctgctggacctgatgggcagcggcaaggagagcctgatcttcatgaagaagagaaccaagagactgaccgcccagtgggccctggccgcccagagactggcccagaagctgggcgccacccagagagaccagaagcagatcctggtgcacatcggcttcctgaccgaggagagcggcgacgtgttcagccccagagtgctgaagggcggccccctgggcgagatggtgcagtgggccgacatcctgaccgccctgtacgtgctgggccacggcctgagagtgaccgtgagcctgaaggagctgcagagcaacctgggcgtgccccccggcagaggcagctgccccctgaccatgcccctgcccttcgacctgatctacaccgactaccacggcctgcagcagatgaagagacacatgggcctgagcttcaagaagtacagatgcagaatcagagtgatcgacaccttcggcaccgagcccgcctacaaccacgaggagtacgccaccctgcacggctacagaaccaactggggctactggaacctgaaccccaagcagttcatgaccatgttcccccacacccccgacaacagcttcatgggcttcgtgagcgaggagctgaacgagaccgagaagagactgatcaagggcggcaaggccagcaacatggccgtggtgtacggcaaggaggccagcatctggaagggcaaggagaagttcctgggcatcctgaacaagtacatggagatccacggcaccgtgtactacgagagccagagaccccccgaggtgcccgccttcgtgaagaaccacggcctgctgccccagcccgagttccagcagctgctgagaaaggccaagctgttcatcggcttcggcttcccctacgagggccccgcccccctggaggccatcgccaacggctgcatcttcctgcagagcagattcagccccccccacagcagcctgaaccacgagttcttcagaggcaagcccaccagcagagaggtgttcagccagcacccctacgccgagaacttcatcggcaagccccacgtgtggaccgtggactacaacaacagcgaggagttcgaggccgccatcaaggccatcatgagaacccaggtggacccctacctgccctacgagtacacctgcgagggcatgctggagagaatccacgcctacatccagcaccaggacttctgcagagcccccgaccccgccctgcccgaggcccacgccccccagagccccttcgtgctggcccccaacgccacccacctggagtgggccagaaacaccagcctggcccccggcgcctggccccccgcccacgccctgagagcctggctggccgtgcccggcagagcctgcaccgacacctgcctggaccacggcctgatctgcgagcccagcttcttccccttcctgaacagccaggacgccttcctgaagctgcaggtgccctgcgacagcaccgagagcgagatgaaccacctgtaccccgccttcgcccagcccggccaggagtgctacctgcagaaggagcccctgctgttcagctgcgccggcagcaacaccaagtacagaagactgtgcccctgcagagacttcagaaagggccaggtggccctgtgccagggctgcctgtag

SEQ ID NO: 87981 - DNA, 1185 bp, synthetic construct
  misc_feature 1..1185: note = Description of Artificial Sequence: Synthetic coding sequence
  source 1..1185: mol_type = other DNA
atgatcaccgtgaaccccgacggcaagatcatggtgagaagatgcctggtgaccctgagacccttcagactgttcgtgctgggcatcggcttcttcaccctgtgcttcctgatgaccagcctgggcggccagttcagcgccagaagactgggcgacagccccttcaccatcagaaccgaggtgatgggcggccccgagagcagaggcgtgctgagaaagatgagcgacctgctggagctgatggtgaagagaatggacgccctggccagactggagaacagcagcgagctgcacagagccggcggcgacctgcacttccccgccgacagaatgccccccggcgccggcctgatggagagaatccaggccatcgcccagaacgtgagcgacatcgccgtgaaggtggaccagatcctgagacacagcctgctgctgcacagcaaggtgagcgagggcagaagagaccagtgcgaggcccccagcgaccccaagttccccgactgcagcggcaaggtggagtggatgagagccagatggaccagcgacccctgctacgccttcttcggcgtggacggcaccgagtgcagcttcctgatctacctgagcgaggtggagtggttctgcccccccctgccctggagaaaccagaccgccgcccagagagcccccaagcccctgcccaaggtgcaggccgtgttcagaagcaacctgagccacctgctggacctgatgggcagcggcaaggagagcctgatcttcatgaagaagagaaccaagagactgaccgcccagtgggccctggccgcccagagactggcccagaagctgggcgccacccagagagaccagaagcagatcctggtgcacatcggcttcctgaccgaggagagcggcgacgtgttcagccccagagtgctgaagggcggccccctgggcgagatggtgcagtgggccgacatcctgaccgccctgtacgtgctgggccacggcctgagagtgaccgtgagcctgaaggagctgcagagacagagaagactgagaagcagccaggagcaggccagatgcggcgtgatgggcgcctgcgagaagatgctgctggagggcgacgtggccagcaacaccctgctgatcgagaagcccagcaagaaggagaccgagaagtgccccaagaacctggtgacctag

SEQ ID NO: 87982 - DNA, 2406 bp, synthetic construct
  misc_feature 1..2406: note = Description of Artificial Sequence: Synthetic coding sequence
  source 1..2406: mol_type = other DNA
atgcacagcttcgtgaagcacctgtgcagcagatacgtggtggagagacagggcaccatggccctgcccgccctgctgaccagactgctgcccctgagaagactgttcgtgctgggcatcggcttcttcaccctgtgcttcctgatgaccagcctgggcggccagttcagcgccagaagactgggcgacagccccttcaccatcagaaccgaggtgatgggcggccccgagagcagaggcgtgctgagaaagatgagcgacctgctggagctgatggtgaagagaatggacgccctggccagactggagaacagcagcgagctgcacagagccggcggcgacctgcacttccccgccgacagaatgccccccggcgccggcctgatggagagaatccaggccatcgcccagaacgtgagcgacatcgccgtgaaggtggaccagatcctgagacacagcctgctgctgcacagcaaggtgagcgagggcagaagagaccagtgcgaggcccccagcgaccccaagttccccgactgcagcggcaaggtggagtggatgagagccagatggaccagcgacccctgctacgccttcttcggcgtggacggcaccgagtgcagcttcctgatctacctgagcgaggtggagtggttctgcccccccctgccctggagaaaccagaccgccgcccagagagcccccaagcccctgcccaaggtgcaggccgtgttcagaagcaacctgagccacctgctggacctgatgggcagcggcaaggagagcctgatcttcatgaagaagagaaccaagagactgaccgcccagtgggccctggccgcccagagactggcccagaagctgggcgccacccagagagaccagaagcagatcctggtgcacatcggcttcctgaccgaggagagcggcgacgtgttcagccccagagtgctgaagggcggccccctgggcgagatggtgcagtgggccgacatcctgaccgccctgtacgtgctgggccacggcctgagagtgaccgtgagcctgaaggagctgcagagcaacctgggcgtgccccccggcagaggcagctgccccctgaccatgcccctgcccttcgacctgatctacaccgactaccacggcctgcagcagatgaagagacacatgggcctgagcttcaagaagtacagatgcagaatcagagtgatcgacaccttcggcaccgagcccgcctacaaccacgaggagtacgccaccctgcacggctacagaaccaactggggctactggaacctgaaccccaagcagttcatgaccatgttcccccacacccccgacaacagcttcatgggcttcgtgagcgaggagctgaacgagaccgagaagagactgatcaagggcggcaaggccagcaacatggccgtggtgtacggcaaggaggccagcatctggaagggcaaggagaagttcctgggcatcctgaacaagtacatggagatccacggcaccgtgtactacgagagccagagaccccccgaggtgcccgccttcgtgaagaaccacggcctgctgccccagcccgagttccagcagctgctgagaaaggccaagctgttcatcggcttcggcttcccctacgagggccccgcccccctggaggccatcgccaacggctgcatcttcctgcagagcagattcagccccccccacagcagcctgaaccacgagttcttcagaggcaagcccaccagcagagaggtgttcagccagcacccctacgccgagaacttcatcggcaagccccacgtgtggaccgtggactacaacaacagcgaggagttcgaggccgccatcaaggccatcatgagaacccaggtggacccctacctgccctacgagtacacctgcgagggcatgctggagagaatccacgcctacatccagcaccaggacttctgcagagcccccgaccccgccctgcccgaggcccacgccccccagagccccttcgtgctggcccccaacgccacccacctggagtgggccagaaacaccagcctggcccccggcgcctggccccccgcccacgccctgagagcctggctggccgtgcccggcagagcctgcaccgacacctgcctggaccacggcctgatctgcgagcccagcttcttccccttcctgaacagccaggacgccttcctgaagctgcaggtgccctgcgacagcaccgagagcgagatgaaccacctgtaccccgccttcgcccagcccggccaggagtgctacctgcagaaggagcccctgctgttcagctgcgccggcagcaacaccaagtacagaagactgtgcccctgcagagacttcagaaagggccaggtggccctgtgccagggctgcctgtag

SEQ ID NO: 87983 - DNA, 1602 bp, synthetic construct
  misc_feature 1..1602: note = Description of Artificial Sequence: Synthetic coding sequence
  source 1..1602: mol_type = other DNA
atgaagatgagaagatacaagctgttcctgatgttctgcatggccggcctgtgcctgatcagcttcctgcacttcttcaagaccctgagctacgtgaccttccccagagagctggccagcctgagccccaacctggtgagcagcttcttctggaacaacgcccccgtgaccccccaggccagccccgagcccggcggccccgacctgctgagaacccccctgtacagccacagccccctgctgcagcccctgccccccagcaaggccgccgaggagctgcacagagtggacctggtgctgcccgaggacaccaccgagtacttcgtgagaaccaaggccggcggcgtgtgcttcaagcccggcaccaagatgctggagagacccccccccggcagacccgaggagaagcccgagggcgccaacggcagcagcgccagaagaccccccagatacctgctgagcgccagagagagaaccggcggcagaggcgccagaagaaagtgggtggagtgcgtgtgcctgcccggctggcacggccccagctgcggcgtgcccaccgtggtgcagtacagcaacctgcccaccaaggagagactggtgcccagagaggtgcccagaagagtgatcaacgccatcaacgtgaaccacgagttcgacctgctggacgtgagattccacgagctgggcgacgtggtggacgccttcgtggtgtgcgagagcaacttcaccgcctacggcgagcccagacccctgaagttcagagagatgctgaccaacggcaccttcgagtacatcagacacaaggtgctgtacgtgttcctggaccacttcccccccggcggcagacaggacggctggatcgccgacgactacctgagaaccttcctgacccaggacggcgtgagcagactgagaaacctgagacccgacgacgtgttcatcatcgacgacgccgacgagatccccgccagagacggcgtgctgttcctgaagctgtacgacggctggaccgagcccttcgccttccacatgagaaagagcctgtacggcttcttctggaagcagcccggcaccctggaggtggtgagcggctgcaccgtggacatgctgcaggccgtgtacggcctggacggcatcagactgagaagaagacagtactacaccatgcccaacttcagacagtacgagaacagaaccggccacatcctggtgcagtggagcctgggcagccccctgcacttcgccggctggcactgcagctggtgcttcacccccgagggcatctacttcaagctggtgagcgcccagaacggcgacttccccagatggggcgactacgaggacaagagagacctgaactacatcagaggcctgatcagaaccggcggctggttcgacggcacccagcaggagtacccccccgccgaccccagcgagcacatgtacgcccccaagtacctgctgaagaactacgacagattccactacctgctggacaacccctaccaggagcccagaagcaccgccgccggcggctggagacacagaggccccgagggcagaccccccgccagaggcaagctggacgaggccgaggtgtag

SEQ ID NO: 87984 - DNA, 327 bp, synthetic construct
  misc_feature 1..327: note = Description of Artificial Sequence: Synthetic coding sequence
  source 1..327: mol_type = other DNA
atggagagctgcagctgccaccccggcagcggcgtgcagtggagagaccacggcagcctgcagctgcccccccccggcttcaagatgaagatgagaagatacaagctgttcctgatgttctgcatggccggcctgtgcctgatcagcttcctgcacttcttcaagaccctgagctacgtgaccttccccagagagctggccagcctgagccccaacctggtgagcagcttcttctggaacaacgcccccgtgaccccccaggccagccccgagcccggcggccccgacctgctgagaacccccctgtacagccacagccccctgtag

SEQ ID NO: 87985 - DNA, 486 bp, synthetic construct
  misc_feature 1..486: note = Description of Artificial Sequence: Synthetic coding sequence
  source 1..486: mol_type = other DNA
atgaagatgagaagatacaagctgttcctgatgttctgcatggccggcctgtgcctgatcagcttcctgcacttcttcaagaccctgagctacgtgaccttccccagagagctggccagcctgagccccaacctggtgagcagcttcttctggaacaacgcccccgtgaccccccaggccagccccgagcccggcggccccgacctgctgagaacccccctgtacagccacagccccctgctgcagcccctgccccccagcaaggccgccgaggagctgcacagagtggacctggtgctgcccgaggacaccaccgagtacttcgtgagaaccaaggccggcggcgtgtgcttcaagcccggcaccaagatgctggagagacccccccccggcagacccgaggagaagcccgagggcgccaacggcagcagcgccagaagaccccccagatacctgctgagcgccagagagagaaccggcggctag

SEQ ID NO: 87986 - DNA, 1044 bp, synthetic construct
  misc_feature 1..1044: note = Description of Artificial Sequence: Synthetic coding sequence
  source 1..1044: mol_type = other DNA
atggtgagcagccagaagctggagaagcccatcgagatgggcagcagcgagcccctgcccatcgccgacggcgacagaagaagaaagaagaagagaagaggcagagccaccgacagcctgcccggcaagttcgaggacatgtacaagctgaccagcgagctgctgggcgagggcgcctacgccaaggtgcagggcgccgtgagcctgcagaacggcaaggagtacgccgtgaagatcatcgagaagcaggccggccacagcagaagcagagtgttcagagaggtggagaccctgtaccagtgccagggcaacaagaacatcctggagctgatcgagttcttcgaggacgacaccagattctacctggtgttcgagaagctgcagggcggcagcatcctggcccacatccagaagcagaagcacttcaacgagagagaggccagcagagtggtgagagacgtggccgccgccctggacttcctgcacaccaagggcatcgcccacagagacctgaagcccgagaacatcctgtgcgagagccccgagaaggtgagccccgtgaagatctgcgacttcgacctgggcagcggcatgaagctgaacaacagctgcacccccatcaccacccccgagctgaccaccccctgcggcagcgccgagtacatggcccccgaggtggtggaggtgttcaccgaccaggccaccttctacgacaagagatgcgacctgtggagcctgggcgtggtgctgtacatcatgctgagcggctacccccccttcgtgggccactgcggcgccgactgcggctgggacagaggcgaggtgtgcagagtgtgccagaacaagctgttcgagagcatccaggagggcaagtacgagttccccgacaaggactgggcccacatcagcagcgaggccaaggacctgatcagcaagctgctggtgagagacgccaagcagagactgagcgccgcccaggtgctgcagcacccctgggtgcagggcgagcagcagcacaacggccccgacgccctgagaagctag

SEQ ID NO: 87987 - DNA, 990 bp, synthetic construct
  misc_feature 1..990: note = Description of Artificial Sequence: Synthetic coding sequence
  source 1..990: mol_type = other DNA
atggccaagagcatgcccagcaagagcagcagaaacaagcagggcaccgtgggcgtgggctgcttcgagagatggagaagatgcatcagcgtgagagagaccagcagcatcctggcccacatccagaagcagaagcacttcaacgagagagaggccagcagagtggtgagagacgtggccgccgccctggacttcctgcacaccaagggcatcgcccacagagacctgaagcccgagaacatcctgtgcgagagccccgagaaggtgagccccgtgaagatctgcgacttcgacctgggcagcggcatgaagctgaacaacagctgcacccccatcaccacccccgagctgaccaccccctgcggcagcgccgagtacatggcccccgaggtggtggaggtgttcaccgaccaggccaccttctacgacaagagatgcgacctgtggagcctgggcgtggtgctgtacatcatgctgagcggctacccccccttcgtgggccactgcggcgccgactgcggctgggacagaggcgaggtgtgcagagtgtgccagaacaagctgttcgagagcatccaggagggcaagtacgagttccccgacaaggactgggcccacatcagcagcgaggccaaggacctgatcagcaagctgctggtgagagacgccaagcagagactgagcgccgcccaggtgctgcagcacccctgggtgcagggccaggcccccgagaagggcctgcccaccccccaggtgctgcagagaaacagcagcaccatggacctgaccctgttcgccgccgaggccatcgccctgaacagacagctgagccagcacgaggagaacgagctggccgaggagcccgaggccctggccgacggcctgtgcagcatgaagctgagccccccctgcaagagcagactggccagaagaagagccctggcccaggccggcagaggcgaggacagaagcccccccaccgccctgtag

SEQ ID NO: 87988 - DNA, 1275 bp, synthetic construct
  misc_feature 1..1275: note = Description of Artificial Sequence: Synthetic coding sequence
  source 1..1275: mol_type = other DNA
atggtgagcagccagaagctggagaagcccatcgagatgggcagcagcgagcccctgcccatcgccgacggcgacagaagaagaaagaagaagagaagaggcagagccaccgacagcctgcccggcaagttcgaggacatgtacaagctgaccagcgagctgctgggcgagggcgcctacgccaaggtgcagggcgccgtgagcctgcagaacggcaaggagtacgccgtgaagatcatcgagaagcaggccggccacagcagaagcagagtgttcagagaggtggagaccctgtaccagtgccagggcaacaagaacatcctggagctgatcgagttcttcgaggacgacaccagattctacctggtgttcgagaagctgcagggcggcagcatcctggcccacatccagaagcagaagcacttcaacgagagagaggccagcagagtggtgagagacgtggccgccgccctggacttcctgcacaccaagggcatcgcccacagagacctgaagcccgagaacatcctgtgcgagagccccgagaaggtgagccccgtgaagatctgcgacttcgacctgggcagcggcatgaagctgaacaacagctgcacccccatcaccacccccgagctgaccaccccctgcggcagcgccgagtacatggcccccgaggtggtggaggtgttcaccgaccaggccaccttctacgacaagagatgcgacctgtggagcctgggcgtggtgctgtacatcatgctgagcggctacccccccttcgtgggccactgcggcgccgactgcggctgggacagaggcgaggtgtgcagagtgtgccagaacaagctgttcgagagcatccaggagggcaagtacgagttccccgacaaggactgggcccacatcagcagcgaggccaaggacctgatcagcaagctgctggtgagagacgccaagcagagactgagcgccgcccaggtgctgcagcacccctgggtgcagggccaggcccccgagaagggcctgcccaccccccaggtgctgcagagaaacagcagcaccatggacctgaccctgttcgccgccgaggccatcgccctgaacagacagctgagccagcacgaggagaacgagctggccgaggagcccgaggccctggccgacggcctgtgcagcatgaagctgagccccccctgcaagagcagactggccagaagaagagccctggcccaggccggcagaggcgaggacagaagcccccccaccgccctgtag

SEQ ID NO: 87989 - DNA, 1398 bp, synthetic construct
  misc_feature 1..1398: note = Description of Artificial Sequence: Synthetic coding sequence
  source 1..1398: mol_type = other DNA
atggtgagcagccagaagctggagaagcccatcgagatgggcagcagcgagcccctgcccatcgccgacggcgacagaagaagaaagaagaagagaagaggcagagccaccgacagcctgcccggcaagttcgaggacatgtacaagctgaccagcgagctgctgggcgagggcgcctacgccaaggtgcagggcgccgtgagcctgcagaacggcaaggagtacgccgtgaagatcatcgagaagcaggccggccacagcagaagcagagtgttcagagaggtggagaccctgtaccagtgccagggcaacaagaacatcctggagctgatcgagttcttcgaggacgacaccagattctacctggtgttcgagaagctgcagggcggcagcatcctggcccacatccagaagcagaagcacttcaacgagagagaggccagcagagtggtgagagacgtggccgccgccctggacttcctgcacaccaaggacaaggtgagcctgtgccacctgggctggagcgccatggcccccagcggcctgaccgccgcccccaccagcctgggcagcagcgacccccccaccagcgccagccaggtggccggcaccaccggcatcgcccacagagacctgaagcccgagaacatcctgtgcgagagccccgagaaggtgagccccgtgaagatctgcgacttcgacctgggcagcggcatgaagctgaacaacagctgcacccccatcaccacccccgagctgaccaccccctgcggcagcgccgagtacatggcccccgaggtggtggaggtgttcaccgaccaggccaccttctacgacaagagatgcgacctgtggagcctgggcgtggtgctgtacatcatgctgagcggctacccccccttcgtgggccactgcggcgccgactgcggctgggacagaggcgaggtgtgcagagtgtgccagaacaagctgttcgagagcatccaggagggcaagtacgagttccccgacaaggactgggcccacatcagcagcgaggccaaggacctgatcagcaagctgctggtgagagacgccaagcagagactgagcgccgcccaggtgctgcagcacccctgggtgcagggccaggcccccgagaagggcctgcccaccccccaggtgctgcagagaaacagcagcaccatggacctgaccctgttcgccgccgaggccatcgccctgaacagacagctgagccagcacgaggagaacgagctggccgaggagcccgaggccctggccgacggcctgtgcagcatgaagctgagccccccctgcaagagcagactggccagaagaagagccctggcccaggccggcagaggcgaggacagaagcccccccaccgccctgtag

SEQ ID NO: 87990 - DNA, 1044 bp, synthetic construct; identical to SEQ ID NO: 87986
  misc_feature 1..1044: note = Description of Artificial Sequence: Synthetic coding sequence
  source 1..1044: mol_type = other DNA

SEQ ID NO: 87991 - DNA, 537 bp, synthetic construct
  misc_feature 1..537: note = Description of Artificial Sequence: Synthetic coding sequence
  source 1..537: mol_type = other DNA
atggtgagcagccagaagctggagaagcccatcgagatgggcagcagcgagcccctgcccatcgccgacggcgacagaagaagaaagaagaagagaagaggcagagccaccgacagcctgcccggcaagttcgaggacatgtacaagctgaccagcgagctgctgggcgagggcgcctacgccaaggtgcagggcgccgtgagcctgcagaacggcaaggagtacgccgtgaagatcatcgagaagcaggccggccacagcagaagcagagtgttcagagaggtggagaccctgtaccagtgccagggcaacaagaacatcctggagctgatcgagttcttcgaggacgacaccagattctacctggtgttcgagaagctgcagggcggcagcatcctggcccacatccagaagcagaagcacttcaacgagagagaggccagcagagtggtgagagacgtggccgccgccctggacttcctgcacaccaagggcatcgcccacagagacctgaagcccgagaacatcctgtgctag

SEQ ID NO: 87992 - DNA, 306 bp, synthetic construct
  misc_feature 1..306: note = Description of Artificial Sequence: Synthetic coding sequence
  source 1..306: mol_type = other DNA
atggtgagcagccagaagctggagaagcccatcgagatgggcagcagcgagcccctgcccatcgccgacggcgacagaagaagaaagaagaagagaagaggcagagccaccgacagcctgcccggcaagttcgaggacatgtacaagctgaccagcgagctgctgggcgagggcgcctacgccaaggtgcagggcgccgtgagcctgcagaacggcaaggagtacgccgtgaagatcatcgagaagcaggccggccacagcagaagcagagtgttcagagaggtggagaccctgtaccagtgctag

SEQ ID NO: 87993 - DNA, 303 bp, synthetic construct
  misc_feature 1..303: note = Description of Artificial Sequence: Synthetic coding sequence
  source 1..303: mol_type = other DNA
atggtgagcagccagaagctggagaagcccatcgagatgggcagcagcgagcccctgcccatcgccgacggcgacagaagaagaaagaagaagagaagaggcagagccaccgacagcctgcccggcaagttcgaggacatgtacaagctgaccagcgagctgctgggcgagggcgcctacgccaaggtgcagggcgccgtgagcctgcagaacggcaaggagtacgccgtgaagatcatcgagaagcaggccggccacagcagaagcagagtgttcagagaggtggagaccctgtaccagtag

SEQ ID NO: 87994 - DNA, 402 bp, synthetic construct
  misc_feature 1..402: note = Description of Artificial Sequence: Synthetic coding sequence
  source 1..402: mol_type = other DNA
atggtgagcagccagaagctggagaagcccatcgagatgggcagcagcgagcccctgcccatcgccgacggcgacagaagaagaaagaagaagagaagaggcagagccaccgacagcctgcccggcaagttcgaggacatgtacaagctgaccagcgagctgctgggcgagggcgcctacgccaaggtgcagggcgccgtgagcctgcagaacggcaaggagtacgccgtgaagatcatcgagaagcaggccggccacagcagaagcagagtgttcagagaggtggagaccctgtaccagtgccagggcaacaagaacatcctggagctgatcgagttcttcgaggacgacaccagattctacctggtgttcgagaagctgcagggcggcacctacagatag

SEQ ID NO: 87995 - DNA, 1398 bp, synthetic construct
  misc_feature 1..1398: note = Description of Artificial Sequence: Synthetic coding sequence
  source 1..1398: mol_type = other DNA
atggtgcagaagaagcccgccgagctgcagggcttccacagaagcttcaagggccagaaccccttcgagctggccttcagcctggaccagcccgaccacggcgacagcgacttcggcctgcagtgcagcgccagacccgacatgcccgccagccagcccatcgacatccccgacgccaagaagagaggcaagaagaagaagagaggcagagccaccgacagcttcagcggcagattcgaggacgtgtaccagctgcaggaggacgtgctgggcgagggcgcccacgccagagtgcagacctgcatcaacctgatcaccagccaggagtacgccgtgaagatcatcgagaagcagcccggccacatcagaagcagagtgttcagagaggtggagatgctgtaccagtgccagggccacagaaacgtgctggagctgatcgagttcttcgaggaggaggacagattctacctggtgttcgagaagatgagaggcggcagcatcctgagccacatccacaagagaagacacttcaacgagctggaggccagcgtggtggtgcaggacgtggccagcgccctggacttcctgcacaacaagggcatcgcccacagagacctgaagcccgagaacatcctgtgcgagcaccccaaccaggtgagccccgtgaagatctgcgacttcgacctgggcagcggcatcaagctgaacggcgactgcagccccatcagcacccccgagctgctgaccccctgcggcagcgccgagtacatggcccccgaggtggtggaggccttcagcgaggaggccagcatctacgacaagagatgcgacctgtggagcctgggcgtgatcctgtacatcctgctgagcggctacccccccttcgtgggcagatgcggcagcgactgcggctgggacagaggcgaggcctgccccgcctgccagaacatgctgttcgagagcatccaggagggcaagtacgagttccccgacaaggactgggcccacatcagctgcgccgccaaggacctgatcagcaagctgctggtgagagacgccaagcagagactgagcgccgcccaggtgctgcagcacccctgggtgcagggctgcgcccccgagaacaccctgcccacccccatggtgctgcagagaaacagctgcgccaaggacctgaccagcttcgccgccgaggccatcgccatgaacagacagctggcccagcacgacgaggacctggccgaggaggaggccgccggccagggccagcccgtgctggtgagagccaccagcagatgcctgcagctgagcccccccagccagagcaagctggcccagagaagacagagagccagcctgagcagcgcccccgtggtgctggtgggcgaccacgcctag

SEQ ID NO: 87996 - DNA, 1245 bp, synthetic construct
  misc_feature 1..1245: note = Description of Artificial Sequence: Synthetic coding sequence
  source 1..1245: mol_type = other DNA
atggtgcagaagaagcccgccgagctgcagggcttccacagaagcttcaagggccagaaccccttcgagctggccttcagcctggaccagcccgaccacggcgacagcgacttcggcctgcagtgcagcgccagacccgacatgcccgccagccagcccatcgacatccccgacgccaagaagagaggcaagaagaagaagagaggcagagccaccgacagcttcagcggcagattcgaggacgtgtaccagctgcaggaggacgtgctgggcgagggcgcccacgccagagtgcagacctgcatcaacctgatcaccagccaggagtacgccgtgaagatcatcgagaagcagcccggccacatcagaagcagagtgttcagagaggtggagatgctgtaccagtgccagggccacagaaacgtgctggagctgatcgagttcttcgaggaggaggacagattctacctggtgttcgagaagatgagaggcggcagcatcctgagccacatccacaagagaagacacttcaacgagctggaggccagcgtggtggtgcaggacgtggccagcgccctggacttcctgcacaacaagggcatcgcccacagagacctgaagcccgagaacatcctgtgcgagcaccccaaccaggtgagccccgtgaagatctgcgacttcgacctgggcagcggcatcaagctgaacggcgactgcagccccatcagcacccccgagctgctgaccccctgcggcagcgccgagtacatggcccccgaggtggtggaggccttcagcgaggaggccagcatctacgacaagagatgcgacctgtggagcctgggcgtgatcctgtacatcctgctgagcggctacccccccttcgtgggcagatgcggcagcgactgcggctgggacagaggcgaggcctgccccgcctgccagaacatgctgttcgagagcatccaggagggcaagtacgagttccccgacaaggactgggcccacatcagctgcgccgccaaggacctgatcagcaagctgctggtgagagacgccaagcagagactgagcgccgcccaggtgctgcagcacccctgggtgcagggctgcgcccccgagaacaccctgcccacccccatggtgctgcagagatgggacagccacttcctgctgcccccccacccctgcagaatccacgtgagacccggcggcctggtgagaaccgtgaccgtgaacgagtag

SEQ ID NO: 87997 - DNA, 1005 bp, synthetic construct
  misc_feature 1..1005: note = Description of Artificial Sequence: Synthetic coding sequence
  source 1..1005: mol_type = other DNA
atgctgtaccagtgccagggccacagaaacgtgctggagctgatcgagttcttcgaggaggaggacagattctacctggtgttcgagaagatgagaggcggcagcatcctgagccacatccacaagagaagacacttcaacgagctggaggccagcgtggtggtgcaggacgtggccagcgccctggacttcctgcacaacaagggcatcgcccacagagacctgaagcccgagaacatcctgtgcgagcaccccaaccaggtgagccccgtgaagatctgcgacttcgacctgggcagcggcatcaagctgaacggcgactgcagccccatcagcacccccgagctgctgaccccctgcggcagcgccgagtacatggcccccgaggtggtggaggccttcagcgaggaggccagcatctacgacaagagatgcgacctgtggagcctgggcgtgatcctgtacatcctgctgagcggctacccccccttcgtgggcagatgcggcagcgactgcggctgggacagaggcgaggcctgccccgcctgccagaacatgctgttcgagagcatccaggagggcaagtacgagttccccgacaaggactgggcccacatcagctgcgccgccaaggacctgatcagcaagctgctggtgagagacgccaagcagagactgagcgccgcccaggtgctgcagcacccctgggtgcagggctgcgcccccgagaacaccctgcccacccccatggtgctgcagagaaacagctgcgccaaggacctgaccagcttcgccgccgaggccatcgccatgaacagacagctggcccagcacgacgaggacctggccgaggaggaggccgccggccagggccagcccgtgctggtgagagccaccagcagatgcctgcagctgagcccccccagccagagcaagctggcccagagaagacagagagccagcctgagcagcgcccccgtggtgctggtgggcgaccacgcctag

SEQ ID NO: 87998 - DNA, 1218 bp, synthetic construct
  misc_feature 1..1218: note = Description of Artificial Sequence: Synthetic coding sequence
  source 1..1218: mol_type = other DNA
atgcccgccagccagcccatcgacatccccgacgccaagaagagaggcaagaagaagaagagaggcagagccaccgacagcttcagcggcagattcgaggacgtgtaccagctgcaggaggacgtgctgggcgagggcgcccacgccagagtgcagacctgcatcaacctgatcaccagccaggagtacgccgtgaagatcatcgagaagcagcccggccacatcagaagcagagtgttcagagaggtggagatgctgtaccagtgccagggccacagaaacgtgctggagctgatcgagaagatgagaggcggcagcatcctgagccacatccacaagagaagacacttcaacgagctggaggccagcgtggtggtgcaggacgtggccagcgccctggacttcctgcacaacaagggcatcgcccacagagacctgaagcccgagaacatcctgtgcgagcaccccaaccaggtgagccccgtgaagatctgcgacttcgacctgggcagcggcatcaagctgaacggcgactgcagccccatcagcacccccgagctgctgaccccctgcggcagcgccgagtacatggcccccgaggtggtggaggccttcagcgaggaggccagcatctacgacaagagatgcgacctgtggagcctgggcgtgatcctgtacatcctgctgagcggctacccccccttcgtgggcagatgcggcagcgactgcggctgggacagaggcgaggcctgccccgcctgccagaacatgctgttcgagagcatccaggagggcaagtacgagttccccgacaaggactgggcccacatcagctgcgccgccaaggacctgatcagcaagctgctggtgagagacgccaagcagagactgagcgccgcccaggtgctgcagcacccctgggtgcagggctgcgcccccgagaacaccctgcccacccccatggtgctgcagagaaacagctgcgccaaggacctgaccagcttcgccgccgaggccatcgccatgaacagacagctggcccagcacgacgaggacctggccgaggaggaggccgccggccagggccagcccgtgctggtgagagccaccagcagatgcctgcagctgagcccccccagccagagcaagctggcccagagaagacagagagccagcctgagcagcgcccccgtggtgctggtgggcgaccacgcctag

SEQ ID NO: 87999 - DNA, 2388 bp, synthetic construct
  misc_feature 1..2388: note = Description of Artificial Sequence: Synthetic coding sequence
  source 1..2388: mol_type = other DNA
atgagcgccagaacccccctgcccaccgtgaacgagagagacaccgagaaccacaccagcgtggacggctacaccgagccccacatccagcccaccaagagcagcagcagacagaacatccccagatgcagaaacagcatcaccagcgccaccgacgagcagccccacatcggcaactacagactgcagaagaccatcggcaagggcaacttcgccaaggtgaagctggccagacacgtgctgaccggcagagaggtggccgtgaagatcatcgacaagacccagctgaaccccaccagcctgcagaagctgttcagagaggtgagaatcatgaagatcctgaaccaccccaacatcgtgaagctgttcgaggtgatcgagaccgagaagaccctgtacctggtgatggagtacgccagcggcggcgaggtgttcgactacctggtggcccacggcagaatgaaggagaaggaggccagagccaagttcagacagatcgtgagcgccgtgcagtactgccaccagaagtacatcgtgcacagagacctgaaggccgagaacctgctgctggacggcgacatgaacatcaagatcgccgacttcggcttcagcaacgagttcaccgtgggcaacaagctggacaccttctgcggcagccccccctacgccgcccccgagctgttccagggcaagaagtacgacggccccgaggtggacgtgtggagcctgggcgtgatcctgtacaccctggtgagcggcagcctgcccttcgacggccagaacctgaaggagctgagagagagagtgctgagaggcaagtacagaatccccttctacatgagcaccgactgcgagaacctgctgaagaagctgctggtgctgaaccccatcaagagaggcagcctggagcagatcatgaaggacagatggatgaacgtgggccacgaggaggaggagctgaagccctacaccgagcccgaccccgacttcaacgacaccaagagaatcgacatcatggtgaccatgggcttcgccagagacgagatcaacgacgccctgatcaaccagaagtacgacgaggtgatggccacctacatcctgctgggcagaaagccccccgagttcgagggcggcgagagcctgagcagcggcaacctgtgccagagaagcagacccagcagcgacctgaacaacagcaccctgcagagccccgcccacctgaaggtgcagagaagcatcagcgccaaccagaagcagagaagattcagcgaccacgccggccccagcatcccccccgccgtgagctacaccaagagaccccaggccaacagcgtggagagcgagcagaaggaggagtgggacaaggacgtggccagaaagctgggcagcaccaccgtgggcagcaagagcgagatgaccgccagccccctggtgggccccgagagaaagaagagcagcaccatccccagcaacaacgtgtacagcggcggcagcatggccagaagaaacacctacgtgtgcgagagaaccaccgacagatacgtggccctgcagaacggcaaggacagcagcctgaccgagatgagcgtgagcagcatcagcagcgccggcagcagcgtggccagcgccgtgcccagcgccagacccagacaccagaagagcatgagcaccagcggccaccccatcaaggtgaccctgcccaccatcaaggacggcagcgaggcctacagacccggcaccacccagagagtgcccgccgccagccccagcgcccacagcatcagcaccgccacccccgacagaaccagattccccagaggcagcagcagcagaagcaccttccacggcgagcagctgagagagagaagaagcgtggcctacaacggcccccccgccagccccagccacgagaccggcgccttcgcccacgccagaagaggcaccagcaccggcatcatcagcaagatcaccagcaagttcgtgagaagagaccccagcgagggcgaggccagcggcagaaccgacaccagcagaagcaccagcggcgagcccaaggagagagacaaggaggagggcaaggacagcaagcccagaagcctgagattcacctggagcatgaagaccaccagcagcatggaccccaacgacatgatgagagagatcagaaaggtgctggacgccaacaactgcgactacgagcagaaggagagattcctgctgttctgcgtgcacggcgacgccagacaggacagcctggtgcagtgggagatggaggtgtgcaagctgcccagactgagcctgaacggcgtgagattcaagagaatcagcggcaccagcatcgccttcaagaacatcgccagcaagatcgccaacgagctgaagctgtag

SEQ ID NO: 88000 - DNA, 2277 bp, synthetic construct
  misc_feature 1..2277: note = Description of Artificial Sequence: Synthetic coding sequence
  source 1..2277: mol_type = other DNA
atgagcgccagaacccccctgcccaccgtgaacgagagagacaccgagaaccacaccagcgtggacggctacaccgagccccacatccagcccaccaagagcagcagcagacagaacatccccagatgcagaaacagcatcaccagcgccaccgacgagcagccccacatcggcaactacagactgcagaagaccatcggcaagggcaacttcgccaaggtgaagctggccagacacgtgctgaccggcagagaggtggccgtgaagatcatcgacaagacccagctgaaccccaccagcctgcagaagctgttcagagaggtgagaatcatgaagatcctgaaccaccccaacatcggcgaggtgttcgactacctggtggcccacggcagaatgaaggagaaggaggccagagccaagttcagacagatcgtgagcgccgtgcagtactgccaccagaagtacatcgtgcacagagacctgaaggccgagaacctgctgctggacggcgacatgaacatcaagatcgccgacttcggcttcagcaacgagttcaccgtgggcaacaagctggacaccttctgcggcagccccccctacgccgcccccgagctgttccagggcaagaagtacgacggccccgaggtggacgtgtggagcctgggcgtgatcctgtacaccctggtgagcggcagcctgcccttcgacggccagaacctgaaggagctgagagagagagtgctgagaggcaagtacagaatccccttctacatgagcaccgactgcgagaacctgctgaagaagctgctggtgctgaaccccatcaagagaggcagcctggagcagatcatgaaggacagatggatgaacgtgggccacgaggaggaggagctgaagccctacaccgagcccgaccccgacttcaacgacaccaagagaatcgacatcatggtgaccatgggcttcgccagagacgagatcaacgacgccctgatcaaccagaagtacgacgaggtgatggccacctacatcctgctgggcagaaagccccccgagttcgagggcggcgagagcctgagcagcggcaacctgtgccagagaagcagacccagcagcgacctgaacaacagcaccctgcagagccccgcccacctgaaggtgcagagaagcatcagcgccaaccagaagcagagaagattcagcgaccacgccggccccagcatcccccccgccgtgagctacaccaagagaccccaggccaacagcgtggagagcgagcagaaggaggagtgggacaaggacgtggccagaaagctgggcagcaccaccgtgggcagcaagagcgagatgaccgccagccccctggtgggccccgagagaaagaagagcagcaccatccccagcaacaacgtgtacagcggcggcagcatggccagaagaaacacctacgtgtgcgagagaaccaccgacagatacgtggccctgcagaacggcaaggacagcagcctgaccgagatgagcgtgagcagcatcagcagcgccggcagcagcgtggccagcgccgtgcccagcgccagacccagacaccagaagagcatgagcaccagcggccaccccatcaaggtgaccctgcccaccatcaaggacggcagcgaggcctacagacccggcaccacccagagagtgcccgccgccagccccagcgcccacagcatcagcaccgccacccccgacagaaccagattccccagaggcagcagcagcagaagcaccttccacggcgagcagctgagagagagaagaagcgtggcctacaacggcccccccgccagccccagccacgagaccggcgccttcgcccacgccagaagaggcaccagcaccggcatcatcagcaagatcaccagcaagttcgtgagaagaagcaccagcggcgagcccaaggagagagacaaggaggagggcaaggacagcaagcccagaagcctgagattcacctggagcatgaagaccaccagcagcatggaccccaacgacatgatgagagagatcagaaaggtgctggacgccaacaactgcgactacgagcagaaggagagattcctgctgttctgcgtgcacggcgacgccagacaggacagcctggtgcagtgggagatggaggtgtgcaagctgcccagactgagcctgaacggcgtgagattcaagagaatcagcggcaccagcatcgccttcaagaacatcgccagcaagatcgccaacgagctgaagctgtag

SEQ ID NO: 88001 - DNA, 1938 bp, synthetic construct
  misc_feature 1..1938: note = Description of Artificial Sequence: Synthetic coding sequence
  source 1..1938: mol_type = other DNA
atggagtacgccagcggcggcgaggtgttcgactacctggtggcccacggcagaatgaaggagaaggaggccagagccaagttcagacagatcgtgagcgccgtgcagtactgccaccagaagtacatcgtgcacagagacctgaaggccgagaacctgctgctggacggcgacatgaacatcaagatcgccgacttcggcttcagcaacgagttcaccgtgggcaacaagctggacaccttctgcggcagccccccctacgccgcccccgagctgttccagggcaagaagtacgacggccccgaggtggacgtgtggagcctgggcgtgatcctgtacaccctggtgagcggcagcctgcccttcgacggccagaacctgaaggagctgagagagagagtgctgagaggcaagtacagaatccccttctacatgagcaccgactgcgagaacctgctgaagaagctgctggtgctgaaccccatcaagagaggcagcctggagcagatcatgaaggacagatggatgaacgtgggccacgaggaggaggagctgaagccctacaccgagcccgaccccgacttcaacgacaccaagagaatcgacatcatggtgaccatgggcttcgccagagacgagatcaacgacgccctgatcaaccagaagtacgacgaggtgatggccacctacatcctgctgggcagaaagccccccgagttcgagggcggcgagagcctgagcagcggcaacctgtgccagagaagcagacccagcagcgacctgaacaacagcaccctgcagagccccgcccacctgaaggtgcagagaagcatcagcgccaaccagaagcagagaagattcagcgaccacgccggccccagcatcccccccgccgtgagctacaccaagagaccccaggccaacagcgtggagagcgagcagaaggaggagtgggacaaggacgtggccagaaagctgggcagcaccaccgtgggcagcaagagcgagatgaccgccagccccctggtgggccccgagagaaagaagagcagcaccatccccagcaacaacgtgtacagcggcggcagcatggccagaagaaacacctacgtgtgcgagagaaccaccgacagatacgtggccctgcagaacggcaaggacagcagcctgaccgagatgagcgtgagcagcatcagcagcgccggcagcagcgtggccagcgccgtgcccagcgccagacccagacaccagaagagcatgagcaccagcggccaccccatcaaggtgaccctgcccaccatcaaggacggcagcgaggcctacagacccggcaccacccagagagtgcccgccgccagccccagcgcccacagcatcagcaccgccacccccgacagaaccagattccccagaggcagcagcagcagaagcaccttccacggcgagcagctgagagagagaagaagcgtggcctacaacggcccccccgccagccccagccacgagaccggcgccttcgcccacgccagaagaggcaccagcaccggcatcatcagcaagatcaccagcaagttcgtgagaagaagcaccagcggcgagcccaaggagagagacaaggaggagggcaaggacagcaagcccagaagcctgagattcacctggagcatgaagaccaccagcagcatggaccccaacgacatgatgagagagatcagaaaggtgctggacgccaacaactgcgactacgagcagaaggagagattcctgctgttctgcgtgcacggcgacgccagacaggacagcctggtgcagtgggagatggaggtgtgcaagctgcccagactgagcctgaacggcgtgagattcaagagaatcagcggcaccagcatcgccttcaagaacatcgccagcaagatcgccaacgagctgaagctgtag

SEQ ID NO: 88002 - DNA, 2340 bp, synthetic construct
  misc_feature 1..2340: note = Description of Artificial Sequence: Synthetic coding sequence
  source 1..2340: mol_type = other DNA
atgagcagcgccagaacccccctgcccaccctgaacgagagagacaccgagcagcccaccctgggccacctggacagcaagcccagcagcaagagcaacatgatcagaggcagaaacagcgccaccagcgccgacgagcagccccacatcggcaactacagactgctgaagaccatcggcaagggcaacttcgccaaggtgaagctggccagacacatcctgaccggcaaggaggtggccgtgaagatcatcgacaagacccagctgaacagcagcagcctgcagaagctgttcagagaggtgagaatcatgaaggtgctgaaccaccccaacatcgtgaagctgttcgaggtgatcgagaccgagaagaccctgtacctggtgatggagtacgccagcggcggcgaggtgttcgactacctggtggcccacggcagaatgaaggagaaggaggccagagccaagttcagacagatcgtgagcgccgtgcagtactgccaccagaagttcatcgtgcacagagacctgaaggccgagaacctgctgctggacgccgacatgaacatcaagatcgccgacttcggcttcagcaacgagttcaccttcggcaacaagctggacaccttctgcggcagccccccctacgccgcccccgagctgttccagggcaagaagtacgacggccccgaggtggacgtgtggagcctgggcgtgatcctgtacaccctggtgagcggcagcctgcccttcgacggccagaacctgaaggagctgagagagagagtgctgagaggcaagtacagaatccccttctacatgagcaccgactgcgagaacctgctgaagaagttcctgatcctgaaccccagcaagagaggcaccctggagcagatcatgaaggacagatggatgaacgtgggccacgaggacgacgagctgaagccctacgtggagcccctgcccgactacaaggaccccagaagaaccgagctgatggtgagcatgggctacaccagagaggagatccaggacagcctggtgggccagagatacaacgaggtgatggccacctacctgctgctgggctacaagagcagcgagctggagggcgacaccatcaccctgaagcccagacccagcgccgacctgaccaacagcagcgcccccagccccagccacaaggtgcagagaagcgtgagcgccaaccccaagcagagaagattcagcgaccaggccgccggccccgccatccccaccagcaacagctacagcaagaagacccagagcaacaacgccgagaacaagagacccgaggaggacagagagagcggcagaaaggccagcagcaccgccaaggtgcccgccagccccctgcccggcctggagagaaagaagaccacccccacccccagcaccaacagcgtgctgagcaccagcaccaacagaagcagaaacagccccctgctggagagagccagcctgggccaggccagcatccagaacggcaaggacagcctgaccatgcccggcagcagagccagcaccgccagcgccagcgccgccgtgagcgccgccagacccagacagcaccagaagagcatgagcgccagcgtgcaccccaacaaggccagcggcctgccccccaccgagagcaactgcgaggtgcccagacccagcaccgccccccagagagtgcccgtggccagccccagcgcccacaacatcagcagcagcggcggcgcccccgacagaaccaacttccccagaggcgtgagcagcagaagcaccttccacgccggccagctgagacaggtgagagaccagcagaacctgccctacggcgtgacccccgccagccccagcggccacagccagggcagaagaggcgccagcggcagcatcttcagcaagttcaccagcaagttcgtgagaagaaacctgaacgagcccgagagcaaggacagagtggagaccctgagaccccacgtggtgggcagcggcggcaacgacaaggagaaggaggagttcagagaggccaagcccagaagcctgagattcacctggagcatgaagaccaccagcagcatggagcccaacgagatgatgagagagatcagaaaggtgctggacgccaacagctgccagagcgagctgcacgagaagtacatgctgctgtgcatgcacggcacccccggccacgaggacttcgtgcagtgggagatggaggtgtgcaagctgcccagactgagcctgaacggcgtgagattcaagagaatcagcggcaccagcatggccttcaagaacatcgccagcaagatcgccaacgagctgaagctgtag

SEQ ID NO: 88003 - DNA, 2130 bp, synthetic construct
  misc_feature 1..2130: note = Description of Artificial Sequence: Synthetic coding sequence
  source 1..2130: mol_type = other DNA
atgagcagcgccagaacccccctgcccaccctgaacgagagagacaccgagcagcccaccctgggccacctggacagcaagcccagcagcaagagcaacatgatcagaggcagaaacagcgccaccagcgccgacgagcagccccacatcggcaactacagactgctgaagaccatcggcaagggcaacttcgccaaggtgaagctggccagacacatcctgaccggcaaggaggtggccgtgaagatcatcgacaagacccagctgaacagcagcagcctgcagaagctgttcagagaggtgagaatcatgaaggtgctgaaccaccccaacatcgtgaagctgttcgaggtgatcgagaccgagaagaccctgtacctggtgatggagtacgccagcggcggcgaggtgttcgactacctggtggcccacggcagaatgaaggagaaggaggccagagccaagttcagacagatcgtgagcgccgtgcagtactgccaccagaagttcatcgtgcacagagacctgaaggccgagaacctgctgctggacgccgacatgaacatcaagatcgccgacttcggcttcagcaacgagttcaccttcggcaacaagctggacaccttctgcggcagccccccctacgccgcccccgagctgttccagggcaagaagtacgacggccccgaggtggacgtgtggagcctgggcgtgatcctgtacaccctggtgagcggcagcctgcccttcgacggccagaacctgaaggagctgagagagagagtgctgagaggcaagtacagaatccccttctacatgagcaccgactgcgagaacctgctgaagaagttcctgatcctgaaccccagcaagagaggcaccctggagcagatcatgaaggacagatggatgaacgtgggccacgaggacgacgagctgaagccctacgtggagcccctgcccgactacaaggaccccagaagaaccgagctgatggtgagcatgggctacaccagagaggagatccaggacagcctggtgggccagagatacaacgaggtgatggccacctacctgctgctgggctacaagagcagcgagctggagggcgacaccatcaccctgaagcccagacccagcgccgacctgaccaacagcagcgcccccagccccagccacaaggtgcagagaagcgtgagcgccaaccccaagcagagaagattcagcgaccaggccggccccgccatccccaccagcaacagctacagcaagaagacccagagcaacaacgccgagaacaagagacccgaggaggacagagagagcggcagaaaggccagcagcaccgccaaggtgcccgccagccccctgcccggcctggagagaaagaagaccacccccacccccagcaccaacagcgtgctgagcaccagcaccaacagaagcagaaacagccccctgctggagagagccagcctgggccaggccagcatccagaacggcaaggacagcaccgccccccagagagtgcccgtggccagccccagcgcccacaacatcagcagcagcggcggcgcccccgacagaaccaacttccccagaggcgtgagcagcagaagcaccttccacgccggccagctgagacaggtgagagaccagcagaacctgccctacggcgtgacccccgccagccccagcggccacagccagggcagaagaggcgccagcggcagcatcttcagcaagttcaccagcaagttcgtgagaagaccccacgtggtgggcagcggcggcaacgacaaggagaaggaggagttcagagaggccaagcccagaagcctgagattcacctggagcatgaagaccaccagcagcatggagcccaacgagatgatgagagagatcagaaaggtgctggacgccaacagctgccagagcgagctgcacgagaagtacatgctgctgtgcatgcacggcacccccggccacgaggacttcgtgcagtgggagatggaggtgtgcaagctgcccagactgagcctgaacggcgtgagattcaagagaatcagcggcaccagcatggccttcaagaacatcgccagcaagatcgccaacgagctgaagctgtag

SEQ ID NO: 88004 - DNA, 2160 bp, synthetic construct
  misc_feature 1..2160: note = Description of Artificial Sequence: Synthetic coding sequence
  source 1..2160: mol_type = other DNA
atgagcagcgccagaacccccctgcccaccctgaacgagagagacaccgagcagcccaccctgggccacctggacagcaagcccagcagcaagagcaacatgatcagaggcagaaacagcgccaccagcgccgacgagcagccccacatcggcaactacagactgctgaagaccatcggcaagggcaacttcgccaaggtgaagctggccagacacatcctgaccggcaaggaggtggccgtgaagatcatcgacaagacccagctgaacagcagcagcctgcagaagctgttcagagaggtgagaatcatgaaggtgctgaaccaccccaacatcgtgaagctgttcgaggtgatcgagaccgagaagaccctgtacctggtgatggagtacgccagcggcggcgaggtgttcgactacctggtggcccacggcagaatgaaggagaaggaggccagagccaagttcagacagatcgtgagcgccgtgcagtactgccaccagaagttcatcgtgcacagagacctgaaggccgagaacctgctgctggacgccgacatgaacatcaagatcgccgacttcggcttcagcaacgagttcaccttcggcaacaagctggacaccttctgcggcagccccccctacgccgcccccgagctgttccagggcaagaagtacgacggccccgaggtggacgtgtggagcctgggcgtgatcctgtacaccctggtgagcggcagcctgcccttcgacggccagaacctgaaggagctgagagagagagtgctgagaggcaagtacagaatccccttctacatgagcaccgactgcgagaacctgctgaagaagttcctgatcctgaaccccagcaagagaggcaccctggagcagatcatgaaggacagatggatgaacgtgggccacgaggacgacgagctgaagccctacgtggagcccctgcccgactacaaggaccccagaagaaccgagctgatggtgagcatgggctacaccagagaggagatccaggacagcctggtgggccagagatacaacgaggtgatggccacctacctgctgctgggctacaagagcagcgagctggagggcgacaccatcaccctgaagcccagacccagcgccgacctgaccaacagcagcgcccccagccccagccacaaggtgcagagaagcgtgagcgccaaccccaagcagagaagattcagcgaccaggccgccggccccgccatccccaccagcaacagctacagcaagaagacccagagcaacaacgccgagaacaagagacccgaggaggacagagagagcggcagaaaggccagcagcaccgccaaggtgcccgccagccccctgcccggcctggagagaaagaagaccacccccacccccagcaccaacagcgtgctgagcaccagcaccaacagaagcagaaacagccccctgctggagagagccagcctgggccaggccagcatccagaacggcaaggacagcaccgccccccagagagtgcccgtggccagccccagcgcccacaacatcagcagcagcggcggcgcccccgacagaaccaacttccccagaggcgtgagcagcagaagcaccttccacgccggccagctgagacaggtgagagaccagcagaacctgccctacggcgtgacccccgccagccccagcggccacagccagggcagaagaggcgccagcggcagcatcttcagcaagttcaccagcaagttcgtgagaagaaacctgagcttcagattcgccagaagaccccacgtggtgggcagcggcggcaacgacaaggagaaggaggagttcagagaggccaagcccagaagcctgagattcacctggagcatgaagaccaccagcagcatggagcccaacgagatgatgagagagatcagaaaggtgctggacgccaacagctgccagagcgagctgcacgagaagtacatgctgctgtgcatgcacggcacccccggccacgaggacttcgtgcagtgggagatggaggtgtgcaagctgcccagactgagcctgaacggcgtgagattcaagagaatcagcggcaccagcatggccttcaagaacatcgccagcaagatcgccaacgagctgaagctgtag

SEQ ID NO: 88005 - DNA, 2322 bp, synthetic construct
  misc_feature 1..2322: note = Description of Artificial Sequence: Synthetic coding sequence
  source 1..2322: mol_type = other DNA
atgagcagcgccagaacccccctgcccaccctgaacgagagagacaccgagcagcccaccctgggccacctggacagcaagcccagcagcaagagcaacatgatcagaggcagaaacagcgccaccagcgccgacgagcagccccacatcggcaactacagactgctgaagaccatcggcaagggcaacttcgccaaggtgaagctggccagacacatcctgaccggcaaggaggtggccgtgaagatcatcgacaagacccagctgaacagcagcagcctgcagaagctgttcagagaggtgagaatcatgaaggtgctgaaccaccccaacatcgtgaagctgttcgaggtgatcgagaccgagaagaccctgtacctggtgatggagtacgccagcggcggcgaggtgttcgactacctggtggcccacggcagaatgaaggagaaggaggccagagccaagttcagacagatcgtgagcgccgtgcagtactgccaccagaagttcatcgtgcacagagacctgaaggccgagaacctgctgctggacgccgacatgaacatcaagatcgccgacttcggcttcagcaacgagttcaccttcggcaacaagctggacaccttctgcggcagccccccctacgccgcccccgagctgttccagggcaagaagtacgacggccccgaggtggacgtgtggagcctgggcgtgatcctgtacaccctggtgagcggcagcctgcccttcgacggccagaacctgaaggagctgagagagagagtgctgagaggcaagtacagaatccccttctacatgagcaccgactgcgagaacctgctgaagaagttcctgatcctgaaccccagcaagagaggcaccctggagcagatcatgaaggacagatggatgaacgtgggccacgaggacgacgagctgaagccctacgtggagcccctgcccgactacaaggaccccagaagaaccgagctgatggtgagcatgggctacaccagagaggagatccaggacagcctggtgggccagagatacaacgaggtgatggccacctacctgctgctgggctacaagagcagcgagctggagggcgacaccatcaccctgaagcccagacccagcgccgacctgaccaacagcagcgcccccagccccagccacaaggtgcagagaagcgtgagcgccaaccccaagcagagaagattcagcgaccaggccgccggccccgccatccccaccagcaacagctacagcaagaagacccagagcaacaacgccgagaacaagagacccgaggaggacagagagagcggcagaaaggccagcagcaccgccaaggtgcccgccagccccctgcccggcctggagagaaagaagaccacccccacccccagcaccaacagcgtgctgagcaccagcaccaacagaagcagaaacagccccctgctggagagagccagcctgggccaggccagcatccagaacggcaaggacagcctgaccatgcccggcagcagagccagcaccgccagcgccagcgccgccgtgagcgccgccagacccagacagcaccagaagagcatgagcgccagcgtgcaccccaacaaggccagcggcctgccccccaccgagagcaactgcgaggtgcccagacccagcaccgccccccagagagtgcccgtggccagccccagcgcccacaacatcagcagcagcggcggcgcccccgacagaaccaacttccccagaggcgtgagcagcagaagcaccttccacgccggccagctgagacaggtgagagaccagcagaacctgccctacggcgtgacccccgccagccccagcggccacagccagggcagaagaggcgccagcggcagcatcttcagcaagttcaccagcaagttcgtgagaagaaacctgagcttcagattcgccagaagaccccacgtggtgggcagcggcggcaacgacaaggagaaggaggagttcagagaggccaagcccagaagcctgagattcacctggagcatgaagaccaccagcagcatggagcccaacgagatgatgagagagatcagaaaggtgctggacgccaacagctgccagagcgagctgcacgagaagtacatgctgctgtgcatgcacggcacccccggccacgaggacttcgtgcagtgggagatggaggtgtgcaagctgcccagactgagcctgaacggcgtgagattcaagagaatcagcggcaccagcatggccttcaagaacatcgccagcaagatcgccaacgagctgaagctgtag

SEQ ID NO: 88006 - DNA, 2076 bp, synthetic construct
  misc_feature 1..2076: note = Description of Artificial Sequence: Synthetic coding sequence
  source 1..2076: mol_type = other DNA
atgatcagaggcagaaacagcgccaccagcgccgacgagcagccccacatcggcaactacagactgctgaagaccatcggcaagggcaacttcgccaaggtgaagctggccagacacatcctgaccggcaaggaggtggccgtgaagatcatcgacaagacccagctgaacagcagcagcctgcagaagctgttcagagaggtgagaatcatgaaggtgctgaaccaccccaacatcgtgaagctgttcgaggtgatcgagaccgagaagaccctgtacctggtgatggagtacgccagcggcggcgaggtgttcgactacctggtggcccacggcagaatgaaggagaaggaggccagagccaagttcagacagatcgtgagcgccgtgcagtactgccaccagaagttcatcgtgcacagagacctgaaggccgagaacctgctgctggacgccgacatgaacatcaagatcgccgacttcggcttcagcaacgagttcaccttcggcaacaagctggacaccttctgcggcagccccccctacgccgcccccgagctgttccagggcaagaagtacgacggccccgaggtggacgtgtggagcctgggcgtgatcctgtacaccctggtgagcggcagcctgcccttcgacggccagaacctgaaggagctgagagagagagtgctgagaggcaagtacagaatccccttctacatgagcaccgactgcgagaacctgctgaagaagttcctgatcctgaaccccagcaagagaggcaccctggagcagatcatgaaggacagatggatgaacgtgggccacgaggacgacgagctgaagccctacgtggagcccctgcccgactacaaggaccccagaagaaccgagctgatggtgagcatgggctacaccagagaggagatccaggacagcctggtgggccagagatacaacgaggtgatggccacctacctgctgctgggctacaagagcagcgagctggagggcgacaccatcaccctgaagcccagacccagcgccgacctgaccaacagcagcgcccccagccccagccacaaggtgcagagaagcgtgagcgccaaccccaagcagagaagattcagcgaccaggccggccccgccatccccaccagcaacagctacagcaagaagacccagagcaacaacgccgagaacaagagacccgaggaggacagagagagcggcagaaaggccagcagcaccgccaaggtgcccgccagccccctgcccggcctggagagaaagaagaccacccccacccccagcaccaacagcgtgctgagcaccagcaccaacagaagcagaaacagccccctgctggagagagccagcctgggccaggccagcatccagaacggcaaggacagcaccgccccccagagagtgcccgtggccagccccagcgcccacaacatcagcagcagcggcggcgcccccgacagaaccaacttccccagaggcgtgagcagcagaagcaccttccacgccggccagctgagacaggtgagagaccagcagaacctgccctacggcgtgacccccgccagccccagcggccacagccagggcagaagaggcgccagcggcagcatcttcagcaagttcaccagcaagttcgtgagaagaaacctgaacgagcccgagagcaaggacagagtggagaccctgagaccccacgtggtgggcagcggcggcaacgacaaggagaaggaggagttcagagaggccaagcccagaagcctgagattcacctggagcatgaagaccaccagcagcatggagcccaacgagatgatgagagagatcagaaaggtgctggacgccaacagctgccagagcgagctgcacgagaagtacatgctgctgtgcatgcacggcacccccggccacgaggacttcgtgcagtgggagatggaggtgtgcaagctgcccagactgagcctgaacggcgtgagattcaagagaatcagcggcaccagcatggccttcaagaacatcgccagcaagatcgccaacgagctgaagctgtag

SEQ ID NO: 88007 - DNA, 2367 bp, synthetic construct
  misc_feature 1..2367: note = Description of Artificial Sequence: Synthetic coding sequence
  source 1..2367: mol_type = other DNA
atgagcagcgccagaacccccctgcccaccctgaacgagagagacaccgagcagcccaccctgggccacctggacagcaagcccagcagcaagagcaacatgatcagaggcagaaacagcgccaccagcgccgacgagcagccccacatcggcaactacagactgctgaagaccatcggcaagggcaacttcgccaaggtgaagctggccagacacatcctgaccggcaaggaggtggccgtgaagatcatcgacaagacccagctgaacagcagcagcctgcagaagctgttcagagaggtgagaatcatgaaggtgctgaaccaccccaacatcgtgaagctgttcgaggtgatcgagaccgagaagaccctgtacctggtgatggagtacgccagcggcggcgaggtgttcgactacctggtggcccacggcagaatgaaggagaaggaggccagagccaagttcagacagatcgtgagcgccgtgcagtactgccaccagaagttcatcgtgcacagagacctgaaggccgagaacctgctgctggacgccgacatgaacatcaagatcgccgacttcggcttcagcaacgagttcaccttcggcaacaagctggacaccttctgcggcagccccccctacgccgcccccgagctgttccagggcaagaagtacgacggccccgaggtggacgtgtggagcctgggcgtgatcctgtacaccctggtgagcggcagcctgcccttcgacggccagaacctgaaggagctgagagagagagtgctgagaggcaagtacagaatccccttctacatgagcaccgactgcgagaacctgctgaagaagttcctgatcctgaaccccagcaagagaggcaccctggagcagatcatgaaggacagatggatgaacgtgggccacgaggacgacgagctgaagccctacgtggagcccctgcccgactacaaggaccccagaagaaccgagctgatggtgagcatgggctacaccagagaggagatccaggacagcctggtgggccagagatacaacgaggtgatggccacctacctgctgctgggctacaagagcagcgagctggagggcgacaccatcaccctgaagcccagacccagcgccgacctgaccaacagcagcgcccccagccccagccacaaggtgcagagaagcgtgagcgccaaccccaagcagagaagattcagcgaccaggccgccggccccgccatccccaccagcaacagctacagcaagaagacccagagcaacaacgccgagaacaagagacccgaggaggacagagagagcggcagaaaggccagcagcaccgccaaggtgcccgccagccccctgcccggcctggagagaaagaagaccacccccacccccagcaccaacagcgtgctgagcaccagcaccaacagaagcagaaacagccccctgctggagagagccagcctgggccaggccagcatccagaacggcaaggacagcctgaccatgcccggcagcagagccagcaccgccagcgccagcgccgccgtgagcgccgccagacccagacagcaccagaagagcatgagcgccagcgtgcaccccaacaaggccagcggcctgccccccaccgagagcaactgcgaggtgcccagacccagcaccgccccccagagagtgcccgtggccagccccagcgcccacaacatcagcagcagcggcggcgcccccgacagaaccaacttccccagaggcgtgagcagcagaagcaccttccacgccggccagctgagacaggtgagagaccagcagaacctgccctacggcgtgacccccgccagccccagcggccacagccagggcagaagaggcgccagcggcagcatcttcagcaagttcaccagcaagttcgtgagaagaaacctgagcttcagattcgccagaagaaacctgaacgagcccgagagcaaggacagagtggagaccctgagaccccacgtggtgggcagcggcggcaacgacaaggagaaggaggagttcagagaggccaagcccagaagcctgagattcacctggagcatgaagaccaccagcagcatggagcccaacgagatgatgagagagatcagaaaggtgctggacgccaacagctgccagagcgagctgcacgagaagtacatgctgctgtgcatgcacggcacccccggccacgaggacttcgtgcagtgggagatggaggtgtgcaagctgcccagactgagcctgaacggcgtgagattcaagagaatcagcggcaccagcatggccttcaagaacatcgccagcaagatcgccaacgagctgaagctgtag

SEQ ID NO: 88008 - DNA, 2076 bp, synthetic construct; identical to SEQ ID NO: 88006
  misc_feature 1..2076: note = Description of Artificial Sequence: Synthetic coding sequence
  source 1..2076: mol_type = other DNA

SEQ ID NO: 88009 - DNA, 2205 bp, synthetic construct
  misc_feature 1..2205: note = Description of Artificial Sequence: Synthetic coding sequence
  source 1..2205: mol_type = other DNA
atgagcagcgccagaacccccctgcccaccctgaacgagagagacaccgagcagcccaccctgggccacctggacagcaagcccagcagcaagagcaacatgatcagaggcagaaacagcgccaccagcgccgacgagcagccccacatcggcaactacagactgctgaagaccatcggcaagggcaacttcgccaaggtgaagctggccagacacatcctgaccggcaaggaggtggccgtgaagatcatcgacaagacccagctgaacagcagcagcctgcagaagctgttcagagaggtgagaatcatgaaggtgctgaaccaccccaacatcgtgaagctgttcgaggtgatcgagaccgagaagaccctgtacctggtgatggagtacgccagcggcggcgaggtgttcgactacctggtggcccacggcagaatgaaggagaaggaggccagagccaagttcagacagatcgtgagcgccgtgcagtactgccaccagaagttcatcgtgcacagagacctgaaggccgagaacctgctgctggacgccgacatgaacatcaagatcgccgacttcggcttcagcaacgagttcaccttcggcaacaagctggacaccttctgcggcagccccccctacgccgcccccgagctgttccagggcaagaagtacgacggccccgaggtggacgtgtggagcctgggcgtgatcctgtacaccctggtgagcggcagcctgcccttcgacggccagaacctgaaggagctgagagagagagtgctgagaggcaagtacagaatccccttctacatgagcaccgactgcgagaacctgctgaagaagttcctgatcctgaaccccagcaagagaggcaccctggagcagatcatgaaggacagatggatgaacgtgggccacgaggacgacgagctgaagccctacgtggagcccctgcccgactacaaggaccccagaagaaccgagctgatggtgagcatgggctacaccagagaggagatccaggacagcctggtgggccagagatacaacgaggtgatggccacctacctgctgctgggctacaagagcagcgagctggagggcgacaccatcaccctgaagcccagacccagcgccgacctgaccaacagcagcgcccccagccccagccacaaggtgcagagaagcgtgagcgccaaccccaagcagagaagattcagcgaccaggccgccggccccgccatccccaccagcaacagctacagcaagaagacccagagcaacaacgccgagaacaagagacccgaggaggacagagagagcggcagaaaggccagcagcaccgccaaggtgcccgccagccccctgcccggcctggagagaaagaagaccacccccacccccagcaccaacagcgtgctgagcaccagcaccaacagaagcagaaacagccccctgctggagagagccagcctgggccaggccagcatccagaacggcaaggacagcaccgccccccagagagtgcccgtggccagccccagcgcccacaacatcagcagcagcggcggcgcccccgacagaaccaacttccccagaggcgtgagcagcagaagcaccttccacgccggccagctgagacaggtgagagaccagcagaacctgccctacggcgtgacccccgccagccccagcggccacagccagggcagaagaggcgccagcggcagcatcttcagcaagttcaccagcaagttcgtgagaagaaacctgagcttcagattcgccagaagaaacctgaacgagcccgagagcaaggacagagtggagaccctgagaccccacgtggtgggcagcggcggcaacgacaaggagaaggaggagttcagagaggccaagcccagaagcctgagattcacctggagcatgaagaccaccagcagcatggagcccaacgagatgatgagagagatcagaaaggtgctggacgccaacagctgccagagcgagctgcacgagaagtacatgctgctgtgcatgcacggcacccccggccacgaggacttcgtgcagtgggagatggaggtgtgcaagctgcccagactgagcctgaacggcgtgagattcaagagaatcagcggcaccagcatggccttcaagaacatcgccagcaagatcgccaacgagctgaagctgtag

SEQ ID NO: 88010 - DNA, 2343 bp, synthetic construct
  misc_feature 1..2343: note = Description of Artificial Sequence: Synthetic coding sequence
  source 1..2343: mol_type = other DNA
atgagcagcgccagaacccccctgcccaccctgaacgagagagacaccgagcagcccaccctgggccacctggacagcaagcccagcagcaagagcaacatgatcagaggcagaaacagcgccaccagcgccgacgagcagccccacatcggcaactacagactgctgaagaccatcggcaagggcaacttcgccaaggtgaagctggccagacacatcctgaccggcaaggaggtggccgtgaagatcatcgacaagacccagctgaacagcagcagcctgcagaagctgttcagagaggtgagaatcatgaaggtgctgaaccaccccaacatcgtgaagctgttcgaggtgatcgagaccgagaagaccctgtacctggtgatggagtacgccagcggcggcgaggtgttcgactacctggtggcccacggcagaatgaaggagaaggaggccagagccaagttcagacagatcgtgagcgccgtgcagtactgccaccagaagttcatcgtgcacagagacctgaaggccgagaacctgctgctggacgccgacatgaacatcaagatcgccgacttcggcttcagcaacgagttcaccttcggcaacaagctggacaccttctgcggcagccccccctacgccgcccccgagctgttccagggcaagaagtacgacggccccgaggtggacgtgtggagcctgggcgtgatcctgtacaccctggtgagcggcagcctgcccttcgacggccagaacctgaaggagctgagagagagagtgctgagaggcaagtacagaatccccttctacatgagcaccgactgcgagaacctgctgaagaagttcctgatcctgaaccccagcaagagaggcaccctggagcagatcatgaaggacagatggatgaacgtgggccacgaggacgacgagctgaagccctacgtggagcccctgcccgactacaaggaccccagaagaaccgagctgatggtgagcatgggctacaccagagaggagatccaggacagcctggtgggccagagatacaacgaggtgatggccacctacctgctgctgggctacaagagcagcgagctggagggcgacaccatcaccctgaagcccagacccagcgccgacctgaccaacagcagcgcccccagccccagccacaaggtgcagagaagcgtgagcgccaaccccaagcagagaagattcagcgaccaggccggccccgccatccccaccagcaacagctacagcaagaagacccagagcaacaacgccgagaacaagagacccgaggaggacagagagagcggcagaaaggccagcagcaccgccaaggtgcccgccagccccctgcccggcctggagagaaagaagaccacccccacccccagcaccaacagcgtgctgagcaccagcaccaacagaagcagaaacagccccctgctggagagagccagcctgggccaggccagcatccagaacggcaaggacagcctgaccatgcccggcagcagagccagcaccgccagcgccagcgccgccgtgagcgccgccagacccagacagcaccagaagagcatgagcgccagcgtgcaccccaacaaggccagcggcctgccccccaccgagagcaactgcgaggtgcccagacccagacaggtgaccgccccccagagagtgcccgtggccagccccagcgcccacaacatcagcagcagcggcggcgcccccgacagaaccaacttccccagaggcgtgagcagcagaagcaccttccacgccggccagctgagacaggtgagagaccagcagaacctgccctacggcgtgacccccgccagccccagcggccacagccagggcagaagaggcgccagcggcagcatcttcagcaagttcaccagcaagttcgtgagaagaaacctgaacgagcccgagagcaaggacagagtggagaccctgagaccccacgtggtgggcagcggcggcaacgacaaggagaaggaggagttcagagaggccaagcccagaagcctgagattcacctggagcatgaagaccaccagcagcatggagcccaacgagatgatgagagagatcagaaaggtgctggacgccaacagctgccagagcgagctgcacgagaagtacatgctgctgtgcatgcacggcacccccggccacgaggacttcgtgcagtgggagatggaggtgtgcaagctgcccagactgagcctgaacggcgtgagattcaagagaatcagcggcaccagcatggccttcaagaacatcgccagcaagatcgccaacgagctgaagctgtag

SEQ ID NO: 88011 - DNA, 126 bp, synthetic construct
  misc_feature 1..126: note = Description of Artificial Sequence: Synthetic coding sequence
  source 1..126: mol_type = other DNA
atgagcagcgccagaacccccctgcccaccctgaacgagagagacaccgagcagcccaccctgggccacctggacagcaagcccagcagcaagagcaacatgatcagaggcagaaacagcgcctag

SEQ ID NO: 88012 - DNA, 2175 bp, synthetic construct
  misc_feature 1..2175: note = Description of Artificial Sequence: Synthetic coding sequence
  source 1..2175: mol_type = other DNA
atgagcagcgccagaacccccctgcccaccctgaacgagagagacaccgagcagcccaccctgggccacctggacagcaagcccagcagcaagagcaacatgatcagaggcagaaacagcgccaccagcgccgacgagcagccccacatcggcaactacagactgctgaagaccatcggcaagggcaacttcgccaaggtgaagctggccagacacatcctgaccggcaaggaggtggccgtgaagatcatcgacaagacccagctgaacagcagcagcctgcagaagctgttcagagaggtgagaatcatgaaggtgctgaaccaccccaacatcgtgaagctgttcgaggtgatcgagaccgagaagaccctgtacctggtgatggagtacgccagcggcggcgaggtgttcgactacctggtggcccacggcagaatgaaggagaaggaggccagagccaagttcagacagatcgtgagcgccgtgcagtactgccaccagaagttcatcgtgcacagagacctgaaggccgagaacctgctgctggacgccgacatgaacatcaagatcgccgacttcggcttcagcaacgagttcaccttcggcaacaagctggacaccttctgcggcagccccccctacgccgcccccgagctgttccagggcaagaagtacgacggccccgaggtggacgtgtggagcctgggcgtgatcctgtacaccctggtgagcggcagcctgcccttcgacggccagaacctgaaggagctgagagagagagtgctgagaggcaagtacagaatccccttctacatgagcaccgactgcgagaacctgctgaagaagttcctgatcctgaaccccagcaagagaggcaccctggagcagatcatgaaggacagatggatgaacgtgggccacgaggacgacgagctgaagccctacgtggagcccctgcccgactacaaggaccccagaagaaccgagctgatggtgagcatgggctacaccagagaggagatccaggacagcctggtgggccagagatacaacgaggtgatggccacctacctgctgctgggctacaagagcagcgagctggagggcgacaccatcaccctgaagcccagacccagcgccgacctgaccaacagcagcgcccccagccccagccacaaggtgcagagaagcgtgagcgccaaccccaagcagagaagattcagcgaccaggccggccccgccatccccaccagcaacagctacagcaagaagacccagagcaacaacgccgagaacaagagacccgaggaggacagagagagcggcagaaaggccagcagcaccgccaaggtgcccgccagccccctgcccggcctggagagaaagaagaccacccccacccccagcaccaacagcgtgctgagcaccagcaccaacagaagcagaaacagccccctgctggagagagccagcctgggccaggccagcatccagaacggcaaggacagcaccgccccccagagagtgcccgtggccagccccagcgcccacaacatcagcagcagcggcggcgcccccgacagaaccaacttccccagaggcgtgagcagcagaagcaccttccacgccggccagctgagacaggtgagagaccagcagaacctgccctacggcgtgacccccgccagccccagcggccacagccagggcagaagaggcgccagcggcagcatcttcagcaagttcaccagcaagttcgtgagaagaaacctgaacgagcccgagagcaaggacagagtggagaccctgagaccccacgtggtgggcagcggcggcaacgacaaggagaaggaggagttcagagaggccaagcccagaagcctgagattcacctggagcatgaagaccaccagcagcatggagcccaacgagatgatgagagagatcagaaaggtgctggacgccaacagctgccagagcgagctgcacgagaagtacatgctgctgtgcatgcacggcacccccggccacgaggacttcgtgcagtgggagatggaggtgtgcaagctgcccagactgagcctgaacggcgtgagattcaagagaatcagcggcaccagcatggccttcaagaacatcgccagcaagatcgccaacgagctgaagctgtag

SEQ ID NO: 88013 - DNA, 186 bp, synthetic construct
  misc_feature 1..186: note = Description of Artificial Sequence: Synthetic coding sequence
  source 1..186: mol_type = other DNA
atggaggtggccggcagccccttccccttcctgcagagcgtggcctgcctgctgaccctggcccacatccccgccgtgggcaacatcctgcagcacagaagaagaggcgccggccccaccctgggccacctggacagcaagcccagcagcaagagcaacatgatcagaggcagaaacagcgcctag

SEQ ID NO: 88014 - DNA, 339 bp, synthetic construct
  misc_feature 1..339: note = Description of Artificial Sequence: Synthetic coding sequence
  source 1..339: mol_type = other DNA
atgatcagaggcagaaacagcgccaccagcgccgacgagcagccccacatcggcaactacagactgctgaagaccatcggcaagggcaacttcgccaaggtgaagctggccagacacatcctgaccggcaaggaggtggccgtgaagatcatcgacaagacccagctgaacagcagcagcctgcagaagctgttcagagaggtgagaatcatgaaggtgctgaaccaccccaacatcgtgaagctgttcgaggtgatcgagaccgagaagaccctgtacctggtgatggagtacgccagcggcggcgaggtgttcgactacctggtggcccacggctag

SEQ ID NO: 88015 - DNA, 486 bp, synthetic construct
  misc_feature 1..486: note = Description of Artificial Sequence: Synthetic coding sequence
  source 1..486: mol_type = other DNA
atgatcagaggcagaaacagcgccaccagcgccgacgagcagccccacatcggcaactacagactgctgaagaccatcggcaagggcaacttcgccaaggtgaagctggccagacacatcctgaccggcaaggaggtggccgtgaagatcatcgacaagacccagctgaacagcagcagcctgcagaagctgttcagagaggtgagaatcatgaaggtgctgaaccaccccaacatcgtgaagctgttcgaggtgatcgagaccgagaagaccctgtacctggtgatggagtacgccagcggcggcgaggtgttcgactacctggtggcccacggcagaatgaaggagaaggaggccagagccaagttcagacagatcgtgagcgccgtgcagtactgccaccagaagttcatcgtgcacagagacctgaaggccgagaacctgctgctggacgccgacatgaacatcaagatcgccgacttctag

SEQ ID NO: 88016 - DNA, 276 bp, synthetic construct
  misc_feature 1..276: note = Description of Artificial Sequence: Synthetic coding sequence
  source 1..276: mol_type = other DNA
atgggcggccagagaaacaccagcgtgggcaacatcgtgcagagatggagagaccacgtggtgtgccagaaggccggcgtgatctacagcggcagaaaggcccaggagcacggcaccggcagaaccgacttcacccccgcccagagactgatgatgcccaccctgggccacctggacagcaagcccagcagcaagagcaacatgatcagaggcagaaacagcgccaccagcgccgacgagcagccccacatcggcaactacagactgctgaagtag

SEQ ID NO: 88017 - DNA, 2238 bp, synthetic construct
  misc_feature 1..2238: note = Description of Artificial Sequence: Synthetic coding sequence
  source 1..2238: mol_type = other DNA
atgatcagaggcagaaacagcgccaccagcgccgacgagcagccccacatcggcaactacagactgctgaagaccatcggcaagggcaacttcgccaaggtgaagctggccagacacatcctgaccggcaaggaggtggccgtgaagatcatcgacaagacccagctgaacagcagcagcctgcagaagctgttcagagaggtgagaatcatgaaggtgctgaaccaccccaacatcgtgaagctgttcgaggtgatcgagaccgagaagaccctgtacctggtgatggagtacgccagcggcggcgaggtgttcgactacctggtggcccacggcagaatgaaggagaaggaggccagagccaagttcagacagatcgtgagcgccgtgcagtactgccaccagaagttcatcgtgcacagagacctgaaggccgagaacctgctgctggacgccgacatgaacatcaagatcgccgacttcggcttcagcaacgagttcaccttcggcaacaagctggacaccttctgcggcagccccccctacgccgcccccgagctgttccagggcaagaagtacgacggccccgaggtggacgtgtggagcctgggcgtgatcctgtacaccctggtgagcggcagcctgcccttcgacggccagaacctgaaggagctgagagagagagtgctgagaggcaagtacagaatccccttctacatgagcaccgactgcgagaacctgctgaagaagttcctgatcctgaaccccagcaagagaggcaccctggagcagatcatgaaggacagatggatgaacgtgggccacgaggacgacgagctgaagccctacgtggagcccctgcccgactacaaggaccccagaagaaccgagctgatggtgagcatgggctacaccagagaggagatccaggacagcctggtgggccagagatacaacgaggtgatggccacctacctgctgctgggctacaagagcagcgagctggagggcgacaccatcaccctgaagcccagacccagcgccgacctgaccaacagcagcgcccccagccccagccacaaggtgcagagaagcgtgagcgccaaccccaagcagagaagattcagcgaccaggccggccccgccatccccaccagcaacagctacagcaagaagacccagagcaacaacgccgagaacaagagacccgaggaggacagagagagcggcagaaaggccagcagcaccgccaaggtgcccgccagccccctgcccggcctggagagaaagaagaccacccccacccccagcaccaacagcgtgctgagcaccagcaccaacagaagcagaaacagccccctgctggagagagccagcctgggccaggccagcatccagaacggcaaggacagcctgaccatgcccggcagcagagccagcaccgccagcgccagcgccgccgtgagcgccgccagacccagacagcaccagaagagcatgagcgccagcgtgcaccccaacaaggccagcggcctgccccccaccgagagcaactgcgaggtgcccagacccagcaccgccccccagagagtgcccgtggccagccccagcgcccacaacatcagcagcagcggcggcgcccccgacagaaccaacttccccagaggcgtgagcagcagaagcaccttccacgccggccagctgagacaggtgagagaccagcagaacctgccctacggcgtgacccccgccagccccagcggccacagccagggcagaagaggcgccagcggcagcatcttcagcaagttcaccagcaagttcgtgagaagaaacctgaacgagcccgagagcaaggacagagtggagaccctgagaccccacgtggtgggcagcggcggcaacgacaaggagaaggaggagttcagagaggccaagcccagaagcctgagattcacctggagcatgaagaccaccagcagcatggagcccaacgagatgatgagagagatcagaaaggtgctggacgccaacagctgccagagcgagctgcacgagaagtacatgctgctgtgcatgcacggcacccccggccacgaggacttcgtgcagtgggagatggaggtgtgcaagctgcccagactgagcctgaacggcgtgagattcaagagaatcagcggcaccagcatggccttcaagaacatcgccagcaagatcgccaacgagctgaagctgtag

SEQ ID NO: 88018 - DNA, 4128 bp, synthetic construct
  misc_feature 1..4128: note = Description of Artificial Sequence: Synthetic coding sequence
  source 1..4128: mol_type = other DNA
atggagggcgacagagtggccggcagacccgtgctgagcagcctgcccgtgctgctgctgctgcccctgctgatgctgagagccgccgccctgcaccccgacgagctgttcccccacggcgagagctggggcgaccagctgctgcaggagggcgacgacgagagcagcgccgtggtgaagctggccaaccccctgcacttctacgaggccagattcagcaacctgtacgtgggcaccaacggcatcatcagcacccaggacttccccagagagacccagtacgtggactacgacttccccaccgacttccccgccatcgcccccttcctggccgacatcgacaccagccacggcagaggcagagtgctgtacagagaggacaccagccccgccgtgctgggcctggccgccagatacgtgagagccggcttccccagaagcgccagattcacccccacccacgccttcctggccacctgggagcaggtgggcgcctacgaggaggtgaagagaggcgccctgcccagcggcgagctgaacaccttccaggccgtgctggccagcgacggcagcgacagctacgccctgttcctgtaccccgccaacggcctgcagttcctgggcaccagacccaaggagagctacaacgtgcagctgcagctgcccgccagagtgggcttctgcagaggcgaggccgacgacctgaagagcgagggcccctacttcagcctgaccagcaccgagcagagcgtgaagaacctgtaccagctgagcaacctgggcatccccggcgtgtgggccttccacatcggcagcaccagccccctggacaacgtgagacccgccgccgtgggcgacctgagcgccgcccacagcagcgtgcccctgggcagaagcttcagccacgccaccgccctggagagcgactacaacgaggacaacctggactactacgacgtgaacgaggaggaggccgagtacctgcccggcgagcccgaggaggccctgaacggccacagcagcatcgacgtgagcttccagagcaaggtggacaccaagcccctggaggagagcagcaccctggacccccacaccaaggagggcaccagcctgggcgaggtgggcggccccgacctgaagggccaggtggagccctgggacgagagagagaccagaagccccgccccccccgaggtggacagagacagcctggcccccagctgggagaccccccccccctaccccgagaacggcagcatccagccctaccccgacggcggccccgtgcccagcgagatggacgtgccccccgcccaccccgaggaggagatcgtgctgagaagctaccccgccagcggccacaccacccccctgagcagaggcacctacgaggtgggcctggaggacaacatcggcagcaacaccgaggtgttcacctacaacgccgccaacaaggagacctgcgagcacaaccacagacagtgcagcagacacgccttctgcaccgactacgccaccggcttctgctgccactgccagagcaagttctacggcaacggcaagcactgcctgcccgagggcgccccccacagagtgaacggcaaggtgagcggccacctgcacgtgggccacacccccgtgcacttcaccgacgtggacctgcacgcctacatcgtgggcaacgacggcagagcctacaccgccatcagccacatcccccagcccgccgcccaggccctgctgcccctgacccccatcggcggcctgttcggctggctgttcgccctggagaagcccggcagcgagaacggcttcagcctggccggcgccgccttcacccacgacatggaggtgaccttctaccccggcgaggagaccgtgagaatcacccagaccgccgagggcctggaccccgagaactacctgagcatcaagaccaacatccagggccaggtgccctacgtgagcgccaacttcaccgcccacatcagcccctacaaggagctgtaccactacagcgacagcaccgtgaccagcaccagcagcagagactacagcctgaccttcggcgccatcaaccagacctggagctacagaatccaccagaacatcacctaccaggtgtgcagacacgcccccagacaccccagcttccccaccacccagcagctgaacgtggacagagtgttcgccctgtacaacgacgaggagagagtgctgagattcgccgtgaccaaccagatcggccccgtgaaggaggacagcgaccccacccccggcaacccctgctacgacggcagccacatgtgcgacaccaccgccagatgccaccccggcaccggcgtggactacacctgcgagtgcgccagcggctaccagggcgacggcagaaactgcgtggacgagaacgagtgcgccaccggcttccacagatgcggccccaacagcgtgtgcatcaacctgcccggcagctacagatgcgagtgcagaagcggctacgagttcgccgacgacagacacacctgcatcctgatcaccccccccgccaacccctgcgaggacggcagccacacctgcgcccccgccggccaggccagatgcgtgcaccacggcggcagcaccttcagctgcgcctgcctgcccggctacgccggcgacggccaccagtgcaccgacgtggacgagtgcagcgagaacagatgccaccccgccgccacctgctacaacacccccggcagcttcagctgcagatgccagcccggctactacggcgacggcttccagtgcatccccgacagcaccagcagcctgaccccctgcgagcagcagcagagacacgcccaggcccagtacgcctaccccggcgccagattccacatcccccagtgcgacgagcagggcaacttcctgcccctgcagtgccacggcagcaccggcttctgctggtgcgtggaccccgacggccacgaggtgcccggcacccagaccccccccggcagcacccccccccactgcggccccagccccgagcccacccagagaccccccaccatctgcgagagatggagagagaacctgctggagcactacggcggcacccccagagacgaccagtacgtgccccagtgcgacgacctgggccacttcatccccctgcagtgccacggcaagagcgacttctgctggtgcgtggacaaggacggcagagaggtgcagggcaccagaagccagcccggcaccacccccgcctgcatccccaccgtggccccccccatggtgagacccacccccagacccgacgtgaccccccccagcgtgggcaccttcctgctgtacacccagggccagcagatcggctacctgcccctgaacggcaccagactgcagaaggacgccgccaagaccctgctgagcctgcacggcagcatcatcgtgggcatcgactacgactgcagagagagaatggtgtactggaccgacgtggccggcagaaccatcagcagagccggcctggagctgggcgccgagcccgagaccatcgtgaacagcggcctgatcagccccgagggcctggccatcgaccacatcagaagaaccatgtactggaccgacagcgtgctggacaagatcgagagcgccctgctggacggcagcgagagaaaggtgctgttctacaccgacctggtgaaccccagagccatcgccgtggaccccatcagaggcaacctgtactggaccgactggaacagagaggcccccaagatcgagaccagcagcctggacggcgagaacagaagaatcctgatcaacaccgacatcggcctgcccaacggcctgaccttcgaccccttcagcaagctgctgtgctgggccgacgccggcaccaagaagctggagtgcaccctgcccgacggcaccggcagaagagtgatccagaacaacctgaagtaccccttcagcatcgtgagctacgccgaccacttctaccacaccgactggagaagagacggcgtggtgagcgtgaacaagcacagcggccagttcaccgacgagtacctgcccgagcagagaagccacctgtacggcatcaccgccgtgtacccctactgccccaccggcagaaagtag

SEQ ID NO: 88019 - DNA, 2190 bp, synthetic construct
  misc_feature 1..2190: note = Description of Artificial Sequence: Synthetic coding sequence
  source 1..2190: mol_type = other DNA
atgagcaccagaacccccctgcccaccgtgaacgagagagacaccgagaaccacaccagccacggcgacggcagacaggaggtgaccagcagaaccagcagaagcggcgccagatgcagaaacagcatcgccagctgcgccgacgagcagccccacatcggcaactacagactgctgaagaccatcggcaagggcaacttcgccaaggtgaagctggccagacacatcctgaccggcagagaggtggccatcaagatcatcgacaagacccagctgaaccccaccagcctgcagaagctgttcagagaggtgagaatcatgaagatcctgaaccaccccaacatcgtgaagctgttcgaggtgatcgagaccgagaagaccctgtacctgatcatggagtacgccagcggcggcgaggtgttcgactacctggtggcccacggcagaatgaaggagaaggaggccagaagcaagttcagacagatcgtgagcgccgtgcagtactgccaccagaagagaatcgtgcacagagacctgaaggccgagaacctgctgctggacgccgacatgaacatcaagatcgccgacttcggcttcagcaacgagttcaccgtgggcggcaagctggacaccttctgcggcagccccccctacgccgcccccgagctgttccagggcaagaagtacgacggccccgaggtggacgtgtggagcctgggcgtgatcctgtacaccctggtgagcggcagcctgcccttcgacggccagaacctgaaggagctgagagagagagtgctgagaggcaagtacagaatccccttctacatgagcaccgactgcgagaacctgctgaagagattcctggtgctgaaccccatcaagagaggcaccctggagcagatcatgaaggacagatggatcaacgccggccacgaggaggacgagctgaagcccttcgtggagcccgagctggacatcagcgaccagaagagaatcgacatcatggtgggcatgggctacagccaggaggagatccaggagagcctgagcaagatgaagtacgacgagatcaccgccacctacctgctgctgggcagaaagagcagcgagctggacgccagcgacagcagcagcagcagcaacctgagcctggccaaggtgagacccagcagcgacctgaacaacagcaccggccagagcccccaccacaaggtgcagagaagcgtgttcagcagccagaagcagagaagatacagcgaccacgccggccccgccatccccagcgtggtggcctaccccaagagaagccagaccagcaccgccgacagcgacctgaaggaggacggcatcagcagcagaaagagcagcggcagcgccgtgggcggcaagggcatcgcccccgccagccccatgctgggcaacgccagcaaccccaacaaggccgacatccccgagagaaagaagagcagcaccgtgcccagcagcaacaccgccagcggcggcatgaccagaagaaacacctacgtgtgcagcgagagaaccaccgccgacagacacagcgtgatccagaacggcaaggagaacagcaccatccccgaccagagaacccccgtggccagcacccacagcatcagcagcgccgccacccccgacagaatcagattccccagaggcaccgccagcagaagcaccttccacggccagcccagagagagaagaaccgccacctacaacggcccccccgccagccccagcctgagccacgaggccacccccctgagccagaccagaagcagaggcagcaccaacctgttcagcaagctgaccagcaagctgaccagaagcagaaacgtgagcgccgagcagaaggacgagaacaaggaggccaagcccagaagcctgagattcacctggagcatgaagaccaccagcagcatggaccccggcgacatgatgagagagatcagaaaggtgctggacgccaacaactgcgactacgagcagagagagagattcctgctgttctgcgtgcacggcgacggccacgccgagaacctggtgcagtgggagatggaggtgtgcaagctgcccagactgagcctgaacggcgtgagattcaagagaatcagcggcaccagcatcgccttcaagaacatcgccagcaagatcgccaacgagctgaagctgtag

SEQ ID NO: 88020 - DNA, 1338 bp, synthetic construct
  misc_feature 1..1338: note = Description of Artificial Sequence: Synthetic coding sequence
  source 1..1338: mol_type = other DNA
atgaagtacgacgagatcaccgccacctacctgctgctgggcagaaagagcagcgagctggacgccagcgacagcagcagcagcagcaacctgagcctggccaaggtgagacccagcagcgacctgaacaacagcaccggccagagcccccaccacaaggtgcagagaagcgtgttcagcagccagaagcagagaagatacagcgaccacgccggccccgccatccccagcgtggtggcctaccccaagagaagccagaccagcaccgccgacagcgacctgaaggaggacggcatcagcagcagaaagagcagcggcagcgccgtgggcggcaagggcatcgcccccgccagccccatgctgggcaacgccagcaaccccaacaaggccgacatccccgagagaaagaagagcagcaccgtgcccagcagcaacaccgccagcggcggcatgaccagaagaaacacctacgtgtgcagcgagagaaccaccgccgacagacacagcgtgatccagaacggcaaggagaacagcctgaccgagatgttcgcctacgccgccagccccgccagcgtgtgcaccagcacctgcagactgagacaccagaagagcatgagcatgagcgccagcggccaccccaagatgatgctgccccccatcgacagcgagggcgacaacttcaaggccatcaccatccccgaccagagaacccccgtggccagcacccacagcatcagcagcgccgccacccccgacagaatcagattccccagaggcaccgccagcagaagcaccttccacggccagcccagagagagaagaaccgccacctacaacggcccccccgccagccccagcctgagccacgaggccacccccctgagccagaccagaagcagaggcagcaccaacctgttcagcaagctgaccagcaagctgaccagaagactgcccaccgagtacgagagaaacggcagatacgagggcagcagcagaaacgtgagcgccgagcagaaggacgagaacaaggaggccaagcccagaagcctgagattcacctggagcatgaagaccaccagcagcatggaccccggcgacatgatgagagagatcagaaaggtgctggacgccaacaactgcgactacgagcagagagagagattcctgctgttctgcgtgcacggcgacggccacgccgagaacctggtgcagtgggagatggaggtgtgcaagctgcccagactgagcctgaacggcgtgagattcaagagaatcagcggcaccagcatcgccttcaagaacatcgccagcaagatcgccaacgagctgaagctgtag

SEQ ID NO: 88021 - DNA, 2259 bp, synthetic construct
  misc_feature 1..2259: note = Description of Artificial Sequence: Synthetic coding sequence
  source 1..2259: mol_type = other DNA
atgagcaccagaacccccctgcccaccgtgaacgagagagacaccgagaaccacaccagccacggcgacggcagacaggaggtgaccagcagaaccagcagaagcggcgccagatgcagaaacagcatcgccagctgcgccgacgagcagccccacatcggcaactacagactgctgaagaccatcggcaagggcaacttcgccaaggtgaagctggccagacacatcctgaccggcagagaggtggccatcaagatcatcgacaagacccagctgaaccccaccagcctgcagaagctgttcagagaggtgagaatcatgaagatcctgaaccaccccaacatcgtgaagctgttcgaggtgatcgagaccgagaagaccctgtacctgatcatggagtacgccagcggcggcgaggtgttcgactacctggtggcccacggcagaatgaaggagaaggaggccagaagcaagttcagacagggctgccaggccggccagaccatcaaggtgcaggtgagcttcgacctgctgagcctgatgttcaccttcatcgtgagcgccgtgcagtactgccaccagaagagaatcgtgcacagagacctgaaggccgagaacctgctgctggacgccgacatgaacatcaagatcgccgacttcggcttcagcaacgagttcaccgtgggcggcaagctggacaccttctgcggcagccccccctacgccgcccccgagctgttccagggcaagaagtacgacggccccgaggtggacgtgtggagcctgggcgtgatcctgtacaccctggtgagcggcagcctgcccttcgacggccagaacctgaaggagctgagagagagagtgctgagaggcaagtacagaatccccttctacatgagcaccgactgcgagaacctgctgaagagattcctggtgctgaaccccatcaagagaggcaccctggagcagatcatgaaggacagatggatcaacgccggccacgaggaggacgagctgaagcccttcgtggagcccgagctggacatcagcgaccagaagagaatcgacatcatggtgggcatgggctacagccaggaggagatccaggagagcctgagcaagatgaagtacgacgagatcaccgccacctacctgctgctgggcagaaagagcagcgagctggacgccagcgacagcagcagcagcagcaacctgagcctggccaaggtgagacccagcagcgacctgaacaacagcaccggccagagcccccaccacaaggtgcagagaagcgtgttcagcagccagaagcagagaagatacagcgaccacgccggccccgccatccccagcgtggtggcctaccccaagagaagccagaccagcaccgccgacagcgacctgaaggaggacggcatcagcagcagaaagagcagcggcagcgccgtgggcggcaagggcatcgcccccgccagccccatgctgggcaacgccagcaaccccaacaaggccgacatccccgagagaaagaagagcagcaccgtgcccagcagcaacaccgccagcggcggcatgaccagaagaaacacctacgtgtgcagcgagagaaccaccgccgacagacacagcgtgatccagaacggcaaggagaacagcaccatccccgaccagagaacccccgtggccagcacccacagcatcagcagcgccgccacccccgacagaatcagattccccagaggcaccgccagcagaagcaccttccacggccagcccagagagagaagaaccgccacctacaacggcccccccgccagccccagcctgagccacgaggccacccccctgagccagaccagaagcagaggcagcaccaacctgttcagcaagctgaccagcaagctgaccagaagcagaaacgtgagcgccgagcagaaggacgagaacaaggaggccaagcccagaagcctgagattcacctggagcatgaagaccaccagcagcatggaccccggcgacatgatgagagagatcagaaaggtgctggacgccaacaactgcgactacgagcagagagagagattcctgctgttctgcgtgcacggcgacggccacgccgagaacctggtgcagtgggagatggaggtgtgcaagctgcccagactgagcctgaacggcgtgagattcaagagaatcagcggcaccagcatcgccttcaagaacatcgccagcaagatcgccaacgagctgaagctgtag

SEQ ID NO: 88022 - DNA, 2262 bp, synthetic construct
  misc_feature 1..2262: note = Description of Artificial Sequence: Synthetic coding sequence
  source 1..2262: mol_type = other DNA
atgagcaccagaacccccctgcccaccgtgaacgagagagacaccgagaaccacaccagccacggcgacggcagacaggaggtgaccagcagaaccagcagaagcggcgccagatgcagaaacagcatcgccagctgcgccgacgagcagccccacatcggcaactacagactgctgaagaccatcggcaagggcaacttcgccaaggtgaagctggccagacacatcctgaccggcagagaggtggccatcaagatcatcgacaagacccagctgaaccccaccagcctgcagaagctgttcagagaggtgagaatcatgaagatcctgaaccaccccaacatcgtgaagctgttcgaggtgatcgagaccgagaagaccctgtacctgatcatggagtacgccagcggcggcgaggtgttcgactacctggtggcccacggcagaatgaaggagaaggaggccagaagcaagttcagacagatcgtgagcgccgtgcagtactgccaccagaagagaatcgtgcacagagacctgaaggccgagaacctgctgctggacgccgacatgaacatcaagatcgccgacttcggcttcagcaacgagttcaccgtgggcggcaagctggacaccttctgcggcagccccccctacgccgcccccgagctgttccagggcaagaagtacgacggccccgaggtggacgtgtggagcctgggcgtgatcctgtacaccctggtgagcggcagcctgcccttcgacggccagaacctgaaggagctgagagagagagtgctgagaggcaagtacagaatccccttctacatgagcaccgactgcgagaacctgctgaagagattcctggtgctgaaccccatcaagagaggcaccctggagcagatcatgaaggacagatggatcaacgccggccacgaggaggacgagctgaagcccttcgtggagcccgagctggacatcagcgaccagaagagaatcgacatcatggtgggcatgggctacagccaggaggagatccaggagagcctgagcaagatgaagtacgacgagatcaccgccacctacctgctgctgggcagaaagagcagcgagctggacgccagcgacagcagcagcagcagcaacctgagcctggccaaggtgagacccagcagcgacctgaacaacagcaccggccagagcccccaccacaaggtgcagagaagcgtgttcagcagccagaagcagagaagatacagcgaccacgccggccccgccatccccagcgtggtggcctaccccaagagaagccagaccagcaccgccgacagcgacctgaaggaggacggcatcagcagcagaaagagcagcggcagcgccgtgggcggcaagggcatcgcccccgccagccccatgctgggcaacgccagcaaccccaacaaggccgacatccccgagagaaagaagagcagcaccgtgcccagcagcaacaccgccagcggcggcatgaccagaagaaacacctacgtgtgcagcgagagaaccaccgccgacagacacagcgtgatccagaacggcaaggagaacagcaccatccccgaccagagaacccccgtggccagcacccacagcatcagcagcgccgccacccccgacagaatcagattccccagaggcaccgccagcagaagcaccttccacggccagcccagagagagaagaaccgccacctacaacggcccccccgccagccccagcctgagccacgaggccacccccctgagccagaccagaagcagaggcagcaccaacctgttcagcaagctgaccagcaagctgaccagaagaaacatgagcttcagattcatcaagagactgcccaccgagtacgagagaaacggcagatacgagggcagcagcagaaacgtgagcgccgagcagaaggacgagaacaaggaggccaagcccagaagcctgagattcacctggagcatgaagaccaccagcagcatggaccccggcgacatgatgagagagatcagaaaggtgctggacgccaacaactgcgactacgagcagagagagagattcctgctgttctgcgtgcacggcgacggccacgccgagaacctggtgcagtgggagatggaggtgtgcaagctgcccagactgagcctgaacggcgtgagattcaagagaatcagcggcaccagcatcgccttcaagaacatcgccagcaagatcgccaacgagctgaagctgtag

SEQ ID NO: 88023 - DNA, 1980 bp, synthetic construct
  misc_feature 1..1980: note = Description of Artificial Sequence: Synthetic coding sequence
  source 1..1980: mol_type = other DNA
atgagcaccagaacccccctgcccaccgtgaacgagagagacaccgagaaccacaccagccacggcgacggcagacaggaggtgaccagcagaaccagcagaagcggcgccagatgcagaaacagcatcgccagctgcgccgacgagcagccccacatcggcaactacagactgctgaagaccatcggcaagggcaacttcgccaaggtgaagctggccagacacatcctgaccggcagagaggtggccatcaagatcatcgacaagacccagctgaaccccaccagcctgcagaagctgttcagagaggtgagaatcatgaagatcctgaaccaccccaacatcgtgaagctgttcgaggtgatcgagaccgagaagaccctgtacctgatcatggagtacgccagcggcggcgaggtgttcgactacctggtggcccacggcagaatgaaggagaaggaggccagaagcaagttcagacagatcgtgagcgccgtgcagtactgccaccagaagagaatcgtgcacagagacctgaaggagctgagagagagagtgctgagaggcaagtacagaatccccttctacatgagcaccgactgcgagaacctgctgaagagattcctggtgctgaaccccatcaagagaggcaccctggagcagatcatgaaggacagatggatcaacgccggccacgaggaggacgagctgaagcccttcgtggagcccgagctggacatcagcgaccagaagagaatcgacatcatggtgggcatgggctacagccaggaggagatccaggagagcctgagcaagatgaagtacgacgagatcaccgccacctacctgctgctgggcagaaagagcagcgagctggacgccagcgacagcagcagcagcagcaacctgagcctggccaaggtgagacccagcagcgacctgaacaacagcaccggccagagcccccaccacaaggtgcagagaagcgtgttcagcagccagaagcagagaagatacagcgaccacgccggccccgccatccccagcgtggtggcctaccccaagagaagccagaccagcaccgccgacagcgacctgaaggaggacggcatcagcagcagaaagagcagcggcagcgccgtgggcggcaagggcatcgcccccgccagccccatgctgggcaacgccagcaaccccaacaaggccgacatccccgagagaaagaagagcagcaccgtgcccagcagcaacaccgccagcggcggcatgaccagaagaaacacctacgtgtgcagcgagagaaccaccgccgacagacacagcgtgatccagaacggcaaggagaacagcaccatccccgaccagagaacccccgtggccagcacccacagcatcagcagcgccgccacccccgacagaatcagattccccagaggcaccgccagcagaagcaccttccacggccagcccagagagagaagaaccgccacctacaacggcccccccgccagccccagcctgagccacgaggccacccccctgagccagaccagaagcagaggcagcaccaacctgttcagcaagctgaccagcaagctgaccagaagaaacatgagcttcagattcatcaagagcagaaacgtgagcgccgagcagaaggacgagaacaaggaggccaagcccagaagcctgagattcacctggagcatgaagaccaccagcagcatggaccccggcgacatgatgagagagatcagaaaggtgctggacgccaacaactgcgactacgagcagagagagagattcctgctgttctgcgtgcacggcgacggccacgccgagaacctggtgcagtgggagatggaggtgtgcaagctgcccagactgagcctgaacggcgtgagattcaagagaatcagcggcaccagcatcgccttcaagaacatcgccagcaagatcgccaacgagctgaagctgtag

SEQ ID NO: 88024 - DNA, 2235 bp, synthetic construct
  misc_feature 1..2235: note = Description of Artificial Sequence: Synthetic coding sequence
  source 1..2235: mol_type = other DNA
atgagcaccagaacccccctgcccaccgtgaacgagagagacaccgagaaccacaccagccacggcgacggcagacaggaggtgaccagcagaaccagcagaagcggcgccagatgcagaaacagcatcgccagctgcgccgacgagcagccccacatcggcaactacagactgctgaagaccatcggcaagggcaacttcgccaaggtgaagctggccagacacatcctgaccggcagagaggtggccatcaagatcatcgacaagacccagctgaaccccaccagcctgcagaagctgttcagagaggtgagaatcatgaagatcctgaaccaccccaacatcgtgaagctgttcgaggtgatcgagaccgagaagaccctgtacctgatcatggagtacgccagcggcggcgaggtgttcgactacctggtggcccacggcagaatgaaggagaaggaggccagaagcaagttcagacagatcgtgagcgccgtgcagtactgccaccagaagagaatcgtgcacagagacctgaaggccgagaacctgctgctggacgccgacatgaacatcaagatcgccgacttcggcttcagcaacgagttcaccgtgggcggcaagctggacaccttctgcggcagccccccctacgccgcccccgagctgttccagggcaagaagtacgacggccccgaggtggacgtgtggagcctgggcgtgatcctgtacaccctggtgagcggcagcctgcccttcgacggccagaacctgaaggagctgagagagagagtgctgagaggcaagtacagaatccccttctacatgagcaccgactgcgagaacctgctgaagagattcctggtgctgaaccccatcaagagaggcaccctggagcagatcatgaaggacagatggatcaacgccggccacgaggaggacgagctgaagcccttcgtggagcccgagctggacatcagcgaccagaagagaatcgacatcatggtgggcatgggctacagccaggaggagatccaggagagcctgagcaagatgaagtacgacgagatcaccgccacctacctgctgctgggcagaaagagcagcgagctggacgccagcgacagcagcagcagcagcaacctgagcctggccaaggtgagacccagcagcgacctgaacaacagcaccggccagagcccccaccacaaggtgcagagaagcgtgttcagcagccagaagcagagaagatacagcgaccacgccggccccgccatccccagcgtggtggcctaccccaagagaagccagaccagcaccgccgacagcgacctgaaggaggacggcatcagcagcagaaagagcagcggcagcgccgtgggcggcaagggcatcgcccccgccagccccatgctgggcaacgccagcaaccccaacaaggccgacatccccgagagaaagaagagcagcaccgtgcccagcagcaacaccgccagcggcggcatgaccagaagaaacacctacgtgtgcagcgagagaaccaccgccgacagacacagcgtgatccagaacggcaaggagaacagcaccatccccgaccagagaacccccgtggccagcacccacagcatcagcagcgccgccacccccgacagaatcagattccccagaggcaccgccagcagaagcaccttccacggccagcccagagagagaagaaccgccacctacaacggcccccccgccagccccagcctgagccacgaggccacccccctgagccagaccagaagcagaggcagcaccaacctgttcagcaagctgaccagcaagctgaccagaagactgcccaccgagtacgagagaaacggcagatacgagggcagcagcagaaacgtgagcgccgagcagaaggacgagaacaaggaggccaagcccagaagcctgagattcacctggagcatgaagaccaccagcagcatggaccccggcgacatgatgagagagatcagaaaggtgctggacgccaacaactgcgactacgagcagagagagagattcctgctgttctgcgtgcacggcgacggccacgccgagaacctggtgcagtgggagatggaggtgtgcaagctgcccagactgagcctgaacggcgtgagattcaagagaatcagcggcaccagcatcgccttcaagaacatcgccagcaagatcgccaacgagctgaagctgtag

SEQ ID NO: 88025 - DNA, 1518 bp, synthetic construct
  misc_feature 1..1518: note = Description of Artificial Sequence: Synthetic coding sequence
  source 1..1518: mol_type = other DNA
tgagtggacgtgtggagcctgggcgtgatcctgtacaccctggtgagcggcagcctgcccttcgacggccagaacctgaaggagctgagagagagagtgctgagaggcaagtacagaatccccttctacatgagcaccgactgcgagaacctgctgaagagattcctggtgctgaaccccatcaagagaggcaccctggagcagatcatgaaggacagatggatcaacgccggccacgaggaggacgagctgaagcccttcgtggagcccgagctggacatcagcgaccagaagagaatcgacatcatggtgggcatgggctacagccaggaggagatccaggagagcctgagcaagatgaagtacgacgagatcaccgccacctacctgctgctgggcagaaagagcagcgaggtgagacccagcagcgacctgaacaacagcaccggccagagcccccaccacaaggtgcagagaagcgtgttcagcagccagaagcagagaagatacagcgaccacgccggccccgccatccccagcgtggtggcctaccccaagagaagccagaccagcaccgccgacagcgacctgaaggaggacggcatcagcagcagaaagagcagcggcagcgccgtgggcggcaagggcatcgcccccgccagccccatgctgggcaacgccagcaaccccaacaaggccgacatccccgagagaaagaagagcagcaccgtgcccagcagcaacaccgccagcggcggcatgaccagaagaaacacctacgtgtgcagcgagagaaccaccgccgacagacacagcgtgatccagaacggcaaggagaacagcaccatccccgaccagagaacccccgtggccagcacccacagcatcagcagcgccgccacccccgacagaatcagattccccagaggcaccgccagcagaagcaccttccacggccagcccagagagagaagaaccgccacctacaacggcccccccgccagccccagcctgagccacgaggccacccccctgagccagaccagaagcagaggcagcaccaacctgttcagcaagctgaccagcaagctgaccagaagaaacatgagcttcagattcatcaagagactgcccaccgagtacgagagaaacggcagatacgagggcagcagcagaaacgtgagcgccgagcagaaggacgagaacaaggaggccaagcccagaagcctgagattcacctggagcatgaagaccaccagcagcatggaccccggcgacatgatgagagagatcagaaaggtgctggacgccaacaactgcgactacgagcagagagagagattcctgctgttctgcgtgcacggcgacggccacgccgagaacctggtgcagtgggagatggaggtgtgcaagctgcccagactgagcctgaacggcgtgagattcaagagaatcagcggcaccagcatcgccttcaagaacatcgccagcaagatcgccaacgagctgaagctgtag

SEQ ID NO: 88026 - DNA, 2259 bp, synthetic construct
  misc_feature 1..2259: note = Description of Artificial Sequence: Synthetic coding sequence
  source 1..2259: mol_type = other DNA
atgagcagcagaaccgtgctggcccccggcaacgacagaaacagcgacacccacggcaccctgggcagcggcagaagcagcgacaagggccccagctggagcagcagaagcctgggcgccagatgcagaaacagcatcgccagctgccccgaggagcagccccacgtgggcaactacagactgctgagaaccatcggcaagggcaacttcgccaaggtgaagctggccagacacatcctgaccggcagagaggtggccatcaagatcatcgacaagacccagctgaaccccagcagcctgcagaagctgttcagagaggtgagaatcatgaagggcctgaaccaccccaacatcgtgaagctgttcgaggtgatcgagaccgagaagaccctgtacctggtgatggagtacgccagcgccggcgaggtgttcgactacctggtgagccacggcagaatgaaggagaaggaggccagagccaagttcagacagatcgtgagcgccgtgcactactgccaccagaagaacatcgtgcacagagacctgaaggccgagaacctgctgctggacgccgaggccaacatcaagatcgccgacttcggcttcagcaacgagttcaccctgggcagcaagctggacaccttctgcggcagccccccctacgccgcccccgagctgttccagggcaagaagtacgacggccccgaggtggacatctggagcctgggcgtgatcctgtacaccctggtgagcggcagcctgcccttcgacggccacaacctgaaggagctgagagagagagtgctgagaggcaagtacagagtgcccttctacatgagcaccgactgcgagagcatcctgagaagattcctggtgctgaaccccgccaagagatgcaccctggagcagatcatgaaggacaagtggatcaacatcggctacgagggcgaggagctgaagccctacaccgagcccgaggaggacttcggcgacaccaagagaatcgaggtgatggtgggcatgggctacaccagagaggagatcaaggagagcctgaccagccagaagtacaacgaggtgaccgccacctacctgctgctgggcagaaagaccgaggagggcggcgacagaggcgcccccggcctggccctggccagagtgagagcccccagcgacaccaccaacggcaccagcagcagcaagggcaccagccacagcaagggccagagaagcagcagcagcacctaccacagacagagaagacacagcgacttctgcggccccagccccgcccccctgcaccccaagagaagccccaccagcaccggcgaggccgagctgaaggaggagagactgcccggcagaaaggccagctgcagcaccgccggcagcggcagcagaggcctgccccccagcagccccatggtgagcagcgcccacaaccccaacaaggccgagatccccgagagaagaaaggacagcaccagcacccccaacaacctgccccccagcatgatgaccagaagaaacacctacgtgtgcaccgagagacccggcgccgagagacccagcctgctgcccaacggcaaggagaacagcagcggcacccccagagtgccccccgccagccccagcagccacagcctggccccccccagcggcgagagaagcagactggccagaggcagcaccatcagaagcaccttccacggcggccaggtgagagacagaagagccggcggcggcggcggcggcggcgtgcagaacggcccccccgccagccccaccctggcccacgaggccgcccccctgcccgccggcagacccagacccaccaccaacctgttcaccaagctgaccagcaagctgaccagaagagtggccgacgagcccgagagaatcggcggccccgaggtgaccagctgccacctgccctgggaccagaccgagaccgcccccagactgctgagattcccctggagcgtgaagctgaccagcagcagaccccccgaggccctgatggccgccctgagacaggccaccgccgccgccagatgcagatgcagacagccccagcccttcctgctggcctgcctgcacggcggcgccggcggccccgagcccctgagccacttcgaggtggaggtgtgccagctgcccagacccggcctgagaggcgtgctgttcagaagagtggccggcaccgccctggccttcagaaccctggtgaccagaatcagcaacgacctggagctgtag

SEQ ID NO: 88027 - DNA, 1389 bp, synthetic construct
  misc_feature 1..1389: note = Description of Artificial Sequence: Synthetic coding sequence
  source 1..1389: mol_type = other DNA
atgagcagcagaaccgtgctggcccccggcaacgacagaaacagcgacacccacggcaccctgggcagcggcagaagcagcgacaagggccccagctggagcagcagaagcctgggcgccagatgcagaaacagcatcgccagctgccccgaggagcagccccacgtgggcaactacagactgctgagaaccatcggcaagggcaacttcgccaaggtgaagctggccagacacatcctgaccggcagagaggtggccatcaagatcatcgacaagacccagctgaaccccagcagcctgcagaagctgttcagagaggtgagaatcatgaagggcctgaaccaccccaacatcgtgaagctgttcgaggtgatcgagaccgagaagaccctgtacctggtgatggagtacgccagcgccggcgagccccccaccctgagcgccctgcccctgtgccacctgcccctgcccctgcacctgaccctgacccccctgggcctgtgccccgccggcgaggtgttcgactacctggtgagccacggcagaatgaaggagaaggaggccagagccaagttcagacagatcgtgagcgccgtgcactactgccaccagaagaacatcgtgcacagagacctgaaggccgagaacctgctgctggacgccgaggccaacatcaagatcgccgacttcggcttcagcaacgagttcaccctgggcagcaagctggacaccttctgcggcagccccccctacgccgcccccgagctgttccagggcaagaagtacgacggccccgaggtggacatctggagcctgggcgtgatcctgtacaccctggtgagcggcagcctgcccttcgacggccacaacctgaaggagctgagagagagagtgctgagaggcaagtacagagtgcccttctacatgagcaccgactgcgagagcatcctgagaagattcctggtgctgaaccccgccaagagatgcaccctggagcagatcatgaaggacaagtggatcaacatcggctacgagggcgaggagctgaagccctacaccgagcccgaggaggacttcggcgacaccaagagaatcgaggtgatggtgggcatgggctacaccagagaggagatcaaggagagcctgaccagccagaagtacaacgaggtgaccgccacctacctgctgctgggcagaaagaccgagcccgacgagcacggcggcggcggcgccgagggcggcgccgccgccagacccgagggcgagctgcagcacagaggcgagtgggagagcagagccgcccccctgcagccccacggccagcagagaccccagccccagcagggcagagaccccagagccgccgagggccagcacgagcacccctag

SEQ ID NO: 88028 - DNA, 2067 bp, synthetic construct
  misc_feature 1..2067: note = Description of Artificial Sequence: Synthetic coding sequence
  source 1..2067: mol_type = other DNA
atgagcagcagaaccgtgctggcccccggcaacgacagaaacagcgacacccacggcaccctgggcagcggcagaagcagcgacaagggccccagctggagcagcagaagcctgggcgccagatgcagaaacagcatcgccagctgccccgaggagcagccccacgtgggcaactacagactgctgagaaccatcggcaagggcaacttcgccaaggtgaagctggccagacacatcctgaccggcagagaggtggccatcaagatcatcgacaagacccagctgaaccccagcagcctgcagaagctgttcagagaggtgagaatcatgaagggcctgaaccaccccaacatcgtgaagctgttcgaggtgatcgagaccgagaagaccctgtacctggtgatggagtacgccagcgccggcgaggtgttcgactacctggtgagccacggcagaatgaaggagaaggaggccagagccaagttcagacagatcgtgagcgccgtgcactactgccaccagaagaacatcgtgcacagagacctgaaggccgagaacctgctgctggacgccgaggccaacatcaagatcgccgacttcggcttcagcaacgagttcaccctgggcagcaagctggacaccttctgcggcagccccccctacgccgcccccgagctgttccagggcaagaagtacgacggccccgaggtggacatctggagcctgggcgtgatcctgtacaccctggtgagcggcagcctgcccttcgacggccacaacctgaaggagctgagagagagagtgctgagaggcaagtacagagtgcccttctacatgagcaccgactgcgagagcatcctgagaagattcctggtgctgaaccccgccaagagatgcaccctggagcagatcatgaaggacaagtggatcaacatcggctacgagggcgaggagctgaagccctacaccgagcccgaggaggacttcggcgacaccaagagaatcgaggtgatggtgggcatgggctacaccagagaggagatcaaggagagcctgaccagccagaagtacaacgaggtgaccgccacctacctgctgctgggcagaaagaccgaggagggcggcgacagaggcgcccccggcctggccctggccagagtgagagcccccagcgacaccaccaacggcaccagcagcagcaagggcaccagccacagcaagggccagagaagcagcagcagcacctaccacagacagagaagacacagcgacttctgcggccccagccccgcccccctgcaccccaagagaagccccaccagcaccggcgaggccgagctgaaggaggagagactgcccggcagaaaggccagctgcagcaccgccggcagcggcagcagaggcctgccccccagcagccccatggtgagcagcgcccacaaccccaacaaggccgagatccccgagagaagaaaggacagcaccagcacccccaacaacctgccccccagcatgatgaccagaagaaacacctacgtgtgcaccgagagacccggcgccgagagacccagcctgctgcccaacggcaaggagaacagcagcggcacccccagagtgccccccgccagccccagcagccacagcctggccccccccagcggcgagagaagcagactggccagaggcagcaccatcagaagcaccttccacggcggccaggtgagagacagaagagccggcggcggcggcggcggcggcgtgcagaacggcccccccgccagccccaccctggcccacgaggccgcccccctgcccgccggcagacccagacccaccaccaacctgttcaccaagctgaccagcaagctgaccagaagagtgaccctggaccccagcaagagacagaacagcaacagatgcgtgagcggcgccagcctgccccagggcagcaagatcagaagccagaccaacctgagagagagcggcgacctgagaagccaggtggccatctacctgggcatcaagagaaagcccccccccggctgcagcgacagccccggcgtgtag

SEQ ID NO: 88029 - DNA, 240 bp, synthetic construct
  misc_feature 1..240: note = Description of Artificial Sequence: Synthetic coding sequence
  source 1..240: mol_type = other DNA
atggccgccctgagacaggccaccgccgccgccagatgcagatgcagacagccccagcccttcctgctggcctgcctgcacggcggcgccggcggccccgagcccctgagccacttcgaggtggaggtgtgccagctgcccagacccggcctgagaggcgtgctgttcagaagagtggccggcaccgccctggccttcagaaccctggtgaccagaatcagcaacgacctggagctgtag

SEQ ID NO: 88030 - DNA, 1032 bp, synthetic construct
  misc_feature 1..1032: note = Description of Artificial Sequence: Synthetic coding sequence
  source 1..1032: mol_type = other DNA
atggccgccgccaccgagctgaacagacccagcagcggcgacagaaacctggagagaagatgcagacccaacctgagcagagaggtgctgtacgagatcttcagaagcctgcacaccctggtgggccagctggacctgagagacgacgtggtgaagatcaccatcgactggaacaagctgcagagcctgagcgccttccagcccgccctgctgttcagcgccctggagcagcacatcctgtacctgcagcccttcctggccaagctgcagagccccatcaaggaggagaacaccaccgccgtggaggagatcggcagaaccgagatgggcaacaagaacgaggtgaacgacaagttcagcatcggcgacctgcaggaggaggagaagcacaaggagagcgacctgagagacgtgaagaagacccagatccacttcgaccccgaggtggtgcagatcaaggccggcaaggccgagatcgacagaagaatcagcgccttcatcgagagaaagcaggccgagatcaacgagaacaacgtgagagagttctgcaacgtgatcgactgcaaccaggagaacagctgcgccagaaccgacgccatcttcaccccctaccccggcttcaagagccacgtgaaggtgagcagagtggtgaacacctacggcccccagaccagacccgagggcatccccggcagcggccacaagcccaacagcatgctgagagactgcggcaaccaggccgtggaggagagactgcagaacatcgaggcccacctgagactgcagaccggcggccccgtgcccagagacatctaccagagaatcaagaagctggaggacaagatcctggagctggagggcatcagccccgagtacttccagagcgtgagcttcagcggcaagagaagaaaggtgcagcccccccagaactacagcctggccgagctggacgagaagatcagcgccctgaagcaggccctgctgagaaagagcagagaggccgagagcatggccacccaccacctgccctag

SEQ ID NO: 88031 - DNA, 1035 bp, synthetic construct
  misc_feature 1..1035: note = Description of Artificial Sequence: Synthetic coding sequence
  source 1..1035: mol_type = other DNA
atggccgccgccaccgagctgaacagacccagcagcggcgacagaaacctggagagaagatgcagacccaacctgagcagagaggtgctgtacgagatcttcagaagcctgcacaccctggtgggccagctggacctgagagacgacgtggtgaagatcaccatcgactggaacaagctgcagagcctgagcgccttccagcccgccctgctgttcagcgccctggagcagcacatcctgtacctgcagcccttcctggccaagctgcagagccccatcaaggaggagaacaccaccgccgtggaggagatcggcagaaccgagatgggcaacaagaacgaggtgaacgacaagttcagcatcggcgacctgcaggaggaggagaagcacaaggagagcgacctgagagacgtgaagaagacccagatccacttcgaccccgaggtggtgcagatcaaggccggcaaggccgagatcgacagaagaatcagcgccttcatcgagagaaagcaggccgagatcaacgagaacaacgtgagagagttctgcaacgtgatcgactgcaaccaggagaacagctgcgccagaaccgacgccatcttcaccccctaccccggcttcaagagccacgtgaaggtgagcagagtggtgaacacctacggcccccagaccagacccgagggcatccccggcagcggccacaagcccaacagcatgctgagagactgcggcaaccaggccgtggaggagagactgcagaacatcgaggcccacctgagactgcagaccggcggccccgtgcccagagacatctaccagagaatcaagaagctggaggacaagatcctggagctggagggcatcagccccgagtacttccagagcgtgagcttcagcggcaagagaagaaaggtgcagcccccccagcagaactacagcctggccgagctggacgagaagatcagcgccctgaagcaggccctgctgagaaagagcagagaggccgagagcatggccacccaccacctgccctag

SEQ ID NO: 88032 - DNA, 4944 bp, synthetic construct
  misc_feature 1..4944: note = Description of Artificial Sequence: Synthetic coding sequence
  source 1..4944: mol_type = other DNA
atggtgcagaagaagaagttctgccccagactgctggactacctggtgatcgtgggcgccagacaccccagcagcgacagcgtggcccagacccccgagctgctgagaagataccccctggaggaccacaccgagttccccctgccccccgacgtggtgttcttctgccagcccgagggctgcctgagcgtgagacagagaagaatgagcctgagagacgacaccagcttcgtgttcaccctgaccgacaaggacaccggcgtgaccagatacggcatctgcgtgaacttctacagaagcttccagaagagaatcagcaaggagaagggcgagggcggcgccggcagcagaggcaaggagggcacccacgccacctgcgccagcgaggagggcggcaccgagagcagcgagagcggcagcagcctgcagcccctgagcgccgacagcacccccgacgtgaaccagagccccagaggcaagagaagagccaaggccggcagcagaagcagaaacagcaccctgaccagcctgtgcgtgctgagccactaccccttcttcagcaccttcagagagtgcctgtacaccctgaagagactggtggactgctgcagcgagagactgctgggcaagaagctgggcatccccagaggcgtgcagagagacaccatgtggagaatcttcaccggcagcctgctggtggaggagaagagcagcgccctgctgcacgacctgagagagatcgaggcctggatctacagactgctgagaagccccgtgcccgtgagcggccagaagagagtggacatcgaggtgctgccccaggagctgcagcccgccctgaccttcgccctgcccgaccccagcagattcaccctggtggacttccccctgcacctgcccctggagctgctgggcgtggacgcctgcctgcaggtgctgacctgcatcctgctggagcacaaggtggtgctgcagagcagagactacaacgccctgagcatgagcgtgatggccttcgtggccatgatctaccccctggagtacatgttccccgtgatccccctgctgcccacctgcatggccagcgccgagcagctgctgctggcccccaccccctacatcatcggcgtgcccgccagcttcttcctgtacaagctggacttcaagatgcccgacgacgtgtggctggtggacctggacagcaacagagtgatcgcccccaccaacgccgaggtgctgcccatcctgcccgagcccgagagcctggagctgaagaagcacctgaagcaggccctggccagcatgagcctgaacacccagcccatcctgaacctggagaagttccacgagggccaggagatccccctgctgctgggcagacccagcaacgacctgcagagcacccccagcaccgagttcaaccccctgatctacggcaacgacgtggacagcgtggacgtggccaccagagtggccatggtgagattcttcaacagcgccaacgtgctgcagggcttccagatgcacaccagaaccctgagactgttccccagacccgtggtggccttccaggccggcagcttcctggccagcagacccagacagacccccttcgccgagaagctggccagaacccaggccgtggagtacttcggcgagtggatcctgaaccccaccaactacgccttccagagaatccacaacaacatgttcgaccccgccctgatcggcgacaagcccaagtggtacgcccaccagctgcagcccatccactacagagtgtacgacagcaacagccagctggccgaggccctgagcgtgccccccgagagagacagcgacagcgagcccaccgacgacagcggcagcgacagcatggactacgacgacagcagcagcagctacagcagcctgggcgacttcgtgagcgagatgatgaagtgcgacatcaacggcgacacccccaacgtggaccccctgacccacgccgccctgggcgacgccagcgaggtggagatcgacgagctgcagaaccagaaggaggccgaggagcccggccccgacagcgagaacagccaggagaacccccccctgagaagcagcagcagcaccaccgccagcagcagccccagcaccgtgatccacggcgccaacagcgagcccgccgacagcaccgagatggacgacaaggccgccgtgggcgtgagcaagcccctgcccagcgtgccccccagcatcggcaagagcaacgtggacagaagacaggccgagatcggcgagggcagcgtgagaagaagaatctacgacaacccctacttcgagccccagtacggcttcccccccgaggaggacgaggacgagcagggcgagagctacacccccagattcagccagcacgtgagcggcaacagagcccagaagctgctgagacccaacagcctgagactggccagcgacagcgacgccgagagcgacagcagagccagcagccccaacagcaccgtgagcaacaccagcaccgagggcttcggcggcatcatgagcttcgccagcagcctgtacagaaaccacagcaccagcttcagcctgagcaacctgaccctgcccaccaagggcgccagagagaaggccacccccttccccagcctgaaggtgttcggcctgaacaccctgatggagatcgtgaccgaggccggccccggcagcggcgagggcaacagaagagccctggtggaccagaagagcagcgtgatcaagcacagccccaccgtgaagagagagccccccagcccccagggcagaagcagcaacagcagcgagaaccagcagttcctgaaggaggtggtgcacagcgtgctggacggccagggcgtgggctggctgaacatgaagaaggtgagaagactgctggagagcgagcagctgagagtgttcgtgctgagcaagctgaacagaatggtgcagagcgaggacgacgccagacaggacatcatccccgacgtggagatcagcagaaaggtgtacaagggcatgctggacctgctgaagtgcaccgtgctgagcctggagcagagctacgcccacgccggcctgggcggcatggccagcatcttcggcctgctggagatcgcccagacccactactacagcaaggagcccgacaagagaaagagaagccccaccgagagcgtgaacacccccgtgggcaaggaccccggcctggccggcagaggcgaccccaaggccatggcccagctgagagtgccccagctgggccccagagcccccagcgccaccggcaagggccccaaggagctggacaccagaagcctgaaggaggagaacttcatcgccagcatcgagctgtggaacaagcaccaggaggtgaagaagcagaaggccctggagaagcagagacccgaggtgatcaagcccgtgttcgacctgggcgagaccgaggagaagaagagccagatcagcgccgacagcggcgtgagcctgaccagcagcagccagagaaccgaccaggacagcgtgatcggcgtgagccccgccgtgatgatcagaagcagcagccaggacagcgaggtgagcaccgtggtgagcaacagcagcggcgagaccctgggcgccgacagcgacctgagcagcaacgccggcgacggccccggcggcgagggcagcgtgcacctggccagcagcagaggcaccctgagcgacagcgagatcgagaccaacagcgccaccagcaccatcttcggcaaggcccacagcctgaagcccagcatcaaggagaagctggccggcagccccatcagaaccagcgaggacgtgagccagagagtgtacctgtacgagggcctgctgggcagagacaagggcagcatgtgggaccagctggaggacgccgccatggagaccttcagcatcagcaaggagagaagcaccctgtgggaccagatgcagttctgggaggacgccttcctggacgccgtgatgctggagagagagggcatgggcatggaccagggcccccaggagatgatcgacagatacctgagcctgggcgagcacgacagaaagagactggaggacgacgaggacagactgctggccaccctgctgcacaacctgatcagctacatgctgctgatgaaggtgaacaagaacgacatcagaaagaaggtgagaagactgatgggcaagagccacatcggcctggtgtacagccagcagatcaacgaggtgctggaccagctggccaacctgaacggcagagacctgagcatctggagcagcggcagcagacacatgaagaagcagaccttcgtggtgcacgccggcaccgacaccaacggcgacatcttcttcatggaggtgtgcgacgactgcgtggtgctgagaagcaacatcggcaccgtgtacgagagatggtggtacgagaagctgatcaacatgacctactgccccaagaccaaggtgctgtgcctgtggagaagaaacggcagcgagacccagctgaacaagttctacaccaagaagtgcagagagctgtactactgcgtgaaggacagcatggagagagccgccgccagacagcagagcatcaagcccggccccgagctgggcggcgagttccccgtgcaggacctgaagaccggcgagggcggcctgctgcaggtgaccctggagggcatcaacctgaagttcatgcacaaccaggtgttcatcgagctgaaccacatcaagaagtgcaacaccgtgagaggcgtgttcgtgctggaggagttcgtgcccgagatcaaggaggtggtgagccacaagtacaagacccccatggcccacgagatctgctacagcgtgctgtgcctgttcagctacgtggccgccgtgcacagcagcgaggaggacctgagaaccccccccagacccgtgagcagctag

SEQ ID NO: 88033 - DNA, 4767 bp, synthetic construct
  misc_feature 1..4767: note = Description of Artificial Sequence: Synthetic coding sequence
  source 1..4767: mol_type = other DNA
atggtgcagaagaagaagttctgccccagactgctggactacctggtgatcgtgggcgccagacaccccagcagcgacagcgtggcccagacccccgagctgctgagaagataccccctggaggaccacaccgagttccccctgccccccgacgtggtgttcttctgccagcccgagggctgcctgagcgtgagacagagaagaatgagcctgagagacgacaccagcttcgtgttcaccctgaccgacaaggacaccggcgtgaccagatacggcatctgcgtgaacttctacagaagcttccagaagagaatcagcaaggagaagggcgagggcggcgccggcagcagaggcaaggagggcacccacgccacctgcgccagcgaggagggcggcaccgagagcagcgagagcggcagcagcctgcagcccctgagcgccgacagcacccccgacgtgaaccagagccccagaggcaagagaagagccaaggccggcagcagaagcagaaacagcaccctgaccagcctgtgcgtgctgagccactaccccttcttcagcaccttcagagagtgcctgtacaccctgaagagactggtggactgctgcagcgagagactgctgggcaagaagctgggcatccccagaggcgtgcagagagacaccatgtggagaatcttcaccggcagcctgctggtggaggagaagagcagcgccctgctgcacgacctgagagagatcgaggcctggatctacagactgctgagaagccccgtgcccgtgagcggccagaagagagtggacatcgaggtgctgccccaggagctgcagcccgccctgaccttcgccctgcccgaccccagcagattcaccctggtggacttccccctgcacctgcccctggagctgctgggcgtggacgcctgcctgcaggtgctgacctgcatcctgctggagcacaaggtggtgctgcagagcagagactacaacgccctgagcatgagcgtgatggccttcgtggccatgatctaccccctggagtacatgttccccgtgatccccctgctgcccacctgcatggccagcgccgagcagctgctgctggcccccaccccctacatcatcggcgtgcccgccagcttcttcctgtacaagctggacttcaagatgcccgacgacgtgtggctggtggacctggacagcaacagagtgatcgcccccaccaacgccgaggtgctgcccatcctgcccgagcccgagagcctggagctgaagaagcacctgaagcaggccctggccagcatgagcctgaacacccagcccatcctgaacctggagaagttccacgagggccaggagatccccctgctgctgggcagacccagcaacgacctgcagagcacccccagcaccgagttcaaccccctgatctacggcaacgacgtggacagcgtggacgtggccaccagagtggccatggtgagattcttcaacagcgccaacgtgctgcagggcttccagatgcacaccagaaccctgagactgttccccagacccgtggtggccttccaggccggcagcttcctggccagcagacccagacagacccccttcgccgagaagctggccagaacccaggccgtggagtacttcggcgagtggatcctgaaccccaccaactacgccttccagagaatccacaacaacatgttcgaccccgccctgatcggcgacaagcccaagtggtacgcccaccagctgcagcccatccactacagagtgtacgacagcaacagccagctggccgaggccctgagcgtgccccccgagagagacagcgacagcgagcccaccgacgacagcggcagcgacagcatggactacgacgacagcagcagcagctacagcagcctgggcgacttcgtgagcgagatgatgaagtgcgacatcaacggcgacacccccaacgtggaccccctgacccacgccgccctgggcgacgccagcgaggtggagatcgacgagctgcagaaccagaaggaggccgaggagcccggccccgacagcgagaacagccaggagaacccccccctgagaagcagcagcagcaccaccgccagcagcagccccagcaccgtgatccacggcgccaacagcgagcccgccgacagcaccgagatggacgacaaggccgccgtgggcgtgagcaagcccctgcccagcgtgccccccagcatcggcaagagcaacgtggacagaagacaggccgagatcggcgagggcagcgtgagaagaagaatctacgacaacccctacttcgagccccagtacggcttcccccccgaggaggacgaggacgagcagggcgagagctacacccccagattcagccagcacgtgagcggcaacagagcccagaagctgctgagacccaacagcctgagactggccagcgacagcgacgccgagagcgacagcagagccagcagccccaacagcaccgtgagcaacaccagcaccgagggcttcggcggcatcatgagcttcgccagcagcctgtacagaaaccacagcaccagcttcagcctgagcaacctgaccctgcccaccaagggcgccagagagaaggccacccccttccccagcctgaagggcaacagaagagccctggtggaccagaagagcagcgtgatcaagcacagccccaccgtgaagagagagccccccagcccccagggcagaagcagcaacagcagcgagaaccagcagttcctgaaggaggtggtgcacagcgtgctggacggccagggcgtgggctggctgaacatgaagaaggtgagaagactgctggagagcgagcagctgagagtgttcgtgctgagcaagctgaacagaatggtgcagagcgaggacgacgccagacaggacatcatccccgacgtggagatcagcagaaaggtgtacaagggcatgctggacctgctgaagtgcaccgtgctgagcctggagcagagctacgcccacgccggcctgggcggcatggccagcatcttcggcctgctggagatcgcccagacccactactacagcaaggagcccgacaagagaaagagaagccccaccgagagcgtgaacacccccgtgggcaaggaccccggcctggccggcagaggcgaccccaaggccatggcccagctgagagtgccccagctgggccccagagcccccagcgccaccggcaagggccccaaggagctggacaccagaagcctgaaggaggagaacttcatcgccagcatcggccccgaggtgatcaagcccgtgttcgacctgggcgagaccgaggagaagaagagccagatcagcgccgacagcggcgtgagcctgaccagcagcagccagagaaccgaccaggacagcgtgatcggcgtgagccccgccgtgatgatcagaagcagcagccaggacagcgaggtgagcaccgtggtgagcaacagcagcggcgagaccctgggcgccgacagcgacctgagcagcaacgccggcgacggccccggcggcgagggcagcgtgcacctggccagcagcagaggcaccctgagcgacagcgagatcgagaccaacagcgccaccagcaccatcttcggcaaggcccacagcctgaagcccagcatcaaggagaagctggccggcagccccatcagaaccagcgaggacgtgagccagagagtgtacctgtacgagggcctgctgggcaaggagagaagcaccctgtgggaccagatgcagttctgggaggacgccttcctggacgccgtgatgctggagagagagggcatgggcatggaccagggcccccaggagatgatcgacagatacctgagcctgggcgagcacgacagaaagagactggaggacgacgaggacagactgctggccaccctgctgcacaacctgatcagctacatgctgctgatgaaggtgaacaagaacgacatcagaaagaaggtgagaagactgatgggcaagagccacatcggcctggtgtacagccagcagatcaacgaggtgctggaccagctggccaacctgaacggcagagacctgagcatctggagcagcggcagcagacacatgaagaagcagaccttcgtggtgcacgccggcaccgacaccaacggcgacatcttcttcatggaggtgtgcgacgactgcgtggtgctgagaagcaacatcggcaccgtgtacgagagatggtggtacgagaagctgatcaacatgacctactgccccaagaccaaggtgctgtgcctgtggagaagaaacggcagcgagacccagctgaacaagttctacaccaagaagtgcagagagctgtactactgcgtgaaggacagcatggagagagccgccgccagacagcagagcatcaagcccggccccgagctgggcggcgagttccccgtgcaggacctgaagaccggcgagggcggcctgctgcaggtgaccctggagggcatcaacctgaagttcatgcacaaccaggtgttcatcgagctgaaccacatcaagaagtgcaacaccgtgagaggcgtgttcgtgctggaggagttcgtgcccgagatcaaggaggtggtgagccacaagtacaagacccccatggcccacgagatctgctacagcgtgctgtgcctgttcagctacgtggccgccgtgcacagcagcgaggaggacctgagaaccccccccagacccgtgagcagctag

SEQ ID NO: 88034 - DNA, 4827 bp, synthetic construct
  misc_feature 1..4827: note = Description of Artificial Sequence: Synthetic coding sequence
  source 1..4827: mol_type = other DNA
atggtgcagaagaagaagttctgccccagactgctggactacctggtgatcgtgggcgccagacaccccagcagcgacagcgtggcccagacccccgagctgctgagaagataccccctggaggaccacaccgagttccccctgccccccgacgtggtgttcttctgccagcccgagggctgcctgagcgtgagacagagaagaatgagcctgagagacgacaccagcttcgtgttcaccctgaccgacaaggacaccggcgtgaccagatacggcatctgcgtgaacttctacagaagcttccagaagagaatcagcaaggagaagggcgagggcggcgccggcagcagaggcaaggagggcacccacgccacctgcgccagcgaggagggcggcaccgagagcagcgagagcggcagcagcctgcagcccctgagcgccgacagcacccccgacgtgaaccagagccccagaggcaagagaagagccaaggccggcagcagaagcagaaacagcaccctgaccagcctgtgcgtgctgagccactaccccttcttcagcaccttcagagagtgcctgtacaccctgaagagactggtggactgctgcagcgagagactgctgggcaagaagctgggcatccccagaggcgtgcagagagacaccatgtggagaatcttcaccggcagcctgctggtggaggagaagagcagcgccctgctgcacgacctgagagagatcgaggcctggatctacagactgctgagaagccccgtgcccgtgagcggccagaagagagtggacatcgaggtgctgccccaggagctgcagcccgccctgaccttcgccctgcccgaccccagcagattcaccctggtggacttccccctgcacctgcccctggagctgctgggcgtggacgcctgcctgcaggtgctgacctgcatcctgctggagcacaaggtggtgctgcagagcagagactacaacgccctgagcatgagcgtgatggccttcgtggccatgatctaccccctggagtacatgttccccgtgatccccctgctgcccacctgcatggccagcgccgagcagctgctgctggcccccaccccctacatcatcggcgtgcccgccagcttcttcctgtacaagctggacttcaagatgcccgacgacgtgtggctggtggacctggacagcaacagagtgatcgcccccaccaacgccgaggtgctgcccatcctgcccgagcccgagagcctggagctgaagaagcacctgaagcaggccctggccagcatgagcctgaacacccagcccatcctgaacctggagaagttccacgagggccaggagatccccctgctgctgggcagacccagcaacgacctgcagagcacccccagcaccgagttcaaccccctgatctacggcaacgacgtggacagcgtggacgtggccaccagagtggccatggtgagattcttcaacagcgccaacgtgctgcagggcttccagatgcacaccagaaccctgagactgttccccagacccgtggtggccttccaggccggcagcttcctggccagcagacccagacagacccccttcgccgagaagctggccagaacccaggccgtggagtacttcggcgagtggatcctgaaccccaccaactacgccttccagagaatccacaacaacatgttcgaccccgccctgatcggcgacaagcccaagtggtacgcccaccagctgcagcccatccactacagagtgtacgacagcaacagccagctggccgaggccctgagcgtgccccccgagagagacagcgacagcgagcccaccgacgacagcggcagcgacagcatggactacgacgacagcagcagcagctacagcagcctgggcgacttcgtgagcgagatgatgaagtgcgacatcaacggcgacacccccaacgtggaccccctgacccacgccgccctgggcgacgccagcgaggtggagatcgacgagctgcagaaccagaaggaggccgaggagcccggccccgacagcgagaacagccaggagaacccccccctgagaagcagcagcagcaccaccgccagcagcagccccagcaccgtgatccacggcgccaacagcgagcccgccgacagcaccgagatggacgacaaggccgccgtgggcgtgagcaagcccctgcccagcgtgccccccagcatcggcaagagcaacgtggacagaagacaggccgagatcggcgagggcagcgtgagaagaagaatctacgacaacccctacttcgagccccagtacggcttcccccccgaggaggacgaggacgagcagggcgagagctacacccccagattcagccagcacgtgagcggcaacagagcccagaagctgctgagacccaacagcctgagactggccagcgacagcgacgccgagagcgacagcagagccagcagccccaacagcaccgtgagcaacaccagcaccgagggcttcggcggcatcatgagcttcgccagcagcctgtacagaaaccacagcaccagcttcagcctgagcaacctgaccctgcccaccaagggcgccagagagaaggccacccccttccccagcctgaaggtgttcggcctgaacaccctgatggagatcgtgaccgaggccggccccggcagcggcgagggcaacagaagagccctggtggaccagaagagcagcgtgatcaagcacagccccaccgtgaagagagagccccccagcccccagggcagaagcagcaacagcagcgagaaccagcagttcctgaaggaggtggtgcacagcgtgctggacggccagggcgtgggctggctgaacatgaagaaggtgagaagactgctggagagcgagcagctgagagtgttcgtgctgagcaagctgaacagaatggtgcagagcgaggacgacgccagacaggacatcatccccgacgtggagatcagcagaaaggtgtacaagggcatgctggacctgctgaagtgcaccgtgctgagcctggagcagagctacgcccacgccggcctgggcggcatggccagcatcttcggcctgctggagatcgcccagacccactactacagcaaggagcccgacaagagaaagagaagccccaccgagagcgtgaacacccccgtgggcaaggaccccggcctggccggcagaggcgaccccaaggccatggcccagctgagagtgccccagctgggccccagagcccccagcgccaccggcaagggccccaaggagctggacaccagaagcctgaaggaggagaacttcatcgccagcatcggccccgaggtgatcaagcccgtgttcgacctgggcgagaccgaggagaagaagagccagatcagcgccgacagcggcgtgagcctgaccagcagcagccagagaaccgaccaggacagcgtgatcggcgtgagccccgccgtgatgatcagaagcagcagccaggacagcgaggtgagcaccgtggtgagcaacagcagcggcgagaccctgggcgccgacagcgacctgagcagcaacgccggcgacggccccggcggcgagggcagcgtgcacctggccagcagcagaggcaccctgagcgacagcgagatcgagaccaacagcgccaccagcaccatcttcggcaaggcccacagcctgaagcccagcatcaaggagaagctggccggcagccccatcagaaccagcgaggacgtgagccagagagtgtacctgtacgagggcctgctgggcaaggagagaagcaccctgtgggaccagatgcagttctgggaggacgccttcctggacgccgtgatgctggagagagagggcatgggcatggaccagggcccccaggagatgatcgacagatacctgagcctgggcgagcacgacagaaagagactggaggacgacgaggacagactgctggccaccctgctgcacaacctgatcagctacatgctgctgatgaaggtgaacaagaacgacatcagaaagaaggtgagaagactgatgggcaagagccacatcggcctggtgtacagccagcagatcaacgaggtgctggaccagctggccaacctgaacggcagagacctgagcatctggagcagcggcagcagacacatgaagaagcagaccttcgtggtgcacgccggcaccgacaccaacggcgacatcttcttcatggaggtgtgcgacgactgcgtggtgctgagaagcaacatcggcaccgtgtacgagagatggtggtacgagaagctgatcaacatgacctactgccccaagaccaaggtgctgtgcctgtggagaagaaacggcagcgagacccagctgaacaagttctacaccaagaagtgcagagagctgtactactgcgtgaaggacagcatggagagagccgccgccagacagcagagcatcaagcccggccccgagctgggcggcgagttccccgtgcaggacctgaagaccggcgagggcggcctgctgcaggtgaccctggagggcatcaacctgaagttcatgcacaaccaggtgttcatcgagctgaaccacatcaagaagtgcaacaccgtgagaggcgtgttcgtgctggaggagttcgtgcccgagatcaaggaggtggtgagccacaagtacaagacccccatggcccacgagatctgctacagcgtgctgtgcctgttcagctacgtggccgccgtgcacagcagcgaggaggacctgagaaccccccccagacccgtgagcagctag

SEQ ID NO: 88035 - DNA, 4746 bp, synthetic construct
  misc_feature 1..4746: note = Description of Artificial Sequence: Synthetic coding sequence
  source 1..4746: mol_type = other DNA
atggtgcagaagaagaagttctgccccagactgctggactacctggtgatcgtgggcgccagacaccccagcagcgacagcgtggcccagacccccgagctgctgagaagataccccctggaggaccacaccgagttccccctgccccccgacgtggtgttcttctgccagcccgagggctgcctgagcgtgagacagagaagaatgagcctgagagacgacaccagcttcgtgttcaccctgaccgacaaggacaccggcgtgaccagatacggcatctgcgtgaacttctacagaagcttccagaagagaatcagcaaggagaagggcgagggcggcgccggcagcagaggcaaggagggcacccacgccacctgcgccagcgaggagggcggcaccgagagcagcgagagcggcagcagcctgcagcccctgagcgccgacagcacccccgacgtgaaccagagccccagaggcaagagaagagccaaggccggcagcagaagcagaaacagcaccctgaccagcctgtgcgtgctgagccactaccccttcttcagcaccttcagagagtgcctgtacaccctgaagagactggtggactgctgcagcgagagactgctgggcaagaagctgggcatccccagaggcgtgcagagagacaccatgtggagaatcttcaccggcagcctgctggtggaggagaagagcagcgccctgctgcacgacctgagagagatcgaggcctggatctacagactgctgagaagccccgtgcccgtgagcggccagaagagagtggacatcgaggtgctgccccaggagctgcagcccgccctgaccttcgccctgcccgaccccagcagattcaccctggtggacttccccctgcacctgcccctggagctgctgggcgtggacgcctgcctgcaggtgctgacctgcatcctgctggagcacaaggtggtgctgcagagcagagactacaacgccctgagcatgagcgtgatggccttcgtggccatgatctaccccctggagtacatgttccccgtgatccccctgctgcccacctgcatggccagcgccgagcagctgctgctggcccccaccccctacatcatcggcgtgcccgccagcttcttcctgtacaagctggacttcaagatgcccgacgacgtgtggctggtggacctggacagcaacagagtgatcgcccccaccaacgccgaggtgctgcccatcctgcccgagcccgagagcctggagctgaagaagcacctgaagcaggccctggccagcatgagcctgaacacccagcccatcctgaacctggagaagttccacgagggccaggagatccccctgctgctgggcagacccagcaacgacctgcagagcacccccagcaccgagttcaaccccctgatctacggcaacgacgtggacagcgtggacgtggccaccagagtggccatggtgagattcttcaacagcgccaacgtgctgcagggcttccagatgcacaccagaaccctgagactgttccccagacccgtggtggccttccaggccggcagcttcctggccagcagacccagacagacccccttcgccgagaagctggccagaacccaggccgtggagtacttcggcgagtggatcctgaaccccaccaactacgccttccagagaatccacaacaacatgttcgaccccgccctgatcggcgacaagcccaagtggtacgcccaccagctgcagcccatccactacagagtgtacgacagcaacagccagctggccgaggccctgagcgtgccccccgagagagacagcgacagcgagcccaccgacgacagcggcagcgacagcatggactacgacgacagcagcagcagctacagcagcctgggcgacttcgtgagcgagatgatgaagtgcgacatcaacggcgacacccccaacgtggaccccctgacccacgccgccctgggcgacgccagcgaggtggagatcgacgagctgcagaaccagaaggaggccgaggagcccggccccgacagcgagaacagccaggagaacccccccctgagaagcagcagcagcaccaccgccagcagcagccccagcaccgtgatccacggcgccaacagcgagcccgccgacagcaccgagatggacgacaaggccgccgtgggcgtgagcaagcccctgcccagcgtgccccccagcatcggcaagagcaacgtggacagaagacaggccgagatcggcgagggcagcgtgagaagaagaatctacgacaacccctacttcgagccccagtacggcttcccccccgaggaggacgaggacgagcagggcgagagctacacccccagattcagccagcacgtgagcggcaacagagcccagaagctgctgagacccaacagcctgagactggccagcgacagcgacgccgagagcgacagcagagccagcagccccaacagcaccgtgagcaacaccagcaccgagggcttcggcggcatcatgagcttcgccagcagcctgtacagaaaccacagcaccagcttcagcctgagcaacctgaccctgcccaccaagggcgccagagagaaggccacccccttccccagcctgaaggtgttcggcctgaacaccctgatggagatcgtgaccgaggccggccccggcagcggcgagggcaacagaagagccctggtggaccagaagagcagcgtgatcaagcacagccccaccgtgaagagagagccccccagcccccagggcagaagcagcaacagcagcgagaaccagcagttcctgaaggaggtggtgcacagcgtgctggacggccagggcgtgggctggctgaacatgaagaaggtgagaagactgctggagagcgagcagctgagagtgttcgtgctgagcaagctgaacagaatggtgcagagcgaggacgacgccagacaggacatcatccccgacgtggagatcagcagaaaggtgtacaagggcatgctggacctgctgaagtgcaccgtgctgagcctggagcagagctacgcccacgccggcctgggcggcatggccagcatcttcggcctgctggagatcgcccagacccactactacagcaaggagcccgacaagagaaagagaagccccaccgagagcgtgaacacccccgtgggcaaggaccccggcctggccggcagaggcgaccccaaggccatggcccagctgagagtgccccagctgggccccagagcccccagcgccaccggcaagggccccaaggagctggacaccagaagcctgaaggaggagaacttcatcgccagcatcgagctgtggaacaagcaccaggaggtgaagaagcagaaggccctggagaagcagagacccgaggtgatcaagcccgtgttcgacctgggcgagaccgaggagaagaagagccagatcagcgccgacagcggcgtgagcctgaccagcagcagccagagaaccgaccaggacagcgtgatcggcgtgagccccgccgtgatgatcagaagcagcagccaggacagcgaggtgagcaccgtggtgagcaacagcagcggcgagaccctgggcgccgacagcgacctgagcagcaacgccggcgacggccccggcggcgagggcagcgtgcacctggccagcagcagaggcaccctgagcgacagcgagatcgagaccaacagcgccaccagcaccatcttcggcaaggcccacagcctgaagcccagcatcaaggagaagctggccggcagccccatcagaaccagcgaggacgtgagccagagagtgtacctgtacgagggcctgctgggcagagacaagggcagcatgtgggaccagctggaggacgccgccatggagaccttcagcatcagcaaggagagaagcaccctgtgggaccagatgcagttctgggaggacgccttcctggacgccgtgatgctggagagagagggcatgggcatggaccagggcccccaggagatgatcgacagatacctgagcctgggcgagcacgacagaaagagactggaggacgacgaggacagactgctggccaccctgctgcacaacctgatcagctacatgctgctgatgaaggtgaacaagaacgacatcagaaagaaggtgagaagactgatgggcaagagccacatcggcctggtgtacagccagcagatcaacgaggtgctggaccagctggccaacctgaacggcagagacctgagcatctggagcagcggcagcagacacatgaagaagcagaccttcgtggtgcacgccggcaccgacaccaacggcgacatcttcttcatggaggtgtgcgacgactgcgtggtgctgagaagcaacatcggcaccgtgtacgagagatggtggtacgagaagctgatcaacatgacctactgccccaagaccaaggtgctgtgcctgtggagaagaaacggcagcgagacccagctgaacaagttctacaccaagaagtgcagagagctgtactactgcgtgaaggacagcatggagagagccgccgccagacagcagagcatcaagcccggccccgagctgggcggcgagttccccgtgcaggacctgaagaccggcgagggcggcctgctgcaggtgaccctggagggcatcaacctgaagttcatgcacaaccagttcctgaagctgaagaagtggtag

SEQ ID NO: 88036 - DNA, 4440 bp, synthetic construct
  misc_feature 1..4440: note = Description of Artificial Sequence: Synthetic coding sequence
  source 1..4440: mol_type = other DNA
atggtgcagaagaagaagttctgccccagactgctggactacctggtgatcgtgggcgccagacaccccagcagcgacagcgtggcccagacccccgagctgctgagaagataccccctggaggaccacaccgagttccccctgccccccgacgtggtgttcttctgccagcccgagggctgcctgagcgtgagacagagaagaatgagcctgagagacgacaccagcttcgtgttcaccctgaccgacaaggacaccggcgtgaccagatacggcatctgcgtgaacttctacagaagcttccagaagagaatcagcaaggagaagggcgagggcggcgccggcagcagaggcaaggagggcacccacgccacctgcgccagcgaggagggcggcaccgagagcagcgagagcggcagcagcctgcagcccctgagcgccgacagcacccccgacgtgaaccagagccccagaggcaagagaagagccaaggccggcagcagaagcagaaacagcaccctgaccagcctgtgcgtgctgagccactaccccttcttcagcaccttcagagagtgcctgtacaccctgaagagactggtggactgctgcagcgagagactgctgggcaagaagctgggcatccccagaggcgtgcagagagacaccatgtggagaatcttcaccggcagcctgctggtggaggagaagagcagcgccctgctgcacgacctgagagagatcgaggcctggatctacagactgctgagaagccccgtgcccgtgagcggccagaagagagtggacatcgaggtgctgccccaggagctgcagcccgccctgaccttcgccctgcccgaccccagcagattcaccctggtggacttccccctgcacctgcccctggagctgctgggcgtggacgcctgcctgcaggtgctgacctgcatcctgctggagcacaaggtggtgctgcagagcagagactacaacgccctgagcatgagcgtgatggccttcgtggccatgatctaccccctggagtacatgttccccgtgatccccctgctgcccacctgcatggccagcgccgagcagctgctgctggcccccaccccctacatcatcggcgtgcccgccagcttcttcctgtacaagctggacttcaagatgcccgacgacgtgtggctggtggacctggacagcaacagagtgatcgcccccaccaacgccgaggtgctgcccatcctgcccgagcccgagagcctggagctgaagaagcacctgaagcaggccctggccagcatgagcctgaacacccagcccatcctgaacctggagaagttccacgagggccaggagatccccctgctgctgggcagacccagcaacgacctgcagagcacccccagcaccgagttcaaccccctgatctacggcaacgacgtggacagcgtggacgtggccaccagagtggccatggtgagattcttcaacagcgccaacgtgctgcagggcttccagatgcacaccagaaccctgagactgttccccagacccgtggtggccttccaggccggcagcttcctggccagcagacccagacagacccccttcgccgagaagctggccagaacccaggccgtggagtacttcggcgagtggatcctgaaccccaccaactacgccttccagagaatccacaacaacatgttcgaccccgccctgatcggcgacaagcccaagtggtacgcccaccagctgcagcccatccactacagagtgtacgacagcaacagccagctggccgaggccctgagcgtgccccccgagagagacagcgacagcgagcccaccgacgacagcggcagcgacagcatggactacgacgacagcagcagcagctacagcagcctgggcgacttcgtgagcgagatgatgaagtgcgacatcaacggcgacacccccaacgtggaccccctgacccacgccgccctgggcgacgccagcgaggtggagatcgacgagctgcagaaccagaaggaggccgaggagcccggccccgacagcgagaacagccaggagaacccccccctgagaagcagcagcagcaccaccgccagcagcagccccagcaccgtgatccacggcgccaacagcgagcccgccgacagcaccgagatggacgacaaggccgccgtgggcgtgagcaagcccctgcccagcgtgccccccagcatcggcaagagcaacgtggacagaagacaggccgagatcggcgagggcgcccagaagctgctgagacccaacagcctgagactggccagcgacagcgacgccgagagcgacagcagagccagcagccccaacagcaccgtgagcaacaccagcaccgagggcttcggcggcatcatgagcttcgccagcagcctgtacagaaaccacagcaccagcttcagcctgagcaacctgaccctgcccaccaagggcgccagagagaaggccacccccttccccagcctgaagggcaacagaagagccctggtggaccagaagagcagcgtgatcaagcacagccccaccgtgaagagagagccccccagcccccagggcagaagcagcaacagcagcgagaaccagcagttcctgaaggaggtggtgcacagcgtgctggacggccagggcgtgggctggctgaacatgaagaaggtgagaagactgctggagagcgagcagctgagagtgttcgtgctgagcaagctgaacagaatggtgcagagcgaggacgacgccagacaggacatcatccccgacgtggagatcagcagaaaggtgtacaagggcatgctggacctgctgaagtgcaccgtgctgagcctggagcagagctacgcccacgccggcctgggcggcatggccagcatcttcggcctgctggagatcgcccagacccactactacagcaaggagcccgacaagagaaagagaagccccaccgagagcgtgaacacccccgtgggcaaggaccccggcctggccggcagaggcgaccccaaggccatggcccagctgagagtgccccagctgggccccagagcccccagcgccaccggcaagggccccaaggagctggacaccagaagcctgaaggaggagaacttcatcgccagcatcggccccgaggtgatcaagcccgtgttcgacctgggcgagaccgaggagaagaagagccagatcagcgccgacagcggcgtgagcctgaccagcagcagccagagaaccgaccaggacagcgtgatcggcgtgagccccgccgtgatgatcagaagcagcagccaggacagcgaggtgagcaccgtggtgagcaacagcagcggcgagaccctgggcgccgacagcgacctgagcagcaacgccggcgacggccccggcggcgagggcagcgtgcacctggccagcagcagaggcaccctgagcgacagcgagatcgagaccaacagcgccaccagcaccatcttcggcaaggcccacagcctgaagcccagcatcaaggagaagctggccggcagccccatcagaaccagcgaggacgtgagccagagagtgtacctgtacgagggcctgctgggcaaggagagaagcaccctgtgggaccagatgcagttctgggaggacgccttcctggacgccgtgatgctggagagagagggcatgggcatggaccagggcccccaggagatgatcgacagatacctgagcctgggcgagcacgacagaaagagactggaggacgacgaggacagactgctggccaccctgctgcacaacctgatcagctacatgctgctgatgaaggtgaacaagaacgacatcagaaagaaggtgagaagactgatgggcaagagccacatcggcctggtgtacagccagcagatcaacgaggtgctggaccagctggccaacctgaacggcagagacctgagcatctggagcagcggcagcagacacatgaagaagcagaccttcgtggtgcacgccggcaccgacaccaacggcgacatcttcttcatggaggtgtgcgacgactgcgtggtgctgagaagcaacatcggcaccgtgtacgagagatggtggtacgagaagctgatcaacatgacctactgccccaagaccaaggtgctgtgcctgtggagaagaaacggcagcgagacccagctgaacaagttctacaccaagaagtgcagagagctgtactactgcgtgaaggacagcatggagagagccgccgccagacagcagagcatcaagcccggccccgagctgggcggcgagttccccgtgcaggacctgaagaccggcgagggcggcctgctgcaggtgaccctggagggcatcaacctgaagttcatgcacaaccagctgctgagaagactgagatggtag

SEQ ID NO: 88037 - DNA, 4626 bp, synthetic construct
  misc_feature 1..4626: note = Description of Artificial Sequence: Synthetic coding sequence
  source 1..4626: mol_type = other DNA
atggtgcagaagaagaagttctgccccagactgctggactacctggtgatcgtgggcgccagacaccccagcagcgacagcgtggcccagacccccgagctgctgagaagataccccctggaggaccacaccgagttccccctgccccccgacgtggtgttcttctgccagcccgagggctgcctgagcgtgagacagagaagaatgagcctgagagacgacaccagcttcgtgttcaccctgaccgacaaggacaccggcgtgaccagatacggcatctgcgtgaacttctacagaagcttccagaagagaatcagcaaggagaagggcgagggcggcgccggcagcagaggcaaggagggcacccacgccacctgcgccagcgaggagggcggcaccgagagcagcgagagcggcagcagcctgcagcccctgagcgccgacagcacccccgacgtgaaccagagccccagaggcaagagaagagccaaggccggcagcagaagcagaaacagcaccctgaccagcctgtgcgtgctgagccactaccccttcttcagcaccttcagagagtgcctgtacaccctgaagagactggtggactgctgcagcgagagactgctgggcaagaagctgggcatccccagaggcgtgcagagagacaccatgtggagaatcttcaccggcagcctgctggtggaggagaagagcagcgccctgctgcacgacctgagagagatcgaggcctggatctacagactgctgagaagccccgtgcccgtgagcggccagaagagagtggacatcgaggtgctgccccaggagctgcagcccgccctgaccttcgccctgcccgaccccagcagattcaccctggtggacttccccctgcacctgcccctggagctgctgggcgtggacgcctgcctgcaggtgctgacctgcatcctgctggagcacaaggtggtgctgcagagcagagactacaacgccctgagcatgagcgtgatggccttcgtggccatgatctaccccctggagtacatgttccccgtgatccccctgctgcccacctgcatggccagcgccgagcagctgctgctggcccccaccccctacatcatcggcgtgcccgccagcttcttcctgtacaagctggacttcaagatgcccgacgacgtgtggctggtggacctggacagcaacagagtgatcgcccccaccaacgccgaggtgctgcccatcctgcccgagcccgagagcctggagctgaagaagcacctgaagcaggccctggccagcatgagcctgaacacccagcccatcctgaacctggagaagttccacgagggccaggagatccccctgctgctgggcagacccagcaacgacctgcagagcacccccagcaccgagttcaaccccctgatctacggcaacgacgtggacagcgtggacgtggccaccagagtggccatggtgagattcttcaacagcgccaacgtgctgcagggcttccagatgcacaccagaaccctgagactgttccccagacccgtggtggccttccaggccggcagcttcctggccagcagacccagacagacccccttcgccgagaagctggccagaacccaggccgtggagtacttcggcgagtggatcctgaaccccaccaactacgccttccagagaatccacaacaacatgttcgaccccgccctgatcggcgacaagcccaagtggtacgcccaccagctgcagcccatccactacagagtgtacgacagcaacagccagctggccgaggccctgagcgtgccccccgagagagacagcgacagcgagcccaccgacgacagcggcagcgacagcatggactacgacgacagcagcagcagctacagcagcctgggcgacttcgtgagcgagatgatgaagtgcgacatcaacggcgacacccccaacgtggaccccctgacccacgccgccctgggcgacgccagcgaggtggagatcgacgagctgcagaaccagaaggaggccgaggagcccggccccgacagcgagaacagccaggagaacccccccctgagaagcagcagcagcaccaccgccagcagcagccccagcaccgtgatccacggcgccaacagcgagcccgccgacagcaccgagatggacgacaaggccgccgtgggcgtgagcaagcccctgcccagcgtgccccccagcatcggcaagagcaacgtggacagaagacaggccgagatcggcgagggcgcccagaagctgctgagacccaacagcctgagactggccagcgacagcgacgccgagagcgacagcagagccagcagccccaacagcaccgtgagcaacaccagcaccgagggcttcggcggcatcatgagcttcgccagcagcctgtacagaaaccacagcaccagcttcagcctgagcaacctgaccctgcccaccaagggcgccagagagaaggccacccccttccccagcctgaagggcaacagaagagccctggtggaccagaagagcagcgtgatcaagcacagccccaccgtgaagagagagccccccagcccccagggcagaagcagcaacagcagcgagaaccagcagttcctgaaggaggtggtgcacagcgtgctggacggccagggcgtgggctggctgaacatgaagaaggtgagaagactgctggagagcgagcagctgagagtgttcgtgctgagcaagctgaacagaatggtgcagagcgaggacgacgccagacaggacatcatccccgacgtggagatcagcagaaaggtgtacaagggcatgctggacctgctgaagtgcaccgtgctgagcctggagcagagctacgcccacgccggcctgggcggcatggccagcatcttcggcctgctggagatcgcccagacccactactacagcaaggagcccgacaagagaaagagaagccccaccgagagcgtgaacacccccgtgggcaaggaccccggcctggccggcagaggcgaccccaaggccatggcccagctgagagtgccccagctgggccccagagcccccagcgccaccggcaagggccccaaggagctggacaccagaagcctgaaggaggagaacttcatcgccagcatcggccccgaggtgatcaagcccgtgttcgacctgggcgagaccgaggagaagaagagccagatcagcgccgacagcggcgtgagcctgaccagcagcagccagagaaccgaccaggacagcgtgatcggcgtgagccccgccgtgatgatcagaagcagcagccaggacagcgaggtgagcaacagcagcggcgagaccctgggcgccgacagcgacctgagcagcaacgccggcgacggccccggcggcgagggcagcgtgcacctggccagcagcagaggcaccctgagcgacagcgagatcgagaccaacagcgccaccagcaccatcttcggcaaggcccacagcctgaagcccagcatcaaggagaagctggccggcagccccatcagaaccagcgaggacgtgagccagagagtgtacctgtacgagggcctgctgggcaaggagagaagcaccctgtgggaccagatgcagttctgggaggacgccttcctggacgccgtgatgctggagagagagggcatgggcatggaccagggcccccaggagatgatcgacagatacctgagcctgggcgagcacgacagaaagagactggaggacgacgaggacagactgctggccaccctgctgcacaacctgatcagctacatgctgctgatgaaggtgaacaagaacgacatcagaaagaaggtgagaagactgatgggcaagagccacatcggcctggtgtacagccagcagatcaacgaggtgctggaccagctggccaacctgaacggcagagacctgagcatctggagcagcggcagcagacacatgaagaagcagaccttcgtggtgcacgccggcaccgacaccaacggcgacatcttcttcatggaggtgtgcgacgactgcgtggtgctgagaagcaacatcggcaccgtgtacgagagatggtggtacgagaagctgatcaacatgacctactgccccaagaccaaggtgctgtgcctgtggagaagaaacggcagcgagacccagctgaacaagttctacaccaagaagtgcagagagctgtactactgcgtgaaggacagcatggagagagccgccgccagacagcagagcatcaagcccggccccgagctgggcggcgagttccccgtgcaggacctgaagaccggcgagggcggcctgctgcaggtgaccctggagggcatcaacctgaagttcatgcacaaccaggtgttcatcgagctgaaccacatcaagaagtgcaacaccgtgagaggcgtgttcgtgctggaggagttcgtgcccgagatcaaggaggtggtgagccacaagtacaagacccccatggcccacgagatctgctacagcgtgctgtgcctgttcagctacgtggccgccgtgcacagcagcgaggaggacctgagaaccccccccagacccgtgagcagctag

SEQ ID NO: 88038 - DNA, 4764 bp, synthetic construct
  misc_feature 1..4764: note = Description of Artificial Sequence: Synthetic coding sequence
  source 1..4764: mol_type = other DNA
atggtgcagaagaagaagttctgccccagactgctggactacctggtgatcgtgggcgccagacaccccagcagcgacagcgtggcccagacccccgagctgctgagaagataccccctggaggaccacaccgagttccccctgccccccgacgtggtgttcttctgccagcccgagggctgcctgagcgtgagacagagaagaatgagcctgagagacgacaccagcttcgtgttcaccctgaccgacaaggacaccggcgtgaccagatacggcatctgcgtgaacttctacagaagcttccagaagagaatcagcaaggagaagggcgagggcggcgccggcagcagaggcaaggagggcacccacgccacctgcgccagcgaggagggcggcaccgagagcagcgagagcggcagcagcctgcagcccctgagcgccgacagcacccccgacgtgaaccagagccccagaggcaagagaagagccaaggccggcagcagaagcagaaacagcaccctgaccagcctgtgcgtgctgagccactaccccttcttcagcaccttcagagagtgcctgtacaccctgaagagactggtggactgctgcagcgagagactgctgggcaagaagctgggcatccccagaggcgtgcagagagacaccatgtggagaatcttcaccggcagcctgctggtggaggagaagagcagcgccctgctgcacgacctgagagagatcgaggcctggatctacagactgctgagaagccccgtgcccgtgagcggccagaagagagtggacatcgaggtgctgccccaggagctgcagcccgccctgaccttcgccctgcccgaccccagcagattcaccctggtggacttccccctgcacctgcccctggagctgctgggcgtggacgcctgcctgcaggtgctgacctgcatcctgctggagcacaaggtggtgctgcagagcagagactacaacgccctgagcatgagcgtgatggccttcgtggccatgatctaccccctggagtacatgttccccgtgatccccctgctgcccacctgcatggccagcgccgagcagctgctgctggcccccaccccctacatcatcggcgtgcccgccagcttcttcctgtacaagctggacttcaagatgcccgacgacgtgtggctggtggacctggacagcaacagagtgatcgcccccaccaacgccgaggtgctgcccatcctgcccgagcccgagagcctggagctgaagaagcacctgaagcaggccctggccagcatgagcctgaacacccagcccatcctgaacctggagaagttccacgagggccaggagatccccctgctgctgggcagacccagcaacgacctgcagagcacccccagcaccgagttcaaccccctgatctacggcaacgacgtggacagcgtggacgtggccaccagagtggccatggtgagattcttcaacagcgccaacgtgctgcagggcttccagatgcacaccagaaccctgagactgttccccagacccgtggtggccttccaggccggcagcttcctggccagcagacccagacagacccccttcgccgagaagctggccagaacccaggccgtggagtacttcggcgagtggatcctgaaccccaccaactacgccttccagagaatccacaacaacatgttcgaccccgccctgatcggcgacaagcccaagtggtacgcccaccagctgcagcccatccactacagagtgtacgacagcaacagccagctggccgaggccctgagcgtgccccccgagagagacagcgacagcgagcccaccgacgacagcggcagcgacagcatggactacgacgacagcagcagcagctacagcagcctgggcgacttcgtgagcgagatgatgaagtgcgacatcaacggcgacacccccaacgtggaccccctgacccacgccgccctgggcgacgccagcgaggtggagatcgacgagctgcagaaccagaaggaggccgaggagcccggccccgacagcgagaacagccaggagaacccccccctgagaagcagcagcagcaccaccgccagcagcagccccagcaccgtgatccacggcgccaacagcgagcccgccgacagcaccgagatggacgacaaggccgccgtgggcgtgagcaagcccctgcccagcgtgccccccagcatcggcaagagcaacgtggacagaagacaggccgagatcggcgagggcagcgtgagaagaagaatctacgacaacccctacttcgagccccagtacggcttcccccccgaggaggacgaggacgagcagggcgagagctacacccccagattcagccagcacgtgagcggcaacagagcccagaagctgctgagacccaacagcctgagactggccagcgacagcgacgccgagagcgacagcagagccagcagccccaacagcaccgtgagcaacaccagcaccgagggcttcggcggcatcatgagcttcgccagcagcctgtacagaaaccacagcaccagcttcagcctgagcaacctgaccctgcccaccaagggcgccagagagaaggccacccccttccccagcctgaagggcaacagaagagccctggtggaccagaagagcagcgtgatcaagcacagccccaccgtgaagagagagccccccagcccccagggcagaagcagcaacagcagcgagaaccagcagttcctgaaggaggtggtgcacagcgtgctggacggccagggcgtgggctggctgaacatgaagaaggtgagaagactgctggagagcgagcagctgagagtgttcgtgctgagcaagctgaacagaatggtgcagagcgaggacgacgccagacaggacatcatccccgacgtggagatcagcagaaaggtgtacaagggcatgctggacctgctgaagtgcaccgtgctgagcctggagcagagctacgcccacgccggcctgggcggcatggccagcatcttcggcctgctggagatcgcccagacccactactacagcaaggagcccgacaagagaaagagaagccccaccgagagcgtgaacacccccgtgggcaaggaccccggcctggccggcagaggcgaccccaaggccatggcccagctgagagtgccccagctgggccccagagcccccagcgccaccggcaagggccccaaggagctggacaccagaagcctgaaggaggagaacttcatcgccagcatcggccccgaggtgatcaagcccgtgttcgacctgggcgagaccgaggagaagaagagccagatcagcgccgacagcggcgtgagcctgaccagcagcagccagagaaccgaccaggacagcgtgatcggcgtgagccccgccgtgatgatcagaagcagcagccaggacagcgaggtgagcaccgtgagcaacagcagcggcgagaccctgggcgccgacagcgacctgagcagcaacgccggcgacggccccggcggcgagggcagcgtgcacctggccagcagcagaggcaccctgagcgacagcgagatcgagaccaacagcgccaccagcaccatcttcggcaaggcccacagcctgaagcccagcatcaaggagaagctggccggcagccccatcagaaccagcgaggacgtgagccagagagtgtacctgtacgagggcctgctgggcaaggagagaagcaccctgtgggaccagatgcagttctgggaggacgccttcctggacgccgtgatgctggagagagagggcatgggcatggaccagggcccccaggagatgatcgacagatacctgagcctgggcgagcacgacagaaagagactggaggacgacgaggacagactgctggccaccctgctgcacaacctgatcagctacatgctgctgatgaaggtgaacaagaacgacatcagaaagaaggtgagaagactgatgggcaagagccacatcggcctggtgtacagccagcagatcaacgaggtgctggaccagctggccaacctgaacggcagagacctgagcatctggagcagcggcagcagacacatgaagaagcagaccttcgtggtgcacgccggcaccgacaccaacggcgacatcttcttcatggaggtgtgcgacgactgcgtggtgctgagaagcaacatcggcaccgtgtacgagagatggtggtacgagaagctgatcaacatgacctactgccccaagaccaaggtgctgtgcctgtggagaagaaacggcagcgagacccagctgaacaagttctacaccaagaagtgcagagagctgtactactgcgtgaaggacagcatggagagagccgccgccagacagcagagcatcaagcccggccccgagctgggcggcgagttccccgtgcaggacctgaagaccggcgagggcggcctgctgcaggtgaccctggagggcatcaacctgaagttcatgcacaaccaggtgttcatcgagctgaaccacatcaagaagtgcaacaccgtgagaggcgtgttcgtgctggaggagttcgtgcccgagatcaaggaggtggtgagccacaagtacaagacccccatggcccacgagatctgctacagcgtgctgtgcctgttcagctacgtggccgccgtgcacagcagcgaggaggacctgagaaccccccccagacccgtgagcagctag

SEQ ID NO: 88039 - DNA, 4638 bp, synthetic construct
  misc_feature 1..4638: note = Description of Artificial Sequence: Synthetic coding sequence
  source 1..4638: mol_type = other DNA
atggtgcagaagaagaagttctgccccagactgctggactacctggtgatcgtgggcgccagacaccccagcagcgacagcgtggcccagacccccgagctgctgagaagataccccctggaggaccacaccgagttccccctgccccccgacgtggtgttcttctgccagcccgagggctgcctgagcgtgagacagagaagaatgagcctgagagacgacaccagcttcgtgttcaccctgaccgacaaggacaccggcgtgaccagatacggcatctgcgtgaacttctacagaagcttccagaagagaatcagcaaggagaagggcgagggcggcgccggcagcagaggcaaggagggcacccacgccacctgcgccagcgaggagggcggcaccgagagcagcgagagcggcagcagcctgcagcccctgagcgccgacagcacccccgacgtgaaccagagccccagaggcaagagaagagccaaggccggcagcagaagcagaaacagcaccctgaccagcctgtgcgtgctgagccactaccccttcttcagcaccttcagagagtgcctgtacaccctgaagagactggtggactgctgcagcgagagactgctgggcaagaagctgggcatccccagaggcgtgcagagagacaccatgtggagaatcttcaccggcagcctgctggtggaggagaagagcagcgccctgctgcacgacctgagagagatcgaggcctggatctacagactgctgagaagccccgtgcccgtgagcggccagaagagagtggacatcgaggtgctgccccaggagctgcagcccgccctgaccttcgccctgcccgaccccagcagattcaccctggtggacttccccctgcacctgcccctggagctgctgggcgtggacgcctgcctgcaggtgctgacctgcatcctgctggagcacaaggtggtgctgcagagcagagactacaacgccctgagcatgagcgtgatggccttcgtggccatgatctaccccctggagtacatgttccccgtgatccccctgctgcccacctgcatggccagcgccgagcagctgctgctggcccccaccccctacatcatcggcgtgcccgccagcttcttcctgtacaagctggacttcaagatgcccgacgacgtgtggctggtggacctggacagcaacagagtgatcgcccccaccaacgccgaggtgctgcccatcctgcccgagcccgagagcctggagctgaagaagcacctgaagcaggccctggccagcatgagcctgaacacccagcccatcctgaacctggagaagttccacgagggccaggagatccccctgctgctgggcagacccagcaacgacctgcagagcacccccagcaccgagttcaaccccctgatctacggcaacgacgtggacagcgtggacgtggccaccagagtggccatggtgagattcttcaacagcgccaacgtgctgcagggcttccagatgcacaccagaaccctgagactgttccccagacccgtggtggccttccaggccggcagcttcctggccagcagacccagacagacccccttcgccgagaagctggccagaacccaggccgtggagtacttcggcgagtggatcctgaaccccaccaactacgccttccagagaatccacaacaacatgttcgaccccgccctgatcggcgacaagcccaagtggtacgcccaccagctgcagcccatccactacagagtgtacgacagcaacagccagctggccgaggccctgagcgtgccccccgagagagacagcgacagcgagcccaccgacgacagcggcagcgacagcatggactacgacgacagcagcagcagctacagcagcctgggcgacttcgtgagcgagatgatgaagtgcgacatcaacggcgacacccccaacgtggaccccctgacccacgccgccctgggcgacgccagcgaggtggagatcgacgagctgcagaaccagaaggaggccgaggagcccggccccgacagcgagaacagccaggagaacccccccctgagaagcagcagcagcaccaccgccagcagcagccccagcaccgtgatccacggcgccaacagcgagcccgccgacagcaccgagatggacgacaaggccgccgtgggcgtgagcaagcccctgcccagcgtgccccccagcatcggcaagagcaacgtggacagaagacaggccgagatcggcgagggcgcccagaagctgctgagacccaacagcctgagactggccagcgacagcgacgccgagagcgacagcagagccagcagccccaacagcaccgtgagcaacaccagcaccgagggcttcggcggcatcatgagcttcgccagcagcctgtacagaaaccacagcaccagcttcagcctgagcaacctgaccctgcccaccaagggcgccagagagaaggccacccccttccccagcctgaagggcaacagaagagccctggtggaccagaagagcagcgtgatcaagcacagccccaccgtgaagagagagccccccagcccccagggcagaagcagcaacagcagcgagaaccagcagttcctgaaggaggtggtgcacagcgtgctggacggccagggcgtgggctggctgaacatgaagaaggtgagaagactgctggagagcgagcagctgagagtgttcgtgctgagcaagctgaacagaatggtgcagagcgaggacgacgccagacaggacatcatccccgacgtggagatcagcagaaaggtgtacaagggcatgctggacctgctgaagtgcaccgtgctgagcctggagcagagctacgcccacgccggcctgggcggcatggccagcatcttcggcctgctggagatcgcccagacccactactacagcaaggagcccgacaagagaaagagaagccccaccgagagcgtgaacacccccgtgggcaaggaccccggcctggccggcagaggcgaccccaaggccatggcccagctgagagtgccccagctgggccccagagcccccagcgccaccggcaagggccccaaggagctggacaccagaagcctgaaggaggagaacttcatcgccagcatcggccccgaggtgatcaagcccgtgttcgacctgggcgagaccgaggagaagaagagccagatcagcgccgacagcggcgtgagcctgaccagcagcagccagagaaccgaccaggacagcgtgatcggcgtgagccccgccgtgatgatcagaagcagcagccaggacagcgaggtgagcaccgtggtgagcaacagcagcggcgagaccctgggcgccgacagcgacctgagcagcaacgccggcgacggccccggcggcgagggcagcgtgcacctggccagcagcagaggcaccctgagcgacagcgagatcgagaccaacagcgccaccagcaccatcttcggcaaggcccacagcctgaagcccagcatcaaggagaagctggccggcagccccatcagaaccagcgaggacgtgagccagagagtgtacctgtacgagggcctgctgggcaaggagagaagcaccctgtgggaccagatgcagttctgggaggacgccttcctggacgccgtgatgctggagagagagggcatgggcatggaccagggcccccaggagatgatcgacagatacctgagcctgggcgagcacgacagaaagagactggaggacgacgaggacagactgctggccaccctgctgcacaacctgatcagctacatgctgctgatgaaggtgaacaagaacgacatcagaaagaaggtgagaagactgatgggcaagagccacatcggcctggtgtacagccagcagatcaacgaggtgctggaccagctggccaacctgaacggcagagacctgagcatctggagcagcggcagcagacacatgaagaagcagaccttcgtggtgcacgccggcaccgacaccaacggcgacatcttcttcatggaggtgtgcgacgactgcgtggtgctgagaagcaacatcggcaccgtgtacgagagatggtggtacgagaagctgatcaacatgacctactgccccaagaccaaggtgctgtgcctgtggagaagaaacggcagcgagacccagctgaacaagttctacaccaagaagtgcagagagctgtactactgcgtgaaggacagcatggagagagccgccgccagacagcagagcatcaagcccggccccgagctgggcggcgagttccccgtgcaggacctgaagaccggcgagggcggcctgctgcaggtgaccctggagggcatcaacctgaagttcatgcacaaccaggtgttcatcgagctgaaccacatcaagaagtgcaacaccgtgagaggcgtgttcgtgctggaggagttcgtgcccgagatcaaggaggtggtgagccacaagtacaagacccccatggcccacgagatctgctacagcgtgctgtgcctgttcagctacgtggccgccgtgcacagcagcgaggaggacctgagaaccccccccagacccgtgagcagctag

SEQ ID NO: 88040 - DNA, 4440 bp, synthetic construct
  misc_feature 1..4440: note = Description of Artificial Sequence: Synthetic coding sequence
  source 1..4440: mol_type = other DNA
atggtgcagaagaagaagttctgccccagactgctggactacctggtgatcgtgggcgccagacaccccagcagcgacagcgtggcccagacccccgagctgctgagaagataccccctggaggaccacaccgagttccccctgccccccgacgtggtgttcttctgccagcccgagggctgcctgagcgtgagacagagaagaatgagcctgagagacgacaccagcttcgtgttcaccctgaccgacaaggacaccggcgtgaccagatacggcatctgcgtgaacttctacagaagcttccagaagagaatcagcaaggagaagggcgagggcggcgccggcagcagaggcaaggagggcacccacgccacctgcgccagcgaggagggcggcaccgagagcagcgagagcggcagcagcctgcagcccctgagcgccgacagcacccccgacgtgaaccagagccccagaggcaagagaagagccaaggccggcagcagaagcagaaacagcaccctgaccagcctgtgcgtgctgagccactaccccttcttcagcaccttcagagagtgcctgtacaccctgaagagactggtggactgctgcagcgagagactgctgggcaagaagctgggcatccccagaggcgtgcagagagacaccatgtggagaatcttcaccggcagcctgctggtggaggagaagagcagcgccctgctgcacgacctgagagagatcgaggcctggatctacagactgctgagaagccccgtgcccgtgagcggccagaagagagtggacatcgaggtgctgccccaggagctgcagcccgccctgaccttcgccctgcccgaccccagcagattcaccctggtggacttccccctgcacctgcccctggagctgctgggcgtggacgcctgcctgcaggtgctgacctgcatcctgctggagcacaaggtggtgctgcagagcagagactacaacgccctgagcatgagcgtgatggccttcgtggccatgatctaccccctggagtacatgttccccgtgatccccctgctgcccacctgcatggccagcgccgagcagctgctgctggcccccaccccctacatcatcggcgtgcccgccagcttcttcctgtacaagctggacttcaagatgcccgacgacgtgtggctggtggacctggacagcaacagagtgatcgcccccaccaacgccgaggtgctgcccatcctgcccgagcccgagagcctggagctgaagaagcacctgaagcaggccctggccagcatgagcctgaacacccagcccatcctgaacctggagaagttccacgagggccaggagatccccctgctgctgggcagacccagcaacgacctgcagagcacccccagcaccgagttcaaccccctgatctacggcaacgacgtggacagcgtggacgtggccaccagagtggccatggtgagattcttcaacagcgccaacgtgctgcagggcttccagatgcacaccagaaccctgagactgttccccagacccgtggtggccttccaggccggcagcttcctggccagcagacccagacagacccccttcgccgagaagctggccagaacccaggccgtggagtacttcggcgagtggatcctgaaccccaccaactacgccttccagagaatccacaacaacatgttcgaccccgccctgatcggcgacaagcccaagtggtacgcccaccagctgcagcccatccactacagagtgtacgacagcaacagccagctggccgaggccctgagcgtgccccccgagagagacagcgacagcgagcccaccgacgacagcggcagcgacagcatggactacgacgacagcagcagcagctacagcagcctgggcgacttcgtgagcgagatgatgaagtgcgacatcaacggcgacacccccaacgtggaccccctgacccacgccgccctgggcgacgccagcgaggtggagatcgacgagctgcagaaccagaaggaggccgaggagcccggccccgacagcgagaacagccaggagaacccccccctgagaagcagcagcagcaccaccgccagcagcagccccagcaccgtgatccacggcgccaacagcgagcccgccgacagcaccgagatggacgacaaggccgccgtgggcgtgagcaagcccctgcccagcgtgccccccagcatcggcaagagcaacgtggacagaagacaggccgagatcggcgagggcgcccagaagctgctgagacccaacagcctgagactggccagcgacagcgacgccgagagcgacagcagagccagcagccccaacagcaccgtgagcaacaccagcaccgagggcttcggcggcatcatgagcttcgccagcagcctgtacagaaaccacagcaccagcttcagcctgagcaacctgaccctgcccaccaagggcgccagagagaaggccacccccttccccagcctgaagggcaacagaagagccctggtggaccagaagagcagcgtgatcaagcacagccccaccgtgaagagagagccccccagcccccagggcagaagcagcaacagcagcgagaaccagcagttcctgaaggaggtggtgcacagcgtgctggacggccagggcgtgggctggctgaacatgaagaaggtgagaagactgctggagagcgagcagctgagagtgttcgtgctgagcaagctgaacagaatggtgcagagcgaggacgacgccagacaggacatcatccccgacgtggagatcagcagaaaggtgtacaagggcatgctggacctgctgaagtgcaccgtgctgagcctggagcagagctacgcccacgccggcctgggcggcatggccagcatcttcggcctgctggagatcgcccagacccactactacagcaaggagcccgacaagagaaagagaagccccaccgagagcgtgaacacccccgtgggcaaggaccccggcctggccggcagaggcgaccccaaggccatggcccagctgagagtgccccagctgggccccagagcccccagcgccaccggcaagggccccaaggagctggacaccagaagcctgaaggaggagaacttcatcgccagcatcggccccgaggtgatcaagcccgtgttcgacctgggcgagaccgaggagaagaagagccagatcagcgccgacagcggcgtgagcctgaccagcagcagccagagaaccgaccaggacagcgtgatcggcgtgagccccgccgtgatgatcagaagcagcagccaggacagcgaggtgagcaccgtggtgagcaacagcagcggcgagaccctgggcgccgacagcgacctgagcagcaacgccggcgacggccccggcggcgagggcagcgtgcacctggccagcagcagaggcaccctgagcgacagcgagatcgagaccaacagcgccaccagcaccatcttcggcaaggcccacagcctgaagcccagcatcaaggagaagctggccggcagccccatcagaaccagcgaggacgtgagccagagagtgtacctgtacgagggcctgctgggcaaggagagaagcaccctgtgggaccagatgcagttctgggaggacgccttcctggacgccgtgatgctggagagagagggcatgggcatggaccagggcccccaggagatgatcgacagatacctgagcctgggcgagcacgacagaaagagactggaggacgacgaggacagactgctggccaccctgctgcacaacctgatcagctacatgctgctgatgaaggtgaacaagaacgacatcagaaagaaggtgagaagactgatgggcaagagccacatcggcctggtgtacagccagcagatcaacgaggtgctggaccagctggccaacctgaacggcagagacctgagcatctggagcagcggcagcagacacatgaagaagcagaccttcgtggtgcacgccggcaccgacaccaacggcgacatcttcttcatggaggtgtgcgacgactgcgtggtgctgagaagcaacatcggcaccgtgtacgagagatggtggtacgagaagctgatcaacatgacctactgccccaagaccaaggtgctgtgcctgtggagaagaaacggcagcgagacccagctgaacaagttctacaccaagaagtgcagagagctgtactactgcgtgaaggacagcatggagagagccgccgccagacagcagagcatcaagcccggccccgagctgggcggcgagttccccgtgcaggacctgaagaccggcgagggcggcctgctgcaggtgaccctggagggcatcaacctgaagttcatgcacaaccagttcctgaagctgaagaagtggtag

SEQ ID NO: 88041 - DNA, 4698 bp, synthetic construct
  misc_feature 1..4698: note = Description of Artificial Sequence: Synthetic coding sequence
  source 1..4698: mol_type = other DNA
atggtgcagaagaagaagttctgccccagactgctggactacctggtgatcgtgggcgccagacaccccagcagcgacagcgtggcccagacccccgagctgctgagaagataccccctggaggaccacaccgagttccccctgccccccgacgtggtgttcttctgccagcccgagggctgcctgagcgtgagacagagaagaatgagcctgagagacgacaccagcttcgtgttcaccctgaccgacaaggacaccggcgtgaccagatacggcatctgcgtgaacttctacagaagcttccagaagagaatcagcaaggagaagggcgagggcggcgccggcagcagaggcaaggagggcacccacgccacctgcgccagcgaggagggcggcaccgagagcagcgagagcggcagcagcctgcagcccctgagcgccgacagcacccccgacgtgaaccagagccccagaggcaagagaagagccaaggccggcagcagaagcagaaacagcaccctgaccagcctgtgcgtgctgagccactaccccttcttcagcaccttcagagagtgcctgtacaccctgaagagactggtggactgctgcagcgagagactgctgggcaagaagctgggcatccccagaggcgtgcagagagacaccatgtggagaatcttcaccggcagcctgctggtggaggagaagagcagcgccctgctgcacgacctgagagagatcgaggcctggatctacagactgctgagaagccccgtgcccgtgagcggccagaagagagtggacatcgaggtgctgccccaggagctgcagcccgccctgaccttcgccctgcccgaccccagcagattcaccctggtggacttccccctgcacctgcccctggagctgctgggcgtggacgcctgcctgcaggtgctgacctgcatcctgctggagcacaaggtggtgctgcagagcagagactacaacgccctgagcatgagcgtgatggccttcgtggccatgatctaccccctggagtacatgttccccgtgatccccctgctgcccacctgcatggccagcgccgagcagctgctgctggcccccaccccctacatcatcggcgtgcccgccagcttcttcctgtacaagctggacttcaagatgcccgacgacgtgtggctggtggacctggacagcaacagagtgatcgcccccaccaacgccgaggtgctgcccatcctgcccgagcccgagagcctggagctgaagaagcacctgaagcaggccctggccagcatgagcctgaacacccagcccatcctgaacctggagaagttccacgagggccaggagatccccctgctgctgggcagacccagcaacgacctgcagagcacccccagcaccgagttcaaccccctgatctacggcaacgacgtggacagcgtggacgtggccaccagagtggccatggtgagattcttcaacagcgccaacgtgctgcagggcttccagatgcacaccagaaccctgagactgttccccagacccgtggtggccttccaggccggcagcttcctggccagcagacccagacagacccccttcgccgagaagctggccagaacccaggccgtggagtacttcggcgagtggatcctgaaccccaccaactacgccttccagagaatccacaacaacatgttcgaccccgccctgatcggcgacaagcccaagtggtacgcccaccagctgcagcccatccactacagagtgtacgacagcaacagccagctggccgaggccctgagcgtgccccccgagagagacagcgacagcgagcccaccgacgacagcggcagcgacagcatggactacgacgacagcagcagcagctacagcagcctgggcgacttcgtgagcgagatgatgaagtgcgacatcaacggcgacacccccaacgtggaccccctgacccacgccgccctgggcgacgccagcgaggtggagatcgacgagctgcagaaccagaaggaggccgaggagcccggccccgacagcgagaacagccaggagaacccccccctgagaagcagcagcagcaccaccgccagcagcagccccagcaccgtgatccacggcgccaacagcgagcccgccgacagcaccgagatggacgacaaggccgccgtgggcgtgagcaagcccctgcccagcgtgccccccagcatcggcaagagcaacgtggacagaagacaggccgagatcggcgagggcgcccagaagctgctgagacccaacagcctgagactggccagcgacagcgacgccgagagcgacagcagagccagcagccccaacagcaccgtgagcaacaccagcaccgagggcttcggcggcatcatgagcttcgccagcagcctgtacagaaaccacagcaccagcttcagcctgagcaacctgaccctgcccaccaagggcgccagagagaaggccacccccttccccagcctgaaggtgttcggcctgaacaccctgatggagatcgtgaccgaggccggccccggcagcggcgagggcaacagaagagccctggtggaccagaagagcagcgtgatcaagcacagccccaccgtgaagagagagccccccagcccccagggcagaagcagcaacagcagcgagaaccagcagttcctgaaggaggtggtgcacagcgtgctggacggccagggcgtgggctggctgaacatgaagaaggtgagaagactgctggagagcgagcagctgagagtgttcgtgctgagcaagctgaacagaatggtgcagagcgaggacgacgccagacaggacatcatccccgacgtggagatcagcagaaaggtgtacaagggcatgctggacctgctgaagtgcaccgtgctgagcctggagcagagctacgcccacgccggcctgggcggcatggccagcatcttcggcctgctggagatcgcccagacccactactacagcaaggagcccgacaagagaaagagaagccccaccgagagcgtgaacacccccgtgggcaaggaccccggcctggccggcagaggcgaccccaaggccatggcccagctgagagtgccccagctgggccccagagcccccagcgccaccggcaagggccccaaggagctggacaccagaagcctgaaggaggagaacttcatcgccagcatcggccccgaggtgatcaagcccgtgttcgacctgggcgagaccgaggagaagaagagccagatcagcgccgacagcggcgtgagcctgaccagcagcagccagagaaccgaccaggacagcgtgatcggcgtgagccccgccgtgatgatcagaagcagcagccaggacagcgaggtgagcaccgtggtgagcaacagcagcggcgagaccctgggcgccgacagcgacctgagcagcaacgccggcgacggccccggcggcgagggcagcgtgcacctggccagcagcagaggcaccctgagcgacagcgagatcgagaccaacagcgccaccagcaccatcttcggcaaggcccacagcctgaagcccagcatcaaggagaagctggccggcagccccatcagaaccagcgaggacgtgagccagagagtgtacctgtacgagggcctgctgggcaaggagagaagcaccctgtgggaccagatgcagttctgggaggacgccttcctggacgccgtgatgctggagagagagggcatgggcatggaccagggcccccaggagatgatcgacagatacctgagcctgggcgagcacgacagaaagagactggaggacgacgaggacagactgctggccaccctgctgcacaacctgatcagctacatgctgctgatgaaggtgaacaagaacgacatcagaaagaaggtgagaagactgatgggcaagagccacatcggcctggtgtacagccagcagatcaacgaggtgctggaccagctggccaacctgaacggcagagacctgagcatctggagcagcggcagcagacacatgaagaagcagaccttcgtggtgcacgccggcaccgacaccaacggcgacatcttcttcatggaggtgtgcgacgactgcgtggtgctgagaagcaacatcggcaccgtgtacgagagatggtggtacgagaagctgatcaacatgacctactgccccaagaccaaggtgctgtgcctgtggagaagaaacggcagcgagacccagctgaacaagttctacaccaagaagtgcagagagctgtactactgcgtgaaggacagcatggagagagccgccgccagacagcagagcatcaagcccggccccgagctgggcggcgagttccccgtgcaggacctgaagaccggcgagggcggcctgctgcaggtgaccctggagggcatcaacctgaagttcatgcacaaccaggtgttcatcgagctgaaccacatcaagaagtgcaacaccgtgagaggcgtgttcgtgctggaggagttcgtgcccgagatcaaggaggtggtgagccacaagtacaagacccccatggcccacgagatctgctacagcgtgctgtgcctgttcagctacgtggccgccgtgcacagcagcgaggaggacctgagaaccccccccagacccgtgagcagctag

SEQ ID NO: 88042 - DNA, 588 bp, synthetic construct
  misc_feature 1..588: note = Description of Artificial Sequence: Synthetic coding sequence
  source 1..588: mol_type = other DNA
atgggcagccagagcagcaaggcccccagaggcgacgtgaccgccgaggaggccgccggcgccagccccgccaaggccaacggccaggagaacggccacgtgaagagcaacggcgacctgagccccaagggcgagggcgagagcccccccgtgaacggcaccgacgaggccgccggcgccaccggcgacgccatcgagcccgccccccccagccagggcgccgaggccaagggcgaggtgccccccaaggagacccccaagaagaagaagaagttcagcttcaagaagcccttcaagctgagcggcctgagcttcaagagaaacagaaaggagggcggcggcgacagcagcgccagcagccccaccgaggaggagcaggagcagggcgagatcggcgcctgcagcgacgagggcaccgcccaggagggcaaggccgccgccacccccgagagccaggagccccaggccaagggcgccgaggccagcgccgccagcgaggaggaggccggcccccaggccaccgagcccagcacccccagcggccccgagagcggccccacccccgccagcgccgagcagaacgagtag

SEQ ID NO: 88043 - DNA, 1377 bp, synthetic construct
  misc_feature 1..1377: note = Description of Artificial Sequence: Synthetic coding sequence
  source 1..1377: mol_type = other DNA
atgagcaacgacggcagaagcagaaacagagacagaagatacgacgaggtgcccagcgacctgccctaccaggacaccaccatcagaacccaccccaccctgcacgacagcgagagagccgtgagcgccgaccccctgccccccccccccctgcccctgcagccccccttcggccccgacttctacagcagcgacaccgaggagcccgccatcgcccccgacctgaagcccgtgagaagattcgtgcccgacagctggaagaacttcttcagaggcaagaagaaggaccccgagtgggacaagcccgtgagcgacatcagatacatcagcgacggcgtggagtgcagcccccccgccagccccgccagacccaaccacagaagccccctgaacagctgcaaggacccctacggcggcagcgagggcaccttcagcagcagaaaggaggccgacgccgtgttccccagagacccctacggcagcctggacagacacacccagaccgtgagaacctacagcgagaaggtggaggagtacaacctgagatacagctacatgaagagctgggccggcctgctgagaatcctgggcgtggtggagctgctgctgggcgccggcgtgttcgcctgcgtgaccgcctacatccacaaggacagcgagtggtacaacctgttcggctacagccagccctacggcatgggcggcgtgggcggcctgggcagcatgtacggcggctactactacaccggccccaagacccccttcgtgctggtggtggccggcctggcctggatcaccaccatcatcatcctggtgctgggcatgagcatgtactacagaaccatcctgctggacagcaactggtggcccctgaccgagttcggcatcaacgtggccctgttcatcctgtacatggccgccgccatcgtgtacgtgaacgacaccaacagaggcggcctgtgctactaccccctgttcaacacccccgtgaacgccgtgttctgcagagtggagggcggccagatcgccgccatgatcttcctgttcgtgaccatgatcgtgtacctgatcagcgccctggtgtgcctgaagctgtggagacacgaggccgccagaagacacagagagtacatggagcagcaggagatcaacgagcccagcctgagcagcaagagaaagatgtgcgagatggccaccagcggcgacagacagagagacagcgaggtgaacttcaaggagctgagaaccgccaagatgaagcccgagctgctgagcggccacatccccccccccagacccgccaacttcttcgtgttcctggtggagatgggcttccacagagtgagccaggacgacctggacctgctgaccagctag

SEQ ID NO: 88044 - DNA, 1677 bp, synthetic construct
  misc_feature 1..1677: note = Description of Artificial Sequence: Synthetic coding sequence
  source 1..1677: mol_type = other DNA
atgagcaacgacggcagaagcagaaacagagacagaagatacgacgaggtgcccagcgacctgccctaccaggacaccaccatcagaacccaccccaccctgcacgacagcgagagagccgtgagcgccgaccccctgccccccccccccctgcccctgcagccccccttcggccccgacttctacagcagcgacaccgaggagcccgccatcgcccccgacctgaagcccgtgagaagattcgtgcccgacagctggaagaacttcttcagaggcaagaagaaggaccccgagtgggacaagcccgtgagcgacatcagatacatcagcgacggcgtggagtgcagcccccccgccagccccgccagacccaaccacagaagccccctgaacagctgcaaggacccctacggcggcagcgagggcaccttcagcagcagaaaggaggccgacgccgtgttccccagagacccctacggcagcctggacagacacacccagaccgtgagaacctacagcgagaaggtggaggagtacaacctgagatacagctacatgaagagctgggccggcctgctgagaatcctgggcgtggtggagctgctgctgggcgccggcgtgttcgcctgcgtgaccgcctacatccacaaggacagcgagtggtacaacctgttcggctacagccagccctacggcatgggcggcgtgggcggcctgggcagcatgtacggcggctactactacaccggccccaagacccccttcgtgctggtggtggccggcctggcctggatcaccaccatcatcatcctggtgctgggcatgagcatgtactacagaaccatcctgctggacagcaactggtggcccctgaccgagttcggcatcaacgtggccctgttcatcctgtacatggccgccgccatcgtgtacgtgaacgacaccaacagaggcggcctgtgctactaccccctgttcaacacccccgtgaacgccgtgttctgcagagtggagggcggccagatcgccgccatgatcttcctgttcgtgaccatgatcgtgtacctgatcagcgccctggtgtgcctgaagctgtggagacacgaggccgccagaagacacagagagtacatggagcagcaggagatcaacgagcccagcctgagcagcaagagaaagatgtgcgagatggccaccagcggcgacagacagagagacagcgaggtgaacttcaaggagctgagaaccgccaagatgaagcccgagctgctgagcggccacatcccccccggccacatccccaagcccatcgtgatgcccgactacgtggccaagtaccccgtgatccagaccgacgacgagagagagagatacaaggccgtgttccaggaccagttcagcgagtacaaggagctgagcgccgaggtgcaggccgtgctgagaaagttcgacgagctggacgccgtgatgagcagactgccccaccacagcgagagcagacaggagcacgagagaatcagcagaatccacgaggagttcaagaagaagaagaacgaccccaccttcctggagaagaaggagagatgcgactacctgaagaacaagctgagccacatcaagcagagaatccaggagtacgacaaggtgatgaactgggacgtgcagggctacagctag

SEQ ID NO: 88045 - DNA, 1329 bp, synthetic construct
  misc_feature 1..1329: note = Description of Artificial Sequence: Synthetic coding sequence
  source 1..1329: mol_type = other DNA
atgagcaacgacggcagaagcagaaacagagacagaagatacgacgaggtgcccagcgacctgccctaccaggacaccaccatcagaacccaccccaccctgcacgacagcgagagagccgtgagcgccgaccccctgccccccccccccctgcccctgcagccccccttcggccccgacttctacagcagcgacaccgaggagcccgccatcgcccccgacctgaagcccgtgagaagattcgtgcccgacagctggaagaacttcttcagaggcaagaagaaggaccccgagtgggacaagcccgtgagcgacatcagatacatcagcgacggcgtggagtgcagcccccccgccagccccgccagacccaaccacagaagccccctgaacagctgcaaggacccctacggcggcagcgagggcaccttcagcagcagaaaggaggccgacgccgtgttccccagagacccctacggcagcctggacagacacacccagaccgtgagaacctacagcgagaaggtggaggagtacaacctgagatacagctacatgaagagctgggccggcctgctgagaatcctgggcgtggtggagctgctgctgggcgccggcgtgttcgcctgcgtgaccgcctacatccacaaggacagcgagtggtacaacctgttcggctacagccagccctacggcatgggcggcgtgggcggcctgggcagcatcgccctggtgtgcctgaagctgtggagacacgaggccgccagaagacacagagagtacatggagcagcaggagatcaacgagcccagcctgagcagcaagagaaagatgtgcgagatggccaccagcggcgacagacagagagacagcgaggtgaacttcaaggagctgagaaccgccaagatgaagcccgagctgctgagcggccacatcccccccggccacatccccaagcccatcgtgatgcccgactacgtggccaagtaccccgtgatccagaccgacgacgagagagagagatacaaggccgtgttccaggaccagttcagcgagtacaaggagctgagcgccgaggtgcaggccgtgctgagaaagttcgacgagctggacgccgtgatgagcagactgccccaccacagcgagagcagacaggagcacgagagaatcagcagaatccacgaggagttcaagaagaagaagaacgaccccaccttcctggagaagaaggagagatgcgactacctgaagaacaagctgagccacatcaagcagagaatccaggagtacgacaaggtgatgaactgggacgtgcagggctacagctag

SEQ ID NO: 88046 - DNA, 1641 bp, synthetic construct
  misc_feature 1..1641: note = Description of Artificial Sequence: Synthetic coding sequence
  source 1..1641: mol_type = other DNA
atgagcaacgacggcagaagcagaaacagagacagaagatacgacgaggtgcccagcgacctgccctaccaggacaccaccatcagaacccaccccaccctgcacgacagcgagagagccgtgagcgccgaccccctgccccccccccccctgcccctgcagccccccttcggccccgacttctacagcagcgacaccgaggagcccgccatcgcccccgacctgaagcccgtgagaagattcgtgcccgacagctggaagaacttcttcagaggcaagaagaaggaccccgagtgggacaagcccgtgagcgacatcagatacatcagcgacggcgtggagtgcagcccccccgccagccccgccagacccaaccacagaagccccctgaacagctgcaaggacccctacggcggcagcgagggcaccttcagcagcagaaaggaggccgacgccgtgttccccagagacccctacggcagcctggacagacacacccagaccgtgagaacctacagcgagaaggtggaggagtacaacctgagatacagctacatgaagagctgggccggcctgctgagaatcctgggcgtggtggagctgctgctgggcgccggcgtgttcgcctgcgtgaccgcctacatccacaaggacagcgagtggtacaacctgttcggctacagccagccctacggcatgggcggcgtgggcggcctgggcagcatgtacggcggctactactacaccggccccaagacccccttcgtgctggtggtggccggcctggcctggatcaccaccatcatcatcctggtgctgggcatgagcatgtactacagaaccatcctgctggacagcaactggtggcccctgaccgagttcggcatcaacgtggccctgttcatcctgtacatggccgccgccatcgtgtacgtgaacgacaccaacagaggcggcctgtgctactaccccctgttcaacacccccgtgaacgccgtgttctgcagagtggagggcggccagatcgccgccatgatcttcctgttcgtgaccatgatcgtgtacctgatcagcgccctggtgtgcctgaagctgtggagacacgaggccgccagaagacacagagagtacatggagcagcaggagtgcgagatggccaccagcggcgacagacagagagacagcgaggtgaacttcaaggagctgagaaccgccaagatgaagcccgagctgctgagcggccacatcccccccggccacatccccaagcccatcgtgatgcccgactacgtggccaagtaccccgtgatccagaccgacgacgagagagagagatacaaggccgtgttccaggaccagttcagcgagtacaaggagctgagcgccgaggtgcaggccgtgctgagaaagttcgacgagctggacgccgtgatgagcagactgccccaccacagcgagagcagacaggagcacgagagaatcagcagaatccacgaggagttcaagaagaagaagaacgaccccaccttcctggagaagaaggagagatgcgactacctgaagaacaagctgagccacatcaagcagagaatccaggagtacgacaaggtgatgaactgggacgtgcagggctacagctag

SEQ ID NO: 88047 - DNA, 1551 bp, synthetic construct
  misc_feature 1..1551: note = Description of Artificial Sequence: Synthetic coding sequence
  source 1..1551: mol_type = other DNA
atgagcaacgacggcagaagcagaaacagagacagaagatacgacgaggtgcccagcgacctgccctaccaggacaccaccatcagaacccaccccaccctgcacgacagcgagagagccgtgagcgccgaccccctgccccccccccccctgcccctgcagccccccttcggccccgacttctacagcagcgacaccgaggagcccgccatcgcccccgacctgaagcccgtgagaagattcgtgcccgacagctggaagaacttcttcagaggcaagaagaaggaccccgagtgggacaagcccgtgagcgacatcagatacatcagcgacggcgtggagtgcagcccccccgccagccccgccagacccaaccacagaagccccctgaacagctgcaaggacccctacggcggcagcgagggcaccttcagcagcagaaaggaggccgacgccgtgttccccagagacccctacggcagcctggacagacacacccagaccgtgagaacctacagcgagaaggtggaggagtacaacctgagatacagctacatgaagagctgggccggcctgctgagaatcctgggcgtggtggagctgctgctgggcgccggcgtgttcgcctgcgtgaccgcctacatccacaaggacagcgagtggtacaacctgttcggctacagccagccctacggcatgggcggcgtgggcggcctgggcagcatgtacggcggctactactacaccggccccaagacccccttcgtgctggtggtggccggcctggcctggatcaccaccatcatcatcctggtgctgggcatgagcatgtactacagaaccatcctgctggacagcaactggtggcccctgaccgagttcggcatcaacgtggccctgttcatcctgtacatggccgccgccatcgtgtacgtgaacgacaccaacagaggcggcctgtgctactaccccctgttcaacacccccgtgaacgccgtgttctgcagagtggagggcggccagatcgccgccatgatcttcctgttcgtgaccatgatcgtgtacctgatcagcgccctggtgtgcctgaagctgtggagacacgaggccgccagaagacacagagagtacatggagcagcaggagatcaacgagcccagcctgagcagcaagagaaagatgtgcgagatggccaccagcggcgacagacagagagacagcgaggtgaacttcaaggagctgagaaccgccaagatgaagcccgagctgctgagcggccacatcccccccggccacatccccaagcccatcgtgatgcccgactacgtggccaagtaccccgtgatccagaccgacgacgagagagagagatacaaggccgtgttccaggaccagttcagcgagtacaaggagctgagcgccgaggtgcaggccgtgctgagaaagttcgacgagctggacgccgtgatgagcagactgccccaccacagcgagagcagacaggagcacgagagaatcagcagaatccacgaggagttcaagaagaagtag

SEQ ID NO: 88048 - DNA, 438 bp, synthetic construct
  misc_feature 1..438: note = Description of Artificial Sequence: Synthetic coding sequence
  source 1..438: mol_type = other DNA
atgagcaacgacggcagaagcagaaacagagacagaagatacgacgaggtgcccagcgacctgccctaccaggacaccaccatcagaacccaccccaccctgcacgacagcgagagagccgtgagcgccgaccccctgccccccccccccctgcccctgcagccccccttcggccccgacttctacagcagcgacaccgaggagcccgccatcgcccccgacctgaagcccgtgagaagattcgtgcccgacagctggaagaacttcttcagaggcaagaagaaggaccccgagtgggacaagcccgtgagcgacatcagatacatcagcgacggcgtggagtgcagcccccccgccagccccgccagacccaaccacagaagccccctgaacagctgcaaggacccctacggcggcagcgagggcaccttcagctag

SEQ ID NO: 88049 - DNA, 1206 bp, synthetic construct
  misc_feature 1..1206: note = Description of Artificial Sequence: Synthetic coding sequence
  source 1..1206: mol_type = other DNA
atggaggaccccagcggcgccagagagcccagagccagacccagagagagagaccccggcagaagaccccaccccgaccagggcagaacccacgacagacccagagacagacccggcgaccccagaagaaagagaagcagcgacggcaacagaagaagagacggcgacagagaccccgagagagaccaggagagagacggcaacagagacagaaacagagacagagagagagagagagagagagagagagaccccgacagaggccccagaagagacacccacagagacgccggccccagagccggcgagcacggcgtgtgggagaagcccagacagagcagaaccagagacggcgccagaggcctgacctgggacgccgccgccccccccggccccgccccctgggaggcccccgagcccccccagccccagagaaagggcgaccccggcagaagaagacccgagagcgagccccccagcgagagatacctgcccagcacccccagacccggcagagaggaggtggagtactaccagagcgaggccgagggcctgctggagtgccacaagtgcaagtacctgtgcaccggcagagcctgctgccagatgctggaggtgctgctgaacctgctgatcctggcctgcagcagcgtgagctacagcagcaccggcggctacaccggcatcaccagcctgggcggcatctactactaccagttcggcggcgcctacagcggcttcgacggcgccgacggcgagaaggcccagcagctggacgtgcagttctaccagctgaagctgcccatggtgaccgtggccatggcctgcagcggcgccctgaccgccctgtgctgcctgttcgtggccatgggcgtgctgagagtgccctggcactgccccctgctgctggtgaccgagggcctgctggacatgctgatcgccggcggctacatccccgccctgtacttctacttccactacctgagcgccgcctacggcagccccgtgtgcaaggagagacaggccctgtaccagagcaagggctacagcggcttcggctgcagcttccacggcgccgacatcggcgccggcatcttcgccgccctgggcatcgtggtgttcgccctgggcgccgtgctggccatcaagggctacagaaaggtgagaaagctgaaggagaagcccgccgagatgttcgagttctag

SEQ ID NO: 88050 - DNA, 1233 bp, synthetic construct
  misc_feature 1..1233: note = Description of Artificial Sequence: Synthetic coding sequence
  source 1..1233: mol_type = other DNA
atggaggaccccagcggcgccagagagcccagagccagacccagagagagagaccccggcagaagaccccaccccgaccagggcagaacccacgacagacccagagacagacccggcgaccccagaagaaagagaagcagcgacggcaacagaagaagagacggcgacagagaccccgagagagaccaggagagagacggcaacagagacagaaacagagacagagagagagagagagagagagagagagaccccgacagaggccccagaagagacacccacagagacgccggccccagagccggcgagcacggcgtgtgggagaagcccagacagagcagaaccagagacggcgccagaggcctgacctgggacgccgccgccccccccggccccgccccctgggaggcccccgagcccccccagccccagagaaagggcgaccccggcagaagaagacccgagagcgagccccccagcgagagatacctgcccagcacccccagacccggcagagaggaggtggagtactaccagagcgaggccgagggcctgctggagtgccacaagtgcaagtacctgtgcaccggcagaggcgtggtgcagatcgtggaggtggtgctgaacggcatggtgctgatctgcatcgtggccagctacttcgtgctggccggcttcagcgccagcttcagcagcggcggcggcttcggcaacaactactacagccccttcgagggcaccgagctggagcaggtgagacagctggaccagcagtacaccatcctgagaagccccctgatctacggcggcgtggccgtgagcctgggcctgggcgtgctgaccatgggcgtgctgctgcagggcgccaagagcagaaccatgctgagcggcaagtggctgctgaccgaggccgccttcagcctgctggccgccgtgggctactgcaccggcatcggcgtgtacctgcacgtggccctgcagatcaacagcaccgacacctgcaagaccagagagagactgtacgccagaaagggcctgacctggatggactgccagctggccggcaccgacggcgccgccgccaccttcgcctgcctgctggtgatcatgtacggcgccagcgtggtgctggccctgagaagctacagagagcagaagagatacaagggcagcagagagcagcccggcagctacagcgacgcccccgagtacctgtggagcggcaccctgtag

SEQ ID NO: 88051 - DNA, 978 bp, synthetic construct
  misc_feature 1..978: note = Description of Artificial Sequence: Synthetic coding sequence
  source 1..978: mol_type = other DNA
atggacggcagcaacgtgaccagcttcgtggtggaggagcccaccaacatcagcaccggcagaaacgccagcgtgggcaacgcccacagacagatccccatcgtgcactgggtgatcatgagcatcagccccgtgggcttcgtggagaacggcatcctgctgtggttcctgtgcttcagaatgagaagaaaccccttcaccgtgtacatcacccacctgagcatcgccgacatcagcctgctgttctgcatcttcatcctgagcatcgactacgccctggactacgagctgagcagcggccactactacaccatcgtgaccctgagcgtgaccttcctgttcggctacaacaccggcctgtacctgctgaccgccatcagcgtggagagatgcctgagcgtgctgtaccccatctggtacagatgccacagacccaagtaccagagcgccctggtgtgcgccctgctgtgggccctgagctgcctggtgaccaccatggagtacgtgatgtgcatcgacagagaggaggagagccacagcagaaacgactgcagagccgtgatcatcttcatcgccatcctgagcttcctggtgttcacccccctgatgctggtgagcagcaccatcctggtggtgaagatcagaaagaacacctgggccagccacagcagcaagctgtacatcgtgatcatggtgaccatcatcatcttcctgatcttcgccatgcccatgagactgctgtacctgctgtactacgagtactggagcaccttcggcaacctgcaccacatcagcctgctgttcagcaccatcaacagcagcgccaaccccttcatctacttcttcgtgggcagcagcaagaagaagagattcaaggagagcctgaaggtggtgctgaccagagccttcaaggacgagatgcagcccagaagacagaaggacaactgcaacaccgtgaccgtggagaccgtggtgtag

SEQ ID NO: 88052 - DNA, 1137 bp, synthetic construct
  misc_feature 1..1137: note = Description of Artificial Sequence: Synthetic coding sequence
  source 1..1137: mol_type = other DNA
atggtgtggggcaagatctgctggttcagccagagagccggctggaccgtgttcgccgagagccagatcagcctgagctgcagcctgtgcctgcacagcggcgaccaggaggcccagaaccccaacctggtgagccagctgtgcggcgtgttcctgcagaacgagaccaacgagaccatccacatgcagatgagcatggccgtgggccagcaggccctgcccctgaacatcatcgcccccaaggccgtgctggtgagcctgtgcggcgtgctgctgaacggcaccgtgttctggctgctgtgctgcggcgccaccaacccctacatggtgtacatcctgcacctggtggccgccgacgtgatctacctgtgctgcagcgccgtgggcttcctgcaggtgaccctgctgacctaccacggcgtggtgttcttcatccccgacttcctggccatcctgagccccttcagcttcgaggtgtgcctgtgcctgctggtggccatcagcaccgagagatgcgtgtgcgtgctgttccccatctggtacagatgccacagacccaagtacaccagcaacgtggtgtgcaccctgatctggggcctgcccttctgcatcaacatcgtgaagagcctgttcctgacctactggaagcacgtgaaggcctgcgtgatcttcctgaagctgagcggcctgttccacgccatcctgagcctggtgatgtgcgtgagcagcctgaccctgctgatcagattcctgtgctgcagccagcagcagaaggccaccagagtgtacgccgtggtgcagatcagcgcccccatgttcctgctgtgggccctgcccctgagcgtggcccccctgatcaccgacttcaagatgttcgtgaccaccagctacctgatcagcctgttcctgatcatcaacagcagcgccaaccccatcatctacttcttcgtgggcagcctgagaaagaagagactgaaggagagcctgagagtgatcctgcagagagccctggccgacaagcccgaggtgggcagaaacaagaaggccgccggcatcgaccccatggagcagccccacagcacccagcacgtggagaacctgctgcccagagagcacagagtggacgtggagacctag

SEQ ID NO: 88053 - DNA, 1137 bp, synthetic construct; identical to SEQ ID NO: 88052
  misc_feature 1..1137: note = Description of Artificial Sequence: Synthetic coding sequence
  source 1..1137: mol_type = other DNA

SEQ ID NO: 88054 - DNA, 1137 bp, synthetic construct; identical to SEQ ID NO: 88052
  misc_feature 1..1137: note = Description of Artificial Sequence: Synthetic coding sequence
  source 1..1137: mol_type = other DNA

SEQ ID NO: 88055 - DNA, 1137 bp, synthetic construct; identical to SEQ ID NO: 88052
  misc_feature 1..1137: note = Description of Artificial Sequence: Synthetic coding sequence
  source 1..1137: mol_type = other DNA

SEQ ID NO: 88056 - DNA, 1137 bp, synthetic construct; identical to SEQ ID NO: 88052
  misc_feature 1..1137: note = Description of Artificial Sequence: Synthetic coding sequence
  source 1..1137: mol_type = other DNA

SEQ ID NO: 88057 - DNA, 1137 bp, synthetic construct; identical to SEQ ID NO: 88052
  misc_feature 1..1137: note = Description of Artificial Sequence: Synthetic coding sequence
  source 1..1137: mol_type = other DNA

SEQ ID NO: 88058 - DNA, 1137 bp, synthetic construct; identical to SEQ ID NO: 88052
  misc_feature 1..1137: note = Description of Artificial Sequence: Synthetic coding sequence
  source 1..1137: mol_type = other DNA

SEQ ID NO: 88059 - DNA, 1137 bp, synthetic construct; identical to SEQ ID NO: 88052
  misc_feature 1..1137: note = Description of Artificial Sequence: Synthetic coding sequence
  source 1..1137: mol_type = other DNA

SEQ ID NO: 88060 - DNA, 966 bp, synthetic construct
  misc_feature 1..966: note = Description of Artificial Sequence: Synthetic coding sequence
  source 1..966: mol_type = other DNA
atgaaccagaccctgaacagcagcggcaccgtggagagcgccctgaactacagcagaggcagcaccgtgcacaccgcctacctggtgctgagcagcctggccatgttcacctgcctgtgcggcatggccggcaacagcatggtgatctggctgctgggcttcagaatgcacagaaaccccttctgcatctacatcctgaacctggccgccgccgacctgctgttcctgttcagcatggccagcaccctgagcctggagacccagcccctggtgaacaccaccgacaaggtgcacgagctgatgaagagactgatgtacttcgcctacaccgtgggcctgagcctgctgaccgccatcagcacccagagatgcctgagcgtgctgttccccatctggttcaagtgccacagacccagacacctgagcgcctgggtgtgcggcctgctgtggaccctgtgcctgctgatgaacggcctgaccagcagcttctgcagcaagttcctgaagttcaacgaggacagatgcttcagagtggacatggtgcaggccgccctgatcatgggcgtgctgacccccgtgatgaccctgagcagcctgaccctgttcgtgtgggtgagaagaagcagccagcagtggagaagacagcccaccagactgttcgtggtggtgctggccagcgtgctggtgttcctgatctgcagcctgcccctgagcatctactggttcgtgctgtactggctgagcctgccccccgagatgcaggtgctgtgcttcagcctgagcagactgagcagcagcgtgagcagcagcgccaaccccgtgatctacttcctggtgggcagcagaagaagccacagactgcccaccagaagcctgggcaccgtgctgcagcaggccctgagagaggagcccgagctggagggcggcgagacccccaccgtgggcaccaacgagatgggcgcctag

SEQ ID NO: 88061 - DNA, 936 bp, synthetic construct
  misc_feature 1..936: note = Description of Artificial Sequence: Synthetic coding sequence
  source 1..936: mol_type = other DNA
atggagcccagagaggccggccagcacgtgggcgccgccaacggcgcccaggaggacgtggccttcaacctgatcatcctgagcctgaccgagggcctgggcctgggcggcctgctgggcaacggcgccgtgctgtggctgctgagcagcaacgtgtacagaaaccccttcgccatctacctgctggacgtggcctgcgccgacctgatcttcctgggctgccacatggtggccatcgtgcccgacctgctgcagggcagactggacttccccggcttcgtgcagaccagcctggccaccctgagattcttctgctacatcgtgggcctgagcctgctggccgccgtgagcgtggagcagtgcctggccgccctgttccccgcctggtacagctgcagaagacccagacacctgaccacctgcgtgtgcgccctgacctgggccctgtgcctgctgctgcacctgctgctgagcggcgcctgcacccagttcttcggcgagcccagcagacacctgtgcagaaccctgtggctggtggccgccgtgctgctggccctgctgtgctgcaccatgtgcggcgccagcctgatgctgctgctgagagtggagagaggcccccagagacccccccccagaggcttccccggcctgatcctgctgaccgtgctgctgttcctgttctgcggcctgcccttcggcatctactggctgagcagaaacctgctgtggtacatcccccactacttctaccacttcagcttcctgatggccgccgtgcactgcgccgccaagcccgtggtgtacttctgcctgggcagcgcccagggcagaagactgcccctgagactggtgctgcagagagccctgggcgacgaggccgagctgggcgccgtgagagagaccagcagaagaggcctggtggacatcgccgcctag

SEQ ID NO: 88062 - DNA, 939 bp, synthetic construct
  misc_feature 1..939: note = Description of Artificial Sequence: Synthetic coding sequence
  source 1..939: mol_type = other DNA
atgatggagcccagagaggccggccagcacgtgggcgccgccaacggcgcccaggaggacgtggccttcaacctgatcatcctgagcctgaccgagggcctgggcctgggcggcctgctgggcaacggcgccgtgctgtggctgctgagcagcaacgtgtacagaaaccccttcgccatctacctgctggacgtggcctgcgccgacctgatcttcctgggctgccacatggtggccatcgtgcccgacctgctgcagggcagactggacttccccggcttcgtgcagaccagcctggccaccctgagattcttctgctacatcgtgggcctgagcctgctggccgccgtgagcgtggagcagtgcctggccgccctgttccccgcctggtacagctgcagaagacccagacacctgaccacctgcgtgtgcgccctgacctgggccctgtgcctgctgctgcacctgctgctgagcggcgcctgcacccagttcttcggcgagcccagcagacacctgtgcagaaccctgtggctggtggccgccgtgctgctggccctgctgtgctgcaccatgtgcggcgccagcctgatgctgctgctgagagtggagagaggcccccagagacccccccccagaggcttccccggcctgatcctgctgaccgtgctgctgttcctgttctgcggcctgcccttcggcatctactggctgagcagaaacctgctgtggtacatcccccactacttctaccacttcagcttcctgatggccgccgtgcactgcgccgccaagcccgtggtgtacttctgcctgggcagcgcccagggcagaagactgcccctgagactggtgctgcagagagccctgggcgacgaggccgagctgggcgccgtgagagagaccagcagaagaggcctggtggacatcgccgcctag

SEQ ID NO: 88063 - DNA, 1032 bp, synthetic construct
  misc_feature 1..1032: note = Description of Artificial Sequence: Synthetic coding sequence
  source 1..1032: mol_type = other DNA
atggccggcaactgcagctgggaggcccaccccggcaacagaaacaagatgtgccccggcctgagcgaggcccccgagctgtacagcagaggcttcctgaccatcgagcagatcgccatgctgcccccccccgccgtgatgaactacatcttcctgctgctgtgcctgtgcggcctggtgggcaacggcctggtgctgtggttcttcggcttcagcatcaagagaaaccccttcagcatctacttcctgcacctggccagcgccgacgtgggctacctgttcagcaaggccgtgttcagcatcctgaacaccggcggcttcctgggcaccttcgccgactacatcagaagcgtgtgcagagtgctgggcctgtgcatgttcctgaccggcgtgagcctgctgcccgccgtgagcgccgagagatgcgccagcgtgatcttccccgcctggtactggagaagaagacccaagagactgagcgccgtggtgtgcgccctgctgtgggtgctgagcctgctggtgacctgcctgcacaactacttctgcgtgttcctgggcagaggcgcccccggcgccgcctgcagacacatggacatcttcctgggcatcctgctgttcctgctgtgctgccccctgatggtgctgccctgcctggccctgatcctgcacgtggagtgcagagccagaagaagacagagaagcgccaagctgaaccacgtgatcctggccatggtgagcgtgttcctggtgagcagcatctacctgggcatcgactggttcctgttctgggtgttccagatccccgcccccttccccgagtacgtgaccgacctgtgcatctgcatcaacagcagcgccaagcccatcgtgtacttcctggccggcagagacaagagccagagactgtgggagcccctgagagtggtgttccagagagccctgagagacggcgccgagctgggcgaggccggcggcagcacccccaacaccgtgaccatggagatgcagtgcccccccggcaacgccagctag

SEQ ID NO: 88064 - DNA, 948 bp, synthetic construct
  misc_feature 1..948: note = Description of Artificial Sequence: Synthetic coding sequence
  source 1..948: mol_type = other DNA
atggccggcaactgcagctgggaggcccaccccggcaacagaaacaagatgtgccccggcctgagcgaggcccccgagctgtacagcagaggcttcctgaccatcgagcagatcgccatgctgcccccccccgccgtgatgaactacatcttcctgctgctgtgcctgtgcggcctggtgggcaacggcctggtgctgtggttcttcggcttcagcatcctgaacaccggcggcttcctgggcaccttcgccgactacatcagaagcgtgtgcagagtgctgggcctgtgcatgttcctgaccggcgtgagcctgctgcccgccgtgagcgccgagagatgcgccagcgtgatcttccccgcctggtactggagaagaagacccaagagactgagcgccgtggtgtgcgccctgctgtgggtgctgagcctgctggtgacctgcctgcacaactacttctgcgtgttcctgggcagaggcgcccccggcgccgcctgcagacacatggacatcttcctgggcatcctgctgttcctgctgtgctgccccctgatggtgctgccctgcctggccctgatcctgcacgtggagtgcagagccagaagaagacagagaagcgccaagctgaaccacgtgatcctggccatggtgagcgtgttcctggtgagcagcatctacctgggcatcgactggttcctgttctgggtgttccagatccccgcccccttccccgagtacgtgaccgacctgtgcatctgcatcaacagcagcgccaagcccatcgtgtacttcctggccggcagagacaagagccagagactgtgggagcccctgagagtggtgttccagagagccctgagagacggcgccgagctgggcgaggccggcggcagcacccccaacaccgtgaccatggagatgcagtgcccccccggcaacgccagctag

SEQ ID NO: 88065 - DNA, 1032 bp, synthetic construct; identical to SEQ ID NO: 88063
  misc_feature 1..1032: note = Description of Artificial Sequence: Synthetic coding sequence
  source 1..1032: mol_type = other DNA

SEQ ID NO: 88066 - DNA, 870 bp, synthetic construct
  misc_feature 1..870: note = Description of Artificial Sequence: Synthetic coding sequence
  source 1..870: mol_type = other DNA
atgttcggcctgttcggcctgtggagaaccttcgacagcgtggtgttctacctgaccctgatcgtgggcctgggcggccccgtgggcaacggcctggtgctgtggaacctgggcttcagaatcaagaagggccccttcagcatctacctgctgcacctggccgccgccgacttcctgttcctgagctgcagagtgggcttcagcgtggcccaggccgccctgggcgcccaggacaccctgtacttcgtgctgaccttcctgtggttcgccgtgggcctgtggctgctggccgccttcagcgtggagagatgcctgagcgacctgttccccgcctgctaccagggctgcagacccagacacgccagcgccgtgctgtgcgccctggtgtggacccccaccctgcccgccgtgcccctgcccgccaacgcctgcggcctgctgagaaacagcgcctgccccctggtgtgccccagataccacgtggccagcgtgacctggttcctggtgctggccagagtggcctggaccgccggcgtggtgctgttcgtgtgggtgacctgctgcagcaccagacccagacccagactgtacggcatcgtgctgggcgccctgctgctgctgttcttctgcggcctgcccagcgtgttctactggagcctgcagcccctgctgaacttcctgctgcccgtgttcagccccctggccaccctgctggcctgcgtgaacagcagcagcaagcccctgatctacagcggcctgggcagacagcccggcaagagagagcccctgagaagcgtgctgagaagagccctgggcgagggcgccgagctgggcgccagaggccagagcctgcccatgggcctgctgtag

SEQ ID NO: 88067 - DNA, 969 bp, synthetic construct
  misc_feature 1..969: note = Description of Artificial Sequence: Synthetic coding sequence
  source 1..969: mol_type = other DNA
atggaccccaccatcagcaccctggacaccgagctgacccccatcaacggcaccgaggagaccctgtgctacaagcagaccctgagcctgaccgtgctgacctgcatcgtgagcctggtgggcctgaccggcaacgccgtggtgctgtggctgctgggctgcagaatgagaagaaacgccttcagcatctacatcctgaacctggccgccgccgacttcctgttcctgagcggcagactgatctacagcctgctgagcttcatcagcatcccccacaccatcagcaagatcctgtaccccgtgatgatgttcagctacttcgccggcctgagcttcctgagcgccgtgagcaccgagagatgcctgagcgtgctgtggcccatctggtacagatgccacagacccacccacctgagcgccgtggtgtgcgtgctgctgtgggccctgagcctgctgagaagcatcctggagtggatgctgtgcggcttcctgttcagcggcgccgacagcgcctggtgccagaccagcgacttcatcaccgtggcctggctgatcttcctgtgcgtggtgctgtgcggcagcagcctggtgctgctgatcagaatcctgtgcggcagcagaaagatccccctgaccagactgtacgtgaccatcctgctgaccgtgctggtgttcctgctgtgcggcctgcccttcggcatccagttcttcctgttcctgtggatccacgtggacagagaggtgctgttctgccacgtgcacctggtgagcatcttcctgagcgccctgaacagcagcgccaaccccatcatctacttcttcgtgggcagcttcagacagagacagaacagacagaacctgaagctggtgctgcagagagccctgcaggacgccagcgaggtggacgagggcggcggccagctgcccgaggagatcctggagctgagcggcagcagactggagcagtag

SEQ ID NO: 88068 - DNA, 993 bp, synthetic construct
  misc_feature 1..993: note = Description of Artificial Sequence: Synthetic coding sequence
  source 1..993: mol_type = other DNA
atggaccccaccacccccgcctggggcaccgagagcaccaccgtgaacggcaacgaccaggccctgctgctgctgtgcggcaaggagaccctgatccccgtgttcctgatcctgttcatcgccctggtgggcctggtgggcaacggcttcgtgctgtggctgctgggcttcagaatgagaagaaacgccttcagcgtgtacgtgctgagcctggccggcgccgacttcctgttcctgtgcttccagatcatcaactgcctggtgtacctgagcaacttcttctgcagcatcagcatcaacttccccagcttcttcaccaccgtgatgacctgcgcctacctggccggcctgagcatgctgagcaccgtgagcaccgagagatgcctgagcgtgctgtggcccatctggtacagatgcagaagacccagacacctgagcgccgtggtgtgcgtgctgctgtgggccctgagcctgctgctgagcatcctggagggcaagttctgcggcttcctgttcagcgacggcgacagcggctggtgccagaccttcgacttcatcaccgccgcctggctgatcttcctgttcatggtgctgtgcggcagcagcctggccctgctggtgagaatcctgtgcggcagcagaggcctgcccctgaccagactgtacctgaccatcctgctgaccgtgctggtgttcctgctgtgcggcctgcccttcggcatccagtggttcctgatcctgtggatctggaaggacagcgacgtgctgttctgccacatccaccccgtgagcgtggtgctgagcagcctgaacagcagcgccaaccccatcatctacttcttcgtgggcagcttcagaaagcagtggagactgcagcagcccatcctgaagctggccctgcagagagccctgcaggacatcgccgaggtggaccacagcgagggctgcttcagacagggcacccccgagatgagcagaagcagcctggtgtag

SEQ ID NO: 88069 - DNA, 969 bp, synthetic construct
  misc_feature 1..969: note = Description of Artificial Sequence: Synthetic coding sequence
  source 1..969: mol_type = other DNA
atggacagcaccatccccgtgctgggcaccgagctgacccccatcaacggcagagaggagaccccctgctacaagcagaccctgagcttcaccggcctgacctgcatcgtgagcctggtggccctgaccggcaacgccgtggtgctgtggctgctgggctgcagaatgagaagaaacgccgtgagcatctacatcctgaacctggtggccgccgacttcctgttcctgagcggccacatcatctgcagccccctgagactgatcaacatcagacaccccatcagcaagatcctgagccccgtgatgaccttcccctacttcatcggcctgagcatgctgagcgccatcagcaccgagagatgcctgagcatcctgtggcccatctggtaccactgcagaagacccagatacctgagcagcgtgatgtgcgtgctgctgtgggccctgagcctgctgagaagcatcctggagtggatgttctgcgacttcctgttcagcggcgccaacagcgtgtggtgcgagaccagcgacttcatcaccatcgcctggctggtgttcctgtgcgtggtgctgtgcggcagcagcctggtgctgctggtgagaatcctgtgcggcagcagaaagatgcccctgaccagactgtacgtgaccatcctgctgaccgtgctggtgttcctgctgtgcggcctgcccttcggcatccagtgggccctgttcagcagaatccacctggactggaaggtgctgttctgccacgtgcacctggtgagcatcttcctgagcgccctgaacagcagcgccaaccccatcatctacttcttcgtgggcagcttcagacagagacagaacagacagaacctgaagctggtgctgcagagagccctgcaggacacccccgaggtggacgagggcggcggctggctgccccaggagaccctggagctgagcggcagcagactggagcagtag

SEQ ID NO: 88070 - DNA, 741 bp, synthetic construct
  misc_feature 1..741: note = Description of Artificial Sequence: Synthetic coding sequence
  source 1..741: mol_type = other DNA
atggacagcaccatccccgtgctgggcaccgagctgacccccatcaacggcagagaggagaccccctgctacaagcagaccctgagcttcaccggcctgacctgcatcgtgagcctggtggccctgaccggcaacgccgtggtgctgtggctgctgggctgcagaatgagaagaaacgccgtgagcatctacatcctgaacctggtggccgccgacttcctgttcctgagcggccacatcatctgcagccccctgagactgatcaacatcagacaccccatcagcaagatcctgagccccgtgatgaccttcccctacttcatcggcctgagcatgctgagcgccatcagcaccgagagatgcctgagcatcctgtggcccatctggtaccactgcagaagacccagatacctgagcagcgtgatgtgcgtgctgctgtgggccctgagcctgctgagaagcatcctggagtggatgttctgcgacttcctgttcagcggcgccaacagcgtgtggtgcgagaccagcgacttcatcaccatcgcctggctggtgttcctgtgcgtggtgctgtgcggcagcagcctggtgctgctggtgagaatcctgtgcggcagcagaaagatgcccctgaccagactgtacgtgaccatcctgctgaccgtgctggtgttcctgctgtgcggcctgcccttcggcatccagtgggccctgttcagcagaatccacctggactggtag

SEQ ID NO: 88071 - DNA, 969 bp, synthetic construct
  misc_feature 1..969: note = Description of Artificial Sequence: Synthetic coding sequence
  source 1..969: mol_type = other DNA
atggaccccaccgtgcccgtgttcggcaccaagctgacccccatcaacggcagagaggagaccccctgctacaaccagaccctgagcttcaccgtgctgacctgcatcatcagcctggtgggcctgaccggcaacgccgtggtgctgtggctgctgggctacagaatgagaagaaacgccgtgagcatctacatcctgaacctggccgccgccgacttcctgttcctgagcttccagatcatcagactgcccctgagactgatcaacatcagccacctgatcagaaagatcctggtgagcgtgatgaccttcccctacttcaccggcctgagcatgctgagcgccatcagcaccgagagatgcctgagcgtgctgtggcccatctggtacagatgcagaagacccacccacctgagcgccgtggtgtgcgtgctgctgtggggcctgagcctgctgttcagcatgctggagtggagattctgcgacttcctgttcagcggcgccgacagcagctggtgcgagaccagcgacttcatccccgtggcctggctgatcttcctgtgcgtggtgctgtgcgtgagcagcctggtgctgctggtgagaatcctgtgcggcagcagaaagatgcccctgaccagactgtacgtgaccatcctgctgaccgtgctggtgttcctgctgtgcggcctgcccttcggcatcctgggcgccctgatctacagaatgcacctgaacctggaggtgctgtactgccacgtgtacctggtgtgcatgagcctgagcagcctgaacagcagcgccaaccccatcatctacttcttcgtgggcagcttcagacagagacagaacagacagaacctgaagctggtgctgcagagagccctgcaggacaagcccgaggtggacaagggcgagggccagctgcccgaggagagcctggagctgagcggcagcagactgggcccctag

SEQ ID NO: 88072 - DNA, 3051 bp, synthetic construct
  misc_feature 1..3051: note = Description of Artificial Sequence: Synthetic coding sequence
  source 1..3051: mol_type = other DNA
atggtgctgcccacctgccccatggccgagttcgccctgcccagacacagcgccgtgatggagagactgagaagaagaatcgagctgtgcagaagacaccacagcacctgcgaggccagatacgaggccgtgagccccgagagactggagctggagagacagcacaccttcgccctgcaccagagatgcatccaggccaaggccaagagagccggcaagcacagacagccccccgccgccaccgcccccgcccccgccgcccccgcccccagactggacgccgccgacggccccgagcacggcagacccgccacccacctgcacgacaccgtgaagagaaacctggacagcgccaccagcccccagaacggcgaccagcagaacggctacggcgacctgttccccggccacaagaagaccagaagagaggcccccctgggcgtggccatcagcagcaacggcctgccccccgccagccccctgggccagagcgacaagcccagcggcgccgacgccctgcagagcagcggcaagcacagcctgggcctggacagcctgaacaagaagagactggccgacagcagcctgcacctgaacggcggcagcaaccccagcgagagcttccccctgagcctgaacaaggagctgaagcaggagcccgtggaggacctgccctgcatgatcaccggcaccgtgggcagcatcagccagagcaacctgatgcccgacctgaacctgaacgagcaggagtggaaggagctgatcgaggagctgaacagaagcgtgcccgacgaggacatgaaggacctgttcaacgaggacttcgaggagaagaaggaccccgagagcagcggcagcgccacccagacccccctggcccaggacatcaacatcaagaccgagttcagccccgccgccttcgagcaggagcagctgggcagcccccaggtgagagccggcagcgccggccagaccttcctgggccccagcagcgcccccgtgagcaccgacagccccagcctgggcggcagccagaccctgttccacaccagcggccagcccagagccgacaaccccagccccaacctgatgcccgccagcgcccaggcccagaacgcccagagagccctggccggcgtggtgctgcccagccagggccccggcggcgccagcgagctgagcagcgcccaccagctgcagcagatcgccgccaagcagaagagagagcagatgctgcagaacccccagcaggccacccccgcccccgcccccggccagatgagcacctggcagcagaccggccccagccacagcagcctggacgtgccctaccccatggagaagcccgccagccccagcagctacaagcaggacttcaccaacagcaagctgctgatgatgcccagcgtgaacaagagcagccccagacccggcggcccctacctgcagcccagccacgtgaacctgctgagccaccagccccccagcaacctgaaccagaacagcgccaacaaccagggcagcgtgctggactacggcaacaccaagcccctgagccactacaaggccgactgcggccagggcagccccggcagcggccagagcaagcccgccctgatggcctacctgccccagcagctgagccacatcagccacgagcagaacagcctgttcctgatgaagcccaagcccggcaacatgcccttcagaagcctggtgccccccggccaggagcagaaccccagcagcgtgcccgtgcaggcccaggccaccagcgtgggcacccagccccccgccgtgagcgtggccagcagccacaacagcagcccctacctgagcagccagcagcaggccgccgtgatgaagcagcaccagctgctgctggaccagcagaagcagagagagcagcagcagaagcacctgcagcagcagcagttcctgcagagacagcagcacctgctggccgagcaggagaagcagcagttccagagacacctgaccagaccccccccccagtaccaggaccccacccagggcagcttcccccagcaggtgggccagttcaccggcagcagcgccgccgtgcccggcatgaacaccctgggccccagcaacagcagctgccccagagtgttcccccaggccggcaacctgatgcccatgggccccggccacgccagcgtgagcagcctgcccaccaacagcggccagcaggacagaggcgtggcccagttccccggcagccagaacatgccccagagcagcctgtacggcatggccagcggcatcacccagatcgtggcccagccccccccccaggccaccaacggccacgcccacatccccagacagaccaacgtgggccagaacaccagcgtgagcgccgcctacggccagaacagcctgggcagcagcggcctgagccagcagcacaacaagggcaccctgaaccccggcctgaccaagccccccgtgcccagagtgagccccgccatgggcggccagaacagcagctggcagcaccagggcatgcccaacctgagcggccagacccccggcaacagcaacgtgagccccttcaccgccgccagcagcttccacatgcagcagcaggcccacctgaagatgagcagcccccagttcagccaggccgtgcccaacagacccatggcccccatgagcagcgccgccgccgtgggcagcctgctgccccccgtgagcgcccagcagagaaccagcgcccccgcccccgcccccccccccaccgccccccagcagggcctgcccggcctgagccccgccggccccgagctgggcgccttcagccagagccccgccagccagatgggcggcagagccggcctgcactgcacccaggcctaccccgtgagaaccgccggccaggagctgcccttcgcctacagcggccagcccggcggcagcggcctgagcagcgtggccggccacaccgacctgatcgacagcctgctgaagaacagaaccagcgaggagtggatgagcgacctggacgacctgctgggcagccagtag

SEQ ID NO: 88073 - DNA, 2286 bp, synthetic construct
  misc_feature 1..2286: note = Description of Artificial Sequence: Synthetic coding sequence
  source 1..2286: mol_type = other DNA
agaggcaagcagtggggcagaggcggcggcgagagacccagactggaggtgggcagcaagagaagactgggcgtgggccccagcggcgccggcggcaagcccgccgccgccagagagcccgcccccctgcccagcggcgcctggagaggcagagaggccgagagaggcagcagaggcgagagaagcccccagtgccagcccgcccccagaggccccgcccccggccccgccagagccgccagaggcccctggtgctgcccccccgccccctggagaagcagcagatgcagaggcaccgccagaagctggagcgccttcgccggcgccagcagctgcgccggcgccaccaccgcccccgccagacccgccgcccccgcccccagactggacgccgccgacggccccgagcacggcagacccgccacccacctgcacgacaccgtgaagagaaacctggacagcgccaccagcccccagaacggcgaccagcagaacggctacggcgacctgttccccggccacaagaagaccagaagagaggcccccctgggcgtggccatcagcagcaacggcctgccccccgccagccccctgggccagagcgacaagcccagcggcgccgacgccctgcagagcagcggcaagcacagcctgggcctggacagcctgaacaagaagagactggccgacagcagcctgcacctgaacggcggcagcaaccccagcgagagcttccccctgagcctgaacaaggagctgaagcaggagcccgtggaggacctgccctgcatgatcaccggcaccgtgggcagcatcagccagagcaacctgatgcccgacctgaacctgaacgagcaggagtggaaggagctgatcgaggagctgaacagaagcgtgcccgacgaggacatgaaggacctgttcaacgaggacttcgaggagaagaaggaccccgagagcagcggcagcgccacccagacccccctggcccaggacatcaacatcaagaccgagttcagccccgccgccttcgagcaggagcagctgggcagcccccaggtgagagccggcagcgccggccagaccttcctgggccccagcagcgcccccgtgagcaccgacagccccagcctgggcggcagccagaccctgttccacaccagcggccagcccagagccgacaaccccagccccaacctgatgcccgccagcgcccaggcccagaacgcccagagagccctggccggcgtggtgctgcccagccagggccccggcggcgccagcgagctgagcagcgcccaccagctgcagcagatcgccgccaagcagaagagagagcagatgctgcagaacccccagcaggccacccccgcccccgcccccggccagatgagcacctggcagcagaccggccccagccacagcagcctggacgtgccctaccccatggagaagcccgccagccccagcagctacaagcaggacttcaccaacagcaagctgctgatgatgcccagcgtgaacaagagcagccccagacccggcggcccctacctgcagcccagccacgtgaacctgctgagccaccagccccccagcaacctgaaccagaacagcgccaacaaccagggcagcgtgctggactacggcaacaccaagcccctgagccactacaaggccgactgcggccagggcagccccggcagcggccagagcaagcccgccctgatggcctacctgccccagcagctgagccacatcagccacgagcagaacagcctgttcctgatgaagcccaagcccggcaacatgcccttcagaagcctggtgccccccggccaggagcagaaccccagcagcgtgcccgtgcaggcccaggccaccagcgtgggcacccagccccccgccgtgagcgtggccagcagccacaacagcagcccctacctgagcagccagcagcaggccgccgtgatgaagcagcaccagctgctgctggaccagcagaagcagagagagcagcagcagaagcacctgcagcagcagcagttcctgcagagacagcagcacctgctggccgagcaggagaagcagcagttccagagacacctgaccagaccccccccccagtaccaggaccccacccagggcagcttcccccagcaggtgggccagttcaccgcccagggcctgagctgcgccctgcccatgatccacagcaccgaggtgctgatcagcagcctgtgcaacggcagcgccggcctgagcgccgcccagagaagctggtag

SEQ ID NO: 88074 - DNA, 3471 bp, synthetic construct
  misc_feature 1..3471: note = Description of Artificial Sequence: Synthetic coding sequence
  source 1..3471: mol_type = other DNA
atgggcgacaccgcccccccccaggcccccgccggcggcctgggcggcgccagcggcgccggcctgctgggcggcggcagcgtgacccccagagtgcacagcgccatcgtggagagactgagagccagaatcgccgtgtgcagacagcaccacctgagctgcgagggcagatacgagagaggcagagccgagagcagcgacagagagagagagagcaccctgcagctgctgagcctggtgcagcacggccagggcgccagaaaggccggcaagcacaccaaggccaccgccaccgccgccaccaccaccgcccccccccccccccccgccgccccccccgccgccagccaggccgccgccaccgccgcccccccccccccccccgactaccaccaccaccaccagcagcacctgctgaacagcagcaacaacggcggcagcggcggcatcaacggcgagcagcagccccccgccagcacccccggcgaccagagaaacagcgccctgatcgccctgcagggcagcctgaagagaaagcaggtggtgaacctgagccccgccaacagcaagagacccaacggcttcgtggacaacagcttcctggacatcaagagaatcagagtgggcgagaacctgagcgccggccagggcggcctgcagatcaacaacggccagagccagatcatgagcggcaccctgcccatgagccaggcccccctgagaaagaccaacaccctgcccagccacacccacagccccggcaacggcctgttcaacatgggcctgaaggaggtgaagaaggagcccggcgagaccctgagctgcagcaagcacatggacggccagatgacccaggagaacatcttccccaacagatacggcgacgaccccggcgagcagctgatggaccccgagctgcaggagctgttcaacgagctgaccaacatcagcgtgccccccatgagcgacctggagctggagaacatgatcaacgccaccatcaagcaggacgaccccttcaacatcgacctgggccagcagagccagagaagcacccccagacccagcctgcccatggagaagatcgtgatcaagagcgagtacagccccggcctgacccagggccccagcggcagcccccagctgagaccccccagcgccggccccgccttcagcatggccaacagcgccctgagcaccagcagccccatccccagcgtgccccagagccaggcccagccccagaccggcagcggcgccagcagagccctgcccagctggcaggaggtgagccacgcccagcagctgaagcagatcgccgccaacagacagcagcacgccagaatgcagcagcaccagcagcagcaccagcccaccaactggagcgccctgcccagcagcgccggccccagccccggccccttcggccaggagaagatccccagccccagcttcggccagcagaccttcagcccccagagcagccccatgcccggcgtggccggcggcagcggccagagcaaggtgatggccaactacatgtacaaggccggccccagcgcccagggcggccacctggacgtgctgatgcagcagaagccccaggacctgagcagaagcttcatcaacaacccccaccccgccatggagcccagacagggcaacaccaagcccctgttccacttcaacagcgaccaggccaaccagcagatgcccagcgtgctgcccagccagaacaagcccagcctgctgcactacacccagcagcagcagcagcagcagcagcagcagcagcagcagcagcagcagcagcagcagcagcagcagcagcagcagcagcagcagcagcagcagcagcagcagagcagcatcagcgcccagcagcagcagcagcagcagagcagcatcagcgcccagcagcagcagcagcagcagcagcagcagcagcagcagcagcagcagcagcagcagcagcagcagcagcagcagcagcagcccagcagccagcccgcccagagcctgcccagccagcccctgctgagaagccccctgcccctgcagcagaagctgctgctgcagcagatgcagaaccagcccatcgccggcatgggctaccaggtgagccagcagcagagacaggaccagcacagcgtggtgggccagaacaccggccccagccccagccccaacccctgcagcaaccccaacaccggcagcggctacatgaacagccagcagagcctgctgaaccagcagctgatgggcaagaagcagaccctgcagagacagatcatggagcagaagcagcagctgctgctgcagcagcagatgctggccgacgccgagaagatcgccccccaggaccagatcaacagacacctgagcagacccccccccgactacaaggaccagagaagaaacgtgggcaacatgcagcccaccgcccagtacagcggcggcagcagcaccatcagcctgaacagcaaccaggccctggccaaccccgtgagcacccacaccatcctgacccccaacagcagcctgctgagcaccagccacggcaccagaatgcccagcctgagcaccgccgtgcagaacatgggcatgtacggcaacctgccctgcaaccagcccaacacctacagcgtgaccagcggcatgaaccagctgacccagcagagaaaccccaagcagctgctggccaaccagaacaaccccatgatgcccagaccccccaccctgggccccagcaacaacaacaacgtggccaccttcggcgccggcagcgtgggcaacagccagcagctgagacccaacctgacccacagcatggccagcatgcccccccagagaaccagcaacgtgatgatcaccagcaacaccaccgcccccaactgggccagccaggagggcaccagcaagcagcaggaggccctgaccagcgccggcgtgagattccccaccggcacccccgccgcctacacccccaaccagagcctgcagcaggccgtgggcagccagcagttcagccagagagccgtggccccccccaaccagctgacccccgccgtgcagatgagacccatgaaccagatgagccagaccctgaacggccagaccatgggccccctgagaggcctgaacctgagacccaaccagctgagcacccagatcctgcccaacctgaaccagagcggcaccggcctgaaccagagcagaaccggcatcaaccagccccccagcctgacccccagcaacttccccagccccaaccagagcagcagagccttccagggcaccgaccacagcagcgacctggccttcgacttcctgagccagcagaacgacaacatgggccccgccctgaacagcgacgccgacttcatcgacagcctgctgaagaccgagcccggcaacgacgactggatgaaggacatcaacctggacgagatcctgggcaacaacagctag

SEQ ID NO: 88075 - DNA, 3471 bp, synthetic construct; identical to SEQ ID NO: 88074
  misc_feature 1..3471: note = Description of Artificial Sequence: Synthetic coding sequence
  source 1..3471: mol_type = other DNA

SEQ ID NO: 88076 - DNA, 1632 bp, synthetic construct
  misc_feature 1..1632: note = Description of Artificial Sequence: Synthetic coding sequence
  source 1..1632: mol_type = other DNA
ctgcaggagaccgtgaagagaaagctggagggcgccagaagccccctgaacggcgaccagcagaacggcgcctgcgacggcaacttcagccccaccagcaagagaatcagaaaggacatcagcgccggcatggaggccatcaacaacctgcccagcaacatgcccctgcccagcgccagccccctgcaccagctggacctgaagcccagcctgcccctgcagaacagcggcacccacacccccggcctgctggaggacctgagcaagaacggcagactgcccgagatcaagctgcccgtgaacggctgcagcgacctggaggacagcttcaccatcctgcagagcaaggacctgaagcaggagcccctggacgaccccacctgcatcgacaccagcgagaccagcctgagcaaccagaacaagctgttcagcgacatcaacctgaacgaccaggagtggcaggagctgatcgacgagctggccaacaccgtgcccgaggacgacatccaggacctgttcaacgaggacttcgaggagaagaaggagcccgagttcagccagcccgccaccgagacccccctgagccaggagagcgccagcgtgaagagcgaccccagccacagccccttcgcccacgtgagcatgggcagcccccaggccagacccagcagcagcggcccccccttcagcaccgtgagcaccgccaccagcctgcccagcgtggccagcacccccgccgcccccaaccccgccagcagccccgccaactgcgccgtgcagagcccccagacccccaaccaggcccacacccccggccaggccccccccagacccggcaacggctacctgctgaaccccgccgccgtgaccgtggccggcagcgccagcggccccgtggccgtgcccagcagcgacatgagccccgccgagcagctgaagcagatggccgcccagcagcagcagagagccaagctgatgcagcagaagcagcagcagcagcagcagcagcagcagcagcagcagcagcagcagcagcagcagcagcagcagcagcagcagcagcacagcaaccagaccagcaactggagccccctgggcccccccagcagcccctacggcgccgccttcaccgccgagaagcccaacagccccatgatgtacccccaggccttcaacaaccagaaccccatcgtgccccccatggccaacaacctgcagaagaccaccatgaacaactacctgccccagaaccacatgaacatgatcaaccagcagcccaacaacctgggcaccaacagcctgaacaagcagcacaacatcctgacctacggcaacaccaagcccctgacccacttcaacgccgacctgagccagagaatgaccccccccgtggccaaccccaacaagaaccccctgatgccctacatccagcagcagcagcagcagcagcagcagcagcagcagcagcagcagcagcagcagcccccccccccccagctgcaggcccccagagcccacctgagcgaggaccagaagagactgctgctgatgaagcagaagggcgtgatgaaccagcccatggcctacgccgccctgcccagccacggccaggagcagcagcccgtgggctag

SEQ ID NO: 88077 - DNA, 831 bp, synthetic construct
  misc_feature 1..831: note = Description of Artificial Sequence: Synthetic coding sequence
  source 1..831: mol_type = other DNA
atgagccccgccgagcagctgaagcagatggccgcccagcagcagcagagagccaagctgatgcagcagaagcagcagcagcagcagcagcagcagcagcagcagcagcagcagcacagcaaccagaccagcaactggagccccctgggcccccccagcagcccctacggcgccgccttcaccgccgagaagcccaacagccccatgatgtacccccaggccttcaacaaccagaaccccatcgtgccccccatggccaacaacctgcagaagaccaccatgaacaactacctgccccagaaccacatgaacatgatcaaccagcagcccaacaacctgggcaccaacagcctgaacaagcagcacaacatcctgacctacggcaacaccaagcccctgacccacttcaacgccgacctgagccagagaatgaccccccccgtggccaaccccaacaagaaccccctgatgccctacatccagcagcagcagcagcagcagcagcagcagcagcagcagcagcagcagcagcagcccccccccccccagctgcaggcccccagagcccacctgagcgaggaccagaagagactgctgctgatgaagcagaagggcgtgatgaaccagcccatggcctacgccgccctgcccagccacggccaggtgagcgtgaaggtgacccacagcagcagcagcagctgcggcgccttcgactgcagatgcgtgatgttctacaagagcaccgtggtgggcagcaactgcctgcagaagaccagcctgcacccccaggtggtggccagattcggcgtgttcttcttccacttcagctag

SEQ ID NO: 88078 - DNA, 3417 bp, synthetic construct
  misc_feature 1..3417: note = Description of Artificial Sequence: Synthetic coding sequence
  source 1..3417: mol_type = other DNA
atgggcgacttcgccgcccccgccgccgccgccaacggcagcagcatctgcatcaacagcagcctgaacagcagcctgggcggcgccggcatcggcgtgaacaacacccccaacagcacccccgccgcccccagcagcaaccaccccgccgccggcggctgcggcggcagcggcggccccggcggcggcagcgccgccgtgcccaagcacagcaccgtggtggagagactgagacagagaatcgagggctgcagaagacaccacgtgaactgcgagaacagataccagcaggcccaggtggagcagctggagctggagagaagagacaccgtgagcctgtaccagagaaccctggagcagagagccaagaagagcggcgccggcaccggcaagcagcagcaccccagcaagccccagcaggacgccgaggccgccagcgccgagcagagaaaccacaccctgatcatgctgcaggagaccgtgaagagaaagctggagggcgccagaagccccctgaacggcgaccagcagaacggcgcctgcgacggcaacttcagccccaccagcaagagaatcagaaaggacatcagcgccggcatggaggccatcaacaacctgcccagcaacatgcccctgcccagcgccagccccctgcaccagctggacctgaagcccagcctgcccctgcagaacagcggcacccacacccccggcctgctggaggacctgagcaagaacggcagactgcccgagatcaagctgcccgtgaacggctgcagcgacctggaggacagcttcaccatcctgcagagcaaggacctgaagcaggagcccctggacgaccccacctgcatcgacaccagcgagaccagcctgagcaaccagaacaagctgttcagcgacatcaacctgaacgaccaggagtggcaggagctgatcgacgagctggccaacaccgtgcccgaggacgacatccaggacctgttcaacgaggacttcgaggagaagaaggagcccgagttcagccagcccgccaccgagacccccctgagccaggagagcgccagcgtgaagagcgaccccagccacagccccttcgcccacgtgagcatgggcagcccccaggccagacccagcagcagcggcccccccttcagcaccgtgagcaccgccaccagcctgcccagcgtggccagcacccccgccgcccccaaccccgccagcagccccgccaactgcgccgtgcagagcccccagacccccaaccaggcccacacccccggccaggccccccccagacccggcaacggctacctgctgaaccccgccgccgtgaccgtggccggcagcgccagcggccccgtggccgtgcccagcagcgacatgagccccgccgagcagctgaagcagatggccgcccagcagcagcagagagccaagctgatgcagcagaagcagcagcagcagcagcagcagcagcagcagcagcagcagcagcagcagcagcagcagcagcagcagcagcagcagcacagcaaccagaccagcaactggagccccctgggcccccccagcagcccctacggcgccgccttcaccgccgagaagcccaacagccccatgatgtacccccaggccttcaacaaccagaaccccatcgtgccccccatggccaacaacctgcagaagaccaccatgaacaactacctgccccagaaccacatgaacatgatcaaccagcagcccaacaacctgggcaccaacagcctgaacaagcagcacaacatcctgacctacggcaacaccaagcccctgacccacttcaacgccgacctgagccagagaatgaccccccccgtggccaaccccaacaagaaccccctgatgccctacatccagcagcagcagcagcagcagcagcagcagcagcagcagcagcagcagcagcagcccccccccccccagctgcaggcccccagagcccacctgagcgaggaccagaagagactgctgctgatgaagcagaagggcgtgatgaaccagcccatggcctacgccgccctgcccagccacggccaggagcagcaccccgtgggcctgcccagaaccaccggccccatgcagagcagcgtgccccccggcagcggcggcatggtgagcggcgccagccccgccggccccggcttcctgggcagccagccccaggccgccatcatgaagcagatgctgatcgaccagagagcccagctgatcgagcagcagaagcagcagttcctgagagagcagagacagcagcagcagcagcagcagcagcagatcctggccgagcagcagctgcagcagagccacctgcccagacagcacctgcagccccagagaaacccctaccccgtgcagcaggtgaaccagttccagggcagcccccaggacatcgccgccgtgagaagccaggccgccctgcagagcatgagaaccagcagactgatggcccagaacgccggcatgatgggcatcggccccagccagaaccccggcaccatggccaccgccgccgcccagagcgagatgggcctggccccctacagcaccacccccaccagccagcccggcatgtacaacatgagcaccggcatgacccagatgctgcagcaccccaaccagagcggcatgagcatcacccacaaccaggcccagggccccagacagcccgccagcggccagggcgtgggcatggtgagcggcttcggccagagcatgctggtgaacagcgccatcacccagcagcacccccagatgaagggccccgtgggccaggccctgcccagaccccaggccccccccagactgcagagcctgatgggcaccgtgcagcagggcgcccagagctggcagcagagaagcctgcagggcatgcccggcagaaccagcggcgagctgggccccttcaacaacggcgccagctaccccctgcaggccggccagcccagactgaccaagcagcacttcccccagggcctgagccagagcgtggtggacgccaacaccggcaccgtgagaaccctgaaccccgccgccatgggcagacagatgatgcccagcctgcccggccagcagggcaccagccaggccagacccatggtgatgagcggcctgagccagggcgtgcccggcatgcccgccttcagccagccccccgcccagcagcagatccccagcggcagcttcgcccccagcagccagagccaggcctacgagagaaacgccccccaggacgtgagctacaactacagcggcgacggcgccggcggcagcttccccggcctgcccgacggcgccgacctggtggacagcatcatcaagggcggccccggcgacgagtggatgcaggagctggacgagctgttcggcaacccctag

SEQ ID NO: 88079 - DNA, 1338 bp, synthetic construct
  misc_feature 1..1338: note = Description of Artificial Sequence: Synthetic coding sequence
  source 1..1338: mol_type = other DNA
gagcagcaccccgtgggcctgcccagaaccaccggccccatgcagagcagcgtgccccccggcagcggcggcatggtgagcggcgccagccccgccggccccggcttcctgggcagccagccccaggccgccatcatgaagcagatgctgatcgaccagagagcccagctgatcgagcagcagaagcagcagttcctgagagagcagagacagcagcagcagcagcagcagcagcagatcctggccgagcagcagctgcagcagagccacctgcccagacagcacctgcagccccagagaaacccctaccccgtgcagcaggtgaaccagttccagggcagcccccaggacatcgccgccgtgagaagccaggccgccctgcagagcatgagaaccagcagactgatggcccagaacgccggcatgatgggcatcggccccagccagaaccccggcaccatggccaccgccgccgcccagagcgagatgggcctggccccctacagcaccacccccaccagccagcccggcatgtacaacatgagcaccggcatgacccagatgctgcagcaccccaaccagagcggcatgagcatcacccacaaccaggcccagggccccagacagcccgccagcggccagggcgtgggcatggtgagcggcttcggccagagcatgctggtgaacagcgccatcacccagcagcacccccagatgaagggccccgtgggccaggccctgcccagaccccaggccccccccagactgcagagcctgatgggcaccgtgcagcagggcgcccagagctggcagcagagaagcctgcagggcatgcccggcagaaccagcggcgagctgggccccttcaacaacggcgccagctaccccctgcaggccggccagcccagactgaccaagcagcacttcccccagggcctgagccagagcgtggtggacgccaacaccggcaccgtgagaaccctgaaccccgccgccatgggcagacagatgatgcccagcctgcccggccagcagggcaccagccaggccagacccatggtgatgagcggcctgagccagggcgtgcccggcatgcccgccttcagccagccccccgcccagcagcagatccccagcggcagcttcgcccccagcagccagagccaggcctacgagagaaacgccccccaggacgtgagctacaactacagcggcgacggcgccggcggcagcttccccggcctgcccgacggcgccgacctggtggacagcatcatcaagggcggccccggcgacgagtggatgcaggagctggacgagctgttcggcaacccctag

SEQ ID NO: 88080 - DNA, 2325 bp, synthetic construct
  misc_feature 1..2325: note = Description of Artificial Sequence: Synthetic coding sequence
  source 1..2325: mol_type = other DNA
atggacgactggaagagcagactggtgatcaagagcatgctgccccacttcgccatggtgggcaacagacaggagcccagaaagctgcaggagagcggcaagaagcccagctggatggaggaggaggacctgagcttcctgtacaagagcagccccggcagaaagcaccagggcaccgtgaagagaagacaggaggaggaccacttccagttccccgacatggccgacggcggctaccccaacaagatcaagagaccctgcctggaggacgtgaccctggccatgggccccggcgcccaccccagcaccgcctgcgccgagctgcaggtgccccccctgaccatcaaccccagccccgccgccatgggcgtggccggccagagcctgctgctggagaacaaccccatgaacggcaacatcatgggcagccccttcgtggtgccccagaccaccgaggtgggcctgaagggccccaccgtgccctactacgagaagatcaacagcgtgcccgccgtggaccaggagctgcaggagctgctggaggagctgaccaagatccaggaccccagccccaacgagctggacctggagaagatcctgggcaccaagcccgaggagcccctggtgctggaccacccccaggccaccctgagcaccacccccaagcccagcgtgcagatgagccacctggagagcctggccagcagcaaggagttcgccagcagctgcagccaggtgaccggcatgagcctgcagatccccagcagcagcaccggcatcagctacagcatccccagcaccagcaagcagatcgtgagccccagcagcagcatggcccagagcaagagccaggtgcaggccatgctgcccgtggccctgccccccctgcccgtgccccagtggcaccacgcccaccagctgaaggccctggccgccagcaagcagggcagcgccaccaagcagcagggccccacccccagctggagcggcctgcccccccccggcctgagccccccctacagacccgtgcccagcccccaccccccccccctgcccctgccccccccccccccccccttcagcccccagagcctgatggtgagctgcatgagcagcaacaccctgagcggcagcaccctgagaggcagccccaacgccctgctgagcagcatgaccagcagcagcaacgccgccctgggccccgccatgccctacgcccccgagaagctgcccagccccgccctgacccagcagccccagttcggcccccagagcagcatcctggccaacctgatgagcagcaccatcaagaccccccagggccacctgatgagcgccctgcccgccagcaaccccggccccagccccccctacagacccgagaagctgagcagccccggcctgccccagcagagcttcaccccccagtgcagcctgatcagaagcctgacccccaccagcaacctgctgagccagcagcagcagcagcagcagcagcagcagcaggccaacgtgatcttcaagcccatcagcagcaacagcagcaagaccctgagcatgatcatgcagcagggcatggccagcagcagccccggcgccaccgagcccttcaccttcggcaacaccaagcccctgagccacttcgtgagcgagcccggcccccagaagatgcccagcatgcccaccaccagcagacagcccagcctgctgcactacctgcagcagcccacccccacccaggccagcagcgccaccgccagcagcaccgccaccgccaccctgcagctgcagcagcagcagcagcagcagcagcagcagcccgaccacagcagcttcctgctgcagcagatgatgcagcagccccagagattccagagaagcgtggccagcgacagcatgcccgccctgcccagacagggctgctgccacctgttcgcctggaccagcgccgccagcagcgtgaagccccagcaccagcacggcaacagcttcaccagcagacaggacccccagcccggcgacgtgagccccagcaacatcacccacgtggacaaggcctgcaagctgggcgaggccagacacccccaggtgagcctgggcagacagccccccagctgccaggccctgggcagcgagagcttcctgcccggcagcagcttcgcccacgagctggccagagtgaccagcagctacagcaccagcgaggccgccccctggggcagctgggaccccaaggcctggagacaggtgcccgcccccctgctgcccagctgcgacgccaccgccagaggcaccgagatcagaagctacggcaacgacccctag

SEQ ID NO: 88081 - DNA, 411 bp, synthetic construct
  misc_feature 1..411: note = Description of Artificial Sequence: Synthetic coding sequence
  source 1..411: mol_type = other DNA
atggacgactggaagagcagactggtgatcaagagcatgctgccccacttcgccatggtgggcaacagacaggagcccagaaagctgcaggagagcggcaagaagcccagctggatggaggaggaggacctgagcttcctgtacaagagcagccccggcagaaagcaccagggcaccgtgaagagaagacaggaggaggaccacttccagttccccgacatggccgacggcggctaccccaacaagatcaagagaccctgcctggaggacgtgaccctggccatgggccccggcgcccaccccagcaccgcctgcgccgagctgcaggtgccccccctgaccatcaaccccagccccgccgccatgggcgtggccggccagagcctgctgctggagaacaaccccatgtag

SEQ ID NO: 88082 - DNA, 2325 bp, synthetic construct; identical to SEQ ID NO: 88080
  misc_feature 1..2325: note = Description of Artificial Sequence: Synthetic coding sequence
  source 1..2325: mol_type = other DNA

SEQ ID NO: 88083 - DNA, 2250 bp, synthetic construct
  misc_feature 1..2250: note = Description of Artificial Sequence: Synthetic coding sequence
  source 1..2250: mol_type = other DNA
atggacgactggaagagcagactggtgatcaagagcatgctgccccacttcgccatggtgggcaacagacaggagcccagaaagctgcaggagagcggcaccgtgaagagaagacaggaggaggaccacttccagttccccgacatggccgacggcggctaccccaacaagatcaagagaccctgcctggaggacgtgaccctggccatgggccccggcgcccaccccagcaccgcctgcgccgagctgcaggtgccccccctgaccatcaaccccagccccgccgccatgggcgtggccggccagagcctgctgctggagaacaaccccatgaacggcaacatcatgggcagccccttcgtggtgccccagaccaccgaggtgggcctgaagggccccaccgtgccctactacgagaagatcaacagcgtgcccgccgtggaccaggagctgcaggagctgctggaggagctgaccaagatccaggaccccagccccaacgagctggacctggagaagatcctgggcaccaagcccgaggagcccctggtgctggaccacccccaggccaccctgagcaccacccccaagcccagcgtgcagatgagccacctggagagcctggccagcagcaaggagttcgccagcagctgcagccaggtgaccggcatgagcctgcagatccccagcagcagcaccggcatcagctacagcatccccagcaccagcaagcagatcgtgagccccagcagcagcatggcccagagcaagagccaggtgcaggccatgctgcccgtggccctgccccccctgcccgtgccccagtggcaccacgcccaccagctgaaggccctggccgccagcaagcagggcagcgccaccaagcagcagggccccacccccagctggagcggcctgcccccccccggcctgagccccccctacagacccgtgcccagcccccaccccccccccctgcccctgccccccccccccccccccttcagcccccagagcctgatggtgagctgcatgagcagcaacaccctgagcggcagcaccctgagaggcagccccaacgccctgctgagcagcatgaccagcagcagcaacgccgccctgggccccgccatgccctacgcccccgagaagctgcccagccccgccctgacccagcagccccagttcggcccccagagcagcatcctggccaacctgatgagcagcaccatcaagaccccccagggccacctgatgagcgccctgcccgccagcaaccccggccccagccccccctacagacccgagaagctgagcagccccggcctgccccagcagagcttcaccccccagtgcagcctgatcagaagcctgacccccaccagcaacctgctgagccagcagcagcagcagcagcagcagcagcagcaggccaacgtgatcttcaagcccatcagcagcaacagcagcaagaccctgagcatgatcatgcagcagggcatggccagcagcagccccggcgccaccgagcccttcaccttcggcaacaccaagcccctgagccacttcgtgagcgagcccggcccccagaagatgcccagcatgcccaccaccagcagacagcccagcctgctgcactacctgcagcagcccacccccacccaggccagcagcgccaccgccagcagcaccgccaccgccaccctgcagctgcagcagcagcagcagcagcagcagcagcagcccgaccacagcagcttcctgctgcagcagatgatgcagcagccccagagattccagagaagcgtggccagcgacagcatgcccgccctgcccagacagggctgctgccacctgttcgcctggaccagcgccgccagcagcgtgaagccccagcaccagcacggcaacagcttcaccagcagacaggacccccagcccggcgacgtgagccccagcaacatcacccacgtggacaaggcctgcaagctgggcgaggccagacacccccaggtgagcctgggcagacagccccccagctgccaggccctgggcagcgagagcttcctgcccggcagcagcttcgcccacgagctggccagagtgaccagcagctacagcaccagcgaggccgccccctggggcagctgggaccccaaggcctggagacaggtgcccgcccccctgctgcccagctgcgacgccaccgccagaggcaccgagatcagaagctacggcaacgacccctag

SEQ ID NO: 88084 - DNA, 2997 bp, synthetic construct
  misc_feature 1..2997: note = Description of Artificial Sequence: Synthetic coding sequence
  source 1..2997: mol_type = other DNA
atggacgactggaagagcagactggtgatcaagagcatgctgccccacttcgccatggtgggcaacagacaggagcccagaaagctgcaggagagcggcaccgtgaagagaagacaggaggaggaccacttccagttccccgacatggccgacggcggctaccccaacaagatcaagagaccctgcctggaggacgtgaccctggccatgggccccggcgcccaccccagcaccgcctgcgccgagctgcaggtgccccccctgaccatcaaccccagccccgccgccatgggcgtggccggccagagcctgctgctggagaacaaccccatgaacggcaacatcatgggcagccccttcgtggtgccccagaccaccgaggtgggcctgaagggccccaccgtgccctactacgagaagatcaacagcgtgcccgccgtggaccaggagctgcaggagctgctggaggagctgaccaagatccaggaccccagccccaacgagctggacctggagaagatcctgggcaccaagcccgaggagcccctggtgctggaccacccccaggccaccctgagcaccacccccaagcccagcgtgcagatgagccacctggagagcctggccagcagcaaggagttcgccagcagctgcagccaggtgaccggcatgagcctgcagatccccagcagcagcaccggcatcagctacagcatccccagcaccagcaagcagatcgtgagccccagcagcagcatggcccagagcaagagccaggtgcaggccatgctgcccgtggccctgccccccctgcccgtgccccagtggcaccacgcccaccagctgaaggccctggccgccagcaagcagggcagcgccaccaagcagcagggccccacccccagctggagcggcctgcccccccccggcctgagccccccctacagacccgtgcccagcccccaccccccccccctgcccctgccccccccccccccccccttcagcccccagagcctgatggtgagctgcatgagcagcaacaccctgagcggcagcaccctgagaggcagccccaacgccctgctgagcagcatgaccagcagcagcaacgccgccctgggccccgccatgccctacgcccccgagaagctgcccagccccgccctgacccagcagccccagttcggcccccagagcagcatcctggccaacctgatgagcagcaccatcaagaccccccagggccacctgatgagcgccctgcccgccagcaaccccggccccagccccccctacagacccgagaagctgagcagccccggcctgccccagcagagcttcaccccccagtgcagcctgatcagaagcctgacccccaccagcaacctgctgagccagcagcagcagcagcagcagcagcagcagcaggccaacgtgatcttcaagcccatcagcagcaacagcagcaagaccctgagcatgatcatgcagcagggcatggccagcagcagccccggcgccaccgagcccttcaccttcggcaacaccaagcccctgagccacttcgtgagcgagcccggcccccagaagatgcccagcatgcccaccaccagcagacagcccagcctgctgcactacctgcagcagcccacccccacccaggccagcagcgccaccgccagcagcaccgccaccgccaccctgcagctgcagcagcagcagcagcagcagcagcagcagcccgaccacagcagcttcctgctgcagcagatgatgcagcagccccagagattccagagaagcgtggccagcgacagcatgcccgccctgcccagacagcaggaggagcagagaagcggcctgatggccatgacccccgagagacagaacgcctacatcagccagcagatgagccccttcgaggccgtgcaggagcaggtgaccagcaagtgcagcagaatcaaggccagcccccccagcagcaagcacctgatgccccccagaaccggcctgctgcagaacaacctgagccccggcatgatccccctgaccagacaccagagctgcgagggcatgggcgtgatcagccccaccctgggcaagagacagggcatcttcaccagcagcccccagtgccccatcctgagccacagcggccagacccccctgggcagactggacagcgtgtgccagcacatgcagagccccaaggccaccccccccgaggtgcccctgcccggcttctgccccagcagcctgggcacccagagcctgagcccccaccagctgagaagacccagcgtgcccagaatgcccaccgccttcaacaacgccgcctgggtgaccgccgccgccgccgtgaccaccgccgtgagcggcaagacccccctgagccaggtggacaacagcgtgcagcagcacagccccagcggccaggcctgcctgcagagacccagcgactgggaggcccaggtgcccgccgccatgggcacccaggtgcccctggccaacaaccccagcttcagcctgctgggcagccagagcctgagacagagccccgtgcagggccccgtgcccgtggccaacaccaccaagttcctgcagcagggcatggccagcttcagccccctgagccccatccagggcatcgagccccccagctacgtggccgccgccgccaccgccgccgccgccagcgccgtggccgccagccagttccccggccccttcgacagaaccgacatcccccccgagctgccccccgccgacttcctgagacagccccagccccccctgaacgacctgatcagcagccccgactgcaacgaggtggacttcatcgaggccctgctgaagggcagctgcgtgagccccgacgaggactgggtgtgcaacctgagactgatcgacgacatcctggagcagcacgccgccgcccagaacgccaccgcccagaacagcggccaggtgacccaggacgccggcgccctgtag

SEQ ID NO: 88085 - DNA, 1941 bp, synthetic construct
  misc_feature 1..1941: note = Description of Artificial Sequence: Synthetic coding sequence
  source 1..1941: mol_type = other DNA
atggaggaggaggacctgagcttcctgtacaagagcagccccggcagaaagcaccagggcaccgtgaagagaagacaggaggaggaccacttccagttccccgacatggccgacggcggctaccccaacaagatcaagagaccctgcctggaggacgtgaccctggccatgggccccggcgcccaccccagcaccgcctgcgccgagctgcaggtgccccccctgaccatcaaccccagccccgccgccatgggcgtggccggccagagcctgctgctggagaacaaccccatgaacggcaacatcatgggcagccccttcgtggtgccccagaccaccgaggtgggcctgaagggccccaccgtgccctactacgagaagatcaacagcgtgcccgccgtggaccaggagctgcaggagctgctggaggagctgaccaagatccaggaccccagccccaacgagctggacctggagaagatcctgggcaccaagcccgaggagcccctggtgctggaccacccccaggccaccctgagcaccacccccaagcccagcgtgcagatgagccacctggagagcctggccagcagcaaggagttcgccagcagctgcagccaggtgaccggcatgagcctgcagatccccagcagcagcaccggcatcagctacagcatccccagcaccagcaagcagatcgtgagccccagcagcagcatggcccagagcaagagccaggtgcaggccatgctgcccgtggccctgccccccctgcccgtgccccagtggcaccacgcccaccagctgaaggccctggccgccagcaagcagggcagcgccaccaagcagcagggccccacccccagctggagcggcctgcccccccccggcctgagccccccctacagacccgtgcccagcccccaccccccccccctgcccctgccccccccccccccccccttcagcccccagagcctgatggtgagctgcatgagcagcaacaccctgagcggcagcaccctgagaggcagccccaacgccctgctgagcagcatgaccagcagcagcaacgccgccctgggccccgccatgccctacgcccccgagaagctgcccagccccgccctgacccagcagccccagttcggcccccagagcagcatcctggccaacctgatgagcagcaccatcaagaccccccagggccacctgatgagcgccctgcccgccagcaaccccggccccagccccccctacagacccgagaagctgagcagccccggcctgccccagcagagcttcaccccccagtgcagcctgctgcactacctgcagcagcccacccccacccaggccagcagcgccaccgccagcagcaccgccaccgccaccctgcagctgcagcagcagcagcagcagcagcagcagcagcccgaccacagcagcttcctgctgcagcagatgatgcagcagccccagagattccagagaagcgtggccagcgacagcatgcccgccctgcccagacagggctgctgccacctgttcgcctggaccagcgccgccagcagcgtgaagccccagcaccagcacggcaacagcttcaccagcagacaggacccccagcccggcgacgtgagccccagcaacatcacccacgtggacaaggcctgcaagctgggcgaggccagacacccccaggtgagcctgggcagacagccccccagctgccaggccctgggcagcgagagcttcctgcccggcagcagcttcgcccacgagctggccagagtgaccagcagctacagcaccagcgaggccgccccctggggcagctgggaccccaaggcctggagacaggtgcccgcccccctgctgcccagctgcgacgccaccgccagaggcaccgagatcagaagctacggcaacgacccctag

SEQ ID NO: 88086 - DNA, 645 bp, synthetic construct
  misc_feature 1..645: note = Description of Artificial Sequence: Synthetic coding sequence
  source 1..645: mol_type = other DNA
atgatcatgcagcagggcatggccagcagcagccccggcgccaccgagcccttcaccttcggcaacaccaagcccctgagccacttcgtgagcgagcccggcccccagaagatgcccagcatgcccaccaccagcagacagcccagcctgctgcactacctgcagcagcccacccccacccaggccagcagcgccaccgccagcagcaccgccaccgccaccctgcagctgcagcagcagcagcagcagcagcagcagcagcccgaccacagcagcttcctgctgcagcagatgatgcagcagccccagagattccagagaagcgtggccagcgacagcatgcccgccctgcccagacagacccacgtggacaaggcctgcaagctgggcgaggccagacacccccaggtgagcctgggcagacagccccccagctgccaggccctgggcagcgagagcttcctgcccggcagcagcttcgcccacgagctggccagagtgaccagcagctacagcaccagcgaggccgccccctggggcagctgggaccccaaggcctggagacaggtgcccgcccccctgctgcccagctgcgacgccaccgccagaggcaccgagatcagaagctacggcaacgacccctag

SEQ ID NO: 88087 - DNA, 1956 bp, synthetic construct
  misc_feature 1..1956: note = Description of Artificial Sequence: Synthetic coding sequence
  source 1..1956: mol_type = other DNA
atgaaggactacgacgagctgctgaagtactacgagctgcacgagaccatcggcaccggcggcttcgccaaggtgaagctggcctgccacatcctgaccggcgagatggtggccatcaagatcatggacaagaacaccctgggcagcgacctgcccagaatcaagaccgagatcgaggccctgaagaacctgagacaccagcacatctgccagctgtaccacgtgctggagaccgccaacaagatcttcatggtgctggagtactgccccggcggcgagctgttcgactacatcatcagccaggacagactgagcgaggaggagaccagagtggtgttcagacagatcgtgagcgccgtggcctacgtgcacagccagggctacgcccacagagacctgaagcccgagaacctgctgttcgacgagtaccacaagctgaagctgatcgacttcggcctgtgcgccaagcccaagggcaacaaggactaccacctgcagacctgctgcggcagcctggcctacgccgcccccgagctgatccagggcaagagctacctgggcagcgaggccgacgtgtggagcatgggcatcctgctgtacgtgctgatgtgcggcttcctgcccttcgacgacgacaacgtgatggccctgtacaagaagatcatgagaggcaagtacgacgtgcccaagtggctgagccccagcagcatcctgctgctgcagcagatgctgcaggtggaccccaagaagagaatcagcatgaagaacctgctgaaccacccctggatcatgcaggactacaactaccccgtggagtggcagagcaagaaccccttcatccacctggacgacgactgcgtgaccgagctgagcgtgcaccacagaaacaacagacagaccatggaggacctgatcagcctgtggcagtacgaccacctgaccgccacctacctgctgctgctggccaagaaggccagaggcaagcccgtgagactgagactgagcagcttcagctgcggccaggccagcgccacccccttcaccgacatcaagagcaacaactggagcctggaggacgtgaccgccagcgacaagaactacgtggccggcctgatcgactacgactggtgcgaggacgacctgagcaccggcgccgccacccccagaaccagccagttcaccaagtactggaccgagagcaacggcgtggagagcaagagcctgacccccgccctgtgcagaacccccgccaacaagctgaagaacaaggagaacgtgtacacccccaagagcgccgtgaagaacgaggagtacttcatgttccccgagcccaagacccccgtgaacaagaaccagcacaagagagagatcctgaccacccccaacagatacaccacccccagcaaggccagaaaccagtgcctgaaggagacccccatcaagatccccgtgaacagcaccggcaccgacaagctgatgaccggcgtgatcagccccgagagaagatgcagaagcgtggagctggacctgaaccaggcccacatggaggagacccccaagagaaagggcgccaaggtgttcggcagcctggagagaggcctggacaaggtgatcaccgtgctgaccagaagcaagagaaagggcagcgccagagacggccccagaagactgaagctgcactacaacgtgaccaccaccagactggtgaaccccgaccagctgctgaacgagatcatgagcatcctgcccaagaagcacgtggacttcgtgcagaagggctacaccctgaagtgccagacccagagcgacttcggcaaggtgaccatgcagttcgagctggaggtgtgccagctgcagaagcccgacgtggtgggcatcagaagacagagactgaagggcgacgcctgggtgtacaagagactggtggaggacatcctgagcagctgcaaggtgtag

SEQ ID NO: 88088 - DNA, 1743 bp, synthetic construct
  misc_feature 1..1743: note = Description of Artificial Sequence: Synthetic coding sequence
  source 1..1743: mol_type = other DNA
atgatgaacttcagcaacatcatgaactacatgaagctgctgggccagtactgccccggcggcgagctgttcgactacatcatcagccaggacagactgagcgaggaggagaccagagtggtgttcagacagatcgtgagcgccgtggcctacgtgcacagccagggctacgcccacagagacctgaagcccgagaacctgctgttcgacgagtaccacaagctgaagctgatcgacttcggcctgtgcgccaagcccaagggcaacaaggactaccacctgcagacctgctgcggcagcctggcctacgccgcccccgagctgatccagggcaagagctacctgggcagcgaggccgacgtgtggagcatgggcatcctgctgtacgtgctgatgtgcggcttcctgcccttcgacgacgacaacgtgatggccctgtacaagaagatcatgagaggcaagtacgacgtgcccaagtggctgagccccagcagcatcctgctgctgcagcagatgctgcaggtggaccccaagaagagaatcagcatgaagaacctgctgaaccacccctggatcatgcaggactacaactaccccgtggagtggcagagcaagaaccccttcatccacctggacgacgactgcgtgaccgagctgagcgtgcaccacagaaacaacagacagaccatggaggacctgatcagcctgtggcagtacgaccacctgaccgccacctacctgctgctgctggccaagaaggccagaggcaagcccgtgagactgagactgagcagcttcagctgcggccaggccagcgccacccccttcaccgacatcaagagcaacaactggagcctggaggacgtgaccgccagcgacaagaactacgtggccggcctgatcgactacgactggtgcgaggacgacctgagcaccggcgccgccacccccagaaccagccagttcaccaagtactggaccgagagcaacggcgtggagagcaagagcctgacccccgccctgtgcagaacccccgccaacaagctgaagaacaaggagaacgtgtacacccccaagagcgccgtgaagaacgaggagtacttcatgttccccgagcccaagacccccgtgaacaagaaccagcacaagagagagatcctgaccacccccaacagatacaccacccccagcaaggccagaaaccagtgcctgaaggagacccccatcaagatccccgtgaacagcaccggcaccgacaagctgatgaccggcgtgatcagccccgagagaagatgcagaagcgtggagctggacctgaaccaggcccacatggaggagacccccaagagaaagggcgccaaggtgttcggcagcctggagagaggcctggacaaggtgatcaccgtgctgaccagaagcaagagaaagggcagcgccagagacggccccagaagactgaagctgcactacaacgtgaccaccaccagactggtgaaccccgaccagctgctgaacgagatcatgagcatcctgcccaagaagcacgtggacttcgtgcagaagggctacaccctgaagtgccagacccagagcgacttcggcaaggtgaccatgcagttcgagctggaggtgtgccagctgcagaagcccgacgtggtgggcatcagaagacagagactgaagggcgacgcctgggtgtacaagagactggtggaggacatcctgagcagctgcaaggtgtag

SEQ ID NO: 88089 - DNA, 1812 bp, synthetic construct
  misc_feature 1..1812: note = Description of Artificial Sequence: Synthetic coding sequence
  source 1..1812: mol_type = other DNA
atgaaggactacgacgagctgctgaagtactacgagctgcacgagaccatcggcaccggcggcttcgccaaggtgaagctggcctgccacatcctgaccggcgagatggtggccatcaagatcatggacaagaacaccctgggcagcgacctgcccagaatcaagaccgagatcgaggccctgaagaacctgagacaccagcacatctgccagctgtaccacgtgctggagaccgccaacaagatcttcatggtgctggaggagaacctgctgttcgacgagtaccacaagctgaagctgatcgacttcggcctgtgcgccaagcccaagggcaacaaggactaccacctgcagacctgctgcggcagcctggcctacgccgcccccgagctgatccagggcaagagctacctgggcagcgaggccgacgtgtggagcatgggcatcctgctgtacgtgctgatgtgcggcttcctgcccttcgacgacgacaacgtgatggccctgtacaagaagatcatgagaggcaagtacgacgtgcccaagtggctgagccccagcagcatcctgctgctgcagcagatgctgcaggtggaccccaagaagagaatcagcatgaagaacctgctgaaccacccctggatcatgcaggactacaactaccccgtggagtggcagagcaagaaccccttcatccacctggacgacgactgcgtgaccgagctgagcgtgcaccacagaaacaacagacagaccatggaggacctgatcagcctgtggcagtacgaccacctgaccgccacctacctgctgctgctggccaagaaggccagaggcaagcccgtgagactgagactgagcagcttcagctgcggccaggccagcgccacccccttcaccgacatcaagagcaacaactggagcctggaggacgtgaccgccagcgacaagaactacgtggccggcctgatcgactacgactggtgcgaggacgacctgagcaccggcgccgccacccccagaaccagccagttcaccaagtactggaccgagagcaacggcgtggagagcaagagcctgacccccgccctgtgcagaacccccgccaacaagctgaagaacaaggagaacgtgtacacccccaagagcgccgtgaagaacgaggagtacttcatgttccccgagcccaagacccccgtgaacaagaaccagcacaagagagagatcctgaccacccccaacagatacaccacccccagcaaggccagaaaccagtgcctgaaggagacccccatcaagatccccgtgaacagcaccggcaccgacaagctgatgaccggcgtgatcagccccgagagaagatgcagaagcgtggagctggacctgaaccaggcccacatggaggagacccccaagagaaagggcgccaaggtgttcggcagcctggagagaggcctggacaaggtgatcaccgtgctgaccagaagcaagagaaagggcagcgccagagacggccccagaagactgaagctgcactacaacgtgaccaccaccagactggtgaaccccgaccagctgctgaacgagatcatgagcatcctgcccaagaagcacgtggacttcgtgcagaagggctacaccctgaagtgccagacccagagcgacttcggcaaggtgaccatgcagttcgagctggaggtgtgccagctgcagaagcccgacgtggtgggcatcagaagacagagactgaagggcgacgcctgggtgtacaagagactggtggaggacatcctgagcagctgcaaggtgtag

SEQ ID NO: 88090 - DNA, 1563 bp, synthetic construct
  misc_feature 1..1563: note = Description of Artificial Sequence: Synthetic coding sequence
  source 1..1563: mol_type = other DNA
atggtgctggaggagaacctgctgttcgacgagtaccacaagctgaagctgatcgacttcggcctgtgcgccaagcccaagggcaacaaggactaccacctgcagacctgctgcggcagcctggcctacgccgcccccgagctgatccagggcaagagctacctgggcagcgaggccgacgtgtggagcatgggcatcctgctgtacgtgctgatgtgcggcttcctgcccttcgacgacgacaacgtgatggccctgtacaagaagatcatgagaggcaagtacgacgtgcccaagtggctgagccccagcagcatcctgctgctgcagcagatgctgcaggtggaccccaagaagagaatcagcatgaagaacctgctgaaccacccctggatcatgcaggactacaactaccccgtggagtggcagagcaagaaccccttcatccacctggacgacgactgcgtgaccgagctgagcgtgcaccacagaaacaacagacagaccatggaggacctgatcagcctgtggcagtacgaccacctgaccgccacctacctgctgctgctggccaagaaggccagaggcaagcccgtgagactgagactgagcagcttcagctgcggccaggccagcgccacccccttcaccgacatcaagagcaacaactggagcctggaggacgtgaccgccagcgacaagaactacgtggccggcctgatcgactacgactggtgcgaggacgacctgagcaccggcgccgccacccccagaaccagccagttcaccaagtactggaccgagagcaacggcgtggagagcaagagcctgacccccgccctgtgcagaacccccgccaacaagctgaagaacaaggagaacgtgtacacccccaagagcgccgtgaagaacgaggagtacttcatgttccccgagcccaagacccccgtgaacaagaaccagcacaagagagagatcctgaccacccccaacagatacaccacccccagcaaggccagaaaccagtgcctgaaggagacccccatcaagatccccgtgaacagcaccggcaccgacaagctgatgaccggcgtgatcagccccgagagaagatgcagaagcgtggagctggacctgaaccaggcccacatggaggagacccccaagagaaagggcgccaaggtgttcggcagcctggagagaggcctggacaaggtgatcaccgtgctgaccagaagcaagagaaagggcagcgccagagacggccccagaagactgaagctgcactacaacgtgaccaccaccagactggtgaaccccgaccagctgctgaacgagatcatgagcatcctgcccaagaagcacgtggacttcgtgcagaagggctacaccctgaagtgccagacccagagcgacttcggcaaggtgaccatgcagttcgagctggaggtgtgccagctgcagaagcccgacgtggtgggcatcagaagacagagactgaagggcgacgcctgggtgtacaagagactggtggaggacatcctgagcagctgcaaggtgtag

SEQ ID NO: 88091 - DNA, 1374 bp, synthetic construct
  misc_feature 1..1374: note = Description of Artificial Sequence: Synthetic coding sequence
  source 1..1374: mol_type = other DNA
atgggcatcctgctgtacgtgctgatgtgcggcttcctgcccttcgacgacgacaacgtgatggccctgtacaagaagatcatgagaggcaagtacgacgtgcccaagtggctgagccccagcagcatcctgctgctgcagcagatgctgcaggtggaccccaagaagagaatcagcatgaagaacctgctgaaccacccctggatcatgcaggactacaactaccccgtggagtggcagagcaagaaccccttcatccacctggacgacgactgcgtgaccgagctgagcgtgcaccacagaaacaacagacagaccatggaggacctgatcagcctgtggcagtacgaccacctgaccgccacctacctgctgctgctggccaagaaggccagaggcaagcccgtgagactgagactgagcagcttcagctgcggccaggccagcgccacccccttcaccgacatcaagagcaacaactggagcctggaggacgtgaccgccagcgacaagaactacgtggccggcctgatcgactacgactggtgcgaggacgacctgagcaccggcgccgccacccccagaaccagccagttcaccaagtactggaccgagagcaacggcgtggagagcaagagcctgacccccgccctgtgcagaacccccgccaacaagctgaagaacaaggagaacgtgtacacccccaagagcgccgtgaagaacgaggagtacttcatgttccccgagcccaagacccccgtgaacaagaaccagcacaagagagagatcctgaccacccccaacagatacaccacccccagcaaggccagaaaccagtgcctgaaggagacccccatcaagatccccgtgaacagcaccggcaccgacaagctgatgaccggcgtgatcagccccgagagaagatgcagaagcgtggagctggacctgaaccaggcccacatggaggagacccccaagagaaagggcgccaaggtgttcggcagcctggagagaggcctggacaaggtgatcaccgtgctgaccagaagcaagagaaagggcagcgccagagacggccccagaagactgaagctgcactacaacgtgaccaccaccagactggtgaaccccgaccagctgctgaacgagatcatgagcatcctgcccaagaagcacgtggacttcgtgcagaagggctacaccctgaagtgccagacccagagcgacttcggcaaggtgaccatgcagttcgagctggaggtgtgccagctgcagaagcccgacgtggtgggcatcagaagacagagactgaagggcgacgcctgggtgtacaagagactggtggaggacatcctgagcagctgcaaggtgtag

SEQ ID NO: 88092 - DNA, 1833 bp, synthetic construct
  misc_feature 1..1833: note = Description of Artificial Sequence: Synthetic coding sequence
  source 1..1833: mol_type = other DNA
atgaaggactacgacgagctgctgaagtactacgagctgcacgagaccatcggcaccggcggcttcgccaaggtgaagctggcctgccacatcctgaccggcgagatggtggccatcaagatcatggacaagaacaccctgggcagcgacctgcccagaatcaagaccgagatcgaggccctgaagaacctgagacaccagcacatctgccagctgtaccacgtgctggagaccgccaacaagatcttcatggtgctggagtactgccccggcggcgagctgttcgactacatcatcagccaggacagactgagcgaggaggagaccagagtggtgttcagacagatcgtgagcgccgtggcctacgtgcacagccagggctacgcccacagagacctgaagcccgagaacctgctgttcgacgagtaccacaagctgaagctgatcgacttcggcctgtgcgccaagcccaagggcaacaaggactaccacctgcagacctgctgcggcagcctggcctacgccgcccccgagctgatccagggcaagagctacctgggcagcgaggccgacgtgtggagcatgggcatcctgctgtacgtgctgatgtgcggcttcctgcccttcgacgacgacaacgtgatggccctgtacaagaagatcatgagaggcaagtacgacgtgcccaagtggctgagccccagcagcatcctgctgctgcagcagatgctgcaggtggaccccaagaagagaatcagcatgaagaacctgctgaaccacccctggatcatgcaggactacaactaccccgtggagtggcagagcaagaaccccttcatccacctggacgacgactgcgtgaccgagctgagcgtgcaccacagaaacaacagacagaccatggaggacctgatcagcctgtggcagtacgaccacctgaccgccacctacctgctgctgctggccaagaaggccagaggcaagcccgtgagactgagactgagcagcttcagctgcggccaggccagcgccacccccttcaccgacatcaagttcaccaagtactggaccgagagcaacggcgtggagagcaagagcctgacccccgccctgtgcagaacccccgccaacaagctgaagaacaaggagaacgtgtacacccccaagagcgccgtgaagaacgaggagtacttcatgttccccgagcccaagacccccgtgaacaagaaccagcacaagagagagatcctgaccacccccaacagatacaccacccccagcaaggccagaaaccagtgcctgaaggagacccccatcaagatccccgtgaacagcaccggcaccgacaagctgatgaccggcgtgatcagccccgagagaagatgcagaagcgtggagctggacctgaaccaggcccacatggaggagacccccaagagaaagggcgccaaggtgttcggcagcctggagagaggcctggacaaggtgatcaccgtgctgaccagaagcaagagaaagggcagcgccagagacggccccagaagactgaagctgcactacaacgtgaccaccaccagactggtgaaccccgaccagctgctgaacgagatcatgagcatcctgcccaagaagcacgtggacttcgtgcagaagggctacaccctgaagtgccagacccagagcgacttcggcaaggtgaccatgcagttcgagctggaggtgtgccagctgcagaagcccgacgtggtgggcatcagaagacagagactgaagggcgacgcctgggtgtacaagagactggtggaggacatcctgagcagctgcaaggtgtag

SEQ ID NO: 88093 - DNA, 1860 bp, synthetic construct
  misc_feature 1..1860: note = Description of Artificial Sequence: Synthetic coding sequence
  source 1..1860: mol_type = other DNA
atgatgaacttcagcaacatcatgaactacatgaagctgctgggccagagcgacctgcccagaatcaagaccgagatcgaggccctgaagaacctgagacaccagcacatctgccagctgtaccacgtgctggagaccgccaacaagatcttcatggtgctggagtactgccccggcggcgagctgttcgactacatcatcagccaggacagactgagcgaggaggagaccagagtggtgttcagacagatcgtgagcgccgtggcctacgtgcacagccagggctacgcccacagagacctgaagcccgagaacctgctgttcgacgagtaccacaagctgaagctgatcgacttcggcctgtgcgccaagcccaagggcaacaaggactaccacctgcagacctgctgcggcagcctggcctacgccgcccccgagctgatccagggcaagagctacctgggcagcgaggccgacgtgtggagcatgggcatcctgctgtacgtgctgatgtgcggcttcctgcccttcgacgacgacaacgtgatggccctgtacaagaagatcatgagaggcaagtacgacgtgcccaagtggctgagccccagcagcatcctgctgctgcagcagatgctgcaggtggaccccaagaagagaatcagcatgaagaacctgctgaaccacccctggatcatgcaggactacaactaccccgtggagtggcagagcaagaaccccttcatccacctggacgacgactgcgtgaccgagctgagcgtgcaccacagaaacaacagacagaccatggaggacctgatcagcctgtggcagtacgaccacctgaccgccacctacctgctgctgctggccaagaaggccagaggcaagcccgtgagactgagactgagcagcttcagctgcggccaggccagcgccacccccttcaccgacatcaagagcaacaactggagcctggaggacgtgaccgccagcgacaagaactacgtggccggcctgatcgactacgactggtgcgaggacgacctgagcaccggcgccgccacccccagaaccagccagttcaccaagtactggaccgagagcaacggcgtggagagcaagagcctgacccccgccctgtgcagaacccccgccaacaagctgaagaacaaggagaacgtgtacacccccaagagcgccgtgaagaacgaggagtacttcatgttccccgagcccaagacccccgtgaacaagaaccagcacaagagagagatcctgaccacccccaacagatacaccacccccagcaaggccagaaaccagtgcctgaaggagacccccatcaagatccccgtgaacagcaccggcaccgacaagctgatgaccggcgtgatcagccccgagagaagatgcagaagcgtggagctggacctgaaccaggcccacatggaggagacccccaagagaaagggcgccaaggtgttcggcagcctggagagaggcctggacaaggtgatcaccgtgctgaccagaagcaagagaaagggcagcgccagagacggccccagaagactgaagctgcactacaacgtgaccaccaccagactggtgaaccccgaccagctgctgaacgagatcatgagcatcctgcccaagaagcacgtggacttcgtgcagaagggctacaccctgaagtgccagacccagagcgacttcggcaaggtgaccatgcagttcgagctggaggtgtgccagctgcagaagcccgacgtggtgggcatcagaagacagagactgaagggcgacgcctgggtgtacaagagactggtggaggacatcctgagcagctgcaaggtgtag

SEQ ID NO: 88094 - DNA, 1743 bp, synthetic construct
  misc_feature 1..1743: note = Description of Artificial Sequence: Synthetic coding sequence
  source 1..1743: mol_type = other DNA
atgaaggactacgacgagctgctgaagtactacgagctgcacgagaccatcggcaccggcggcttcgccaaggtgaagctggcctgccacatcctgaccggcgagatggtggccatcaagatcatggacaagaacaccctgggcagcgacctgcccagaatcaagaccgagatcgaggccctgaagaacctgagacaccagcacatctgccagctgtaccacgtgctggagaccgccaacaagatcttcatggtgctggagggcaacaaggactaccacctgcagacctgctgcggcagcctggcctacgccgcccccgagctgatccagggcaagagctacctgggcagcgaggccgacgtgtggagcatgggcatcctgctgtacgtgctgatgtgcggcttcctgcccttcgacgacgacaacgtgatggccctgtacaagaagatcatgagaggcaagtacgacgtgcccaagtggctgagccccagcagcatcctgctgctgcagcagatgctgcaggtggaccccaagaagagaatcagcatgaagaacctgctgaaccacccctggatcatgcaggactacaactaccccgtggagtggcagagcaagaaccccttcatccacctggacgacgactgcgtgaccgagctgagcgtgcaccacagaaacaacagacagaccatggaggacctgatcagcctgtggcagtacgaccacctgaccgccacctacctgctgctgctggccaagaaggccagaggcaagcccgtgagactgagactgagcagcttcagctgcggccaggccagcgccacccccttcaccgacatcaagagcaacaactggagcctggaggacgtgaccgccagcgacaagaactacgtggccggcctgatcgactacgactggtgcgaggacgacctgagcaccggcgccgccacccccagaaccagccagttcaccaagtactggaccgagagcaacggcgtggagagcaagagcctgacccccgccctgtgcagaacccccgccaacaagctgaagaacaaggagaacgtgtacacccccaagagcgccgtgaagaacgaggagtacttcatgttccccgagcccaagacccccgtgaacaagaaccagcacaagagagagatcctgaccacccccaacagatacaccacccccagcaaggccagaaaccagtgcctgaaggagacccccatcaagatccccgtgaacagcaccggcaccgacaagctgatgaccggcgtgatcagccccgagagaagatgcagaagcgtggagctggacctgaaccaggcccacatggaggagacccccaagagaaagggcgccaaggtgttcggcagcctggagagaggcctggacaaggtgatcaccgtgctgaccagaagcaagagaaagggcagcgccagagacggccccagaagactgaagctgcactacaacgtgaccaccaccagactggtgaaccccgaccagctgctgaacgagatcatgagcatcctgcccaagaagcacgtggacttcgtgcagaagggctacaccctgaagtgccagacccagagcgacttcggcaaggtgaccatgcagttcgagctggaggtgtgccagctgcagaagcccgacgtggtgggcatcagaagacagagactgaagggcgacgcctgggtgtacaagagactggtggaggacatcctgagcagctgcaaggtgtag

SEQ ID NO: 88095 - DNA, 1491 bp, synthetic construct
  misc_feature 1..1491: note = Description of Artificial Sequence: Synthetic coding sequence
  source 1..1491: mol_type = other DNA
atgagagtgctgagcggcaccagcctgatgctgtgcagcctgctgctgctgctgcaggccctgtgcagccccggcctggccccccagagcagaggccacctgtgcagaaccagacccaccgacctggtgttcgtggtggacagcagcagaagcgtgagacccgtggagttcgagaaggtgaaggtgttcctgagccaggtgatcgagagcctggacgtgggccccaacgccaccagagtgggcatggtgaactacgccagcaccgtgaagcaggagttcagcctgagagcccacgtgagcaaggccgccctgctgcaggccgtgagaagaatccagcccctgagcaccggcaccatgaccggcctggccatccagttcgccatcaccaaggccttcggcgacgccgagggcggcagaagcagaagccccgacatcagcaaggtggtgatcgtggtgaccgacggcagaccccaggacagcgtgcaggacgtgagcgccagagccagagccagcggcgtggagctgttcgccatcggcgtgggcagcgtggacaaggccaccctgagacagatcgccagcgagccccaggacgagcacgtggactacgtggagagctacagcgtgatcgagaagctgagcagaaagttccaggaggccttctgcgtggtgagcgacctgtgcgccaccggcgaccacgactgcgagcaggtgtgcatcagcagccccggcagctacacctgcgcctgccacgagggcttcaccctgaacagcgacggcaagacctgcaacgtgtgcagcggcggcggcggcagcagcgccaccgacctggtgttcctgatcgacggcagcaagagcgtgagacccgagaacttcgagctggtgaagaagttcatcagccagatcgtggacaccctggacgtgagcgacaagctggcccaggtgggcctggtgcagtacagcagcagcgtgagacaggagttccccctgggcagattccacaccaagaaggacatcaaggccgccgtgagaaacatgagctacatggagaagggcaccatgaccggcgccgccctgaagtacctgatcgacaacagcttcaccgtgagcagcggcgccagacccggcgcccagaaggtgggcatcgtgttcaccgacggcagaagccaggactacatcaacgacgccgccaagaaggccaaggacctgggcttcaagatgttcgccgtgggcgtgggcaacgccgtggaggacgagctgagagagatcgccagcgagcccgtggccgagcactacttctacaccgccgacttcaagaccatcaaccagatcggcaagaagctgcagaagaagatctgcgtggaggaggacccctgcgcctgcgagagcctggtgaagttccaggccaaggtggagggcctgctgcaggccctgaccagaaagctggaggccgtgagcaagagactggccatcctggagaacaccgtggtgtag

SEQ ID NO: 88096 - DNA, 2874 bp, synthetic construct
  misc_feature 1..2874: note = Description of Artificial Sequence: Synthetic coding sequence
  source 1..2874: mol_type = other DNA
atggagaagatgctggccggctgcttcctgctgatcctgggccagatcgtgctgctgcccgccgaggccagagagagaagcagaggcagaagcatcagcagaggcagacacgccagaacccacccccagaccgccctgctggagagcagctgcgagaacaagagagccgacctggtgttcatcatcgacagcagcagaagcgtgaacacccacgactacgccaaggtgaaggagttcatcgtggacatcctgcagttcctggacatcggccccgacgtgaccagagtgggcctgctgcagtacggcagcaccgtgaagaacgagttcagcctgaagaccttcaagagaaagagcgaggtggagagagccgtgaagagaatgagacacctgagcaccggcaccatgaccggcctggccatccagtacgccctgaacatcgccttcagcgaggccgagggcgccagacccctgagagagaacgtgcccagagtgatcatgatcgtgaccgacggcagaccccaggacagcgtggccgaggtggccgccaaggccagagacaccggcatcctgatcttcgccatcggcgtgggccaggtggacttcaacaccctgaagagcatcggcagcgagccccacgaggaccacgtgttcctggtggccaacttcagccagatcgagaccctgaccagcgtgttccagaagaagctgtgcaccgcccacatgtgcagcaccctggagcacaactgcgcccacttctgcatcaacatccccggcagctacgtgtgcagatgcaagcagggctacatcctgaacagcgaccagaccacctgcagaatccaggacctgtgcgccatggaggaccacaactgcgagcagctgtgcgtgaacgtgcccggcagcttcgtgtgccagtgctacagcggctacgccctggccgaggacggcaagagatgcgtggccgtggactactgcgccagcgagaaccacggctgcgagcacgagtgcgtgaacgccgacggcagctacctgtgccagtgccacgagggcttcgccctgaaccccgacaagaagacctgcaccaagatcgactactgcgccagcagcaaccacggctgccagcacgagtgcgtgaacaccgacgacagctacagctgccactgcctgaagggcttcaccctgaaccccgacaagaagacctgcagaagaatcaactactgcgccctgaacaagcccggctgcgagcacgagtgcgtgaacatggaggagagctactactgcagatgccacagaggctacaccctggaccccaacggcaagacctgcagcagagtggaccactgcgcccagcaggaccacggctgcgagcagctgtgcctgaacaccgaggacagcttcgtgtgccagtgcagcgagggcttcctgatcaacgaggacctgaagacctgcagcagagtggactactgcctgctgagcgaccacggctgcgagtacagctgcgtgaacatggacagaagcttcgcctgccagtgccccgagggccacgtgctgagaagcgacggcaagacctgcgccaagctggacagctgcgccctgggcgaccacggctgcgagcacagctgcgtgagcagcgaggacagcttcgtgtgccagtgcttcgagggctacatcctgagagaggacggcaagacctgcagaagaaaggacgtgtgccaggccatcgaccacggctgcgagcacatctgcgtgaacagcgacgacagctacacctgcgagtgcctggagggcttcagactggccgaggacggcaagagatgcagaagaaaggacgtgtgcaagagcacccaccacggctgcgagcacatctgcgtgaacaacggcaacagctacatctgcaagtgcagcgagggcttcgtgctggccgaggacggcagaagatgcaagaagtgcaccgagggccccatcgacctggtgttcgtgatcgacggcagcaagagcctgggcgaggagaacttcgaggtggtgaagcagttcgtgaccggcatcatcgacagcctgaccatcagccccaaggccgccagagtgggcctgctgcagtacagcacccaggtgcacaccgagttcaccctgagaaacttcaacagcgccaaggacatgaagaaggccgtggcccacatgaagtacatgggcaagggcagcatgaccggcctggccctgaagcacatgttcgagagaagcttcacccagggcgagggcgccagacccctgagcaccagagtgcccagagccgccatcgtgttcaccgacggcagagcccaggacgacgtgagcgagtgggccagcaaggccaaggccaacggcatcaccatgtacgccgtgggcgtgggcaaggccatcgaggaggagctgcaggagatcgccagcgagcccaccaacaagcacctgttctacgccgaggacttcagcaccatggacgagatcagcgagaagctgaagaagggcatctgcgaggccctggaggacagcgacggcagacaggacagccccgccggcgagctgcccaagaccgtgcagcagcccaccgagagcgagcccgtgaccatcaacatccaggacctgctgagctgcagcaacttcgccgtgcagcacagatacctgttcgaggaggacaacctgctgagaagcacccagaagctgagccacagcaccaagcccagcggcagccccctggaggagaagcacgaccagtgcaagtgcgagaacctgatcatgttccagaacctggccaacgaggaggtgagaaagctgacccagagactgctggaggagatgacccagagaatggaggccctggagaacagactgagatacagatag

SEQ ID NO: 88097 - DNA, 2754 bp, synthetic construct
  misc_feature 1..2754: note = Description of Artificial Sequence: Synthetic coding sequence
  source 1..2754: mol_type = other DNA
atggagaagatgctggccggctgcttcctgctgatcctgggccagatcgtgctgctgcccgccgaggccagagagagaagcagaggcagaagcatcagcagaggcagacacgccagaacccacccccagaccgccctgctggagagcagctgcgagaacaagagagccgacctggtgttcatcatcgacagcagcagaagcgtgaacacccacgactacgccaaggtgaaggagttcatcgtggacatcctgcagttcctggacatcggccccgacgtgaccagagtgggcctgctgcagtacggcagcaccgtgaagaacgagttcagcctgaagaccttcaagagaaagagcgaggtggagagagccgtgaagagaatgagacacctgagcaccggcaccatgaccggcctggccatccagtacgccctgaacatcgccttcagcgaggccgagggcgccagacccctgagagagaacgtgcccagagtgatcatgatcgtgaccgacggcagaccccaggacagcgtggccgaggtggccgccaaggccagagacaccggcatcctgatcttcgccatcggcgtgggccaggtggacttcaacaccctgaagagcatcggcagcgagccccacgaggaccacgtgttcctggtggccaacttcagccagatcgagaccctgaccagcgtgttccagaagaagctgtgcaccgcccacatgtgcagcaccctggagcacaactgcgcccacttctgcatcaacatccccggcagctacgtgtgcagatgcaagcagggctacatcctgaacagcgaccagaccacctgcagaatccaggacctgtgcgccatggaggaccacaactgcgagcagctgtgcgtgaacgtgcccggcagcttcgtgtgccagtgctacagcggctacgccctggccgaggacggcaagagatgcgtggccgtggactactgcgccagcgagaaccacggctgcgagcacgagtgcgtgaacgccgacggcagctacctgtgccagtgccacgagggcttcgccctgaaccccgacaagaagacctgcaccagaatcaactactgcgccctgaacaagcccggctgcgagcacgagtgcgtgaacatggaggagagctactactgcagatgccacagaggctacaccctggaccccaacggcaagacctgcagcagagtggaccactgcgcccagcaggaccacggctgcgagcagctgtgcctgaacaccgaggacagcttcgtgtgccagtgcagcgagggcttcctgatcaacgaggacctgaagacctgcagcagagtggactactgcctgctgagcgaccacggctgcgagtacagctgcgtgaacatggacagaagcttcgcctgccagtgccccgagggccacgtgctgagaagcgacggcaagacctgcgccaagctggacagctgcgccctgggcgaccacggctgcgagcacagctgcgtgagcagcgaggacagcttcgtgtgccagtgcttcgagggctacatcctgagagaggacggcaagacctgcagaagaaaggacgtgtgccaggccatcgaccacggctgcgagcacatctgcgtgaacagcgacgacagctacacctgcgagtgcctggagggcttcagactggccgaggacggcaagagatgcagaagaaaggacgtgtgcaagagcacccaccacggctgcgagcacatctgcgtgaacaacggcaacagctacatctgcaagtgcagcgagggcttcgtgctggccgaggacggcagaagatgcaagaagtgcaccgagggccccatcgacctggtgttcgtgatcgacggcagcaagagcctgggcgaggagaacttcgaggtggtgaagcagttcgtgaccggcatcatcgacagcctgaccatcagccccaaggccgccagagtgggcctgctgcagtacagcacccaggtgcacaccgagttcaccctgagaaacttcaacagcgccaaggacatgaagaaggccgtggcccacatgaagtacatgggcaagggcagcatgaccggcctggccctgaagcacatgttcgagagaagcttcacccagggcgagggcgccagacccctgagcaccagagtgcccagagccgccatcgtgttcaccgacggcagagcccaggacgacgtgagcgagtgggccagcaaggccaaggccaacggcatcaccatgtacgccgtgggcgtgggcaaggccatcgaggaggagctgcaggagatcgccagcgagcccaccaacaagcacctgttctacgccgaggacttcagcaccatggacgagatcagcgagaagctgaagaagggcatctgcgaggccctggaggacagcgacggcagacaggacagccccgccggcgagctgcccaagaccgtgcagcagcccaccgagagcgagcccgtgaccatcaacatccaggacctgctgagctgcagcaacttcgccgtgcagcacagatacctgttcgaggaggacaacctgctgagaagcacccagaagctgagccacagcaccaagcccagcggcagccccctggaggagaagcacgaccagtgcaagtgcgagaacctgatcatgttccagaacctggccaacgaggaggtgagaaagctgacccagagatacctgctggaggagatgacccagagaatggaggccctggagaacagactgagatacagatag

SEQ ID NO: 88098 - DNA, 348 bp, synthetic construct
  misc_feature 1..348: note = Description of Artificial Sequence: Synthetic coding sequence
  source 1..348: mol_type = other DNA
atggaggaccacaactgcgagcagctgtgcgtgaacgtgcccggcagcttcgtgtgccagtgctacagcggctacgccctggccgaggacggcaagagatgcgtggccgtggactactgcgccagcgagaaccacggctgcgagcacgagtgcgtgaacgccgacggcagctacctgtgccagtgccacgagggcttcgccctgaaccccgacaagaagacctgcaccaagatcgactactgcgccagcagcaaccacggctgccagcacgagtgcgtgaacaccgacgacagctacagctgccactgcctgaagggcttcaccctgaaccccgacaagaagacctag

SEQ ID NO: 88099 - DNA, 2871 bp, synthetic construct
  misc_feature 1..2871: note = Description of Artificial Sequence: Synthetic coding sequence
  source 1..2871: mol_type = other DNA
atggagaagatgctggccggctgcttcctgctgatcctgggccagatcgtgctgctgcccgccgaggccagagagagaagcagaggcagaagcatcagcagaggcagacacgccagaacccacccccagaccgccctgctggagagcagctgcgagaacaagagagccgacctggtgttcatcatcgacagcagcagaagcgtgaacacccacgactacgccaaggtgaaggagttcatcgtggacatcctgcagttcctggacatcggccccgacgtgaccagagtgggcctgctgcagtacggcagcaccgtgaagaacgagttcagcctgaagaccttcaagagaaagagcgaggtggagagagccgtgaagagaatgagacacctgagcaccggcaccatgaccggcctggccatccagtacgccctgaacatcgccttcagcgaggccgagggcgccagacccctgagagagaacgtgcccagagtgatcatgatcgtgaccgacggcagaccccaggacagcgtggccgaggtggccgccaaggccagagacaccggcatcctgatcttcgccatcggcgtgggccaggtggacttcaacaccctgaagagcatcggcagcgagccccacgaggaccacgtgttcctggtggccaacttcagccagatcgagaccctgaccagcgtgttccagaagaagctgtgcaccgcccacatgtgcagcaccctggagcacaactgcgcccacttctgcatcaacatccccggcagctacgtgtgcagatgcaagcagggctacatcctgaacagcgaccagaccacctgcagaatccaggacctgtgcgccatggaggaccacaactgcgagcagctgtgcgtgaacgtgcccggcagcttcgtgtgccagtgctacagcggctacgccctggccgaggacggcaagagatgcgtggccgtggactactgcgccagcgagaaccacggctgcgagcacgagtgcgtgaacgccgacggcagctacctgtgccagtgccacgagggcttcgccctgaaccccgacaagaagacctgcaccaagatcgactactgcgccagcagcaaccacggctgccagcacgagtgcgtgaacaccgacgacagctacagctgccactgcctgaagggcttcaccctgaaccccgacaagaagacctgcagaagaatcaactactgcgccctgaacaagcccggctgcgagcacgagtgcgtgaacatggaggagagctactactgcagatgccacagaggctacaccctggaccccaacggcaagacctgcagcagagtggaccactgcgcccagcaggaccacggctgcgagcagctgtgcctgaacaccgaggacagcttcgtgtgccagtgcagcgagggcttcctgatcaacgaggacctgaagacctgcagcagagtggactactgcctgctgagcgaccacggctgcgagtacagctgcgtgaacatggacagaagcttcgcctgccagtgccccgagggccacgtgctgagaagcgacggcaagacctgcgccaagctggacagctgcgccctgggcgaccacggctgcgagcacagctgcgtgagcagcgaggacagcttcgtgtgccagtgcttcgagggctacatcctgagagaggacggcaagacctgcagaagaaaggacgtgtgccaggccatcgaccacggctgcgagcacatctgcgtgaacagcgacgacagctacacctgcgagtgcctggagggcttcagactggccgaggacggcaagagatgcagaagaaaggacgtgtgcaagagcacccaccacggctgcgagcacatctgcgtgaacaacggcaacagctacatctgcaagtgcagcgagggcttcgtgctggccgaggacggcagaagatgcaagaagtgcaccgagggccccatcgacctggtgttcgtgatcgacggcagcaagagcctgggcgaggagaacttcgaggtggtgaagcagttcgtgaccggcatcatcgacagcctgaccatcagccccaaggccgccagagtgggcctgctgcagtacagcacccaggtgcacaccgagttcaccctgagaaacttcaacagcgccaaggacatgaagaaggccgtggcccacatgaagtacatgggcaagggcagcatgaccggcctggccctgaagcacatgttcgagagaagcttcacccagggcgagggcgccagacccctgagcaccagagtgcccagagccgccatcgtgttcaccgacggcagagcccaggacgacgtgagcgagtgggccagcaaggccaaggccaacggcatcaccatgtacgccgtgggcgtgggcaaggccatcgaggaggagctgcaggagatcgccagcgagcccaccaacaagcacctgttctacgccgaggacttcagcaccatggacgagatcagcgagaagctgaagaagggcatctgcgaggccctggaggacagcgacggcagacaggacagccccgccggcgagctgcccaagaccgtgcagcagcccaccgagagcgagcccgtgaccatcaacatccaggacctgctgagctgcagcaacttcgccgtgcagcacagatacctgttcgaggaggacaacctgctgagaagcacccagaagctgagccacagcaccaagcccagcggcagccccctggaggagaagcacgaccagtgcaagtgcgagaacctgatcatgttccagaacctggccaacgaggaggtgagaaagctgacccagagactggaggagatgacccagagaatggaggccctggagaacagactgagatacagatag

SEQ ID NO: 88100 - DNA, 2814 bp, synthetic construct
  misc_feature 1..2814: note = Description of Artificial Sequence: Synthetic coding sequence
  source 1..2814: mol_type = other DNA
atggagaagatgctggccggctgcttcctgctgatcctgggccagatcgtgctgctgcccgccgaggccagagagagaagcagaggcagaagcatcagcagaggcagacacgccagaacccacccccagaccgccctgctggagagcagctgcgagaacaagagagccgacctggtgttcatcatcgacagcagcagaagcgtgaacacccacgactacgccaaggtgaaggagttcatcgtggacatcctgcagttcctggacatcggccccgacgtgaccagagtgggcctgctgcagtacggcagcaccgtgaagaacgagttcagcctgaagaccttcaagagaaagagcgaggtggagagagccgtgaagagaatgagacacctgagcaccggcaccatgaccggcctggccatccagtacgccctgaacatcgccttcagcgaggccgagggcgccagacccctgagagagaacgtgcccagagtgatcatgatcgtgaccgacggcagaccccaggacagcgtggccgaggtggccgccaaggccagagacaccggcatcctgatcttcgccatcggcgtgggccaggtggacttcaacaccctgaagagcatcggcagcgagccccacgaggaccacgtgttcctggtggccaacttcagccagatcgagaccctgaccagcgtgttccagaagaagctgtgcaccgcccacatgtgcagcaccctggagcacaactgcgcccacttctgcatcaacatccccggcagctacgtgtgcagatgcaagcagggctacatcctgaacagcgaccagaccacctgcagaatccaggacctgtgcgccatggaggaccacaactgcgagcagctgtgcgtgaacgtgcccggcagcttcgtgtgccagtgctacagcggctacgccctggccgaggacggcaagagatgcgtggccgtggactactgcgccagcgagaaccacggctgcgagcacgagtgcgtgaacgccgacggcagctacctgtgccagtgccacgagggcttcgccctgaaccccgacaagaagacctgcaccaagatcgactactgcgccagcagcaaccacggctgccagcacgagtgcgtgaacaccgacgacagctacagctgccactgcctgaagggcttcaccctgaaccccgacaagaagacctgcagaagaatcaactactgcgccctgaacaagcccggctgcgagcacgagtgcgtgaacatggaggagagctactactgcagatgccacagaggctacaccctggaccccaacggcaagacctgcagcagagtggaccactgcgcccagcaggaccacggctgcgagcagctgtgcctgaacaccgaggacagcttcgtgtgccagtgcagcgagggcttcctgatcaacgaggacctgaagacctgcagcagagtggactactgcctgctgagcgaccacggctgcgagtacagctgcgtgaacatggacagaagcttcgcctgccagtgccccgagggccacgtgctgagaagcgacggcaagacctgcgccaagctggacagctgcgccctgggcgaccacggctgcgagcacagctgcgtgagcagcgaggacagcttcgtgtgccagtgcttcgagggctacatcctgagagaggacggcaagacctgcagaagaaaggacgtgtgccaggccatcgaccacggctgcgagcacatctgcgtgaacagcgacgacagctacacctgcgagtgcctggagggcttcagactggccgaggacggcaagagatgcagaagaaaggacgtgtgcaagagcacccaccacggctgcgagcacatctgcgtgaacaacggcaacagctacatctgcaagtgcagcgagggcttcgtgctggccgaggacggcagaagatgcaagaagtgcaccgagggccccatcgacctggtgttcgtgatcgacggcagcaagagcctgggcgaggagaacttcgaggtggtgaagcagttcgtgaccggcatcatcgacagcctgaccatcagccccaaggccgccagagtgggcctgctgcagtacagcacccaggtgcacaccgagttcaccctgagaaacttcaacagcgccaaggacatgaagaaggccgtggcccacatgaagtacatgggcaagggcagcatgaccggcctggccctgaagcacatgttcgagagaagcttcacccagggcgagggcgccagacccctgagcaccagagtgcccagagccgccatcgtgttcaccgacggcagagcccaggacgacgtgagcgagtgggccagcaaggccaaggccaacggcatcaccatgtacgccgtgggcgtgggcaaggccatcgaggaggagctgcaggagatcgccagcgagcccaccaacaagcacctgttctacgccgaggacttcagcaccatggacgagatcagcgagaagctgaagaagggcatctgcgaggccctggaggacagcgacggcagacaggacagccccgccggcgagctgcccaagaccgtgcagcagcccaccgtgcagcacagatacctgttcgaggaggacaacctgctgagaagcacccagaagctgagccacagcaccaagcccagcggcagccccctggaggagaagcacgaccagtgcaagtgcgagaacctgatcatgttccagaacctggccaacgaggaggtgagaaagctgacccagagactggaggagatgacccagagaatggaggccctggagaacagactgagatacagatag

SEQ ID NO: 88101 - DNA, 2019 bp, synthetic construct
  misc_feature 1..2019: note = Description of Artificial Sequence: Synthetic coding sequence
  source 1..2019: mol_type = other DNA
atggaggaccacaactgcgagcagctgtgcgtgaacgtgcccggcagcttcgtgtgccagtgctacagcggctacgccctggccgaggacggcaagagatgcgtggccgtggactactgcgccagcgagaaccacggctgcgagcacgagtgcgtgaacgccgacggcagctacctgtgccagtgccacgagggcttcgccctgaaccccgacaagaagacctgcaccaagatcgactactgcgccagcagcaaccacggctgccagcacgagtgcgtgaacaccgacgacagctacagctgccactgcctgaagggcttcaccctgaaccccgacaagaagacctgcagaagaatcaactactgcgccctgaacaagcccggctgcgagcacgagtgcgtgaacatggaggagagctactactgcagatgccacagaggctacaccctggaccccaacggcaagacctgcagcagagtggaccactgcgcccagcaggaccacggctgcgagcagctgtgcctgaacaccgaggacagcttcgtgtgccagtgcagcgagggcttcctgatcaacgaggacctgaagacctgcagcagagtggactactgcctgctgagcgaccacggctgcgagtacagctgcgtgaacatggacagaagcttcgcctgccagtgccccgagggccacgtgctgagaagcgacggcaagacctgcgccaagctggacagctgcgccctgggcgaccacggctgcgagcacagctgcgtgagcagcgaggacagcttcgtgtgccagtgcttcgagggctacatcctgagagaggacggcaagacctgcagaagaaaggacgtgtgccaggccatcgaccacggctgcgagcacatctgcgtgaacagcgacgacagctacacctgcgagtgcctggagggcttcagactggccgaggacggcaagagatgcagaagaaaggacgtgtgcaagagcacccaccacggctgcgagcacatctgcgtgaacaacggcaacagctacatctgcaagtgcagcgagggcttcgtgctggccgaggacggcagaagatgcaagaagtgcaccgagggccccatcgacctggtgttcgtgatcgacggcagcaagagcctgggcgaggagaacttcgaggtggtgaagcagttcgtgaccggcatcatcgacagcctgaccatcagccccaaggccgccagagtgggcctgctgcagtacagcacccaggtgcacaccgagttcaccctgagaaacttcaacagcgccaaggacatgaagaaggccgtggcccacatgaagtacatgggcaagggcagcatgaccggcctggccctgaagcacatgttcgagagaagcttcacccagggcgagggcgccagacccctgagcaccagagtgcccagagccgccatcgtgttcaccgacggcagagcccaggacgacgtgagcgagtgggccagcaaggccaaggccaacggcatcaccatgtacgccgtgggcgtgggcaaggccatcgaggaggagctgcaggagatcgccagcgagcccaccaacaagcacctgttctacgccgaggacttcagcaccatggacgagatcagcgagaagctgaagaagggcatctgcgaggccctggaggacagcgacggcagacaggacagccccgccggcgagctgcccaagaccgtgcagcagcccaccgagagcgagcccgtgaccatcaacatccaggacctgctgagctgcagcaacttcgccgtgcagcacagatacctgttcgaggaggacaacctgctgagaagcacccagaagctgagccacagcaccaagcccagcggcagccccctggaggagaagcacgaccagtgcaagtgcgagaacctgatcatgttccagaacctggccaacgaggaggtgagaaagctgacccagagactggaggagatgacccagagaatggaggccctggagaacagactgagatacagatag

SEQ ID NO: 88102 - DNA, 2748 bp, synthetic construct
  misc_feature 1..2748: note = Description of Artificial Sequence: Synthetic coding sequence
  source 1..2748: mol_type = other DNA
atggagaagatgctggccggctgcttcctgctgatcctgggccagatcgtgctgctgcccgccgaggccagagagagaagcagaggcagaagcatcagcagaggcagacacgccagaacccacccccagaccgccctgctggagagcagctgcgagaacaagagagccgacctggtgttcatcatcgacagcagcagaagcgtgaacacccacgactacgccaaggtgaaggagttcatcgtggacatcctgcagttcctggacatcggccccgacgtgaccagagtgggcctgctgcagtacggcagcaccgtgaagaacgagttcagcctgaagaccttcaagagaaagagcgaggtggagagagccgtgaagagaatgagacacctgagcaccggcaccatgaccggcctggccatccagtacgccctgaacatcgccttcagcgaggccgagggcgccagacccctgagagagaacgtgcccagagtgatcatgatcgtgaccgacggcagaccccaggacagcgtggccgaggtggccgccaaggccagagacaccggcatcctgatcttcgccatcggcgtgggccaggtggacttcaacaccctgaagagcatcggcagcgagccccacgaggaccacgtgttcctggtggccaacttcagccagatcgagaccctgaccagcgtgttccagaagaagctgtgcaccgcccacatgtgcagcaccctggagcacaactgcgcccacttctgcatcaacatccccggcagctacgtgtgcagatgcaagcagggctacatcctgaacagcgaccagaccacctgcagaatccaggacctgtgcgccatggaggaccacaactgcgagcagctgtgcgtgaacgtgcccggcagcttcgtgtgccagtgctacagcggctacgccctggccgaggacggcaagagatgcgtggccgtggactactgcgccagcgagaaccacggctgcgagcacgagtgcgtgaacgccgacggcagctacctgtgccagtgccacgagggcttcgccctgaaccccgacaagaagacctgcaccagaatcaactactgcgccctgaacaagcccggctgcgagcacgagtgcgtgaacatggaggagagctactactgcagatgccacagaggctacaccctggaccccaacggcaagacctgcagcagagtggaccactgcgcccagcaggaccacggctgcgagcagctgtgcctgaacaccgaggacagcttcgtgtgccagtgcagcgagggcttcctgatcaacgaggacctgaagacctgcagcagagtggactactgcctgctgagcgaccacggctgcgagtacagctgcgtgaacatggacagaagcttcgcctgccagtgccccgagggccacgtgctgagaagcgacggcaagacctgcgccaagctggacagctgcgccctgggcgaccacggctgcgagcacagctgcgtgagcagcgaggacagcttcgtgtgccagtgcttcgagggctacatcctgagagaggacggcaagacctgcagaagaaaggacgtgtgccaggccatcgaccacggctgcgagcacatctgcgtgaacagcgacgacagctacacctgcgagtgcctggagggcttcagactggccgaggacggcaagagatgcagaagaaaggacgtgtgcaagagcacccaccacggctgcgagcacatctgcgtgaacaacggcaacagctacatctgcaagtgcagcgagggcttcgtgctggccgaggacggcagaagatgcaagaagtgcaccgagggccccatcgacctggtgttcgtgatcgacggcagcaagagcctgggcgaggagaacttcgaggtggtgaagcagttcgtgaccggcatcatcgacagcctgaccatcagccccaaggccgccagagtgggcctgctgcagtacagcacccaggtgcacaccgagttcaccctgagaaacttcaacagcgccaaggacatgaagaaggccgtggcccacatgaagtacatgggcaagggcagcatgaccggcctggccctgaagcacatgttcgagagaagcttcacccagggcgagggcgccagacccctgagcaccagagtgcccagagccgccatcgtgttcaccgacggcagagcccaggacgacgtgagcgagtgggccagcaaggccaaggccaacggcatcaccatgtacgccgtgggcgtgggcaaggccatcgaggaggagctgcaggagatcgccagcgagcccaccaacaagcacctgttctacgccgaggacttcagcaccatggacgagatcagcgagaagctgaagaagggcatctgcgaggccctggaggacagcgacggcagacaggacagccccgccggcgagctgcccaagaccgtgcagcagcccaccgagagcgagcccgtgaccatcaacatccaggacctgctgagctgcagcaacttcgccgtgcagcacagatacctgttcgaggaggacaacctgctgagaagcacccagaagctgagccacagcaccaagcccagcggcagccccctggaggagaagcacgaccagtgcaagtgcgagaacctgatcatgttccagaacctggccaacgaggaggtgagaaagctgacccagagactggaggagatgacccagagaatggaggccctggagaacagactgagatacagatag

SEQ ID NO: 88103 - DNA, 1461 bp, synthetic construct
  misc_feature 1..1461: note = Description of Artificial Sequence: Synthetic coding sequence
  source 1..1461: mol_type = other DNA
atgcccagacccgcccccgccagaagactgcccggcctgctgctgctgctgtggcccctgctgctgctgcccagcgccgcccccgaccccgtggccagacccggcttcagaagactggagaccagaggccccggcggcagccccggcagaagacccagccccgccgcccccgacggcgcccccgccagcggcaccagcgagcccggcagagccagaggcgccggcgtgtgcaagagcagacccctggacctggtgttcatcatcgacagcagcagaagcgtgagacccctggagttcaccaaggtgaagaccttcgtgagcagaatcatcgacaccctggacatcggccccgccgacaccagagtggccgtggtgaactacgccagcaccgtgaagatcgagttccagctgcaggcctacaccgacaagcagagcctgaagcaggccgtgggcagaatcacccccctgagcaccggcaccatgagcggcctggccatccagaccgccatggacgaggccttcaccgtggaggccggcgccagagagcccagcagcaacatccccaaggtggccatcatcgtgaccgacggcagaccccaggaccaggtgaacgaggtggccgccagagcccaggccagcggcatcgagctgtacgccgtgggcgtggacagagccgacatggccagcctgaagatgatggccagcgagcccctggaggagcacgtgttctacgtggagacctacggcgtgatcgagaagctgagcagcagattccaggagaccttctgcgccctggacccctgcgtgctgggcacccaccagtgccagcacgtgtgcatcagcgacggcgagggcaagcaccactgcgagtgcagccagggctacaccctgaacgccgacaagaagacctgcagcgccctggacagatgcgccctgaacacccacggctgcgagcacatctgcgtgaacgacagaagcggcagctaccactgcgagtgctacgagggctacaccctgaacgaggacagaaagacctgcagcgcccaggacaagtgcgccctgggcacccacggctgccagcacatctgcgtgaacgacagaaccggcagccaccactgcgagtgctacgagggctacaccctgaacgccgacaagaagacctgcagcgtgagagacaagtgcgccctgggcagccacggctgccagcacatctgcgtgagcgacggcgccgccagctaccactgcgactgctaccccggctacaccctgaacgaggacaagaagacctgcagcgccaccgaggaggccagaagactggtgagcaccgaggacgcctgcggctgcgaggccaccctggccttccaggacaaggtgagcagctacctgcagagactgaacaccaagctggacgacatcctggagaagctgaagatcaacgagtacggccagatccacagatag

SEQ ID NO: 88104 - DNA, 1335 bp, synthetic construct
  misc_feature 1..1335: note = Description of Artificial Sequence: Synthetic coding sequence
  source 1..1335: mol_type = other DNA
atgcccagacccgcccccgccagaagactgcccggcctgctgctgctgctgtggcccctgctgctgctgcccagcgccgcccccgaccccgtggccagacccggcttcagaagactggagaccagaggccccggcggcagccccggcagaagacccagccccgccgcccccgacggcgcccccgccagcggcaccagcgagcccggcagagccagaggcgccggcgtgtgcaagagcagacccctggacctggtgttcatcatcgacagcagcagaagcgtgagacccctggagttcaccaaggtgaagaccttcgtgagcagaatcatcgacaccctggacatcggccccgccgacaccagagtggccgtggtgaactacgccagcaccgtgaagatcgagttccagctgcaggcctacaccgacaagcagagcctgaagcaggccgtgggcagaatcacccccctgagcaccggcaccatgagcggcctggccatccagaccgccatggacgaggccttcaccgtggaggccggcgccagagagcccagcagcaacatccccaaggtggccatcatcgtgaccgacggcagaccccaggaccaggtgaacgaggtggccgccagagcccaggccagcggcatcgagctgtacgccgtgggcgtggacagagccgacatggccagcctgaagatgatggccagcgagcccctggaggagcacgtgttctacgtggagacctacggcgtgatcgagaagctgagcagcagattccaggagaccttctgcgccctggacagatgcgccctgaacacccacggctgcgagcacatctgcgtgaacgacagaagcggcagctaccactgcgagtgctacgagggctacaccctgaacgaggacagaaagacctgcagcgcccaggacaagtgcgccctgggcacccacggctgccagcacatctgcgtgaacgacagaaccggcagccaccactgcgagtgctacgagggctacaccctgaacgccgacaagaagacctgcagcgtgagagacaagtgcgccctgggcagccacggctgccagcacatctgcgtgagcgacggcgccgccagctaccactgcgactgctaccccggctacaccctgaacgaggacaagaagacctgcagcgccaccgaggaggccagaagactggtgagcaccgaggacgcctgcggctgcgaggccaccctggccttccaggacaaggtgagcagctacctgcagagactgaacaccaagctggacgacatcctggagaagctgaagatcaacgagtacggccagatccacagatag

SEQ ID NO: 88105 - DNA, 1869 bp, synthetic construct
  misc_feature 1..1869: note = Description of Artificial Sequence: Synthetic coding sequence
  source 1..1869: mol_type = other DNA
atgagaggcctgctgtgctggcccgtgctgctgctgctgctgcagccctgggagacccagctgcagctgaccggccccagatgccacaccggccccctggacctggtgttcgtgatcgacagcagcagaagcgtgagacccttcgagttcgagaccatgagacagttcctgatgggcctgctgagaggcctgaacgtgggccccaacgccaccagagtgggcgtgatccagtacagcagccaggtgcagagcgtgttccccctgagagccttcagcagaagagaggacatggagagagccatcagagacctggtgcccctggcccagggcaccatgaccggcctggccatccagtacgccatgaacgtggccttcagcgtggccgagggcgccagaccccccgaggagagagtgcccagagtggccgtgatcgtgaccgacggcagaccccaggacagagtggccgaggtggccgcccaggccagagccagaggcatcgagatctacgccgtgggcgtgcagagagccgacgtgggcagcctgagagccatggccagcccccccctggacgagcacgtgttcctggtggagagcttcgacctgatccaggagttcggcctgcagttccagagcagactgtgcggcaaggaccagtgcgccgagggcggccacggctgccagcaccagtgcgtgaacgcctgggccatgttccactgcacctgcaaccccggctacaagctggccgccgacaacaagagctgcctggccatcgacctgtgcgccgagggcacccacggctgcgagcaccactgcgtgaacagccccggcagctacttctgccactgccaggtgggcttcgtgctgcagcaggaccagagaagctgcagagccatcgactactgcagcttcggcaaccacagctgccagcacgagtgcgtgagcacccccggcggccccagatgccactgcagagagggccacgacctgcagcccgacggcagaagctgccaggtgagagacctgtgcaacggcgtggaccacggctgcgagttccagtgcgtgagcgagggcctgagctacagatgcctgtgccccgagggcagacagctgcaggccgacggcaagagctgcaacagatgcagagagggccacgtggacctggtgctgctggtggacggcagcaagagcgtgagaccccagaacttcgagctggtgaagagattcgtgaaccagatcgtggacttcctggacgtgagccccgagggcaccagagtgggcctggtgcagttcagcagcagagtgagaaccgagttccccctgggcagatacggcaccgccgccgaggtgaagcaggccgtgctggccgtggagtacatggagagaggcaccatgaccggcctggccctgagacacatggtggagcacagcttcagcgaggcccagggcgccagacccagagccctgaacgtgcccagagtgggcctggtgttcaccgacggcagaagccaggacgacatcagcgtgtgggccgccagagccaaggaggagggcatcgtgatgtacgccgtgggcgtgggcaaggccgtggaggccgagctgagagagatcgccagcgagcccgccgagctgcacgtgagctacgcccccgacttcggcaccatgacccacctgctggagaacctgagaggcagcatctgccccgaggagggcatcagcgccggcaccgagctgagaagcccctgcgagtgcgagagcctggtggagttccagggcagaaccctgggcgccctggagagcctgaccctgaacctggcccagctgaccgccagactggaggacctggagaaccagctggccaaccagaagtag

SEQ ID NO: 88106 - DNA, 1746 bp, synthetic construct
  misc_feature 1..1746: note = Description of Artificial Sequence: Synthetic coding sequence
  source 1..1746: mol_type = other DNA
atgagaggcctgctgtgctggcccgtgctgctgctgctgctgcagccctgggagacccagctgcagctgaccggccccagatgccacaccggccccctggacctggtgttcgtgatcgacagcagcagaagcgtgagacccttcgagttcgagaccatgagacagttcctgatgggcctgctgagaggcctgaacgtgggccccaacgccaccagagtgggcgtgatccagtacagcagccaggtgcagagcgtgttccccctgagagccttcagcagaagagaggacatggagagagccatcagagacctggtgcccctggcccagggcaccatgaccggcctggccatccagtacgccatgaacgtggccttcagcgtggccgagggcgccagaccccccgaggagagagtgcccagagtggccgtgatcgtgaccgacggcagaccccaggacagagtggccgaggtggccgcccaggccagagccagaggcatcgagatctacgccgtgggcgtgcagagagccgacgtgggcagcctgagagccatggccagcccccccctggacgagcacgtgttcctggtggagagcttcgacctgatccaggagttcggcctgcagttccagagcagactgtgcgccatcgacctgtgcgccgagggcacccacggctgcgagcaccactgcgtgaacagccccggcagctacttctgccactgccaggtgggcttcgtgctgcagcaggaccagagaagctgcagagccatcgactactgcagcttcggcaaccacagctgccagcacgagtgcgtgagcacccccggcggccccagatgccactgcagagagggccacgacctgcagcccgacggcagaagctgccaggtgagagacctgtgcaacggcgtggaccacggctgcgagttccagtgcgtgagcgagggcctgagctacagatgcctgtgccccgagggcagacagctgcaggccgacggcaagagctgcaacagatgcagagagggccacgtggacctggtgctgctggtggacggcagcaagagcgtgagaccccagaacttcgagctggtgaagagattcgtgaaccagatcgtggacttcctggacgtgagccccgagggcaccagagtgggcctggtgcagttcagcagcagagtgagaaccgagttccccctgggcagatacggcaccgccgccgaggtgaagcaggccgtgctggccgtggagtacatggagagaggcaccatgaccggcctggccctgagacacatggtggagcacagcttcagcgaggcccagggcgccagacccagagccctgaacgtgcccagagtgggcctggtgttcaccgacggcagaagccaggacgacatcagcgtgtgggccgccagagccaaggaggagggcatcgtgatgtacgccgtgggcgtgggcaaggccgtggaggccgagctgagagagatcgccagcgagcccgccgagctgcacgtgagctacgcccccgacttcggcaccatgacccacctgctggagaacctgagaggcagcatctgccccgaggagggcatcagcgccggcaccgagctgagaagcccctgcgagtgcgagagcctggtggagttccagggcagaaccctgggcgccctggagagcctgaccctgaacctggcccagctgaccgccagactggaggacctggagaaccagctggccaaccagaagtag

SEQ ID NO: 88107 - DNA, 1500 bp, synthetic construct
  misc_feature 1..1500: note = Description of Artificial Sequence: Synthetic coding sequence
  source 1..1500: mol_type = other DNA
atgagaggcctgctgtgctggcccgtgctgctgctgctgctgcagccctgggagacccagctgcagctgaccggccccagatgccacaccggccccctggacctggtgttcgtgatcgacagcagcagaagcgtgagacccttcgagttcgagaccatgagacagttcctgatgggcctgctgagaggcctgaacgtgggccccaacgccaccagagtgggcgtgatccagtacagcagccaggtgcagagcgtgttccccctgagagccttcagcagaagagaggacatggagagagccatcagagacctggtgcccctggcccagggcaccatgaccggcctggccatccagtacgccatgaacgtggccttcagcgtggccgagggcgccagaccccccgaggagagagtgcccagagtggccgtgatcgtgaccgacggcagaccccaggacagagtggccgaggtggccgcccaggccagagccagaggcatcgagatctacgccgtgggcgtgcagagagccgacgtgggcagcctgagagccatggccagcccccccctggacgagcacgtgttcctggtggagagcttcgacctgatccaggagttcggcctgcagttccagagcagactgtgcgtgagagacctgtgcaacggcgtggaccacggctgcgagttccagtgcgtgagcgagggcctgagctacagatgcctgtgccccgagggcagacagctgcaggccgacggcaagagctgcaacagatgcagagagggccacgtggacctggtgctgctggtggacggcagcaagagcgtgagaccccagaacttcgagctggtgaagagattcgtgaaccagatcgtggacttcctggacgtgagccccgagggcaccagagtgggcctggtgcagttcagcagcagagtgagaaccgagttccccctgggcagatacggcaccgccgccgaggtgaagcaggccgtgctggccgtggagtacatggagagaggcaccatgaccggcctggccctgagacacatggtggagcacagcttcagcgaggcccagggcgccagacccagagccctgaacgtgcccagagtgggcctggtgttcaccgacggcagaagccaggacgacatcagcgtgtgggccgccagagccaaggaggagggcatcgtgatgtacgccgtgggcgtgggcaaggccgtggaggccgagctgagagagatcgccagcgagcccgccgagctgcacgtgagctacgcccccgacttcggcaccatgacccacctgctggagaacctgagaggcagcatctgccccgaggagggcatcagcgccggcaccgagctgagaagcccctgcgagtgcgagagcctggtggagttccagggcagaaccctgggcgccctggagagcctgaccctgaacctggcccagctgaccgccagactggaggacctggagaaccagctggccaaccagaagtag

SEQ ID NO: 88108 - DNA, 1623 bp, synthetic construct
  misc_feature 1..1623: note = Description of Artificial Sequence: Synthetic coding sequence
  source 1..1623: mol_type = other DNA
atgagaggcctgctgtgctggcccgtgctgctgctgctgctgcagccctgggagacccagctgcagctgaccggccccagatgccacaccggccccctggacctggtgttcgtgatcgacagcagcagaagcgtgagacccttcgagttcgagaccatgagacagttcctgatgggcctgctgagaggcctgaacgtgggccccaacgccaccagagtgggcgtgatccagtacagcagccaggtgcagagcgtgttccccctgagagccttcagcagaagagaggacatggagagagccatcagagacctggtgcccctggcccagggcaccatgaccggcctggccatccagtacgccatgaacgtggccttcagcgtggccgagggcgccagaccccccgaggagagagtgcccagagtggccgtgatcgtgaccgacggcagaccccaggacagagtggccgaggtggccgcccaggccagagccagaggcatcgagatctacgccgtgggcgtgcagagagccgacgtgggcagcctgagagccatggccagcccccccctggacgagcacgtgttcctggtggagagcttcgacctgatccaggagttcggcctgcagttccagagcagactgtgcgccatcgactactgcagcttcggcaaccacagctgccagcacgagtgcgtgagcacccccggcggccccagatgccactgcagagagggccacgacctgcagcccgacggcagaagctgccaggtgagagacctgtgcaacggcgtggaccacggctgcgagttccagtgcgtgagcgagggcctgagctacagatgcctgtgccccgagggcagacagctgcaggccgacggcaagagctgcaacagatgcagagagggccacgtggacctggtgctgctggtggacggcagcaagagcgtgagaccccagaacttcgagctggtgaagagattcgtgaaccagatcgtggacttcctggacgtgagccccgagggcaccagagtgggcctggtgcagttcagcagcagagtgagaaccgagttccccctgggcagatacggcaccgccgccgaggtgaagcaggccgtgctggccgtggagtacatggagagaggcaccatgaccggcctggccctgagacacatggtggagcacagcttcagcgaggcccagggcgccagacccagagccctgaacgtgcccagagtgggcctggtgttcaccgacggcagaagccaggacgacatcagcgtgtgggccgccagagccaaggaggagggcatcgtgatgtacgccgtgggcgtgggcaaggccgtggaggccgagctgagagagatcgccagcgagcccgccgagctgcacgtgagctacgcccccgacttcggcaccatgacccacctgctggagaacctgagaggcagcatctgccccgaggagggcatcagcgccggcaccgagctgagaagcccctgcgagtgcgagagcctggtggagttccagggcagaaccctgggcgccctggagagcctgaccctgaacctggcccagctgaccgccagactggaggacctggagaaccagctggccaaccagaagtag

SEQ ID NO: 88109 - DNA, 1299 bp, synthetic construct
  misc_feature 1..1299: note = Description of Artificial Sequence: Synthetic coding sequence
  source 1..1299: mol_type = other DNA
atgagaggcctgctgtgctggcccgtgctgctgctgctgctgcagccctgggagacccagctgcagctgaccggcaaggaccagtgcgccgagggcggccacggctgccagcaccagtgcgtgaacgcctgggccatgttccactgcacctgcaaccccggctacaagctggccgccgacaacaagagctgcctggccatcgacctgtgcgccgagggcacccacggctgcgagcaccactgcgtgaacagccccggcagctacttctgccactgccaggtgggcttcgtgctgcagcaggaccagagaagctgcagagccatcgactactgcagcttcggcaaccacagctgccagcacgagtgcgtgagcacccccggcggccccagatgccactgcagagagggccacgacctgcagcccgacggcagaagctgccaggtgagagacctgtgcaacggcgtggaccacggctgcgagttccagtgcgtgagcgagggcctgagctacagatgcctgtgccccgagggcagacagctgcaggccgacggcaagagctgcaacagatgcagagagggccacgtggacctggtgctgctggtggacggcagcaagagcgtgagaccccagaacttcgagctggtgaagagattcgtgaaccagatcgtggacttcctggacgtgagccccgagggcaccagagtgggcctggtgcagttcagcagcagagtgagaaccgagttccccctgggcagatacggcaccgccgccgaggtgaagcaggccgtgctggccgtggagtacatggagagaggcaccatgaccggcctggccctgagacacatggtggagcacagcttcagcgaggcccagggcgccagacccagagccctgaacgtgcccagagtgggcctggtgttcaccgacggcagaagccaggacgacatcagcgtgtgggccgccagagccaaggaggagggcatcgtgatgtacgccgtgggcgtgggcaaggccgtggaggccgagctgagagagatcgccagcgagcccgccgagctgcacgtgagctacgcccccgacttcggcaccatgacccacctgctggagaacctgagaggcagcatctgccccgaggagggcatcagcgccggcaccgagctgagaagcccctgcgagtgcgagagcctggtggagttccagggcagaaccctgggcgccctggagagcctgaccctgaacctggcccagctgaccgccagactggaggacctggagaaccagctggccaaccagaagtag

SEQ ID NO: 88110 - DNA, 1299 bp, synthetic construct; identical to SEQ ID NO: 88109
  misc_feature 1..1299: note = Description of Artificial Sequence: Synthetic coding sequence
  source 1..1299: mol_type = other DNA

SEQ ID NO: 88111 - DNA, 1869 bp, synthetic construct; identical to SEQ ID NO: 88105
  misc_feature 1..1869: note = Description of Artificial Sequence: Synthetic coding sequence
  source 1..1869: mol_type = other DNA

SEQ ID NO: 88112 - DNA, 1746 bp, synthetic construct; identical to SEQ ID NO: 88106
  misc_feature 1..1746: note = Description of Artificial Sequence: Synthetic coding sequence
  source 1..1746: mol_type = other DNA

SEQ ID NO: 88113 - DNA, 852 bp, synthetic construct
  misc_feature 1..852: note = Description of Artificial Sequence: Synthetic coding sequence
  source 1..852: mol_type = other DNA
atgagcaagagcttccagcagagcagcctgagcagagacagccagggccacggcagagacctgagcgccgccggcatcggcctgctggccgccgccacccagagcctgagcatgctgctggagagcgaggacgagctgctggtggacgaggaggaggccgccgccctgctggagagcggcagcagcgtgggcgacgagaccgacctggccaacctgggcgacgtggccagcgacggcaagaaggagcccagcgacaaggccgtgaagaaggacggcagcgccagcgccgccgccaagaagaagctgaagaagagaagattccccggcagcatggagggcttcgtgaccctggacgaggtgggcgacgaggaggacagcgagctgcagaagctgagaaagagcggcatggccttcaagagcggcgacaagaacgacgacggcctggtggagatcaaggtggacaagatcgaggagctggaccaggagaacgaggccgccctggagaacggcatcaagaacgaggagaacaccgagcccggcgccgagagcagcgagaacgccgacgaccccaacaaggacaccagcgagaacgccgacggccagagcgacgagaacaaggacgactacaccatccccgacgagtacagaatcggcccctaccagcccaacgtgcccgtgggcatcgactacgtgatccccaagaccggcttctactgcaagctgtgcagcctgttctacaccaacgaggaggtggccaagaacacccactgcagcagcctgccccactaccagaagctgaagaagttcctgaacaagctggccgaggagagaagacagaagaaggagacctag

SEQ ID NO: 88114 - DNA, 2544 bp, synthetic construct
  misc_feature 1..2544: note = Description of Artificial Sequence: Synthetic coding sequence
  source 1..2544: mol_type = other DNA
atgagcaagagcttccagcagagcagcctgagcagagacagccagggccacggcagagacctgagcgccgccggcatcggcctgctggccgccgccacccagagcctgagcatgcccgccagcctgggcagaatgaaccagggcaccgccagactggccagcctgatgaacctgggcatgagcagcagcctgaaccagcagggcgcccacagcgccctgagcagcgccagcaccagcagccacaacctgcagagcatcttcaacatcggcagcagaggccccctgcccctgagcagccagcacagaggcgacgccgaccaggccagcaacatcctggccagcttcggcctgagcgccagagacctggacgagctgagcagataccccgaggacaagatcacccccgagaacctgccccagatcctgctgcagctgaagagaagaagaaccgaggagggccccaccctgagctacggcagagacggcagaagcgccaccagagagcccccctacagagtgcccagagacgactgggaggagaagagacacttcagaagagacagcttcgacgacagaggccccagcctgaaccccgtgctggactacgaccacggcagcagaagccaggagagcggctactacgacagaatggactacgaggacgacagactgagagacggcgagagatgcagagacgacagcttcttcggcgagaccagccacaactaccacaagttcgacagcgagtacgagagaatgggcagaggccccggccccctgcaggagagaagcctgttcgagaagaagagaggcgccccccccagcagcaacatcgaggacttccacggcctgctgcccaagggctacccccacctgtgcagcatctgcgacctgcccgtgcacagcaacaaggagtggagccagcacatcaacggcgccagccacagcagaagatgccagctgctgctggagatctaccccgagtggaaccccgacaacgacaccggccacaccatgggcgaccccttcatgctgcagcagagcaccaaccccgcccccggcatcctgggcccccccccccccagcttccacctgggcggccccgccgtgggccccagaggcaacctgggcgccggcaacggcaacctgcagggccccagacacatgcagaagggcagagtggagaccagcagagtggtgcacatcatggacttccagagaggcaagaacctgagataccagctgctgcagctggtggagcccttcggcgtgatcagcaaccacctgatcctgaacaagatcaacgaggccttcatcgagatggccaccaccgaggacgcccaggccgccgtggactactacaccaccacccccgccctggtgttcggcaagcccgtgagagtgcacctgagccagaagtacaagagaatcaagaagcccgagggcaagcccgaccagaagttcgaccagaagcaggagctgggcagagtgatccacctgagcaacctgccccacagcggctacagcgacagcgccgtgctgaagctggccgagccctacggcaagatcaagaactacatcctgatgagaatgaagagccaggccttcatcgagatggagaccagagaggacgccatggccatggtggaccactgcctgaagaaggccctgtggttccagggcagatgcgtgaaggtggacctgagcgagaagtacaagaagctggtgctgagaatccccaacagaggcatcgacctgctgaagaaggacaagagcagaaagagaagctacagccccgacggcaaggagagccccagcgacaagaagagcaagaccgacggcagccagaagaccgagagcagcaccgagggcaaggagcaggaggagaagagcggcgaggacggcgagaaggacaccaaggacgaccagaccgagcaggagcccaacatgctgctggagagcgaggacgagctgctggtggacgaggaggaggccgccgccctgctggagagcggcagcagcgtgggcgacgagaccgacctggccaacctgggcgacgtggccagcgacggcaagaaggagcccagcgacaaggccgtgaagaaggacggcagcgccagcgccgccgccaagaagaagctgaagaaggtggacaagatcgaggagctggaccaggagaacgaggccgccctggagaacggcatcaagaacgaggagaacaccgagcccggcgccgagagcagcgagaacgccgacgaccccaacaaggacaccagcgagaacgccgacggccagagcgacgagaacaaggacgactacaccatccccgacgagtacagaatcggcccctaccagcccaacgtgcccgtgggcatcgactacgtgatccccaagaccggcttctactgcaagctgtgcagcctgttctacaccaacgaggaggtggccaagaacacccactgcagcagcctgccccactaccagaagctgaagaagttcctgaacaagctggccgaggagagaagacagaagaaggagacctag

SEQ ID NO: 88115 - DNA, 2544 bp, synthetic construct; identical to SEQ ID NO: 88114
  misc_feature 1..2544: note = Description of Artificial Sequence: Synthetic coding sequence
  source 1..2544: mol_type = other DNA

SEQ ID NO: 88116 - DNA, 300 bp, synthetic construct
  misc_feature 1..300: note = Description of Artificial Sequence: Synthetic coding sequence
  source 1..300: mol_type = other DNA
atgagcaagagcttccagcagagcagcctgagcagagacagccagggccacggcagagacctgagcgccgccggcatcggcctgctggccgccgccacccagagcctgagcatgcccgccagcctgggcagaatgaaccagggcaccgccagactggccagcctgatgaacctgggcatgagcagcagcctgaaccagcagggcgcccacagcgccctgagcagcgccagcaccagcagccacaacctgcagagcatcttcaacatcggcagcagaggccccctgcccctgagcagctag

SEQ ID NO: 88117 - DNA, 1530 bp, synthetic construct
  misc_feature 1..1530: note = Description of Artificial Sequence: Synthetic coding sequence
  source 1..1530: mol_type = other DNA
atgggcgaccccttcatgctgcagcagagcaccaaccccgcccccggcatcctgggcccccccccccccagcttccacctgggcggccccgccgtgggccccagaggcaacctgggcgccggcaacggcaacctgcagggccccagacacatgcagaagggcagagtggagaccagcagagtggtgcacatcatggacttccagagaggcaagaacctgagataccagctgctgcagctggtggagcccttcggcgtgatcagcaaccacctgatcctgaacaagatcaacgaggccttcatcgagatggccaccaccgaggacgcccaggccgccgtggactactacaccaccacccccgccctggtgttcggcaagcccgtgagagtgcacctgagccagaagtacaagagaatcaagaagcccgagggcaagcccgaccagaagttcgaccagaagcaggagctgggcagagtgatccacctgagcaacctgccccacagcggctacagcgacagcgccgtgctgaagctggccgagccctacggcaagatcaagaactacatcctgatgagaatgaagagccaggccttcatcgagatggagaccagagaggacgccatggccatggtggaccactgcctgaagaaggccctgtggttccagggcagatgcgtgaaggtggacctgagcgagaagtacaagaagctggtgctgagaatccccaacagaggcatcgacctgctgaagaaggacaagagcagaaagagaagctacagccccgacggcaaggagagccccagcgacaagaagagcaagaccgacggcagccagaagaccgagagcagcaccgagggcaaggagcaggaggagaagagcggcgaggacggcgagaaggacaccaaggacgaccagaccgagcaggagcccaacatgctgctggagagcgaggacgagctgctggtggacgaggaggaggccgccgccctgctggagagcggcagcagcgtgggcgacgagaccgacctggccaacctgggcgacgtggccagcgacggcaagaaggagcccagcgacaaggccgtgaagaaggacggcagcgccagcgccgccgccaagaagaagctgaagaaggtggacaagatcgaggagctggaccaggagaacgaggccgccctggagaacggcatcaagaacgaggagaacaccgagcccggcgccgagagcagcgagaacgccgacgaccccaacaaggacaccagcgagaacgccgacggccagagcgacgagaacaaggacgactacaccatccccgacgagtacagaatcggcccctaccagcccaacgtgcccgtgggcatcgactacgtgatccccaagaccggcttctactgcaagctgtgcagcctgttctacaccaacgaggaggtggccaagaacacccactgcagcagcctgccccactaccagaagctgaagaagttcctgaacaagctggccgaggagagaagacagaagaaggagacctag

SEQ ID NO: 88118 - DNA, 264 bp, synthetic construct
  misc_feature 1..264: note = Description of Artificial Sequence: Synthetic coding sequence
  source 1..264: mol_type = other DNA
atgagcaagagcttccagcagagcagcctgagcagagacagccagggccacggcagagacctgagcgccgccggcatcggcctgctggccgccgccacccagagcctgagcatgcccgccagcctgggcagaatgaaccagggcaccgccagactggccagcctgatgaacctgggcatgagcagcagcctgaaccagcagggcgcccacagcgccctgagcagcgccagcaccagcagccacaacctgcagagcatcttctag

SEQ ID NO: 88119 - DNA, 1680 bp, synthetic construct
  misc_feature 1..1680: note = Description of Artificial Sequence: Synthetic coding sequence
  source 1..1680: mol_type = other DNA
atgctgggcgcccagtggagaagaaaccagcccagcagagccgccgaggagtggagccagcacatcaacggcgccagccacagcagaagatgccagctgctgctggagatctaccccgagtggaaccccgacaacgacaccggccacaccatgggcgaccccttcatgctgcagcagagcaccaaccccgcccccggcatcctgggcccccccccccccagcttccacctgggcggccccgccgtgggccccagaggcaacctgggcgccggcaacggcaacctgcagggccccagacacatgcagaagggcagagtggagaccagcagagtggtgcacatcatggacttccagagaggcaagaacctgagataccagctgctgcagctggtggagcccttcggcgtgatcagcaaccacctgatcctgaacaagatcaacgaggccttcatcgagatggccaccaccgaggacgcccaggccgccgtggactactacaccaccacccccgccctggtgttcggcaagcccgtgagagtgcacctgagccagaagtacaagagaatcaagaagcccgagggcaagcccgaccagaagttcgaccagaagcaggagctgggcagagtgatccacctgagcaacctgccccacagcggctacagcgacagcgccgtgctgaagctggccgagccctacggcaagatcaagaactacatcctgatgagaatgaagagccaggccttcatcgagatggagaccagagaggacgccatggccatggtggaccactgcctgaagaaggccctgtggttccagggcagatgcgtgaaggtggacctgagcgagaagtacaagaagctggtgctgagaatccccaacagaggcatcgacctgctgaagaaggacaagagcagaaagagaagctacagccccgacggcaaggagagccccagcgacaagaagagcaagaccgacggcagccagaagaccgagagcagcaccgagggcaaggagcaggaggagaagagcggcgaggacggcgagaaggacaccaaggacgaccagaccgagcaggagcccaacatgctgctggagagcgaggacgagctgctggtggacgaggaggaggccgccgccctgctggagagcggcagcagcgtgggcgacgagaccgacctggccaacctgggcgacgtggccagcgacggcaagaaggagcccagcgacaaggccgtgaagaaggacggcagcgccagcgccgccgccaagaagaagctgaagaaggtggacaagatcgaggagctggaccaggagaacgaggccgccctggagaacggcatcaagaacgaggagaacaccgagcccggcgccgagagcagcgagaacgccgacgaccccaacaaggacaccagcgagaacgccgacggccagagcgacgagaacaaggacgactacaccatccccgacgagtacagaatcggcccctaccagcccaacgtgcccgtgggcatcgactacgtgatccccaagaccggcttctactgcaagctgtgcagcctgttctacaccaacgaggaggtggccaagaacacccactgcagcagcctgccccactaccagaagctgaagaagttcctgaacaagctggccgaggagagaagacagaagaaggagacctag

SEQ ID NO: 88120 - DNA, 237 bp, synthetic construct
  misc_feature 1..237: note = Description of Artificial Sequence: Synthetic coding sequence
  source 1..237: mol_type = other DNA
atgagcaagagcttccagcagagcagcctgagcagagacagccagggccacggcagagacctgagcgccgccggcatcggcctgctggccgccgccacccagagcctgagcatgcccgccagcctgggcagaatgaaccagggcaccgccagactggccagcctgatgaacctgggcatgagcagcagcctgaaccagcagggcgcccacagcgccctgagcagcgccagcacctag

SEQ ID NO: 88121 - DNA, 1302 bp, synthetic construct
  misc_feature 1..1302: note = Description of Artificial Sequence: Synthetic coding sequence
  source 1..1302: mol_type = other DNA
atgagcaagagcttccagcagagcagcctgagcagagacagccagggccacggcagagacctgagcgccgccggcatcggcctgctggccgccgccacccagagcctgagcatgcccgccagcctgggcagaatgaaccagggcaccgccagactggccagcctgatgaacctgggcatgagcagcagcctgaaccagcagggcgcccacagcgccctgagcagcgccagcaccagcagccacaacctgcagagcatcttcaacatcggcagcagaggccccctgcccctgagcagccagcacagaggcgacgccgaccaggccagcaacatcctggccagcttcggcctgagcgccagagacctggacgagctgagcagataccccgaggacaagatcacccccgagaacctgccccagatcctgctgcagctgaagagaagaagaaccgaggagggccccaccctgagctacggcagagacggcagaagcgccaccagagagcccccctacagagtgcccagagacgactgggaggagaagagacacttcagaagagacagcttcgacgacagaggccccagcctgaaccccgtgctggactacgaccacggcagcagaagccaggagagcggctactacgacagaatggactacgaggacgacagactgagagacggcgagagatgcagagacgacagcttcttcggcgagaccagccacaactaccacaagttcgacagcgagtacgagagaatgggcagaggccccggccccctgcaggagagaagcctgttcgagaagaagagaggcgccccccccagcagcaacatcgaggacttccacggcctgctgcccaagggctacccccacctgtgcagcatctgcgacctgcccgtgcacagcaacaaggagtggagccagcacatcaacggcgccagccacagcagaagatgccagctgctgctggagatctaccccgagtggaaccccgacaacgacaccggccacaccatgggcgaccccttcatgctgcagcagagcaccaaccccgcccccggcatcctgggcccccccccccccagcttccacctgggcggccccgccgtgggccccagaggcaacctgggcgccggcaacggcaacctgcagggccccagacacatgcagaagggcagagtggagaccagcagagtggtgcacatcatggacttccagagaggcaagaacctgagataccagctgctgcagctggtggagcccttcggcgtgatcagcaaccacctgatcctgaacaagtag

SEQ ID NO: 88122 - DNA, 1530 bp, synthetic construct; identical to SEQ ID NO: 88117
  misc_feature 1..1530: note = Description of Artificial Sequence: Synthetic coding sequence
  source 1..1530: mol_type = other DNA

SEQ ID NO: 88123 - DNA, 144 bp, synthetic construct
  misc_feature 1..144: note = Description of Artificial Sequence: Synthetic coding sequence
  source 1..144: mol_type = other DNA
atgagcaagagcttccagcagagcagcctgagcagagacagccagggccacggcagagacctgagcgccgccggcatcggcctgctggccgccgccacccagagcctgagcatgcccgccagcctgggcagaatgaaccagtag

SEQ ID NO: 88124 - DNA, 237 bp, synthetic construct; identical to SEQ ID NO: 88120
  misc_feature 1..237: note = Description of Artificial Sequence: Synthetic coding sequence
  source 1..237: mol_type = other DNA

SEQ ID NO: 88125 - DNA, 2544 bp, synthetic construct; identical to SEQ ID NO: 88114
  misc_feature 1..2544: note = Description of Artificial Sequence: Synthetic coding sequence
  source 1..2544: mol_type = other DNA

SEQ ID NO: 88126 - DNA, 30 bp, synthetic construct
  misc_feature 1..30: note = Description of Artificial Sequence: Synthetic coding sequence
  source 1..30: mol_type = other DNA
atgagcaagagcttccagcagagcagctag

SEQ ID NO: 88127 - DNA, 303 bp, synthetic construct
  misc_feature 1..303: note = Description of Artificial Sequence: Synthetic coding sequence
  source 1..303: mol_type = other DNA
atgagcaagagcttccagcagagcagcctgagcagagacagccagggccacggcagagacctgagcgccgccggcatcggcctgctggccgccgccacccagagcctgagcatgcccgccagcctgggcagaatgaaccagggcaccgccagactggccagcctgatgaacctgggcatgagcagcagcctgaaccagcagggcgcccacagcgccctgagcagcgccagcaccagcagccacaacctgcagagcatcttcaacatcggcagcagaggccccctgcccctgagcagccagtag

SEQ ID NO: 88128 - DNA, 324 bp, synthetic construct
  misc_feature 1..324: note = Description of Artificial Sequence: Synthetic coding sequence
  source 1..324: mol_type = other DNA
atgagcaagagcttccagcagagcagcctgagcagagacagccagggccacggcagagacctgagcgccgccggcatcggcctgctggccgccgccacccagagcctgagcatgcccgccagcctgggcagaatgaaccagggcaccgccagactggccagcctgatgaacctgggcatgagcagcagcctgaaccagcagggcgcccacagcgccctgagcagcgccagcaccagcagccacaacctgcagagcatcttcaacatcggcagcagaggccccctgcccctgagcagccagcacagaggcgacgccgaccagtag

SEQ ID NO: 88129 - DNA, 1578 bp, synthetic construct
  misc_feature 1..1578: note = Description of Artificial Sequence: Synthetic coding sequence
  source 1..1578: mol_type = other DNA
atgagagtgttctgcgtgggcctgctgctgttcagcgtgacctgggccgcccccaccttccagccccagaccgagaagaccaagcagagctgcgtggaggagcagagacaggaggagaagaacaaggacaacatcggcttccaccacctgggcaagagaatcaaccaggagctgagcagcaaggagaacatcgtgcaggagagaaagaaggacctgagcctgagcgaggccagcgagaacaagggcagcagcaagagccagaactacttcaccaacagacagagactgaacaaggagtacagcatcagcaacaaggagaacacccacaacggcctgagaatgagcatctaccccaagagcaccggcaacaagggcttcgaggacggcgacgacgccatcagcaagctgcacgaccaggaggagtacggcgccgccctgatcagaaacaacatgcagcacatcatgggccccgtgaccgccatcaagctgctgggcgaggagaacaaggagaacacccccagaaacgtgctgaacatcatccccgccagcatgaactacgccaaggcccacagcaaggacaagaagaagccccagagagacagccaggcccagaagagccccgtgaagagcaagagcacccacagaatccagcacaacatcgactacctgaagcacctgagcaaggtgaagaagatccccagcgacttcgagggcagcggctacaccgacctgcaggagagaggcgacaacgacatcagccccttcagcggcgacggccagcccttcaaggacatccccggcaagggcgaggccaccggccccgacctggagggcaaggacatccagaccggcttcgccggccccagcgaggccgagagcacccacctggacaccaagaagcccggctacaacgagatccccgagagagaggagaacggcggcaacaccatcggcaccagagacgagaccgccaaggaggccgacgccgtggacgtgagcctggtggagggcagcaacgacatcatgggcagcaccaacttcaaggagctgcccggcagagagggcaacagagtggacgccggcagccagaacgcccaccagggcaaggtggagttccactacccccccgcccccagcaaggagaagagaaaggagggcagcagcgacgccgccgagagcaccaactacaacgagatccccaagaacggcaagggcagcaccagaaagggcgtggaccacagcaacagaaaccaggccaccctgaacgagaagcagagattccccagcaagggcaagagccagggcctgcccatccccagcagaggcctggacaacgagatcaagaacgagatggacagcttcaacggccccagccacgagaacatcatcacccacggcagaaagtaccactacgtgccccacagacagaacaacagcaccagaaacaagggcatgccccagggcaagggcagctggggcagacagccccacagcaacagaagattcagcagcagaagaagagacgacagcagcgagagcagcgacagcggcagcagcagcgagagcgacggcgactag

SEQ ID NO: 88130 - DNA, 1578 bp, synthetic construct; identical to SEQ ID NO: 88129
  misc_feature 1..1578: note = Description of Artificial Sequence: Synthetic coding sequence
  source 1..1578: mol_type = other DNA

SEQ ID NO: 88131 - DNA, 828 bp, synthetic construct
  misc_feature 1..828: note = Description of Artificial Sequence: Synthetic coding sequence
  source 1..828: mol_type = other DNA
atgagagtgttctgcgtgggcctgctgctgttcagcgtgacctgggccgcccccaccttccagccccagaccgagaagaccaagcagagctgcgtggaggagcagagacaggaggagaagaacaaggacaacatcggcttccaccacctgggcaagagaatcaaccaggagctgagcagcaaggagaacatcgtgcaggagagaaagaaggacctgagcctgagcgaggccagcgagaacaagggcagcagcaagagccagaactacttcaccaacagacagagactgaacaaggagtacagcatcagcaacaaggagaacacccacaacggcctgagaatgagcatctaccccaagagcaccggcaacaagggcttcgaggacggcgacgacgccatcagcaagctgcacgaccaggaggagtacggcgccgccctgatcagaaacaacatgcagcacatcatgggccccgtgaccgccatcaagctgctgggcgaggagaacaaggagaacacccccagaaacgtgctgaacatcatccccgccagcatgaactacgccaaggcccacagcaaggacaagaagaagccccagagagacagccaggcccagaagagccccgtgaagagcaagagcacccacagaatccagcacaacatcgactacctgaagcacctgagcaaggtgaagaagatccccagcgacttcgagggcagcggctacaccgacctgcaggagagaggcgacaacgacatcagccccttcagcggcaccgccaacctgctgagaaccttcctggtgaaggagaagctgctggtgctgacctag

SEQ ID NO: 88132 - DNA, 1239 bp, synthetic construct
  misc_feature 1..1239: note = Description of Artificial Sequence: Synthetic coding sequence
  source 1..1239: mol_type = other DNA
atgagcatctaccccaagagcaccggcaacaagggcttcgaggacggcgacgacgccatcagcaagctgcacgaccaggaggagtacggcgccgccctgatcagaaacaacatgcagcacatcatgggccccgtgaccgccatcaagctgctgggcgaggagaacaaggagaacacccccagaaacgtgctgaacatcatccccgccagcatgaactacgccaaggcccacagcaaggacaagaagaagccccagagagacagccaggcccagaagagccccgtgaagagcaagagcacccacagaatccagcacaacatcgactacctgaagcacctgagcaaggtgaagaagatccccagcgacttcgagggcagcggctacaccgacctgcaggagagaggcgacaacgacatcagccccttcagcggcgacggccagcccttcaaggacatccccggcaagggcgaggccaccggccccgacctggagggcaaggacatccagaccggcttcgccggccccagcgaggccgagagcacccacctggacaccaagaagcccggctacaacgagatccccgagagagaggagaacggcggcaacaccatcggcaccagagacgagaccgccaaggaggccgacgccgtggacgtgagcctggtggagggcagcaacgacatcatgggcagcaccaacttcaaggagctgcccggcagagagggcaacagagtggacgccggcagccagaacgcccaccagggcaaggtggagttccactacccccccgcccccagcaaggagaagagaaaggagggcagcagcgacgccgccgagagcaccaactacaacgagatccccaagaacggcaagggcagcaccagaaagggcgtggaccacagcaacagaaaccaggccaccctgaacgagaagcagagattccccagcaagggcaagagccagggcctgcccatccccagcagaggcctggacaacgagatcaagaacgagatggacagcttcaacggccccagccacgagaacatcatcacccacggcagaaagtaccactacgtgccccacagacagaacaacagcaccagaaacaagggcatgccccagggcaagggcagctggggcagacagccccacagcaacagaagattcagcagcagaagaagagacgacagcagcgagagcagcgacagcggcagcagcagcgagagcgacggcgactag

SEQ ID NO: 88133 - DNA, 1239 bp, synthetic construct; identical to SEQ ID NO: 88132
  misc_feature 1..1239: note = Description of Artificial Sequence: Synthetic coding sequence
  source 1..1239: mol_type = other DNA

SEQ ID NO: 88134 - DNA, 312 bp, synthetic construct
  misc_feature 1..312: note = Description of Artificial Sequence: Synthetic coding sequence
  source 1..312: mol_type = other DNA
atgaagagcctgatcctgctggccatcctggccgccctggccgtggtgaccctgtgctacgagagccacgagagcatggagagctacgagctgaaccccttcatcaacagaagaaacgccaacaccttcatcagcccccagcagagatggagagccaaggtgcaggagagaatcagagagagaagcaagcccgtgcacgagctgaacagagaggcctgcgacgactacagactgtgcgagagatacgccatggtgtacggctacaacgccgcctacaacagatacttcagaaagagaagaggcaccaagtag

SEQ ID NO: 88135 - DNA, 945 bp, synthetic construct
  misc_feature 1..945: note = Description of Artificial Sequence: Synthetic coding sequence
  source 1..945: mol_type = other DNA
atgggccccctgatcaacagatgcaagaagatcctgctgcccaccaccgtgccccccgccaccatgagaatctggctgctgggcggcctgctgcccttcctgctgctgctgagcggcctgcagagacccaccgagggcagcgaggtggccatcaagatcgacttcgacttcgcccccggcagcttcgacgaccagtaccagggctgcagcaagcaggtgatggagaagctgacccagggcgactacttcaccaaggacatcgaggcccagaagaactacttcagaatgtggcagaaggcccacctggcctggctgaaccagggcaaggtgctgccccagaacatgaccaccacccacgccgtggccatcctgttctacaccctgaacagcaacgtgcacagcgacttcaccagagccatggccagcgtggccagaaccccccagcagtacgagagaagcttccacttcaagtacctgcactactacctgaccagcgccatccagctgctgagaaaggacagcatcatggagaacggcaccctgtgctacgaggtgcactacagaaccaaggacgtgcacttcaacgcctacaccggcgccaccatcagattcggccagttcctgagcaccagcctgctgaaggaggaggcccaggagttcggcaaccagaccctgttcaccatcttcacctgcctgggcgcccccgtgcagtacttcagcctgaagaaggaggtgctgatccccccctacgagctgttcaaggtgatcaacatgagctaccaccccagaggcgactggctgcagctgagaagcaccggcaacctgagcacctacaactgccagctgctgaaggccagcagcaagaagtgcatccccgaccccatcgccatcgccagcctgagcttcctgaccagcgtgatcatcttcagcaagagcagagtgtag

SEQ ID NO: 88136 - DNA, 1749 bp, synthetic construct
  misc_feature 1..1749: note = Description of Artificial Sequence: Synthetic coding sequence
  source 1..1749: mol_type = other DNA
atgagcatcgagaccctgctggaggccgccagattcctggagtggcaggcccagcagcagcagagagccagagaggagcaggagagactgagactggagcaggagagagagcaggagcagaagaaggccaacagcctggccagactggcccacaccctgcccgtggaggagcccagaatggaggccccccccctgcccctgagcccccccgcccccccccccgccccccccccccccctggccacccccgcccccctgaccgtgatccccatccccgtggtgaccaacagcccccagcccctgcccccccccccccccctgcccgccgccgcccagcccctgcccctggcccccagacagcccgccctggtgggcgcccccggcctgagcatcaaggagcccgcccccctgcccagcagaccccaggtgcccacccccgcccccctgctgcccgacagcaaggccaccatcccccccaacggcagccccaagcccctgcagcccctgcccacccccgtgctgaccatcgccccccaccccggcgtgcagccccagctggccccccagcagccccccccccccaccctgggcaccctgaagctggcccccgccgaggaggtgaagagcagcgagcagaagaagagacccggcggcatcggcaccagagaggtgcacaacaagctggagaagaacagaagagcccacctgaaggagtgcttcgagaccctgaagagaaacatccccaacgtggacgacaagaagaccagcaacctgagcgtgctgagaaccgccctgagatacatccagagcctgaagagaaaggagaaggagtacgagcacgagatggagagactggccagagagaagatcgccacccagcagagactggccgagctgaagcacgagctgagccagtggatggacgtgctggagatcgacagagtgctgagacagaccggccagcccgaggacgaccaggccagcaccagcaccgccagcgagggcgaggacaacatcgacgaggacatggaggaggacagagccggcctgggcccccccaagctgagccacagaccccagcccgagctgctgaagagcaccctgcccccccccagcaccacccccgcccccctgcccccccacccccacccccacccccacagcgtggccctgccccccgcccacctgcccgtgcagcagcagcagccccagcagaagacccccctgcccgcccccccccccccccccgccgcccccgcccagaccctggtgcccgcccccgcccacctggtggccaccgccggcggcggcagcaccgtgatcgcccacaccgccaccacccacgccagcgtgatccagaccgtgaaccacgtgctgcagggccccggcggcaagcacatcgcccacatcgcccccagcgcccccagccccgccgtgcagctggcccccgccaccccccccatcggccacatcaccgtgcaccccgccaccctgaaccacgtggcccacctgggcagccagctgcccctgtacccccagcccgtggccgtgagccacatcgcccacaccctgagccaccagcaggtgaacggcaccgccggcctgggcccccccgccaccgtgatggccaagcccgccgtgggcgcccaggtggtgcaccacccccagctggtgggccagaccgtgctgaaccccgtgaccatggtgaccatgcccagcttccccgtgagcaccctgaagctggcctag

SEQ ID NO: 88137 - DNA, 1749 bp, synthetic construct; identical to SEQ ID NO: 88136
  misc_feature 1..1749: note = Description of Artificial Sequence: Synthetic coding sequence
  source 1..1749: mol_type = other DNA

SEQ ID NO: 88138 - DNA, 594 bp, synthetic construct
  misc_feature 1..594: note = Description of Artificial Sequence: Synthetic coding sequence
  source 1..594: mol_type = other DNA
atggagcccctggccagcaacatccaggtgctgctgcaggccgccgagttcctggagagaagagagagagaggccgagcacggctacgccagcctgtgcccccacagaagccccggccccatccacagaagaaagaagagacccccccaggcccccggcgcccaggacagcggcagatggagagcccagctgaagagatgcctggagagactgaagcagcagatgcccctgggcgccgactgcgccagatacaccaccctgagcctgctgagaagagccagaatgcacatccagaagctggaggaccaggagcagagagccagacagctgaaggagagactgagaagcaagcagcagagcctgcagagacagctggagcagctgagaggcctggccggcgccgccgagagagagagactgagagccgacagcctggacagcagcggcctgagcagcgagagaagcgacagcgaccaggaggagctggaggtggacgtggagagcctggtgttcggcggcgaggccgagctgctgagaggcttcgtggccggccaggagcacagctacagccacggcggcggcgcctggctgtag

SEQ ID NO: 88139 - DNA, 1167 bp, synthetic construct
  misc_feature 1..1167: note = Description of Artificial Sequence: Synthetic coding sequence
  source 1..1167: mol_type = other DNA
atggagcccctggccagcaacatccaggtgctgctgcaggccgccgagttcctggagagaagagagagagaggccgagcacggctacgccagcctgtgcccccacagaagccccggccccatccacagaagaaagaagagacccccccaggcccccggcgcccaggacagcggcagaagcgtgcacaacgagctggagaagagaagaagagcccagctgaagagatgcctggagagactgaagcagcagatgcccctgggcgccgactgcgccagatacaccaccctgagcctgctgagaagagccagaatgcacatccagaagctggaggaccaggagcagagagccagacagctgaaggagagactgagaagcaagcagcagagcctgcagagacagctggagcagctgagaggcctggccggcgccgccgagagagagagactgagagccgacagcctggacagcagcggcctgagcagcgagagaagcgacagcgaccagggcgagtgccccgaggccgagggcctgtgcggccccagaggcgagcccggcctgctgaccggccccctgcccgcccagagaagctggagatggatgtggagagcctggtgcctgggcgtgagacccagctgctgcggcgccagcagccccgccagaagcaccgccaccagaaccgccgccgcccccggctacgacgtgccccaccccggcagagccagcgccctgtacagctgccaggcccacctgcccggcagaagccccccccaggccttcagagccgccagaagccacctgctggagtggaccaagagaaccctggtgtgggagcaggtgctgcccaagcaccccgccgccggctgccaggccggccccctggagggcaagggccaggacagcagcggccccccctggacccccgccggccaggccgcctgggccagagcccaggccttcggcagcgccgcccccaagggcaccggcagcctgctgggcctgttccccagctggaccagaccccccgccttcgccagccacaagctgtacagcatcttcatcaagagcctgttccacaacttccccagcatcgtgctgcccaacgagaacggcggcacccccaaccacagacccaccggcagaggcaacaacatcagcagccaccactag

SEQ ID NO: 88140 - DNA, 582 bp, synthetic construct
  misc_feature 1..582: note = Description of Artificial Sequence: Synthetic coding sequence
  source 1..582: mol_type = other DNA
atggagcccctggccagcaacatccaggtgctgctgcaggccgccgagttcctggagagaagagagagagaggccgagcacggctacgccagcctgtgcccccacagaagccccggccccatccacagaagaaagaagagacccccccaggcccccggcgcccaggacagcggcagaagcgtgcacaacgagctggagaagagaagaagagcccagctgaagagatgcctggagagactgaagcagcagatgcccctgggcgccgactgcgccagatacaccaccctgagcctgctgagaagagccagaatgcacatccagaagctggaggaccaggagcagagagccagacagctgaaggagagactgagaagcaagcagcagagcctgcagagacagctggagcagctgagaggcctggccggcgccgccgagagagagagactgagagccgacagcctggacagcagcggcctgagcagcgagagaagcgacagcgaccaggtgctgcccaacgagaacggcggcacccccaaccacagacccaccggcagaggcaacaacatcagcagccaccactag

SEQ ID NO: 88141 - DNA, 621 bp, synthetic construct
  misc_feature 1..621: note = Description of Artificial Sequence: Synthetic coding sequence
  source 1..621: mol_type = other DNA
atggagcccctggccagcaacatccaggtgctgctgcaggccgccgagttcctggagagaagagagagagaggccgagcacggctacgccagcctgtgcccccacagaagccccggccccatccacagaagaaagaagagacccccccaggcccccggcgcccaggacagcggcagaagcgtgcacaacgagctggagaagagaagaagagcccagctgaagagatgcctggagagactgaagcagcagatgcccctgggcgccgactgcgccagatacaccaccctgagcctgctgagaagagccagaatgcacatccagaagctggaggaccaggagcagagagccagacagctgaaggagagactgagaagcaagcagcagagcctgcagagacagctggagcagctgagaggcctggccggcgccgccgagagagagagactgagagccgacagcctggacagcagcggcctgagcagcgagagaagcgacagcgaccaggaggagctggaggtggacgtggagagcctggtgttcggcggcgaggccgagctgctgagaggcttcgtggccggccaggagcacagctacagccacggcggcggcgcctggctgtag

SEQ ID NO: 88142 - DNA, 621 bp, synthetic construct; identical to SEQ ID NO: 88141
  misc_feature 1..621: note = Description of Artificial Sequence: Synthetic coding sequence
  source 1..621: mol_type = other DNA

SEQ ID NO: 88143 - DNA, 768 bp, synthetic construct
  misc_feature 1..768: note = Description of Artificial Sequence: Synthetic coding sequence
  source 1..768: mol_type = other DNA
atgatccaggccatccaggtgctgagattccacctgctggagctggagaaggtgcacgagctgtgcgacaacttctgccacagatacatcagctgcctgaagggcaagatgcccatcgacctggtgatcgacgagagagacggcagcagcaagagcgaccacgaggagctgagcggcagcagcaccaacctggccgaccacaaccccagcagctggagagaccacgacgacgccaccagcacccacagcgccggcacccccggccccagcagcggcggccacgccagccagagcggcgacaacagcagcgagcagggcgacggcctggacaacagcgtggccagccccggcaccggcgacgacgacgaccccgacaaggacaagaagagacagaagaagagaggcatcttccccaaggtggccaccaacatcatgagagcctggctgttccagcacctgacccacccctaccccagcgaggagcagaagaagcagctggcccaggacaccggcctgaccatcctgcaggtgaacaactggttcatcaacgccagaagaagaatcgtgcagcccatgatcgaccagagcaacagagccggcttcctgctggaccccagcgtgagccagggcgccgcctacagccccgagggccagcccatgggcagcttcgtgctggacggccagcagcacatgggcatcagacccgccggccccatgagcggcatgggcatgaacatgggcatggacggccagtggcactacatgtag

SEQ ID NO: 88144 - DNA, 9081 bp, synthetic construct
  misc_feature 1..9081: note = Description of Artificial Sequence: Synthetic coding sequence
  source 1..9081: mol_type = other DNA
atggaggagaagcagcagatcatcctggccaaccaggacggcggcaccgtggccggcgccgcccccaccttcttcgtgatcctgaagcagcccggcaacggcaagaccgaccagggcatcctggtgaccaaccaggacgcctgcgccctggccagcagcgtgagcagccccgtgaagagcaagggcaagatctgcctgcccgccgactgcaccgtgggcggcatcaccgtgaccctggacaacaacagcatgtggaacgagttctaccacagaagcaccgagatgatcctgaccaagcagggcagaagaatgttcccctactgcagatactggatcaccggcctggacagcaacctgaagtacatcctggtgatggacatcagccccgtggacaaccacagatacaagtggaacggcagatggtgggagcccagcggcaaggccgagccccacgtgctgggcagagtgttcatccaccccgagagccccagcaccggccactactggatgcaccagcccgtgagcttctacaagctgaagctgaccaacaacaccctggaccaggagggccacatcatcctgcacagcatgcacagatacctgcccagactgcacctggtgcccgccgagaaggccgtggaggtgatccagctgaacggccccggcgtgcacaccttcaccttcccccagaccgagttcttcgccgtgaccgcctaccagaacatccagatcacccagctgaagatcgactacaaccccttcgccaagggcttcagagacgacggcctgaacaacaagccccagagagacggcaagcagaagaacagcagcgaccaggagggcaacaacatcagcagcagcagcggccacagagtgagactgaccgagggccagggcagcgagatccagcccggcgacctggaccccctgagcagaggccacgagaccagcggcaagggcctggagaagaccagcctgaacatcaagagagacttcctgggcttcatggacaccgacagcgccctgagcgaggtgccccagctgaagcaggagatcagcgagtgcctgatcgccagcagcttcgaggacgacagcagagtggccagccccctggaccagaacggcagcttcaacgtggtgatcaaggaggagcccctggacgactacgactacgagctgggcgagtgccccgagggcgtgaccgtgaagcaggaggagaccgacgaggagaccgacgtgtacagcaacagcgacgacgaccccatcctggagaagcagctgaagagacacaacaaggtggacaaccccgaggccgaccacctgagcagcaagtggctgcccagcagccccagcggcgtggccaaggccaagatgttcaagctggacaccggcaagatgcccgtggtgtacctggagccctgcgccgtgaccagaagcaccgtgaagatcagcgagctgcccgacaacatgctgagcaccagcagaaaggacaagagcagcatgctggccgagctggagtacctgcccacctacatcgagaacagcaacgagaccgccttctgcctgggcaaggagagcgagaacggcctgagaaagcacagccccgacctgagagtggtgcagaagtaccccctgctgaaggagccccagtggaagtaccccgacatcagcgacagcatcagcaccgagagaatcctggacgacagcaaggacagcgtgggcgacagcctgagcggcaaggaggacctgggcagaaagagaaccaccatgctgaagatcgccaccgccgccaaggtggtgaacgccaaccagaacgccagccccaacgtgcccggcaagagaggcagacccagaaagctgaagctgtgcaaggccggcagaccccccaagaacaccggcaagagcctgatcagcaccaagaacacccccgtgagccccggcagcaccttccccgacgtgaagcccgacctggaggacgtggacggcgtgctgttcgtgagcttcgagagcaaggaggccctggacatccacgccgtggacggcaccaccgaggagagcagcagcctgcaggccagcaccaccaacgacagcggctacagagccagaatcagccagctggagaaggagctgatcgaggacctgaagaccctgagacacaagcaggtgatccaccccggcctgcaggaggtgggcctgaagctgaacagcgtggaccccaccatgagcatcgacctgaagtacctgggcgtgcagctgcccctggcccccgccaccagcttccccttctggaacctgaccggcaccaaccccgccagccccgacgccggcttccccttcgtgagcagaaccggcaagaccaacgacttcaccaagatcaagggctggagaggcaagttccacagcgccagcgccagcagaaacgagggcggcaacagcgagagcagcctgaagaacagaagcgccttctgcagcgacaagctggacgagtacctggagaacgagggcaagctgatggagaccagcatgggcttcagcagcaacgcccccaccagccccgtggtgtaccagctgcccaccaagagcaccagctacgtgagaaccctggacagcgtgctgaagaagcagagcaccatcagccccagcaccagctacagcctgaagccccacagcgtgccccccgtgagcagaaaggccaagagccagaacagacaggccaccttcagcggcagaaccaagagcagctacaagagcatcctgccctaccccgtgagccccaagcagaagtacagccacgtgatcctgggcgacaaggtgaccaagaacagcagcggcatcatcagcgagaaccaggccaacaacttcgtggtgcccaccctggacgagaacatcttccccaagcagatcagcctgagacaggcccagcagcagcagcagcagcagcagggcagcagaccccccggcctgagcaagagccaggtgaagctgatggacctggaggactgcgccctgtgggagggcaagcccagaacctacatcaccgaggagagagccgacgtgagcctgaccaccctgctgaccgcccaggccagcctgaagaccaagcccatccacaccatcatcagaaagagagcccccccctgcaacaacgacttctgcagactgggctgcgtgtgcagcagcctggccctggagaagagacagcccgcccactgcagaagacccgactgcatgttcggctgcacctgcctgaagagaaaggtggtgctggtgaagggcggcagcaagaccaagcacttccagagaaaggccgcccacagagaccccgtgttctacgacaccctgggcgaggaggccagagaggaggaggagggcatcagagaggaggaggagcagctgaaggagaagaagaagagaaagaagctggagtacaccatctgcgagaccgagcccgagcagcccgtgagacactaccccctgtgggtgaaggtggagggcgaggtggaccccgagcccgtgtacatccccacccccagcgtgatcgagcccatgaagcccctgctgctgccccagcccgaggtgctgagccccaccgtgaagggcaagctgctgaccggcatcaagagccccagaagctacacccccaagcccaaccccgtgatcagagaggaggacaaggaccccgtgtacctgtacttcgagagcatgatgacctgcgccagagtgagagtgtacgagagaaagaaggaggaccagagacagcccagcagcagcagcagccccagccccagcttccagcagcagaccagctgccacagcagccccgagaaccacaacaacgccaaggagcccgacagcgagcagcagcccctgaagcagctgacctgcgacctggaggacgacagcgacaagctgcaggagaagagctggaagagcagctgcaacgagggcgagagcagcagcaccagctacatgcaccagagaagccccggcggccccaccaagctgatcgagatcatcagcgactgcaactgggaggaggacagaaacaagatcctgagcatcctgagccagcacatcaacagcaacatgccccagagcctgaaggtgggcagcttcatcatcgagctggccagccagagaaagagcagaggcgagaagaacccccccgtgtacagcagcagagtgaagatcagcatgcccagctgccaggaccaggacgacatggccgagaagagcggcagcgagacccccgacggccccctgagccccggcaagatggaggacatcagccccgtgcagaccgacgccctggacagcgtgagagagagactgcacggcggcaagggcctgcccttctacgccggcctgagccccgccggcaagctggtggcctacaagagaaagcccagcagcagcaccagcggcctgatccaggtggccagcaacgccaaggtggccgccagcagaaagcccagaaccctgctgcccagcaccagcaacagcaagatggccagcagcagcggcaccgccaccaacagacccggcaagaacctgaaggccttcgtgcccgccaagagacccatcgccgccagacccagccccggcggcgtgttcacccagttcgtgatgagcaaggtgggcgccctgcagcagaagatccccggcgtgagcaccccccagaccctggccggcacccagaagttcagcatcagacccagccccgtgatggtggtgacccccgtggtgagcagcgagcccgtgcaggtgtgcagccccgtgaccgccgccgtgaccaccaccaccccccaggtgttcctggagaacaccaccgccgtgacccccatgaccgccatcagcgacgtggagaccaaggagaccacctacagcagcggcgccaccaccaccggcgtggtggaggtgagcgagaccaacaccagcaccagcgtgaccagcacccagagcaccgccaccgtgaacctgaccaagaccaccggcatcaccacccccgtggccagcgtggccttccccaagagcctggtggccagccccagcaccatcaccctgcccgtggccagcaccgccagcaccagcctggtggtggtgaccgccgccgccagcagcagcatggtgaccacccccaccagcagcctgggcagcgtgcccatcatcctgagcggcatcaacggcagcccccccgtgagccagagacccgagaacgccgcccagatccccgtggccaccccccaggtgagccccaacaccgtgaagagagccggccccagactgctgcaccccaacggccagatcgtgcagctgctgcccctgcaccagctgagaggcagcaacacccagcccaacctgcagcccgtgatgttcagaaaccccggcagcgtgatgggcatcagactgcccgcccccagcaagcccagcgagaccccccccagcagcaccagcagcagcgccttcagcgtgatgaaccccgtgatccaggccgtgggcagcagcagcgccgtgaacgtgatcacccaggcccccagcctgctgagcagcggcgccagcttcgtgagccaggccggcaccctgaccctgagaatcagcccccccgagccccagagcttcgccagcaagaccggcagcgagaccaagatcacctacagcagcggcggccagcccgtgggcaccgccagcctgatccccctgcagagcggcagcttcgccctgctgcagctgcccggccagaagcccgtgcccagcagcatcctgcagcacgtggccagcctgcagatgaagagagagagccagaaccccgaccagaaggacgagaccaacagcatcaagagagagcaggagaccaagaaggtgctgcagagcgagggcgaggccgtggaccccgaggccaacgtgatcaagcagaacagcggcgccgccaccagcgaggagaccctgaacgacagcctggaggacagaggcgaccacctggacgaggagtgcctgcccgaggagggctgcgccaccgtgaagcccagcgagcacagctgcatcaccggcagccacaccgaccaggactacaaggacgtgaacgaggagtacggcgccagaaacagaaagagcagcaaggagaaggtggccgtgctggaggtgagaaccatcagcgagaaggccagcaacaagaccgtgcagaacctgagcaaggtgcagcaccagaagctgggcgacgtgaaggtggagcagcagaagggcttcgacaaccccgaggagaacagcagcgagttccccgtgaccttcaaggaggagagcaagttcgagctgagcggcagcaaggtgatggagcagcagagcaacctgcagcccgaggccaaggagaaggagtgcggcgacagcctggagaaggacagagagagatggagaaagcacctgaagggccccctgaccagaaagtgcgtgggcgccagccaggagtgcaagaaggaggccgacgagcagctgatcaaggagaccaagacctgccaggagaacagcgacgtgttccagcaggagcagggcatcagcgacctgctgggcaagagcggcatcaccgaggacgccagagtgctgaagaccgagtgcgacagctggagcagaatcagcaaccccagcgccttcagcatcgtgcccagaagagccgccaagagcagcagaggcaacggccacttccagggccacctgctgctgcccggcgagcagatccagcccaagcaggagaagaagggcggcagaagcagcgccgacttcaccgtgctggacctggaggaggacgacgaggacgacaacgagaagaccgacgacagcatcgacgagatcgtggacgtggtgagcgactaccagagcgaggaggtggacgacgtggagaagaacaactgcgtggagtacatcgaggacgacgaggagcacgtggacatcgagaccgtggaggagctgagcgaggagatcaacgtggcccacctgaagaccaccgccgcccacacccagagcttcaagcagcccagctgcacccacatcagcgccgacgagaaggccgccgagagaagcagaaaggccccccccatccccctgaagctgaagcccgactactggagcgacaagctgcagaaggaggccgaggccttcgcctactacagaagaacccacaccgccaacgagagaagaagaagaggcgagatgagagacctgttcgagaagctgaagatcaccctgggcctgctgcacagcagcaaggtgagcaagagcctgatcctgaccagagccttcagcgagatccagggcctgaccgaccaggccgacaagctgatcggccagaagaacctgctgaccagaaagagaaacatcctgatcagaaaggtgagcagcctgagcggcaagaccgaggaggtggtgctgaagaagctggagtacatctacgccaagcagcaggccctggaggcccagaagagaaagaagaagatgggcagcgacgagttcgacatcagccccagaatcagcaagcagcaggagggcagcagcgccagcagcgtggacctgggccagatgttcatcaacaacagaagaggcaagcccctgatcctgagcagaaagaaggaccaggccaccgagaacaccagccccctgaacaccccccacaccagcgccaacctggtgatgaccccccagggccagctgctgaccctgaagggccccctgttcagcggccccgtggtggccgtgagccccgacctgctggagagcgacctgaagccccaggtggccggcagcgccgtggccctgcccgagaacgacgacctgttcatgatgcccagaatcgtgaacgtgaccagcctggccaccgagggcggcctggtggacatgggcggcagcaagtacccccacgaggtgcccgacagcaagcccagcgaccacctgaaggacaccgtgagaaacgaggacaacagcctggaggacaagggcagaatcagcagcagaggcaacagagacggcagagtgaccctgggccccacccaggtgttcctggccaacaaggacagcggctacccccagatcgtggacgtgagcaacatgcagaaggcccaggagttcctgcccaagaagatcagcggcgacatgagaggcatccagtacaagtggaaggagagcgagagcagaggcgagagagtgaagagcaaggacagcagcttccacaagctgaagatgaaggacctgaaggacagcagcatcgagatggagctgagaaaggtgaccagcgccatcgaggaggccgccctggacagcagcgagctgctgaccaacatggaggacgaggacgacaccgacgagaccctgaccagcctgctgaacgagatcgccttcctgaaccagcagctgaacgacgacagcgtgggcctggccgagctgcccagcagcatggacaccgagttccccggcgacgccagaagagccttcatcagcaaggtgccccccggcagcagagccaccttccaggtggagcacctgggcaccggcctgaaggagctgcccgacgtgcagggcgagagcgacagcatcagccccctgctgctgcacctggaggacgacgacttcagcgagaacgagaagcagctggccgagcccgccagcgagcccgacgtgctgaagatcgtgatcgacagcgagatcaaggacagcctgctgagcaacaagaaggccatcgacggcggcaagaacaccagcggcctgcccgccgagcccgagagcgtgagcagcccccccaccctgcacatgaagaccggcctggagaacagcaacagcaccgacaccctgtggagacccatgcccaagctggcccccctgggcctgaaggtggccaaccccagcagcgacgccgacggccagagcctgaaggtgatgccctgcctggcccccatcgccgccaaggtgggcagcgtgggccacaagatgaacctgaccggcaacgaccaggagggcagagagagcaaggtgatgcccaccctggcccccgtggtggccaagctgggcaacagcggcgccagccccagcagcgccggcaagtag

SEQ ID NO: 88145 - DNA, 8571 bp, synthetic construct
  misc_feature 1..8571: note = Description of Artificial Sequence: Synthetic coding sequence
  source 1..8571: mol_type = other DNA
atggaggagaagcagcagatcatcctggccaaccaggacggcggcaccgtggccggcgccgcccccaccttcttcgtgatcctgaagcagcccggcaacggcaagaccgaccagggcatcctggtgaccaaccaggacgcctgcgccctggccagcagcgtgagcagccccgtgaagagcaagggcaagatctgcctgcccgccgactgcaccgtgggcggcatcaccgtgaccctggacaacaacagcatgtggaacgagttctaccacagaagcaccgagatgatcctgaccaagcagggcagaagaatgttcccctactgcagatactggatcaccggcctggacagcaacctgaagtacatcctggtgatggacatcagccccgtggacaaccacagatacaagtggaacggcagatggtgggagcccagcggcaaggccgagccccacgtgctgggcagagtgttcatccaccccgagagccccagcaccggccactactggatgcaccagcccgtgagcttctacaagctgaagctgaccaacaacaccctggaccaggagggccacatcatcctgcacagcatgcacagatacctgcccagactgcacctggtgcccgccgagaaggccgtggaggtgatccagctgaacggccccggcgtgcacaccttcaccttcccccagaccgagttcttcgccgtgaccgcctaccagaacatccagatcacccagctgaagatcgactacaaccccttcgccaagggcttcagagacgacggcctgaacaacaagccccagagagacggcaagcagaagaacagcagcgaccaggagggcaacaacatcagcagcagcagcggccacagagtgagactgaccgagggccagggcagcgagatccagcccggcgacctggaccccctgagcagaggccacgagaccagcggcaagggcctggagaagaccagcctgaacatcaagagagacttcctgggcttcatggacaccgacagcgccctgagcgaggtgccccagctgaagcaggagatcagcgagtgcctgatcgccagcagcttcgaggacgacagcagagtggccagccccctggaccagaacggcagcttcaacgtggtgatcaaggaggagcccctggacgactacgactacgagctgggcgagtgccccgagggcgtgaccgtgaagcaggaggagaccgacgaggagaccgacgtgtacagcaacagcgacgacgaccccatcctggagaagcagctgaagagacacaacaaggtggacaaccccgaggccgaccacctgagcagcaagtggctgcccagcagccccagcggcgtggccaaggccaagatgttcaagctggacaccggcaagatgcccgtggtgtacctggagccctgcgccgtgaccagaagcaccgtgaagatcagcgagctgcccgacaacatgctgagcaccagcagaaaggacaagagcagcatgctggccgagctggagtacctgcccacctacatcgagaacagcaacgagaccgccttctgcctgggcaaggagagcgagaacggcctgagaaagcacagccccgacctgagagtggtgcagaagtaccccctgctgaaggagccccagtggaagtaccccgacatcagcgacagcatcagcaccgagagaatcctggacgacagcaaggacagcgtgggcgacagcctgagcggcaaggaggacctgggcagaaagagaaccaccatgctgaagatcgccaccgccgccaaggtggtgaacgccaaccagaacgccagccccaacgtgcccggcaagagaggcagacccagaaagctgaagctgtgcaaggccggcagaccccccaagaacaccggcaagagcctgatcagcaccaagaacacccccgtgagccccggcagcaccttccccgacgtgaagcccgacctggaggacgtggacggcgtgctgttcgtgagcttcgagagcaaggaggccctggacatccacgccgtggacggcaccaccgaggagagcagcagcctgcaggccagcaccaccaacgacagcggctacagagccagaatcagccagctggagaaggagctgatcgaggacctgaagaccctgagacacaagcaggtgatccaccccggcctgcaggaggtgggcctgaagctgaacagcgtggaccccaccatgagcatcgacctgaagtacctgggcgtgcagctgcccctggcccccgccaccagcttccccttctggaacctgaccggcaccaaccccgccagccccgacgccggcttccccttcgtgagcagaaccggcaagaccaacgacttcaccaagatcaagggctggagaggcaagttccacagcgccagcgccagcagaaacgagggcggcaacagcgagagcagcctgaagaacagaagcgccttctgcagcgacaagctggacgagtacctggagaacgagggcaagctgatggagaccagcatgggcttcagcagcaacgcccccaccagccccgtggtgtaccagctgcccaccaagagcaccagctacgtgagaaccctggacagcgtgctgaagaagcagagcaccatcagccccagcaccagctacagcctgaagccccacagcgtgccccccgtgagcagaaaggccaagagccagaacagacaggccaccttcagcggcagaaccaagagcagctacaagagcatcctgccctaccccgtgagccccaagcagaagtacagccacgtgatcctgggcgacaaggtgaccaagaacagcagcggcatcatcagcgagaaccaggccaacaacttcgtggtgcccaccctggacgagaacatcttccccaagcagatcagcctgagacaggcccagcagcagcagcagcagcagcagggcagcagaccccccggcctgagcaagagccaggtgaagctgatggacctggaggactgcgccctgtgggagggcaagcccagaacctacatcaccgaggagagagccgacgtgagcctgaccaccctgctgaccgcccaggccagcctgaagaccaagcccatccacaccatcatcagaaagagagcccccccctgcaacaacgacttctgcagactgggctgcgtgtgcagcagcctggccctggagaagagacagcccgcccactgcagaagacccgactgcatgttcggctgcacctgcctgaagagaaaggtggtgctggtgaagggcggcagcaagaccaagcacttccagagaaaggccgcccacagagaccccgtgttctacgacaccctgggcgaggaggccagagaggaggaggagggcatcagagaggaggaggagcagctgaaggagaagaagaagagaaagaagctggagtacaccatctgcgagaccgagcccgagcagcccgtgagacactaccccctgtgggtgaaggtggagggcgaggtggaccccgagcccgtgtacatccccacccccagcgtgatcgagcccatgaagcccctgctgctgccccagcccgaggtgctgagccccaccgtgaagggcaagctgctgaccggcatcaagagccccagaagctacacccccaagcccaaccccgtgatcagagaggaggacaaggaccccgtgtacctgtacttcgagagcatgatgacctgcgccagagtgagagtgtacgagagaaagaaggaggaccagagacagcccagcagcagcagcagccccagccccagcttccagcagcagaccagctgccacagcagccccgagaaccacaacaacgccaaggagcccgacagcgagcagcagcccctgaagcagctgacctgcgacctggaggacgacagcgacaagctgcaggagaagagctggaagagcagctgcaacgagggcgagagcagcagcaccagctacatgcaccagagaagccccggcggccccaccaagctgatcgagatcatcagcgactgcaactgggaggaggacagaaacaagatcctgagcatcctgagccagcacatcaacagcaacatgccccagagcctgaaggtgggcagcttcatcatcgagctggccagccagagaaagagcagaggcgagaagaacccccccgtgtacagcagcagagtgaagatcagcatgcccagctgccaggaccaggacgacatggccgagaagagcggcagcgagacccccgacggccccctgagccccggcaagatggaggacatcagccccgtgcagaccgacgccctggacagcgtgagagagagactgcacggcggcaagggcctgcccttctacgccggcctgagccccgccggcaagctggtggcctacaagagaaagcccagcagcagcaccagcggcctgatccaggtggccagcaacgccaaggtggccgccagcagaaagcccagaaccctgctgcccagcaccagcaacagcaagatggccagcagcagcggcaccgccaccaacagacccggcaagaacctgaaggccttcgtgcccgccaagagacccatcgagaacgccgcccagatccccgtggccaccccccaggtgagccccaacaccgtgaagagagccggccccagactgctgctgatccccgtgcagcagggcagccccaccctgagacccgtgagcaacacccagctgcagggccacagaatggtgctgcagcccgtgagaagccccagcggcatgaacctgttcagacaccccaacggccagatcgtgcagctgctgcccctgcaccagctgagaggcagcaacacccagcccaacctgcagcccgtgatgttcagaaaccccggcagcgtgatgggcatcagactgcccgcccccagcaagcccagcgagaccccccccagcagcaccagcagcagcgccttcagcgtgatgaaccccgtgatccaggccgtgggcagcagcagcgccgtgaacgtgatcacccaggcccccagcctgctgagcagcggcgccagcttcgtgagccaggccggcaccctgaccctgagaatcagcccccccgagccccagagcttcgccagcaagaccggcagcgagaccaagatcacctacagcagcggcggccagcccgtgggcaccgccagcctgatccccctgcagagcggcagcttcgccctgctgcagctgcccggccagaagcccgtgcccagcagcatcctgcagcacgtggccagcctgcagatgaagagagagagccagaaccccgaccagaaggacgagaccaacagcatcaagagagagcaggagaccaagaaggtgctgcagagcgagggcgaggccgtggaccccgaggccaacgtgatcaagcagaacagcggcgccgccaccagcgaggagaccctgaacgacagcctggaggacagaggcgaccacctggacgaggagtgcctgcccgaggagggctgcgccaccgtgaagcccagcgagcacagctgcatcaccggcagccacaccgaccaggactacaaggacgtgaacgaggagtacggcgccagaaacagaaagagcagcaaggagaaggtggccgtgctggaggtgagaaccatcagcgagaaggccagcaacaagaccgtgcagaacctgagcaaggtgcagcaccagaagctgggcgacgtgaaggtggagcagcagaagggcttcgacaaccccgaggagaacagcagcgagttccccgtgaccttcaaggaggagagcaagttcgagctgagcggcagcaaggtgatggagcagcagagcaacctgcagcccgaggccaaggagaaggagtgcggcgacagcctggagaaggacagagagagatggagaaagcacctgaagggccccctgaccagaaagtgcgtgggcgccagccaggagtgcaagaaggaggccgacgagcagctgatcaaggagaccaagacctgccaggagaacagcgacgtgttccagcaggagcagggcatcagcgacctgctgggcaagagcggcatcaccgaggacgccagagtgctgaagaccgagtgcgacagctggagcagaatcagcaaccccagcgccttcagcatcgtgcccagaagagccgccaagagcagcagaggcaacggccacttccagggccacctgctgctgcccggcgagcagatccagcccaagcaggagaagaagggcggcagaagcagcgccgacttcaccgtgctggacctggaggaggacgacgaggacgacaacgagaagaccgacgacagcatcgacgagatcgtggacgtggtgagcgactaccagagcgaggaggtggacgacgtggagaagaacaactgcgtggagtacatcgaggacgacgaggagcacgtggacatcgagaccgtggaggagctgagcgaggagatcaacgtggcccacctgaagaccaccgccgcccacacccagagcttcaagcagcccagctgcacccacatcagcgccgacgagaaggccgccgagagaagcagaaaggccccccccatccccctgaagctgaagcccgactactggagcgacaagctgcagaaggaggccgaggccttcgcctactacagaagaacccacaccgccaacgagagaagaagaagaggcgagatgagagacctgttcgagaagctgaagatcaccctgggcctgctgcacagcagcaaggtgagcaagagcctgatcctgaccagagccttcagcgagatccagggcctgaccgaccaggccgacaagctgatcggccagaagaacctgctgaccagaaagagaaacatcctgatcagaaaggtgagcagcctgagcggcaagaccgaggaggtggtgctgaagaagctggagtacatctacgccaagcagcaggccctggaggcccagaagagaaagaagaagatgggcagcgacgagttcgacatcagccccagaatcagcaagcagcaggagggcagcagcgccagcagcgtggacctgggccagatgttcatcaacaacagaagaggcaagcccctgatcctgagcagaaagaaggaccaggccaccgagaacaccagccccctgaacaccccccacaccagcgccaacctggtgatgaccccccagggccagctgctgaccctgaagggccccctgttcagcggccccgtggtggccgtgagccccgacctgctggagagcgacctgaagccccaggtggccggcagcgccgtggccctgcccgagaacgacgacctgttcatgatgcccagaatcgtgaacgtgaccagcctggccaccgagggcggcctggtggacatgggcggcagcaagtacccccacgaggtgcccgacagcaagcccagcgaccacctgaaggacaccgtgagaaacgaggacaacagcctggaggacaagggcagaatcagcagcagaggcaacagagacggcagagtgaccctgggccccacccaggtgttcctggccaacaaggacagcggctacccccagatcgtggacgtgagcaacatgcagaaggcccaggagttcctgcccaagaagatcagcggcgacatgagaggcatccagtacaagtggaaggagagcgagagcagaggcgagagagtgaagagcaaggacagcagcttccacaagctgaagatgaaggacctgaaggacagcagcatcgagatggagctgagaaaggtgaccagcgccatcgaggaggccgccctggacagcagcgagctgctgaccaacatggaggacgaggacgacaccgacgagaccctgaccagcctgctgaacgagatcgccttcctgaaccagcagctgaacgacgacagcgtgggcctggccgagctgcccagcagcatggacaccgagttccccggcgacgccagaagagccttcatcagcaaggtgccccccggcagcagagccaccttccaggtggagcacctgggcaccggcctgaaggagctgcccgacgtgcagggcgagagcgacagcatcagccccctgctgctgcacctggaggacgacgacttcagcgagaacgagaagcagctggccgagcccgccagcgagcccgacgtgctgaagatcgtgatcgacagcgagatcaaggacagcctgctgagcaacaagaaggccatcgacggcggcaagaacaccagcggcctgcccgccgagcccgagagcgtgagcagcccccccaccctgcacatgaagaccggcctggagaacagcaacagcaccgacaccctgtggagacccatgcccaagctggcccccctgggcctgaaggtggccaaccccagcagcgacgccgacggccagagcctgaaggtgatgccctgcctggcccccatcgccgccaaggtgggcagcgtgggccacaagatgaacctgaccggcaacgaccaggagggcagagagagcaaggtgatgcccaccctggcccccgtggtggccaagctgggcaacagcggcgccagccccagcagcgccggcaagtag

SEQ ID NO: 88146 - DNA, 687 bp, synthetic construct
  misc_feature 1..687: note = Description of Artificial Sequence: Synthetic coding sequence
  source 1..687: mol_type = other DNA
atggagagagtgaagatgatcaacgtgcagagactgctggaggccgccgagttcctggagagaagagagagagagtgcgagcacggctacgccagcagcttccccagcatgcccagccccagactgcagcacagcaagccccccagaagactgagcagagcccagaagcacagcagcggcagcagcaacaccagcaccgccaacagaagcacccacaacgagctggagaagaacagaagagcccacctgagactgtgcctggagagactgaaggtgctgatccccctgggccccgactgcaccagacacaccaccctgggcctgctgaacaaggccaaggcccacatcaagaagctggaggaggccgagagaaagagccagcaccagctggagaacctggagagagagcagagattcctgaagtggagactggagcagctgcagggcccccaggagatggagagaatcagaatggacagcatcggcagcaccatcagcagcgacagaagcgacagcgagagagaggagatcgaggtggacgtggagagcaccgagttcagccacggcgaggtggacaacatcagcaccaccagcatcagcgacatcgacgaccacagcagcctgcccagcatcggcagcgacgagggctacagcagcgccagcgtgaagctgagcttcaccagctag

SEQ ID NO: 88147 - DNA, 888 bp, synthetic construct
  misc_feature 1..888: note = Description of Artificial Sequence: Synthetic coding sequence
  source 1..888: mol_type = other DNA
atgggcaagagaggcagacccagaaaggaggccagatgcgagggcgccggcctggcccccgccgccccccccgccgtgccccccgccgtggccgccccccagccccccgccctgcccgaggaccccgccggcgccaagcccagatgccccttcagcgacatcttcaacaccagcgagaacagcatggagaagcacatcaacaccttcctgcagaacgtgcagatcctgctggaggccgccagctacctggagcagatcgagaaggagaacaagaagtgcgagcacggctacgccagcagcttccccagcatgcccagccccagactgcagcacagcaagccccccagaagactgagcagagcccagaagcacagcagcggcagcagcaacaccagcaccgccaacagaagcacccacaacgagctggagaagaacagaagagcccacctgagactgtgcctggagagactgaaggtgctgatccccctgggccccgactgcaccagacacaccaccctgggcctgctgaacaaggccaaggcccacatcaagaagctggaggaggccgagagaaagagccagcaccagctggagaacctggagagagagcagagattcctgaagtggagactggagcagctgcagggcccccaggagatggagagaatcagaatggacagcatcggcagcaccatcagcagcgacagaagcgacagcgagagagaggagatcgaggtggacgtggagagcaccgagttcagccacggcgaggtggacaacatcagcaccaccagcatcagcgacatcgacgaccacagcagcctgcccagcatcggcagcgacgagggctacagcagcgccagcgtgaagctgagcttcaccagctag

SEQ ID NO: 88148 - DNA, 549 bp, synthetic construct
  misc_feature 1..549: note = Description of Artificial Sequence: Synthetic coding sequence
  source 1..549: mol_type = other DNA
atgcccagccccagactgcagcacagcaagccccccagaagactgagcagagcccagaagcacagcagcggcagcagcaacaccagcaccgccaacagaagagcccacctgagactgtgcctggagagactgaaggtgctgatccccctgggccccgactgcaccagacacaccaccctgggcctgctgaacaaggccaaggcccacatcaagaagctggaggaggccgagagaaagagccagcaccagctggagaacctggagagagagcagagattcctgaagtggagactggagcagctgcagggcccccaggagatggagagaatcagaatggacagcatcggcagcaccatcagcagcgacagaagcgacagcgagagagaggagatcgaggtggacgtggagagcaccgagttcagccacggcgaggtggacaacatcagcaccaccagcatcagcgacatcgacgaccacagcagcctgcccagcatcggcagcgacgagggctacagcagcgccagcgtgaagctgagcttcaccagctag

SEQ ID NO: 88149 - DNA, 579 bp, synthetic construct
  misc_feature 1..579: note = Description of Artificial Sequence: Synthetic coding sequence
  source 1..579: mol_type = other DNA
atgcccagccccagactgcagcacagcaagccccccagaagactgagcagagcccagaagcacagcagcggcagcagcaacaccagcaccgccaacagaagcacccacaacgagctggagaagaacagaagagcccacctgagactgtgcctggagagactgaaggtgctgatccccctgggccccgactgcaccagacacaccaccctgggcctgctgaacaaggccaaggcccacatcaagaagctggaggaggccgagagaaagagccagcaccagctggagaacctggagagagagcagagattcctgaagtggagactggagcagctgcagggcccccaggagatggagagaatcagaatggacagcatcggcagcaccatcagcagcgacagaagcgacagcgagagagaggagatcgaggtggacgtggagagcaccgagttcagccacggcgaggtggacaacatcagcaccaccagcatcagcgacatcgacgaccacagcagcctgcccagcatcggcagcgacgagggctacagcagcgccagcgtgaagctgagcttcaccagctag

SEQ ID NO: 88150 - DNA, 579 bp, synthetic construct; identical to SEQ ID NO: 88149
  misc_feature 1..579: note = Description of Artificial Sequence: Synthetic coding sequence
  source 1..579: mol_type = other DNA

SEQ ID NO: 88151 - DNA, 579 bp, synthetic construct; identical to SEQ ID NO: 88149
  misc_feature 1..579: note = Description of Artificial Sequence: Synthetic coding sequence
  source 1..579: mol_type = other DNA

SEQ ID NO: 88152 - DNA, 657 bp, synthetic construct
  misc_feature 1..657: note = Description of Artificial Sequence: Synthetic coding sequence
  source 1..657: mol_type = other DNA
atggagagagtgaagatgatcaacgtgcagagactgctggaggccgccgagttcctggagagaagagagagagagtgcgagcacggctacgccagcagcttccccagcatgcccagccccagactgcagcacagcaagccccccagaagactgagcagagcccagaagcacagcagcggcagcagcaacaccagcaccgccaacagaagagcccacctgagactgtgcctggagagactgaaggtgctgatccccctgggccccgactgcaccagacacaccaccctgggcctgctgaacaaggccaaggcccacatcaagaagctggaggaggccgagagaaagagccagcaccagctggagaacctggagagagagcagagattcctgaagtggagactggagcagctgcagggcccccaggagatggagagaatcagaatggacagcatcggcagcaccatcagcagcgacagaagcgacagcgagagagaggagatcgaggtggacgtggagagcaccgagttcagccacggcgaggtggacaacatcagcaccaccagcatcagcgacatcgacgaccacagcagcctgcccagcatcggcagcgacgagggctacagcagcgccagcgtgaagctgagcttcaccagctag

SEQ ID NO: 88153 - DNA, 657 bp, synthetic construct; identical to SEQ ID NO: 88152
  misc_feature 1..657: note = Description of Artificial Sequence: Synthetic coding sequence
  source 1..657: mol_type = other DNA

SEQ ID NO: 88154 - DNA, 357 bp, synthetic construct
  misc_feature 1..357: note = Description of Artificial Sequence: Synthetic coding sequence
  source 1..357: mol_type = other DNA
atgcccagccccagactgcagcacagcaagccccccagaagactgagcagagcccagaagcacagcagcggcagcagcaacaccagcaccgccaacagaagcacccacaacgagctggagaagaacagaagagcccacctgagactgtgcctggagagactgaaggtgctgatccccctgggccccgactgcaccagacacaccaccctgggcctgctgaacaaggccaaggcccacatcaagaagctggaggaggccgagagaaagagccagcaccagctggagaacctggagagagagcagagattcctgaagtggagactggagcagctgcagggcccccaggagatggagtag

SEQ ID NO: 88155 - DNA, 681 bp, synthetic construct
  misc_feature 1..681: note = Description of Artificial Sequence: Synthetic coding sequence
  source 1..681: mol_type = other DNA
atgggcaagagaggcagacccagaaaggaggccagatgcgagggcgccggcctggcccccgccgccccccccgccgtgccccccgccgtggccgccccccagccccccgccctgcccgaggaccccgccggcgccaagcccagatgccccttcagcgacatcttcaacaccagcgagaacagcatggagaagcacatcaacaccttcctgcagaacgtgcagatcctgctggaggccgccagctacctggagcagatcgagaaggagaacaagaagtgcgagcacggctacgccagcagcttccccagcatgcccagccccagactgcagcacagcaagccccccagaagactgagcagagcccagaagcacagcagcggcagcagcaacaccagcaccgccaacagaagagcccacctgagactgtgcctggagagactgaaggtgctgatccccctgggccccgactgcaccagacacaccaccctgggcctgctgaacaaggccaaggcccacatcaagaagctggaggaggccgagagaaagagccagcaccagctggagaacctggagagagagcagagattcctgaagtggagactggagcagctgcagggcccccaggagatggagagaatcagaatggacagcatcggcagcaccatcagcagcgacagatag

SEQ ID NO: 88156 - DNA, 897 bp, synthetic construct
  misc_feature 1..897: note = Description of Artificial Sequence: Synthetic coding sequence
  source 1..897: mol_type = other DNA
atgaccgagcccggcgccagccccgaggacccctgggtgaaggccagccccgtgggcgcccacgccggcgagggcagagccggcagagccagagccagaagaggcgccggcagaagaggcgccagcctgctgagccccaagagccccaccctgagcgtgcccagaggctgcagagaggacagcagccaccccgcctgcgccaaggtggagtacgcctacagcgacaacagcctggaccccggcctgttcgtggagagcaccagaaagggcagcgtggtgagcagagccaacagcatcggcagcaccagcgccagcagcgtgcccaacaccgacgacgaggacagcgactaccaccaggaggcctacaaggagagctacaaggacagaagaagaagagcccacacccaggccgagcagaagagaagagacgccatcaagagaggctacgacgacctgcagaccatcgtgcccacctgccagcagcaggacttcagcatcggcagccagaagctgagcaaggccatcgtgctgcagaagaccatcgactacatccagttcctgcacaaggagaagaagaagcaggaggaggaggtgagcaccctgagaaaggacgtgaccgccctgaagatcatgaaggtgaactacgagcagatcgtgaaggcccaccaggacaacccccacgagggcgaggaccaggtgagcgaccaggtgaagttcaacgtgttccagggcatcatggacagcctgttccagagcttcaacgccagcatcagcgtggccagcttccaggagctgagcgcctgcgtgttcagctggatcgaggagcactgcaagccccagaccctgagagagatcgtgatcggcgtgctgcaccagctgaagaaccagctgtactag

SEQ ID NO: 88157 - DNA, 645 bp, synthetic construct
  misc_feature 1..645: note = Description of Artificial Sequence: Synthetic coding sequence
  source 1..645: mol_type = other DNA
atgaccgagcccggcgccagccccgaggacccctgggtgaaggtggagtacgcctacagcgacaacagcctggaccccgacgacgaggacagcgactaccaccaggaggcctacaaggagagctacaaggacagaagaagaagagcccacacccaggccgagcagaagagaagagacgccatcaagagaggctacgacgacctgcagaccatcgtgcccacctgccagcagcaggacttcagcatcggcagccagaagctgagcaaggccatcgtgctgcagaagaccatcgactacatccagttcctgcacaaggagaagaagaagcaggaggaggaggtgagcaccctgagaaaggacgtgaccgccctgaagatcatgaaggtgaactacgagcagatcgtgaaggcccaccaggacaacccccacgagggcgaggaccaggtgagcgaccaggtgaagttcaacgtgttccagggcatcatggacagcctgttccagagcttcaacgccagcatcagcgtggccagcttccaggagctgagcgcctgcgtgttcagctggatcgaggagcactgcaagccccagaccctgagagagatcgtgatcggcgtgctgcaccagctgaagaaccagctgtactag

SEQ ID NO: 88158 - DNA, 735 bp, synthetic construct
  misc_feature 1..735: note = Description of Artificial Sequence: Synthetic coding sequence
  source 1..735: mol_type = other DNA
atgaccgagcccggcgccagccccgaggacccctgggtgaaggtggagtacgcctacagcgacaacagcctggaccccggcctgttcgtggagagcaccagaaagggcagcgtggtgagcagagccaacagcatcggcagcaccagcgccagcagcgtgcccaacaccgacgacgaggacagcgactaccaccaggaggcctacaaggagagctacaaggacagaagaagaagagcccacacccaggccgagcagaagagaagagacgccatcaagagaggctacgacgacctgcagaccatcgtgcccacctgccagcagcaggacttcagcatcggcagccagaagctgagcaaggccatcgtgctgcagaagaccatcgactacatccagttcctgcacaaggagaagaagaagcaggaggaggaggtgagcaccctgagaaaggacgtgaccgccctgaagatcatgaaggtgaactacgagcagatcgtgaaggcccaccaggacaacccccacgagggcgaggaccaggtgagcgaccaggtgaagttcaacgtgttccagggcatcatggacagcctgttccagagcttcaacgccagcatcagcgtggccagcttccaggagctgagcgcctgcgtgttcagctggatcgaggagcactgcaagccccagaccctgagagagatcgtgatcggcgtgctgcaccagctgaagaaccagctgtactag

SEQ ID NO: 88159 - DNA, 2826 bp, synthetic construct
  misc_feature 1..2826: note = Description of Artificial Sequence: Synthetic coding sequence
  source 1..2826: mol_type = other DNA
atggccgaggccaaccccagaagaggcaagatgagattcagaagaaacgccgccagcttccccggcaacctgcacctggtgctggtgctgagacccaccagcttcctgcagagaaccttcaccgacatcggcttctggttcagccaggaggacttcatgctgaagctgcccgtggtgatgctgagcagcgtgagcgacctgctgacctacatcgacgacaagcagctgacccccgagctgggcggcaccctgcagtactgccacagcgagtggatcatcttcagaaacgccatcgagaacttcgccctgaccgtgaaggagatggcccagatgctgcagagcttcggcaccgagctggccgagaccgagctgcccgacgacatccccagcatcgaggagatcctggccatcagagccgagagataccacctgctgaagaacgacatcaccgccgtgaccaaggagggcaagatcctgctgaccaacctggaggtgcccgacaccgagggcgccgtgagcagcagactggagtgccacagacagatcagcggcgactggcagaccatcaacaagctgctgacccaggtgcacgacatggagaccgccttcgacggcttctgggagaagcaccagctgaagatggagcagtacctgcagctgtggaagttcgagcaggacttccagcagctggtgaccgaggtggagttcctgctgaaccagcaggccgagctggccgacgtgaccggcaccatcgcccaggtgaagcagaagatcaagaagctggagaacctggacgagaacagccaggagctgctgagcaaggcccagttcgtgatcctgcacggccacaagctggccgccaaccaccactacgccctggacctgatctgccagagatgcaacgagctgagatacctgagcgacatcctggtgaacgagatcaaggccaagagaatccagctgagcagaaccttcaagatgcacaagctgctgcagcaggccagacagtgctgcgacgagggcgagtgcctgctggccaaccaggagatcgacaagttccagagcaaggaggacgcccagaaggccctgcaggacatcgagaacttcctggagatggccctgcccttcatcaactacgagcccgagaccctgcagtacgagttcgacgtgatcctgagccccgagctgaaggtgcagatgaagaccatccagctgaagctggagaacatcagaagcatcttcgagaaccagcaggccggcttcagaaacctggccgacaagcacgtgagacccatccagttcgtggtgcccacccccgagaacctggtgaccagcggcacccccttcttcagcagcaagcaggtgggcgtgggctacagcttcttccaggcctgcaagctgttcagcaagggcaagaagacctggagacagaaccagagcaacctgaagatcgaggtggtgcccgactgccaggagaagagaagcagcggccccagcagcagcctggacaacggcaacagcctggacgtgctgaagaaccacgtgctgaacgagctgatccagaccgagagagtgtacgtgagagagctgtacaccgtgctgctgggctacagagccgagatggacaaccccgagatgttcgacctgatgccccccctgctgagaaacaagaaggacatcctgttcggcaacatggccgagatctacgagttccacaacgacatcttcctgagcagcctggagaactgcgcccacgcccccgagagagtgggcccctgcttcctggagagaaaggacgacttccagatgtacgccaagtactgccagaacaagcccagaagcgagaccatctggagaaagtacagcgagtgcgccttcttccaggagtgccagagaaagctgaagcacagactgagactggacagctacctgctgaagcccgtgcagagaatcaccaagtaccagctgctgctgaaggagctgctgaagtacagcaaggactgcgagggcagcgccctgctgaagaaggccctggacgccatgctggacctgctgaagagcgtgaacgacagcatgcaccagatcgccatcaacggctacatcggcaacctgaacgagctgggcaagatgatcatgcagggcggcttcagcgtgtggatcggccacaagaagggcgccaccaagatgaaggacctggccagattcaagcccatgcagagacacctgttcctgtacgagaaggccatcgtgttctgcaagagaagagtggagagcggcgagggcagcgacagataccccagctacagcttcaagcactgctggaagatggacgaggtgggcatcaccgagtacgtgaagggcgacaacagaaagttcgagatctggtacggcgagaaggaggaggtgtacatcgtgcaggccagcaacgtggacgtgaagatgacctggctgaaggagatcagaaacatcctgctgaagcagcaggagctgctgaccgtgaagaagagaaagcagcaggaccagctgaccgagagagacaagttccagatcagcctgcagcagaacgacgagaagcagcagggcgccttcatcagcaccgaggagaccgagctggagcacaccagcaccgtggtggaggtgtgcgaggccatcgccagcgtgcaggccgaggccaacaccgtgtggaccgaggccagccagagcgccgagatcagcgaggagcccgccgagtggagcagcaactacttctaccccacctacgacgagaacgaggaggagaacagacccctgatgagacccgtgagcgagatggccctgctgtactag

SEQ ID NO: 88160 - DNA, 2583 bp, synthetic construct
  misc_feature 1..2583: note = Description of Artificial Sequence: Synthetic coding sequence
  source 1..2583: mol_type = other DNA
atggccgaggccaaccccagaagaggcaagatgagattcagaagaaacgccgccagcttccccggcaacctgcacctggtgctggtgctgagacccaccagcttcctgcagagaaccttcaccgacatcggcttctggttcagccaggaggacttcatgctgaagctgcccgtggtgatgctgagcagcgtgagcgacctgctgacctacatcgacgacaagcagctgacccccgagctgggcggcaccctgcagtactgccacagcgagtggatcatcttcagaaacgccatcgagaacttcgccctgaccgtgaaggagatggcccagatgctgcagagcttcggcaccgagctggccgagaccgagctgcccgacgacatccccagcatcgaggagatcctggccatcagagccgagagataccacctgctgaagaacgacatcaccgccgtgaccaaggagggcaagatcctgctgaccaacctggaggtgcccgacaccgagggcgccgtgagcagcagactggagtgccacagacagatcagcggcgactggcagaccatcaacaagctgctgacccaggtgcacgacatggagaccgccttcgacggcttctgggagaagcaccagctgaagatggagcagtacctgcagctgtggaagttcgagcaggacttccagcagctggtgaccgaggtggagttcctgctgaaccagcaggccgagctggccgacgtgaccggcaccatcgcccaggtgaagcagaagatcaagaagctggagaacctggacgagaacagccaggagctgctgagcaaggcccagttcgtgatcctgcacggccacaagctggccgccaaccaccactacgccctggacctgatctgccagagatgcaacgagctgagatacctgagcgacatcctggtgaacgagatcaaggccaagagaatccagctgagcagaaccttcaagatgcacaagctgctgcagcaggccagacagtgctgcgacgagggcgagtgcctgctggccaaccaggagatcgacaagttccagagcaaggaggacgcccagaaggccctgcaggacatcgagaacttcctggagatggccctgcccttcatcaactacgagcccgagaccctgcagtacgagttcgacgtgatcctgagccccgagctgaaggtgcagatgaagaccatccagctgaagctggagaacatcagaagcatcttcgagaaccagcaggccggcttcagaaacctggccgacaagcacgtgagacccatccagttcgtggtgcccacccccgagaacctggtgaccagcggcacccccttcttcagcagcaagcagggcaagaagacctggagacagaaccagagcaacctgaagatcgaggtggtgcccgactgccaggagaagagaagcagcggccccagcagcagcctggacaacggcaacagcctggacgtgctgaagaaccacgtgctgaacgagctgatccagaccgagagagtgtacgtgagagagctgtacaccgtgctgctgggctacagagccgagatggacaaccccgagatgttcgacctgatgccccccctgctgagaaacaagaaggacatcctgttcggcaacatggccgagatctacgagttccacaacgacatcttcctgagcagcctggagaactgcgcccacgcccccgagagagtgggcccctgcttcctggagagaaaggacgacttccagatgtacgccaagtactgccagaacaagcccagaagcgagaccatctggagaaagtacagcgagtgcgccttcttccaggagtgccagagaaagctgaagcacagactgagactggacagctacctgctgaagcccgtgcagagaatcaccaagtaccagctgctgctgaaggagctgctgaagtacagcaaggactgcgagggcagcgccctgctgaagaaggccctggacgccatgctggacctgctgaagagcgtgaacgacagcatgcaccagatcgccatcaacggctacatcggcaacctgaacgagctgggcaagatgatcatgcagggcggcttcagcgtgtggatcggccacaagaagggcgccaccaagatgaaggacctggccagattcaagcccatgcagagacacctgttcctgtacgagaaggccatcgtgttctgcaagagaagagtggagagcggcgagggcagcgacagataccccagctacagcttcaagcactgctggaagatggacgaggtgggcatcaccgagtacgtgaagggcgacaacagaaagttcgagatctggtacggcgagaaggaggaggtgtacatcgtgcaggccagcaacgtggacgtgaagatgacctggctgaaggagatcagaaacatcctgctgaagcagcaggagctgctgaccgtgaagaagagaaagcagcaggaccagctgaccgagagagacaagttccagatcagcctgcagcagaacgacgaggacctgtgcagaagatggctgagctacatcgacgaggccaccatgagcaacggcaagtag

SEQ ID NO: 88161 - DNA, 2778 bp, synthetic construct
  misc_feature 1..2778: note = Description of Artificial Sequence: Synthetic coding sequence
  source 1..2778: mol_type = other DNA
atggccgaggccaaccccagaagaggcaagatgagattcagaagaaacgccgccagcttccccggcaacctgcacctggtgctggtgctgagacccaccagcttcctgcagagaaccttcaccgacatcggcttctggttcagccaggaggacttcatgctgaagctgcccgtggtgatgctgagcagcgtgagcgacctgctgacctacatcgacgacaagcagctgacccccgagctgggcggcaccctgcagtactgccacagcgagtggatcatcttcagaaacgccatcgagaacttcgccctgaccgtgaaggagatggcccagatgctgcagagcttcggcaccgagctggccgagaccgagctgcccgacgacatccccagcatcgaggagatcctggccatcagagccgagagataccacctgctgaagaacgacatcaccgccgtgaccaaggagggcaagatcctgctgaccaacctggaggtgcccgacaccgagggcgccgtgagcagcagactggagtgccacagacagatcagcggcgactggcagaccatcaacaagctgctgacccaggtgcacgacatggagaccgccttcgacggcttctgggagaagcaccagctgaagatggagcagtacctgcagctgtggaagttcgagcaggacttccagcagctggtgaccgaggtggagttcctgctgaaccagcaggccgagctggccgacgtgaccggcaccatcgcccaggtgaagcagaagatcaagaagctggagaacctggacgagaacagccaggagctgctgagcaaggcccagttcgtgatcctgcacggccacaagctggccgccaaccaccactacgccctggacctgatctgccagagatgcaacgagctgagatacctgagcgacatcctggtgaacgagatcaaggccaagagaatccagctgagcagaaccttcaagatgcacaagctgctgcagcaggccagacagtgctgcgacgagggcgagtgcctgctggccaaccaggagatcgacaagttccagagcaaggaggacgcccagaaggccctgcaggacatcgagaacttcctggagatggccctgcccttcatcaactacgagcccgagaccctgcagtacgagttcgacgtgatcctgagccccgagctgaaggtgcagatgaagaccatccagctgaagctggagaacatcagaagcatcttcgagaaccagcaggccggcttcagaaacctggccgacaagcacgtgagacccatccagttcgtggtgcccacccccgagaacctggtgaccagcggcacccccttcttcagcagcaagcagggcaagaagacctggagacagaaccagagcaacctgaagatcgaggtggtgcccgactgccaggagaagagaagcagcggccccagcagcagcctggacaacggcaacagcctggacgtgctgaagaaccacgtgctgaacgagctgatccagaccgagagagtgtacgtgagagagctgtacaccgtgctgctgggctacagagccgagatggacaaccccgagatgttcgacctgatgccccccctgctgagaaacaagaaggacatcctgttcggcaacatggccgagatctacgagttccacaacgacatcttcctgagcagcctggagaactgcgcccacgcccccgagagagtgggcccctgcttcctggagagaaaggacgacttccagatgtacgccaagtactgccagaacaagcccagaagcgagaccatctggagaaagtacagcgagtgcgccttcttccaggagtgccagagaaagctgaagcacagactgagactggacagctacctgctgaagcccgtgcagagaatcaccaagtaccagctgctgctgaaggagctgctgaagtacagcaaggactgcgagggcagcgccctgctgaagaaggccctggacgccatgctggacctgctgaagagcgtgaacgacagcatgcaccagatcgccatcaacggctacatcggcaacctgaacgagctgggcaagatgatcatgcagggcggcttcagcgtgtggatcggccacaagaagggcgccaccaagatgaaggacctggccagattcaagcccatgcagagacacctgttcctgtacgagaaggccatcgtgttctgcaagagaagagtggagagcggcgagggcagcgacagataccccagctacagcttcaagcactgctggaagatggacgaggtgggcatcaccgagtacgtgaagggcgacaacagaaagttcgagatctggtacggcgagaaggaggaggtgtacatcgtgcaggccagcaacgtggacgtgaagatgacctggctgaaggagatcagaaacatcctgctgaagcagcaggagctgctgaccgtgaagaagagaaagcagcaggaccagctgaccgagagagacaagttccagatcagcctgcagcagaacgacgagaagcagcagggcgccttcatcagcaccgaggagaccgagctggagcacaccagcaccgtggtggaggtgtgcgaggccatcgccagcgtgcaggccgaggccaacaccgtgtggaccgaggccagccagagcgccgagatcagcgaggagcccgccgagtggagcagcaactacttctaccccacctacgacgagaacgaggaggagaacagacccctgatgagacccgtgagcgagatggccctgctgtactag

SEQ ID NO: 88162 - DNA, 3213 bp, synthetic construct
  misc_feature 1..3213: note = Description of Artificial Sequence: Synthetic coding sequence
  source 1..3213: mol_type = other DNA
atgccccaggccgccgccagcgccccctggaccagcgtgagctgcggcagaatccccggcctgccccagaaccccgacggctgcaccttcatgcccatcgcccaggccatccccctgcaggtggacatggccatggccctgcagagagtgagaatcgccgagaagtacggcaagaactacctgtgcctgctgcaggccgtgttcgtggccgagaccgacctgctgctgagaatcaaggacatcagccacttcctgatgcaggacatcgccttcctgagcggcggcagaggcaaggacaacgcctggatcatcaccttccccgagaactgcaacttcagatgcatccccgaggaggtgatcgccaaggtgctgacctacctgaccagcatcgccagacagaacggcagcgacagcagattcaccatcatcctggacagaagactggacacctggagcagcctgaagatcagcctgcagaagatcagcgccagcttccccggcaacctgcacctggtgctggtgctgagacccaccagcttcctgcagagaaccttcaccgacatcggcttctggttcagccaggaggacttcatgctgaagctgcccgtggtgatgctgagcagcgtgagcgacctgctgacctacatcgacgacaagcagctgacccccgagctgggcggcaccctgcagtactgccacagcgagtggatcatcttcagaaacgccatcgagaacttcgccctgaccgtgaaggagatggcccagatgctgcagagcttcggcaccgagctggccgagaccgagctgcccgacgacatccccagcatcgaggagatcctggccatcagagccgagagataccacctgctgaagaacgacatcaccgccgtgaccaaggagggcaagatcctgctgaccaacctggaggtgcccgacaccgagggcgccgtgagcagcagactggagtgccacagacagatcagcggcgactggcagaccatcaacaagctgctgacccaggtgcacgacatggagaccgccttcgacggcttctgggagaagcaccagctgaagatggagcagtacctgcagctgtggaagttcgagcaggacttccagcagctggtgaccgaggtggagttcctgctgaaccagcaggccgagctggccgacgtgaccggcaccatcgcccaggtgaagcagaagatcaagaagctggagaacctggacgagaacagccaggagctgctgagcaaggcccagttcgtgatcctgcacggccacaagctggccgccaaccaccactacgccctggacctgatctgccagagatgcaacgagctgagatacctgagcgacatcctggtgaacgagatcaaggccaagagaatccagctgagcagaaccttcaagatgcacaagctgctgcagcaggccagacagtgctgcgacgagggcgagtgcctgctggccaaccaggagatcgacaagttccagagcaaggaggacgcccagaaggccctgcaggacatcgagaacttcctggagatggccctgcccttcatcaactacgagcccgagaccctgcagtacgagttcgacgtgatcctgagccccgagctgaaggtgcagatgaagaccatccagctgaagctggagaacatcagaagcatcttcgagaaccagcaggccggcttcagaaacctggccgacaagcacgtgagacccatccagttcgtggtgcccacccccgagaacctggtgaccagcggcacccccttcttcagcagcaagcagggcaagaagacctggagacagaaccagagcaacctgaagatcgaggtggtgcccgactgccaggagaagagaagcagcggccccagcagcagcctggacaacggcaacagcctggacgtgctgaagaaccacgtgctgaacgagctgatccagaccgagagagtgtacgtgagagagctgtacaccgtgctgctgggctacagagccgagatggacaaccccgagatgttcgacctgatgccccccctgctgagaaacaagaaggacatcctgttcggcaacatggccgagatctacgagttccacaacgacatcttcctgagcagcctggagaactgcgcccacgcccccgagagagtgggcccctgcttcctggagagaaaggacgacttccagatgtacgccaagtactgccagaacaagcccagaagcgagaccatctggagaaagtacagcgagtgcgccttcttccaggagtgccagagaaagctgaagcacagactgagactggacagctacctgctgaagcccgtgcagagaatcaccaagtaccagctgctgctgaaggagctgctgaagtacagcaaggactgcgagggcagcgccctgctgaagaaggccctggacgccatgctggacctgctgaagagcgtgaacgacagcatgcaccagatcgccatcaacggctacatcggcaacctgaacgagctgggcaagatgatcatgcagggcggcttcagcgtgtggatcggccacaagaagggcgccaccaagatgaaggacctggccagattcaagcccatgcagagacacctgttcctgtacgagaaggccatcgtgttctgcaagagaagagtggagagcggcgagggcagcgacagataccccagctacagcttcaagcactgctggaagatggacgaggtgggcatcaccgagtacgtgaagggcgacaacagaaagttcgagatctggtacggcgagaaggaggaggtgtacatcgtgcaggccagcaacgtggacgtgaagatgacctggctgaaggagatcagaaacatcctgctgaagcagcaggagctgctgaccgtgaagaagagaaagcagcaggaccagctgaccgagagagacaagttccagatcagcctgcagcagaacgacgagaagcagcagggcgccttcatcagcaccgaggagaccgagctggagcacaccagcaccgtggtggaggtgtgcgaggccatcgccagcgtgcaggccgaggccaacaccgtgtggaccgaggccagccagagcgccgagatcagcgaggagcccgccgagtggagcagcaactacttctaccccacctacgacgagaacgaggaggagaacagacccctgatgagacccgtgagcgagatggccctgctgtactag

SEQ ID NO: 88163 - DNA, 2958 bp, synthetic construct
  misc_feature 1..2958: note = Description of Artificial Sequence: Synthetic coding sequence
  source 1..2958: mol_type = other DNA
atgcaggacatcgccttcctgagcggcggcagaggcaaggacaacgcctggatcatcaccttccccgagaactgcaacttcagatgcatccccgaggaggtgatcgccaaggtgctgacctacctgaccagcatcgccagacagaacggcagcgacagcagattcaccatcatcctggacagaagactggacacctggagcagcctgaagatcagcctgcagaagatcagcgccagcttccccggcaacctgcacctggtgctggtgctgagacccaccagcttcctgcagagaaccttcaccgacatcggcttctggttcagccaggaggacttcatgctgaagctgcccgtggtgatgctgagcagcgtgagcgacctgctgacctacatcgacgacaagcagctgacccccgagctgggcggcaccctgcagtactgccacagcgagtggatcatcttcagaaacgccatcgagaacttcgccctgaccgtgaaggagatggcccagatgctgcagagcttcggcaccgagctggccgagaccgagctgcccgacgacatccccagcatcgaggagatcctggccatcagagccgagagataccacctgctgaagaacgacatcaccgccgtgaccaaggagggcaagatcctgctgaccaacctggaggtgcccgacaccgagggcgccgtgagcagcagactggagtgccacagacagatcagcggcgactggcagaccatcaacaagctgctgacccaggtgcacgacatggagaccgccttcgacggcttctgggagaagcaccagctgaagatggagcagtacctgcagctgtggaagttcgagcaggacttccagcagctggtgaccgaggtggagttcctgctgaaccagcaggccgagctggccgacgtgaccggcaccatcgcccaggtgaagcagaagatcaagaagctggagaacctggacgagaacagccaggagctgctgagcaaggcccagttcgtgatcctgcacggccacaagctggccgccaaccaccactacgccctggacctgatctgccagagatgcaacgagctgagatacctgagcgacatcctggtgaacgagatcaaggccaagagaatccagctgagcagaaccttcaagatgcacaagctgctgcagcaggccagacagtgctgcgacgagggcgagtgcctgctggccaaccaggagatcgacaagttccagagcaaggaggacgcccagaaggccctgcaggacatcgagaacttcctggagatggccctgcccttcatcaactacgagcccgagaccctgcagtacgagttcgacgtgatcctgagccccgagctgaaggtgcagatgaagaccatccagctgaagctggagaacatcagaagcatcttcgagaaccagcaggccggcttcagaaacctggccgacaagcacgtgagacccatccagttcgtggtgcccacccccgagaacctggtgaccagcggcacccccttcttcagcagcaagcagggcaagaagacctggagacagaaccagagcaacctgaagatcgaggtggtgcccgactgccaggagaagagaagcagcggccccagcagcagcctggacaacggcaacagcctggacgtgctgaagaaccacgtgctgaacgagctgatccagaccgagagagtgtacgtgagagagctgtacaccgtgctgctgggctacagagccgagatggacaaccccgagatgttcgacctgatgccccccctgctgagaaacaagaaggacatcctgttcggcaacatggccgagatctacgagttccacaacgacatcttcctgagcagcctggagaactgcgcccacgcccccgagagagtgggcccctgcttcctggagagaaaggacgacttccagatgtacgccaagtactgccagaacaagcccagaagcgagaccatctggagaaagtacagcgagtgcgccttcttccaggagtgccagagaaagctgaagcacagactgagactggacagctacctgctgaagcccgtgcagagaatcaccaagtaccagctgctgctgaaggagctgctgaagtacagcaaggactgcgagggcagcgccctgctgaagaaggccctggacgccatgctggacctgctgaagagcgtgaacgacagcatgcaccagatcgccatcaacggctacatcggcaacctgaacgagctgggcaagatgatcatgcagggcggcttcagcgtgtggatcggccacaagaagggcgccaccaagatgaaggacctggccagattcaagcccatgcagagacacctgttcctgtacgagaaggccatcgtgttctgcaagagaagagtggagagcggcgagggcagcgacagataccccagctacagcttcaagcactgctggaagatggacgaggtgggcatcaccgagtacgtgaagggcgacaacagaaagttcgagatctggtacggcgagaaggaggaggtgtacatcgtgcaggccagcaacgtggacgtgaagatgacctggctgaaggagatcagaaacatcctgctgaagcagcaggagctgctgaccgtgaagaagagaaagcagcaggaccagctgaccgagagagacaagttccagatcagcctgcagcagaacgacgagaagcagcagggcgccttcatcagcaccgaggagaccgagctggagcacaccagcaccgtggtggaggtgtgcgaggccatcgccagcgtgcaggccgaggccaacaccgtgtggaccgaggccagccagagcgccgagatcagcgaggagcccgccgagtggagcagcaactacttctaccccacctacgacgagaacgaggaggagaacagacccctgatgagacccgtgagcgagatggccctgctgtactag

SEQ ID NO: 88164 - DNA, 1290 bp, synthetic construct
  misc_feature 1..1290: note = Description of Artificial Sequence: Synthetic coding sequence
  source 1..1290: mol_type = other DNA
tgacacgtgctgaacgagctgatccagaccgagagagtgtacgtgagagagctgtacaccgtgctgctgggctacagagccgagatggacaaccccgagatgttcgacctgatgccccccctgctgagaaacaagaaggacatcctgttcggcaacatggccgagatctacgagttccacaacgacatcttcctgagcagcctggagaactgcgcccacgcccccgagagagtgggcccctgcttcctggagagaaaggacgacttccagatgtacgccaagtactgccagaacaagcccagaagcgagaccatctggagaaagtacagcgagtgcgccttcttccaggagtgccagagaaagctgaagcacagactgagactggacagctacctgctgaagcccgtgcagagaatcaccaagtaccagctgctgctgaaggagctgctgaagtacagcaaggactgcgagggcagcgccctgctgaagaaggccctggacgccatgctggacctgctgaagagcgtgaacgacagcatgcaccagatcgccatcaacggctacatcggcaacctgaacgagctgggcaagatgatcatgcagggcggcttcagcgtgtggatcggccacaagaagggcgccaccaagatgaaggacctggccagattcaagcccatgcagagacacctgttcctgtacgagaaggccatcgtgttctgcaagagaagagtggagagcggcgagggcagcgacagataccccagctacagcttcaagcactgctggaagatggacgaggtgggcatcaccgagtacgtgaagggcgacaacagaaagttcgagatctggtacggcgagaaggaggaggtgtacatcgtgcaggccagcaacgtggacgtgaagatgacctggctgaaggagatcagaaacatcctgctgaagcagcaggagctgctgaccgtgaagaagagaaagcagcaggaccagctgaccgagagagacaagttccagatcagcctgcagcagaacgacgagaagcagcagggcgccttcatcagcaccgaggagaccgagctggagcacaccagcaccgtggtggaggtgtgcgaggccatcgccagcgtgcaggccgaggccaacaccgtgtggaccgaggccagccagagcgccgagatcagcgaggagcccgccgagtggagcagcaactacttctaccccacctacgacgagaacgaggaggagaacagacccctgatgagacccgtgagcgagatggccctgctgtactag

SEQ ID NO: 88165 - DNA, 1587 bp, synthetic construct
  misc_feature 1..1587: note = Description of Artificial Sequence: Synthetic coding sequence
  source 1..1587: mol_type = other DNA
gtgcagatgaagaccatccagctgaagctggagaacatcagaagcatcttcgagaaccagcaggccggcttcagaaacctggccgacaagcacgtgagacccatccagttcgtggtgcccacccccgagaacctggtgaccagcggcacccccttcttcagcagcaagcagggcaagaagacctggagacagaaccagagcaacctgaagatcgaggtggtgcccgactgccaggagaagagaagcagcggccccagcagcagcctggacaacggcaacagcctggacgtgctgaagaaccacgtgctgaacgagctgatccagaccgagagagtgtacgtgagagagctgtacaccgtgctgctgggctacagagccgagatggacaaccccgagatgttcgacctgatgccccccctgctgagaaacaagaaggacatcctgttcggcaacatggccgagatctacgagttccacaacgacatcttcctgagcagcctggagaactgcgcccacgcccccgagagagtgggcccctgcttcctggagagaaaggacgacttccagatgtacgccaagtactgccagaacaagcccagaagcgagaccatctggagaaagtacagcgagtgcgccttcttccaggagtgccagagaaagctgaagcacagactgagactggacagctacctgctgaagcccgtgcagagaatcaccaagtaccagctgctgctgaaggagctgctgaagtacagcaaggactgcgagggcagcgccctgctgaagaaggccctggacgccatgctggacctgctgaagagcgtgaacgacagcatgcaccagatcgccatcaacggctacatcggcaacctgaacgagctgggcaagatgatcatgcagggcggcttcagcgtgtggatcggccacaagaagggcgccaccaagatgaaggacctggccagattcaagcccatgcagagacacctgttcctgtacgagaaggccatcgtgttctgcaagagaagagtggagagcggcgagggcagcgacagataccccagctacagcttcaagcactgctggaagatggacgaggtgggcatcaccgagtacgtgaagggcgacaacagaaagttcgagatctggtacggcgagaaggaggaggtgtacatcgtgcaggccagcaacgtggacgtgaagatgacctggctgaaggagatcagaaacatcctgctgaagcagcaggagctgctgaccgtgaagaagagaaagcagcaggaccagctgaccgagagagacaagttccagatcagcctgcagcagaacgacgagaagcagcagggcgccttcatcagcaccgaggagaccgagctggagcacaccagcaccgtggtggaggtgtgcgaggccatcgccagcgtgcaggccgaggccaacaccgtgtggaccgaggccagccagagcgccgagatcagcgaggagcccgccgagtggagcagcaactacttctaccccacctacgacgagaacgaggaggagaacagacccctgatgagacccgtgagcgagatggccctgctgtactag

SEQ ID NO: 88166 - DNA, 3006 bp, synthetic construct
  misc_feature 1..3006: note = Description of Artificial Sequence: Synthetic coding sequence
  source 1..3006: mol_type = other DNA
atgcaggacatcgccttcctgagcggcggcagaggcaaggacaacgcctggatcatcaccttccccgagaactgcaacttcagatgcatccccgaggaggtgatcgccaaggtgctgacctacctgaccagcatcgccagacagaacggcagcgacagcagattcaccatcatcctggacagaagactggacacctggagcagcctgaagatcagcctgcagaagatcagcgccagcttccccggcaacctgcacctggtgctggtgctgagacccaccagcttcctgcagagaaccttcaccgacatcggcttctggttcagccaggaggacttcatgctgaagctgcccgtggtgatgctgagcagcgtgagcgacctgctgacctacatcgacgacaagcagctgacccccgagctgggcggcaccctgcagtactgccacagcgagtggatcatcttcagaaacgccatcgagaacttcgccctgaccgtgaaggagatggcccagatgctgcagagcttcggcaccgagctggccgagaccgagctgcccgacgacatccccagcatcgaggagatcctggccatcagagccgagagataccacctgctgaagaacgacatcaccgccgtgaccaaggagggcaagatcctgctgaccaacctggaggtgcccgacaccgagggcgccgtgagcagcagactggagtgccacagacagatcagcggcgactggcagaccatcaacaagctgctgacccaggtgcacgacatggagaccgccttcgacggcttctgggagaagcaccagctgaagatggagcagtacctgcagctgtggaagttcgagcaggacttccagcagctggtgaccgaggtggagttcctgctgaaccagcaggccgagctggccgacgtgaccggcaccatcgcccaggtgaagcagaagatcaagaagctggagaacctggacgagaacagccaggagctgctgagcaaggcccagttcgtgatcctgcacggccacaagctggccgccaaccaccactacgccctggacctgatctgccagagatgcaacgagctgagatacctgagcgacatcctggtgaacgagatcaaggccaagagaatccagctgagcagaaccttcaagatgcacaagctgctgcagcaggccagacagtgctgcgacgagggcgagtgcctgctggccaaccaggagatcgacaagttccagagcaaggaggacgcccagaaggccctgcaggacatcgagaacttcctggagatggccctgcccttcatcaactacgagcccgagaccctgcagtacgagttcgacgtgatcctgagccccgagctgaaggtgcagatgaagaccatccagctgaagctggagaacatcagaagcatcttcgagaaccagcaggccggcttcagaaacctggccgacaagcacgtgagacccatccagttcgtggtgcccacccccgagaacctggtgaccagcggcacccccttcttcagcagcaagcaggtgggcgtgggctacagcttcttccaggcctgcaagctgttcagcaagggcaagaagacctggagacagaaccagagcaacctgaagatcgaggtggtgcccgactgccaggagaagagaagcagcggccccagcagcagcctggacaacggcaacagcctggacgtgctgaagaaccacgtgctgaacgagctgatccagaccgagagagtgtacgtgagagagctgtacaccgtgctgctgggctacagagccgagatggacaaccccgagatgttcgacctgatgccccccctgctgagaaacaagaaggacatcctgttcggcaacatggccgagatctacgagttccacaacgacatcttcctgagcagcctggagaactgcgcccacgcccccgagagagtgggcccctgcttcctggagagaaaggacgacttccagatgtacgccaagtactgccagaacaagcccagaagcgagaccatctggagaaagtacagcgagtgcgccttcttccaggagtgccagagaaagctgaagcacagactgagactggacagctacctgctgaagcccgtgcagagaatcaccaagtaccagctgctgctgaaggagctgctgaagtacagcaaggactgcgagggcagcgccctgctgaagaaggccctggacgccatgctggacctgctgaagagcgtgaacgacagcatgcaccagatcgccatcaacggctacatcggcaacctgaacgagctgggcaagatgatcatgcagggcggcttcagcgtgtggatcggccacaagaagggcgccaccaagatgaaggacctggccagattcaagcccatgcagagacacctgttcctgtacgagaaggccatcgtgttctgcaagagaagagtggagagcggcgagggcagcgacagataccccagctacagcttcaagcactgctggaagatggacgaggtgggcatcaccgagtacgtgaagggcgacaacagaaagttcgagatctggtacggcgagaaggaggaggtgtacatcgtgcaggccagcaacgtggacgtgaagatgacctggctgaaggagatcagaaacatcctgctgaagcagcaggagctgctgaccgtgaagaagagaaagcagcaggaccagctgaccgagagagacaagttccagatcagcctgcagcagaacgacgagaagcagcagggcgccttcatcagcaccgaggagaccgagctggagcacaccagcaccgtggtggaggtgtgcgaggccatcgccagcgtgcaggccgaggccaacaccgtgtggaccgaggccagccagagcgccgagatcagcgaggagcccgccgagtggagcagcaactacttctaccccacctacgacgagaacgaggaggagaacagacccctgatgagacccgtgagcgagatggccctgctgtactag

SEQ ID NO: 88167 - DNA, 2958 bp, synthetic construct; identical to SEQ ID NO: 88163
  misc_feature 1..2958: note = Description of Artificial Sequence: Synthetic coding sequence
  source 1..2958: mol_type = other DNA

SEQ ID NO: 88168 - DNA, 2466 bp, synthetic construct
  misc_feature 1..2466: note = Description of Artificial Sequence: Synthetic coding sequence
  source 1..2466: mol_type = other DNA
atggccgaggccaaccccagaagaggcaagatgagattcagaagaaacgccgccagcttccccggcaacctgcacctggtgctggtgctgagacccaccagcttcctgcagagaaccttcaccgacatcggcttctggttcagccaggaggacttcatgctgaagctgcccgccatcgagaacttcgccctgaccgtgaaggagatggcccagatgctgcagagcttcggcaccgagctggccgagaccgagctgcccgacgacatccccagcatcgaggagatcctggccatcagagccgagagataccacctgctgaagaacgacatcaccgccgtgaccaaggagggcaagatcctgctgaccaacctggaggtgcccgacaccgagggcgccgtgagcagcagactggagtgccacagacagatcagcggcgactggcagaccatcaacaagctgctgacccaggtgcacgacatggagaccgccttcgacggcttctgggagaagcaccagctgaagatggagcagtacctgcagctgtggaagttcgagcaggacttccagcagctggtgaccgaggtggagttcctgctgaaccagcaggccgagctggccgacgtgaccggcaccatcgcccaggtgaagcagaagatcaagaagctggagaacctggacgagaacagccaggagctgctgagcaaggcccagttcgtgatcctgcacggccacaagctggccgccaaccaccactacgccctggacctgatctgccagagatgcaacgagctgagatacctgagcgacatcctggtgaacgagatcaaggccaagagaatccagctgagcagaaccttcaagatgcacaagctgctgcagcaggccagacagtgctgcgacgagggcgagtgcctgctggccaaccaggagatcgacaagttccagagcaaggaggacgcccagaaggccctgcaggacatcgagaacttcctggagatggccctgcccttcatcaactacgagcccgagaccctgcagtacgagttcgacgtgatcctgagccccgagctgaaggtgcagatgaagaccatccagctgaagctggagaacatcagaagcatcttcgagaaccagcaggccggcttcagaaacctggccgacaagcacgtgagacccatccagttcgtggtgcccacccccgagaacctggtgaccagcggcacccccttcttcagcagcaagcagggcaagaagacctggagacagaaccagagcaacctgaagatcgaggtggtgcccgactgccaggagaagagaagcagcggccccagcagcagcctggacaacggcaacagcctggacgtgctgaagaaccacgtgctgaacgagctgatccagaccgagagagtgtacgtgagagagctgtacaccgtgctgctgggctacagagccgagatggacaaccccgagatgttcgacctgatgccccccctgctgagaaacaagaaggacatcctgttcggcaacatggccgagatctacgagttccacaacgacatcttcctgagcagcctggagaactgcgcccacgcccccgagagagtgggcccctgcttcctggagagaaaggacgacttccagatgtacgccaagtactgccagaacaagcccagaagcgagaccatctggagaaagtacagcgagtgcgccttcttccaggagtgccagagaaagctgaagcacagactgagactggacagctacctgctgaagcccgtgcagagaatcaccaagtaccagctgctgctgaaggagctgctgaagtacagcaaggactgcgagggcagcgccctgctgaagaaggccctggacgccatgctggacctgctgaagagcgtgaacgacagcatgcaccagatcgccatcaacggctacatcggcaacctgaacgagctgggcaagatgatcatgcagggcggcttcagcgtgtggatcggccacaagaagggcgccaccaagatgaaggacctggccagattcaagcccatgcagagacacctgttcctgtacgagaaggccatcgtgttctgcaagagaagagtggagagcggcgagggcagcgacagataccccagctacagcttcaagcactgctggaagatggacgaggtgggcatcaccgagtacgtgaagggcgacaacagaaagttcgagatctggtacggcgagaaggaggaggtgtacatcgtgcaggccagcaacgtggacgtgaagatgacctggctgaaggagatcagaaacatcctgctgaagcagcaggagctgctgaccgtgaagaagagaaagcagcaggaccagctgaccgagagagacaagttccagatcagcctgcagcagaacgacgaggacctgtgcagaagatggctgagctacatcgacgaggccaccatgagcaacggcaagtag

SEQ ID NO: 88169 - DNA, 2955 bp, synthetic construct
  misc_feature 1..2955: note = Description of Artificial Sequence: Synthetic coding sequence
  source 1..2955: mol_type = other DNA
atgaccgtgagaagactgagcctgctgtgcagagacctgtgggccctgtggctgctgctgaaggccggcgccgacgagatcatgcaccaggacatcgtgcccctgtgcgccgccgacatccaggaccagctgaagaagagattcgcctacctgagcggcggcagaggccaggacggcagccccgtgatcaccttccccgactaccccgccttcagcgagatccccgacaaggagttccagaacgtgatgacctacctgaccagcatccccagcctgcaggacgccggcatcggcttcatcctggtgatcgacagaagaagagacaagtggaccagcgtgaaggccagcgtgctgagaatcgccgccagcttccccgccaacctgcagctggtgctggtgctgagacccaccggcttcttccagagaaccctgagcgacatcgccttcaagttcaacagagacgacttcaagatgaaggtgcccgtgatcatgctgagcagcgtgcccgacctgcacggctacatcgacaagagccagctgaccgaggacctgggcggcaccctggactactgccacagcagatggctgtgccagagaaccgccatcgagagcttcgccctgatggtgaagcagaccgcccagatgctgcagagcttcggcaccgagctggccgagaccgagctgcccaacgacgtgcagagcaccagcagcgtgctgtgcgcccacaccgagaagaaggacaaggccaaggaggacctgagactggccctgaaggagggccacagcgtgctggagagcctgagagagctgcaggccgagggcagcgagcccagcgtgaaccaggaccagctggacaaccaggccaccgtgcagagactgctggcccagctgaacgagaccgaggccgccttcgacgagttctgggccaagcaccagcagaagctggagcagtgcctgcagctgagacacttcgagcagggcttcagagaggtgaaggccatcctggacgccgccagccagaagatcgccaccttcaccgacatcggcaacagcctggcccacgtggagcacctgctgagagacctggccagcttcgaggagaagagcggcgtggccgtggagagagccagagccctgagcctggacggcgagcagctgatcggcaacaagcactacgccgtggacagcatcagacccaagtgccaggagctgagacacctgtgcgaccagttcagcgccgagatcgccagaagaagaggcctgctgagcaagagcctggagctgcacagaagactggagaccagcatgaagtggtgcgacgagggcatctacctgctggccagccagcccgtggacaagtgccagagccaggacggcgccgaggccgccctgcaggagatcgagaagttcctggagaccggcgccgagaacaagatccaggagctgaacgccatctacaaggagtacgagagcatcctgaaccaggacctgatggagcacgtgagaaaggtgttccagaagcaggccagcatggaggaggtgttccacagaagacaggccagcctgaagaagctggccgccagacagaccagacccgtgcagcccgtggcccccagacccgaggccctggccaagagcccctgccccagccccggcatcagaagaggcagcgagaacagcagcagcgagggcggcgccctgagaagaggcccctacagaagagccaagagcgagatgagcgagagcagacagggcagaggcagcgccggcgaggaggaggagagcctggccatcctgagaagacacgtgatgagcgagctgctggacaccgagagagcctacgtggaggagctgctgtgcgtgctggagggctacgccgccgagatggacaaccccctgatggcccacctgctgagcaccggcctgcacaacaagaaggacgtgctgttcggcaacatggaggagatctaccacttccacaacagaatcttcctgagagagctggagaactacaccgactgccccgagctggtgggcagatgcttcctggagagaatggaggacttccagatctacgagaagtactgccagaacaagcccagaagcgagagcctgtggagacagtgcagcgactgccccttcttccaggagtgccagagaaagctggaccacaagctgagcctggacagctacctgctgaagcccgtgcagagaatcaccaagtaccagctgctgctgaaggagatgctgaagtacagcagaaactgcgagggcgccgaggacctgcaggaggccctgagcagcatcctgggcatcctgaaggccgtgaacgacagcatgcacctgatcgccatcaccggctacgacggcaacctgggcgacctgggcaagctgctgatgcagggcagcttcagcgtgtggaccgaccacaagagaggccacaccaaggtgaaggagctggccagattcaagcccatgcagagacacctgttcctgcacgagaaggccgtgctgttctgcaagaagagagaggagaacggcgagggctacgagaaggcccccagctacagctacaagcagagcctgaacatggccgccgtgggcatcaccgagaacgtgaagggcgacgccaagaagttcgagatctggtacaacgccagagaggaggtgtacatcgtgcaggcccccacccccgagatcaaggccgcctgggtgaacgagatcagaaaggtgctgaccagccagctgcaggcctgcagagaggccagccagcacagagccctggagcagagccagagcctgcccctgcccgcccccaccagcaccagccccagcagaggcaacagcagaaacatcaagaagctggaggagagaaagaccgaccccctgagcctggagggctacgtgagcagcgcccccctgaccaagccccccgagaagggcaaggagccctag

SEQ ID NO: 88170 - DNA, 3390 bp, synthetic construct
  misc_feature 1..3390: note = Description of Artificial Sequence: Synthetic coding sequence
  source 1..3390: mol_type = other DNA
atggccgagaagggcgccagcagaggcaccctgagaagactgtggagcctgcccagaagaagaagaggcaccgccggcagaagcagacccgacgagatcatgcaccaggacatcgtgcccctgtgcgccgccgacatccaggaccagctgaagaagagattcgcctacctgagcggcggcagaggccaggacggcagccccgtgatcaccttccccgactaccccgccttcagcgagatccccgacaaggagttccagaacgtgatgacctacctgaccagcatccccagcctgcaggacgccggcatcggcttcatcctggtgatcgacagaagaagagacaagtggaccagcgtgaaggccagcgtgctgagaatcgccgccagcttccccgccaacctgcagctggtgctggtgctgagacccaccggcttcttccagagaaccctgagcgacatcgccttcaagttcaacagagacgacttcaagatgaaggtgcccgtgatcatgctgagcagcgtgcccgacctgcacggctacatcgacaagagccagctgaccgaggacctgggcggcaccctggactactgccacagcagatggctgtgccagagaaccgccatcgagagcttcgccctgatggtgaagcagaccgcccagatgctgcagagcttcggcaccgagctggccgagaccgagctgcccaacgacgtgcagagcaccagcagcgtgctgtgcgcccacaccgagaagaaggacaaggccaaggaggacctgagactggccctgaaggagggccacagcgtgctggagagcctgagagagctgcaggccgagggcagcgagcccagcgtgaaccaggaccagctggacaaccaggccaccgtgcagagactgctggcccagctgaacgagaccgaggccgccttcgacgagttctgggccaagcaccagcagaagctggagcagtgcctgcagctgagacacttcgagcagggcttcagagaggtgaaggccatcctggacgccgccagccagaagatcgccaccttcaccgacatcggcaacagcctggcccacgtggagcacctgctgagagacctggccagcttcgaggagaagagcggcgtggccgtggagagagccagagccctgagcctggacggcgagcagctgatcggcaacaagcactacgccgtggacagcatcagacccaagtgccaggagctgagacacctgtgcgaccagttcagcgccgagatcgccagaagaagaggcctgctgagcaagagcctggagctgcacagaagactggagaccagcatgaagtggtgcgacgagggcatctacctgctggccagccagcccgtggacaagtgccagagccaggacggcgccgaggccgccctgcaggagatcgagaagttcctggagaccggcgccgagaacaagatccaggagctgaacgccatctacaaggagtacgagagcatcctgaaccaggacctgatggagcacgtgagaaaggtgttccagaagcaggccagcatggaggaggtgttccacagaagacaggccagcctgaagaagctggccgccagacagaccagacccgtgcagcccgtggcccccagacccgaggccctggccaagagcccctgccccagccccggcatcagaagaggcagcgagaacagcagcagcgagggcggcgccctgagaagaggcccctacagaagagccaagagcgagatgagcgagagcagacagggcagaggcagcgccggcgaggaggaggagagcctggccatcctgagaagacacgtgatgagcgagctgctggacaccgagagagcctacgtggaggagctgctgtgcgtgctggagggctacgccgccgagatggacaaccccctgatggcccacctgctgagcaccggcctgcacaacaagaaggacgtgctgttcggcaacatggaggagatctaccacttccacaacagaatcttcctgagagagctggagaactacaccgactgccccgagctggtgggcagatgcttcctggagagaatggaggacttccagatctacgagaagtactgccagaacaagcccagaagcgagagcctgtggagacagtgcagcgactgccccttcttccaggagtgccagagaaagctggaccacaagctgagcctggacagctacctgctgaagcccgtgcagagaatcaccaagtaccagctgctgctgaaggagatgctgaagtacagcagaaactgcgagggcgccgaggacctgcaggaggccctgagcagcatcctgggcatcctgaaggccgtgaacgacagcatgcacctgatcgccatcaccggctacgacggcaacctgggcgacctgggcaagctgctgatgcagggcagcttcagcgtgtggaccgaccacaagagaggccacaccaaggtgaaggagctggccagattcaagcccatgcagagacacctgttcctgcacgagaaggccgtgctgttctgcaagaagagagaggagaacggcgagggctacgagaaggcccccagctacagctacaagcagagcctgaacatggccgccgtgggcatcaccgagaacgtgaagggcgacgccaagaagttcgagatctggtacaacgccagagaggaggtgtacatcgtgcaggcccccacccccgagatcaaggccgcctgggtgaacgagatcagaaaggtgctgaccagccagctgcaggcctgcagagaggccagccagcacagagccctggagcagagccagagcctgcccctgcccgcccccaccagcaccagccccagcagaggcaacagcagaaacatcaagaagctggaggagagaaagaccgaccccctgagcctggagggctacgtgagcagcgcccccctgaccaagccccccgagaagggcaagggctggagcaagaccagccacagcctggaggcccccgaggacgacggcggctggagcagcgccgaggagcagatcaacagcagcgacgccgaggaggacggcggcctgggccccaagaagctggtgcccggcaagtacaccgtggtggccgaccacgagaagggcggccccgacgccctgagagtgagaagcggcgacgtggtggagctggtgcaggagggcgacgagggcctgtggtacgtgagagaccccaccaccggcaaggagggctgggtgcccgccagcagcctgagcgtgagactgggccccagcggcagcgcccagtgcctgagcagcagcgagagcagccccggcagcgccgtgctgagcaacagcagcagctgcagcgagggcggccaggcccccttcagcgacctgcagggctag

SEQ ID NO: 88171 - DNA, 3549 bp, synthetic construct
  misc_feature 1..3549: note = Description of Artificial Sequence: Synthetic coding sequence
  source 1..3549: mol_type = other DNA
atggccagagtggagagccccgtgcccgccgccagagccagcctgaccggcagctgcgtgctgggccaggccatgcccctgagaggcggcgccggccccagccccgccagccacggccccacccacggccccagcgaccccagaacctgcctgcccggcagaggcgccggcggcatgagaccccacggcagaggcgccctgggctgctgcggcctgtgcagcttctacacctgccacggcgccgccggcgacgagatcatgcaccaggacatcgtgcccctgtgcgccgccgacatccaggaccagctgaagaagagattcgcctacctgagcggcggcagaggccaggacggcagccccgtgatcaccttccccgactaccccgccttcagcgagatccccgacaaggagttccagaacgtgatgacctacctgaccagcatccccagcctgcaggacgccggcatcggcttcatcctggtgatcgacagaagaagagacaagtggaccagcgtgaaggccagcgtgctgagaatcgccgccagcttccccgccaacctgcagctggtgctggtgctgagacccaccggcttcttccagagaaccctgagcgacatcgccttcaagttcaacagagacgacttcaagatgaaggtgcccgtgatcatgctgagcagcgtgcccgacctgcacggctacatcgacaagagccagctgaccgaggacctgggcggcaccctggactactgccacagcagatggctgtgccagagaaccgccatcgagagcttcgccctgatggtgaagcagaccgcccagatgctgcagagcttcggcaccgagctggccgagaccgagctgcccaacgacgtgcagagcaccagcagcgtgctgtgcgcccacaccgagaagaaggacaaggccaaggaggacctgagactggccctgaaggagggccacagcgtgctggagagcctgagagagctgcaggccgagggcagcgagcccagcgtgaaccaggaccagctggacaaccaggccaccgtgcagagactgctggcccagctgaacgagaccgaggccgccttcgacgagttctgggccaagcaccagcagaagctggagcagtgcctgcagctgagacacttcgagcagggcttcagagaggtgaaggccatcctggacgccgccagccagaagatcgccaccttcaccgacatcggcaacagcctggcccacgtggagcacctgctgagagacctggccagcttcgaggagaagagcggcgtggccgtggagagagccagagccctgagcctggacggcgagcagctgatcggcaacaagcactacgccgtggacagcatcagacccaagtgccaggagctgagacacctgtgcgaccagttcagcgccgagatcgccagaagaagaggcctgctgagcaagagcctggagctgcacagaagactggagaccagcatgaagtggtgcgacgagggcatctacctgctggccagccagcccgtggacaagtgccagagccaggacggcgccgaggccgccctgcaggagatcgagaagttcctggagaccggcgccgagaacaagatccaggagctgaacgccatctacaaggagtacgagagcatcctgaaccaggacctgatggagcacgtgagaaaggtgttccagaagcaggccagcatggaggaggtgttccacagaagacaggccagcctgaagaagctggccgccagacagaccagacccgtgcagcccgtggcccccagacccgaggccctggccaagagcccctgccccagccccggcatcagaagaggcagcgagaacagcagcagcgagggcggcgccctgagaagaggcccctacagaagagccaagagcgagatgagcgagagcagacagggcagaggcagcgccggcgaggaggaggagagcctggccatcctgagaagacacgtgatgagcgagctgctggacaccgagagagcctacgtggaggagctgctgtgcgtgctggagggctacgccgccgagatggacaaccccctgatggcccacctgctgagcaccggcctgcacaacaagaaggacgtgctgttcggcaacatggaggagatctaccacttccacaacagaatcttcctgagagagctggagaactacaccgactgccccgagctggtgggcagatgcttcctggagagaatggaggacttccagatctacgagaagtactgccagaacaagcccagaagcgagagcctgtggagacagtgcagcgactgccccttcttccaggagtgccagagaaagctggaccacaagctgagcctggacagctacctgctgaagcccgtgcagagaatcaccaagtaccagctgctgctgaaggagatgctgaagtacagcagaaactgcgagggcgccgaggacctgcaggaggccctgagcagcatcctgggcatcctgaaggccgtgaacgacagcatgcacctgatcgccatcaccggctacgacggcaacctgggcgacctgggcaagctgctgatgcagggcagcttcagcgtgtggaccgaccacaagagaggccacaccaaggtgaaggagctggccagattcaagcccatgcagagacacctgttcctgcacgagaaggccgtgctgttctgcaagaagagagaggagaacggcgagggctacgagaaggcccccagctacagctacaagcagagcctgaacatggccgccgtgggcatcaccgagaacgtgaagggcgacgccaagaagttcgagatctggtacaacgccagagaggaggtgtacatcgtgcaggcccccacccccgagatcaaggccgcctgggtgaacgagatcagaaaggtgctgaccagccagctgcaggcctgcagagaggccagccagcacagagccctggagcagagccagagcctgcccctgcccgcccccaccagcaccagccccagcagaggcaacagcagaaacatcaagaagctggaggagagaaagaccgaccccctgagcctggagggctacgtgagcagcgcccccctgaccaagccccccgagaagggcaagggctggagcaagaccagccacagcctggaggcccccgaggacgacggcggctggagcagcgccgaggagcagatcaacagcagcgacgccgaggaggacggcggcctgggccccaagaagctggtgcccggcaagtacaccgtggtggccgaccacgagaagggcggccccgacgccctgagagtgagaagcggcgacgtggtggagctggtgcaggagggcgacgagggcctgtggtacgtgagagaccccaccaccggcaaggagggctgggtgcccgccagcagcctgagcgtgagactgggccccagcggcagcgcccagtgcctgagcagcagcgagagcagccccggcagcgccgtgctgagcaacagcagcagctgcagcgagggcggccaggcccccttcagcgacctgcagggctag

SEQ ID NO: 88172 - DNA, 3414 bp, synthetic construct
  misc_feature 1..3414: note = Description of Artificial Sequence: Synthetic coding sequence
  source 1..3414: mol_type = other DNA
atgttcgactgctggagattcatcctgtgcaagagacccggcagcaacagctacagcagcccccagagacccaacgaggccaagaaggaggagaccgaccaccagatcgacgtgagcgacgtgatcagactggtgcaggacacccccgaggccaccgccatggccaccgacgagatcatgcaccaggacatcgtgcccctgtgcgccgccgacatccaggaccagctgaagaagagattcgcctacctgagcggcggcagaggccaggacggcagccccgtgatcaccttccccgactaccccgccttcagcgagatccccgacaaggagttccagaacgtgatgacctacctgaccagcatccccagcctgcaggacgccggcatcggcttcatcctggtgatcgacagaagaagagacaagtggaccagcgtgaaggccagcgtgctgagaatcgccgccagcttccccgccaacctgcagctggtgctggtgctgagacccaccggcttcttccagagaaccctgagcgacatcgccttcaagttcaacagagacgacttcaagatgaaggtgcccgtgatcatgctgagcagcgtgcccgacctgcacggctacatcgacaagagccagctgaccgaggacctgggcggcaccctggactactgccacagcagatggctgtgccagagaaccgccatcgagagcttcgccctgatggtgaagcagaccgcccagatgctgcagagcttcggcaccgagctggccgagaccgagctgcccaacgacgtgcagagcaccagcagcgtgctgtgcgcccacaccgagaagaaggacaaggccaaggaggacctgagactggccctgaaggagggccacagcgtgctggagagcctgagagagctgcaggccgagggcagcgagcccagcgtgaaccaggaccagctggacaaccaggccaccgtgcagagactgctggcccagctgaacgagaccgaggccgccttcgacgagttctgggccaagcaccagcagaagctggagcagtgcctgcagctgagacacttcgagcagggcttcagagaggtgaaggccatcctggacgccgccagccagaagatcgccaccttcaccgacatcggcaacagcctggcccacgtggagcacctgctgagagacctggccagcttcgaggagaagagcggcgtggccgtggagagagccagagccctgagcctggacggcgagcagctgatcggcaacaagcactacgccgtggacagcatcagacccaagtgccaggagctgagacacctgtgcgaccagttcagcgccgagatcgccagaagaagaggcctgctgagcaagagcctggagctgcacagaagactggagaccagcatgaagtggtgcgacgagggcatctacctgctggccagccagcccgtggacaagtgccagagccaggacggcgccgaggccgccctgcaggagatcgagaagttcctggagaccggcgccgagaacaagatccaggagctgaacgccatctacaaggagtacgagagcatcctgaaccaggacctgatggagcacgtgagaaaggtgttccagaagcaggccagcatggaggaggtgttccacagaagacaggccagcctgaagaagctggccgccagacagaccagacccgtgcagcccgtggcccccagacccgaggccctggccaagagcccctgccccagccccggcatcagaagaggcagcgagaacagcagcagcgagggcggcgccctgagaagaggcccctacagaagagccaagagcgagatgagcgagagcagacagggcagaggcagcgccggcgaggaggaggagagcctggccatcctgagaagacacgtgatgagcgagctgctggacaccgagagagcctacgtggaggagctgctgtgcgtgctggagggctacgccgccgagatggacaaccccctgatggcccacctgctgagcaccggcctgcacaacaagaaggacgtgctgttcggcaacatggaggagatctaccacttccacaacagaatcttcctgagagagctggagaactacaccgactgccccgagctggtgggcagatgcttcctggagagaatggaggacttccagatctacgagaagtactgccagaacaagcccagaagcgagagcctgtggagacagtgcagcgactgccccttcttccaggagtgccagagaaagctggaccacaagctgagcctggacagctacctgctgaagcccgtgcagagaatcaccaagtaccagctgctgctgaaggagatgctgaagtacagcagaaactgcgagggcgccgaggacctgcaggaggccctgagcagcatcctgggcatcctgaaggccgtgaacgacagcatgcacctgatcgccatcaccggctacgacggcaacctgggcgacctgggcaagctgctgatgcagggcagcttcagcgtgtggaccgaccacaagagaggccacaccaaggtgaaggagctggccagattcaagcccatgcagagacacctgttcctgcacgagaaggccgtgctgttctgcaagaagagagaggagaacggcgagggctacgagaaggcccccagctacagctacaagcagagcctgaacatggccgccgtgggcatcaccgagaacgtgaagggcgacgccaagaagttcgagatctggtacaacgccagagaggaggtgtacatcgtgcaggcccccacccccgagatcaaggccgcctgggtgaacgagatcagaaaggtgctgaccagccagctgcaggcctgcagagaggccagccagcacagagccctggagcagagccagagcctgcccctgcccgcccccaccagcaccagccccagcagaggcaacagcagaaacatcaagaagctggaggagagaaagaccgaccccctgagcctggagggctacgtgagcagcgcccccctgaccaagccccccgagaagggcaagggctggagcaagaccagccacagcctggaggcccccgaggacgacggcggctggagcagcgccgaggagcagatcaacagcagcgacgccgaggaggacggcggcctgggccccaagaagctggtgcccggcaagtacaccgtggtggccgaccacgagaagggcggccccgacgccctgagagtgagaagcggcgacgtggtggagctggtgcaggagggcgacgagggcctgtggtacgtgagagaccccaccaccggcaaggagggctgggtgcccgccagcagcctgagcgtgagactgggccccagcggcagcgcccagtgcctgagcagcagcggcaaggcccacgtgcccagagcccacccctag

SEQ ID NO: 88173 - DNA, 2382 bp, synthetic construct
  misc_feature 1..2382: note = Description of Artificial Sequence: Synthetic coding sequence
  source 1..2382: mol_type = other DNA
tgaagccagaagatcgccaccttcaccgacatcggcaacagcctggcccacgtggagcacctgctgagagacctggccagcttcgaggagaagagcggcgtggccgtggagagagccagagccctgagcctggacggcgagcagctgatcggcaacaagcactacgccgtggacagcatcagacccaagtgccaggagctgagacacctgtgcgaccagttcagcgccgagatcgccagaagaagaggcctgctgagcaagagcctggagctgcacagaagactggagaccagcatgaagtggtgcgacgagggcatctacctgctggccagccagcccgtggacaagtgccagagccaggacggcgccgaggccgccctgcaggagatcgagaagttcctggagaccggcgccgagaacaagatccaggagctgaacgccatctacaaggagtacgagagcatcctgaaccaggacctgatggagcacgtgagaaaggtgttccagaagcaggccagcatggaggaggtgttccacagaagacaggccagcctgaagaagctggccgccagacagaccagacccgtgcagcccgtggcccccagacccgaggccctggccaagagcccctgccccagccccggcatcagaagaggcagcgagaacagcagcagcgagggcggcgccctgagaagaggcccctacagaagagccaagagcgagatgagcgagagcagacagggcagaggcagcgccggcgaggaggaggagagcctggccatcctgagaagacacgtgatgagcgagctgctggacaccgagagagcctacgtggaggagctgctgtgcgtgctggagggctacgccgccgagatggacaaccccctgatggcccacctgctgagcaccggcctgcacaacaagaaggacgtgctgttcggcaacatggaggagatctaccacttccacaacagaatcttcctgagagagctggagaactacaccgactgccccgagctggtgggcagatgcttcctggagagaatggaggacttccagatctacgagaagtactgccagaacaagcccagaagcgagagcctgtggagacagtgcagcgactgccccttcttccaggagtgccagagaaagctggaccacaagctgagcctggacagctacctgctgaagcccgtgcagagaatcaccaagtaccagctgctgctgaaggagatgctgaagtacagcagaaactgcgagggcgccgaggacctgcaggaggccctgagcagcatcctgggcatcctgaaggccgtgaacgacagcatgcacctgatcgccatcaccggctacgacggcaacctgggcgacctgggcaagctgctgatgcagggcagcttcagcgtgtggaccgaccacaagagaggccacaccaaggtgaaggagctggccagattcaagcccatgcagagacacctgttcctgcacgagaaggccgtgctgttctgcaagaagagagaggagaacggcgagggctacgagaaggcccccagctacagctacaagcagagcctgaacatggccgccgtgggcatcaccgagaacgtgaagggcgacgccaagaagttcgagatctggtacaacgccagagaggaggtgtacatcgtgcaggcccccacccccgagatcaaggccgcctgggtgaacgagatcagaaaggtgctgaccagccagctgcaggcctgcagagaggccagccagcacagagccctggagcagagccagagcctgcccctgcccgcccccaccagcaccagccccagcagaggcaacagcagaaacatcaagaagctggaggagagaaagaccgaccccctgagcctggagggctacgtgagcagcgcccccctgaccaagccccccgagaagggcaaggccagccccaccagccccgacaagaaggccaagagacacgaggtgaagagcgaccccacccccttcggcgtgagaggctggagcaagaccagccacagcctggaggcccccgaggacgacggcggctggagcagcgccgaggagcagatcaacagcagcgacgccgaggaggacggcggcctgggccccaagaagctggtgcccggcaagtacaccgtggtggccgaccacgagaagggcggccccgacgccctgagagtgagaagcggcgacgtggtggagctggtgcaggagggcgacgagggcctgtggtacgtgagagaccccaccaccggcaaggagggctgggtgcccgccagcagcctgagcgtgagactgggccccagcggcagcgcccagtgcctgagcagcagcggcaaggcccacgtgcccagagcccacccctag

SEQ ID NO: 88174 - DNA, 3291 bp, synthetic construct
  misc_feature 1..3291: note = Description of Artificial Sequence: Synthetic coding sequence
  source 1..3291: mol_type = other DNA
atgcccctgagaggcggcgccggccccagccccgccagccacggccccacccacggccccagcgaccccagaacctgcctgcccggcagaggcgccggcggcatgagaccccacggcagaggcgccctgggctgctgcggcctgtgcagcttctacacctgccacggcgccgccggcgacgagatcatgcaccaggacatcgtgcccctgtgcgccgccgacatccaggaccagctgaagaagagattcgcctacctgagcggcggcagaggccaggacggcagccccgtgatcaccttccccgactaccccgccttcagcgagatccccgacaaggagttccagaacgtgatgacctacctgaccagcatccccagcctgcaggacgccggcatcggcttcatcctggtgatcgacagaagaagagacaagtggaccagcgtgaaggccagcgtgctgagaatcgccgccagcttccccgccaacctgcagctggtgctggtgctgagacccaccggcttcttccagagaaccctgagcgacatcgccttcaagttcaacagagacgacttcaagatgaaggtgcccgtgatcatgctgagcagcgtgcccgacctgcacggctacatcgacaagagccagctgaccgaggacctgggcggcaccctggactactgccacagcagatggctgtgccagagaaccgccatcgagagcttcgccctgatggtgaagcagaccgcccagatgctgcagagcttcggcaccgagctggccgagaccgagctgcccaacgacgtgcagagcaccagcagcgtgctgtgcgcccacaccgagaagaaggacaaggccaaggaggacctgagactggccctgaaggagggccacagcgtgctggagagcctgagagagctgcaggccgagggcagcgagcccagcgtgaaccaggaccagctggacaaccaggccaccgtgcagagactgctggcccagctgaacgagaccgaggccgccttcgacgagttctgggccaagcaccagcagaagctggagcagtgcctgcagctgagacacttcgagcagggcttcagagaggtgaaggccatcctggacgccgccagccagaagatcgccaccttcaccgacatcggcaacagcctggcccacgtggagcacctgctgagagacctggccagcttcgaggagaagagcggcgtggccgtggagagagccagagccctgagcctggacggcgagcagctgatcggcaacaagcactacgccgtggacagcatcagacccaagtgccaggagctgagacacctgtgcgaccagttcagcgccgagatcgccagaagaagaggcctgctgagcaagagcctggagctgcacagaagactggagaccagcatgaagtggtgcgacgagggcatctacctgctggccagccagcccgtggacaagtgccagagccaggacggcgccgaggccgccctgcaggagatcgagaagttcctggagaccggcgccgagaacaagatccaggagctgaacgccatctacaaggagtacgagagcatcctgaaccaggacctgatggagcacgtgagaaaggtgttccagaagcaggccagcatggaggaggtgttccacagaagacaggccagcctgaagaagctggccgccagacagaccagacccgtgcagcccgtggcccccagacccgaggccctggccaagagcccctgccccagccccggcatcagaagaggcagcgagaacagcagcagcgagggcggcgccctgagaagaggcccctacagaagagccaagagcgagatgagcgagagcagacagggcagaggcagcgccggcgaggaggaggagagcctggccatcctgagaagacacgtgatgagcgagctgctggacaccgagagagcctacgtggaggagctgctgtgcgtgctggagggctacgccgccgagatggacaaccccctgatggcccacctgctgagcaccggcctgcacaacaagaaggacgtgctgttcggcaacatggaggagatctaccacttccacaacagaatcttcctgagagagctggagaactacaccgactgccccgagctggtgggcagatgcttcctggagagaatggaggacttccagatctacgagaagtactgccagaacaagcccagaagcgagagcctgtggagacagtgcagcgactgccccttcttccaggagtgccagagaaagctggaccacaagctgagcctggacagctacctgctgaagcccgtgcagagaatcaccaagtaccagctgctgctgaaggagatgctgaagtacagcagaaactgcgagggcgccgaggacctgcaggaggccctgagcagcatcctgggcatcctgaaggccgtgaacgacagcatgcacctgatcgccatcaccggctacgacggcaacctgggcgacctgggcaagctgctgatgcagggcagcttcagcgtgtggaccgaccacaagagaggccacaccaaggtgaaggagctggccagattcaagcccatgcagagacacctgttcctgcacgagaaggccgtgctgttctgcaagaagagagaggagaacggcgagggctacgagaaggcccccagctacagctacaagcagagcctgaacatggccgccgtgggcatcaccgagaacgtgaagggcgacgccaagaagttcgagatctggtacaacgccagagaggaggtgtacatcgtgcaggcccccacccccgagatcaaggccgcctgggtgaacgagatcagaaaggtgctgaccagccagctgcaggcctgcagagaggccagccagcacagagccctggagcagagccagagcctgcccctgcccgcccccaccagcaccagccccagcagaggcaacagcagaaacatcaagaagctggaggagagaaagaccgaccccctgagcctggagggctacgtgagcagcgcccccctgaccaagccccccgagaagggcaagggctggagcaagaccagccacagcctggaggcccccgaggacgacggcggctggagcagcgccgaggagcagatcaacagcagcgacgccgaggaggacggcggcctgggccccaagaagctggtgcccggcaagtacaccgtggtggccgaccacgagaagggcggccccgacgccctgagagtgagaagcggcgacgtggtggagctggtgcaggagggcgacgagggcctgtggtag

SEQ ID NO: 88175 - DNA, 411 bp, synthetic construct
  misc_feature 1..411: note = Description of Artificial Sequence: Synthetic coding sequence
  source 1..411: mol_type = other DNA
atgcaccaggacatcgtgcccctgtgcgccgccgacatccaggaccagctgaagaagagattcgcctacctgagcggcggcagaggccaggacggcagccccgtgatcaccttccccgactaccccgccttcagcgagatccccgacaaggagttccagaacgtgatgacctacctgaccagcatccccagcctgcaggacgccggcatcggcttcatcctggtgatcgacagaagaagagacaagtggaccagcgtgaaggccagcgtgctgagaatcgccgccagcttccccgccaacctgcagctggtgctggtgctgagacccaccggcttcttccagagaaccctgagcgacatcgccttcaagttcaacagagacgacttcaagatgaaggtgcccgtgatctag

SEQ ID NO: 88176 - DNA, 3372 bp, synthetic construct
  misc_feature 1..3372: note = Description of Artificial Sequence: Synthetic coding sequence
  source 1..3372: mol_type = other DNA
atgaccgtgagaagactgagcctgctgtgcagagacctgtgggccctgtggctgctgctgaaggccggcgccgacgagatcatgcaccaggacatcgtgcccctgtgcgccgccgacatccaggaccagctgaagaagagattcgcctacctgagcggcggcagaggccaggacggcagccccgtgatcaccttccccgactaccccgccttcagcgagatccccgacaaggagttccagaacgtgatgacctacctgaccagcatccccagcctgcaggacgccggcatcggcttcatcctggtgatcgacagaagaagagacaagtggaccagcgtgaaggccagcgtgctgagaatcgccgccagcttccccgccaacctgcagctggtgctggtgctgagacccaccggcttcttccagagaaccctgagcgacatcgccttcaagttcaacagagacgacttcaagatgaaggtgcccgtgatcatgctgagcagcgtgcccgacctgcacggctacatcgacaagagccagctgaccgaggacctgggcggcaccctggactactgccacagcagatggctgtgccagagaaccgccatcgagagcttcgccctgatggtgaagcagaccgcccagatgctgcagagcttcggcaccgagctggccgagaccgagctgcccaacgacgtgcagagcaccagcagcgtgctgtgcgcccacaccgagaagaaggacaaggccaaggaggacctgagactggccctgaaggagggccacagcgtgctggagagcctgagagagctgcaggccgagggcagcgagcccagcgtgaaccaggaccagctggacaaccaggccaccgtgcagagactgctggcccagctgaacgagaccgaggccgccttcgacgagttctgggccaagcaccagcagaagctggagcagtgcctgcagctgagacacttcgagcagggcttcagagaggtgaaggccatcctggacgccgccagccagaagatcgccaccttcaccgacatcggcaacagcctggcccacgtggagcacctgctgagagacctggccagcttcgaggagaagagcggcgtggccgtggagagagccagagccctgagcctggacggcgagcagctgatcggcaacaagcactacgccgtggacagcatcagacccaagtgccaggagctgagacacctgtgcgaccagttcagcgccgagatcgccagaagaagaggcctgctgagcaagagcctggagctgcacagaagactggagaccagcatgaagtggtgcgacgagggcatctacctgctggccagccagcccgtggacaagtgccagagccaggacggcgccgaggccgccctgcaggagatcgagaagttcctggagaccggcgccgagaacaagatccaggagctgaacgccatctacaaggagtacgagagcatcctgaaccaggacctgatggagcacgtgagaaaggtgttccagaagcaggccagcatggaggaggtgttccacagaagacaggccagcctgaagaagctggccgccagacagaccagacccgtgcagcccgtggcccccagacccgaggccctggccaagagcccctgccccagccccggcatcagaagaggcagcgagaacagcagcagcgagggcggcgccctgagaagaggcccctacagaagagccaagagcgagatgagcgagagcagacagggcagaggcagcgccggcgaggaggaggagagcctggccatcctgagaagacacgtgatgagcgagctgctggacaccgagagagcctacgtggaggagctgctgtgcgtgctggagggctacgccgccgagatggacaaccccctgatggcccacctgctgagcaccggcctgcacaacaagaaggacgtgctgttcggcaacatggaggagatctaccacttccacaacagaatcttcctgagagagctggagaactacaccgactgccccgagctggtgggcagatgcttcctggagagaatggaggacttccagatctacgagaagtactgccagaacaagcccagaagcgagagcctgtggagacagtgcagcgactgccccttcttccaggagtgccagagaaagctggaccacaagctgagcctggacagctacctgctgaagcccgtgcagagaatcaccaagtaccagctgctgctgaaggagatgctgaagtacagcagaaactgcgagggcgccgaggacctgcaggaggccctgagcagcatcctgggcatcctgaaggccgtgaacgacagcatgcacctgatcgccatcaccggctacgacggcaacctgggcgacctgggcaagctgctgatgcagggcagcttcagcgtgtggaccgaccacaagagaggccacaccaaggtgaaggagctggccagattcaagcccatgcagagacacctgttcctgcacgagaaggccgtgctgttctgcaagaagagagaggagaacggcgagggctacgagaaggcccccagctacagctacaagcagagcctgaacatggccgccgtgggcatcaccgagaacgtgaagggcgacgccaagaagttcgagatctggtacaacgccagagaggaggtgtacatcgtgcaggcccccacccccgagatcaaggccgcctgggtgaacgagatcagaaaggtgctgaccagccagctgcaggcctgcagagaggccagccagcacagagccctggagcagagccagagcctgcccctgcccgcccccaccagcaccagccccagcagaggcaacagcagaaacatcaagaagctggaggagagaaagaccgaccccctgagcctggagggctacgtgagcagcgcccccctgaccaagccccccgagaagggcaagggctggagcaagaccagccacagcctggaggcccccgaggacgacggcggctggagcagcgccgaggagcagatcaacagcagcgacgccgaggaggacggcggcctgggccccaagaagctggtgcccggcaagtacaccgtggtggccgaccacgagaagggcggccccgacgccctgagagtgagaagcggcgacgtggtggagctggtgcaggagggcgacgagggcctgtggtacgtgagagaccccaccaccggcaaggagggctgggtgcccgccagcagcctgagcgtgagactgggccccagcggcagcgcccagtgcctgagcagcagcgagagcagccccggcagcgccgtgctgagcaacagcagcagctgcagcgagggcggccaggcccccttcagcgacctgcagggctag

SEQ ID NO: 88177 - DNA, 741 bp, synthetic construct
  misc_feature 1..741: note = Description of Artificial Sequence: Synthetic coding sequence
  source 1..741: mol_type = other DNA
atgagattctggctgagaaccgaggagatggccctggaggagatggtgcagagactgaacgccgtgagcaagcacaccgacgagatcatgcaccaggacatcgtgcccctgtgcgccgccgacatccaggaccagctgaagaagagattcgcctacctgagcggcggcagaggccaggacggcagccccgtgatcaccttccccgactaccccgccttcagcgagatccccgacaaggagttccagaacgtgatgacctacctgaccagcatccccagcctgcaggacgccggcatcggcttcatcctggtgatcgacagaagaagagacaagtggaccagcgtgaaggccagcgtgctgagaatcgccgccagcttccccgccaacctgcagctggtgctggtgctgagacccaccggcttcttccagagaaccctgagcgacatcgccttcaagttcaacagagacgacttcaagatgaaggtgcccgtgatcatgctgagcagcgtgcccgacctgcacggctacatcgacaagagccagctgaccgaggacctgggcggcaccctggactactgccacagcagatggctgtgccagagaaccgccatcgagagcttcgccctgatggtgaagcagaccgcccagatgctgcagagcttcggcaccgagctggccgagaccgagctgcccaacgacgtgcagagcaccagcagcgtgctgtgcgcccacaccgagtag

SEQ ID NO: 88178 - DNA, 3342 bp, synthetic construct
  misc_feature 1..3342: note = Description of Artificial Sequence: Synthetic coding sequence
  source 1..3342: mol_type = other DNA
atgggcgacggcaaggccgtgagaatcagcgtggccgagatgaagagctactacctgtacagcgagtggtgcagctggctgctgagcgtggccgaggacgagatcatgcaccaggacatcgtgcccctgtgcgccgccgacatccaggaccagctgaagaagagattcgcctacctgagcggcggcagaggccaggacggcagccccgtgatcaccttccccgactaccccgccttcagcgagatccccgacaaggagttccagaacgtgatgacctacctgaccagcatccccagcctgcaggacgccggcatcggcttcatcctggtgatcgacagaagaagagacaagtggaccagcgtgaaggccagcgtgctgagaatcgccgccagcttccccgccaacctgcagctggtgctggtgctgagacccaccggcttcttccagagaaccctgagcgacatcgccttcaagttcaacagagacgacttcaagatgaaggtgcccgtgatcatgctgagcagcgtgcccgacctgcacggctacatcgacaagagccagctgaccgaggacctgggcggcaccctggactactgccacagcagatggctgtgccagagaaccgccatcgagagcttcgccctgatggtgaagcagaccgcccagatgctgcagagcttcggcaccgagctggccgagaccgagctgcccaacgacgtgcagagcaccagcagcgtgctgtgcgcccacaccgagaagaaggacaaggccaaggaggacctgagactggccctgaaggagggccacagcgtgctggagagcctgagagagctgcaggccgagggcagcgagcccagcgtgaaccaggaccagctggacaaccaggccaccgtgcagagactgctggcccagctgaacgagaccgaggccgccttcgacgagttctgggccaagcaccagcagaagctggagcagtgcctgcagctgagacacttcgagcagggcttcagagaggtgaaggccatcctggacgccgccagccagaagatcgccaccttcaccgacatcggcaacagcctggcccacgtggagcacctgctgagagacctggccagcttcgaggagaagagcggcgtggccgtggagagagccagagccctgagcctggacggcgagcagctgatcggcaacaagcactacgccgtggacagcatcagacccaagtgccaggagctgagacacctgtgcgaccagttcagcgccgagatcgccagaagaagaggcctgctgagcaagagcctggagctgcacagaagactggagaccagcatgaagtggtgcgacgagggcatctacctgctggccagccagcccgtggacaagtgccagagccaggacggcgccgaggccgccctgcaggagatcgagaagttcctggagaccggcgccgagaacaagatccaggagctgaacgccatctacaaggagtacgagagcatcctgaaccaggacctgatggagcacgtgagaaaggtgttccagaagcaggccagcatggaggaggtgttccacagaagacaggccagcctgaagaagctggccgccagacagaccagacccgtgcagcccgtggcccccagacccgaggccctggccaagagcccctgccccagccccggcatcagaagaggcagcgagaacagcagcagcgagggcggcgccctgagaagaggcccctacagaagagccaagagcgagatgagcgagagcagacagggcagaggcagcgccggcgaggaggaggagagcctggccatcctgagaagacacgtgatgagcgagctgctggacaccgagagagcctacgtggaggagctgctgtgcgtgctggagggctacgccgccgagatggacaaccccctgatggcccacctgctgagcaccggcctgcacaacaagaaggacgtgctgttcggcaacatggaggagatctaccacttccacaacagaatcttcctgagagagctggagaactacaccgactgccccgagctggtgggcagatgcttcctggagagaatggaggacttccagatctacgagaagtactgccagaacaagcccagaagcgagagcctgtggagacagtgcagcgactgccccttcttccaggagtgccagagaaagctggaccacaagctgagcctggacagctacctgctgaagcccgtgcagagaatcaccaagtaccagctgctgctgaaggagatgctgaagtacagcagaaactgcgagggcgccgaggacctgcaggaggccctgagcagcatcctgggcatcctgaaggccgtgaacgacagcatgcacctgatcgccatcaccggctacgacggcaacctgggcgacctgggcaagctgctgatgcagggcagcttcagcgtgtggaccgaccacaagagaggccacaccaaggtgaaggagctggccagattcaagcccatgcagagacacctgttcctgcacgagaaggccgtgctgttctgcaagaagagagaggagaacggcgagggctacgagaaggcccccagctacagctacaagcagagcctgaacatggccgccgtgggcatcaccgagaacgtgaagggcgacgccaagaagttcgagatctggtacaacgccagagaggaggtgtacatcgtgcaggcccccacccccgagatcaaggccgcctgggtgaacgagatcagaaaggtgctgaccagccagctgcaggcctgcagagaggccagccagcacagagccctggagcagagccagagcctgcccctgcccgcccccaccagcaccagccccagcagaggcaacagcagaaacatcaagaagctggaggagagaaagaccgaccccctgagcctggagggctacgtgagcagcgcccccctgaccaagccccccgagaagggcaagggctggagcaagaccagccacagcctggaggcccccgaggacgacggcggctggagcagcgccgaggagcagatcaacagcagcgacgccgaggaggacggcggcctgggccccaagaagctggtgcccggcaagtacaccgtggtggccgaccacgagaagggcggccccgacgccctgagagtgagaagcggcgacgtggtggagctggtgcaggagggcgacgagggcctgtggtacgtgagagaccccaccaccggcaaggagggctgggtgcccgccagcagcctgagcgtgagactgggccccagcggcagcgcccagtgcctgagcagcagcggcaaggcccacgtgcccagagcccacccctag

SEQ ID NO: 88179 - DNA, 2712 bp, synthetic construct
  misc_feature 1..2712: note = Description of Artificial Sequence: Synthetic coding sequence
  source 1..2712: mol_type = other DNA
ctgaagatgcccgtgatcatgctgagcagcgtgcccgacctgcacggctacatcgacaagagccagctgaccgaggacctgggcggcaccctggactactgccacagcagatggctgtgccagagaaccgccatcgagagcttcgccctgatggtgaagcagaccgcccagatgctgcagagcttcggcaccgagctggccgagaccgagctgcccaacgacgtgcagagcaccagcagcgtgctgtgcgcccacaccgagaagaaggacaaggccaaggaggacctgagactggccctgaaggagggccacagcgtgctggagagcctgagagagctgcaggccgagggcagcgagcccagcgtgaaccaggaccagctggacaaccaggccaccgtgcagagactgctggcccagctgaacgagaccgaggccgccttcgacgagttctgggccaagcaccagcagaagctggagcagtgcctgcagctgagacacttcgagcagggcttcagagaggtgaaggccatcctggacgccgccagccagaagatcgccaccttcaccgacatcggcaacagcctggcccacgtggagcacctgctgagagacctggccagcttcgaggagaagagcggcgtggccgtggagagagccagagccctgagcctggacggcgagcagctgatcggcaacaagcactacgccgtggacagcatcagacccaagtgccaggagctgagacacctgtgcgaccagttcagcgccgagatcgccagaagaagaggcctgctgagcaagagcctggagctgcacagaagactggagaccagcatgaagtggtgcgacgagggcatctacctgctggccagccagcccgtggacaagtgccagagccaggacggcgccgaggccgccctgcaggagatcgagaagttcctggagaccggcgccgagaacaagatccaggagctgaacgccatctacaaggagtacgagagcatcctgaaccaggacctgatggagcacgtgagaaaggtgttccagaagcaggccagcatggaggaggtgttccacagaagacaggccagcctgaagaagctggccgccagacagaccagacccgtgcagcccgtggcccccagacccgaggccctggccaagagcccctgccccagccccggcatcagaagaggcagcgagaacagcagcagcgagggcggcgccctgagaagaggcccctacagaagagccaagagcgagatgagcgagagcagacagggcagaggcagcgccggcgaggaggaggagagcctggccatcctgagaagacacgtgatgagcgagctgctggacaccgagagagcctacgtggaggagctgctgtgcgtgctggagggctacgccgccgagatggacaaccccctgatggcccacctgctgagcaccggcctgcacaacaagaaggacgtgctgttcggcaacatggaggagatctaccacttccacaacagaatcttcctgagagagctggagaactacaccgactgccccgagctggtgggcagatgcttcctggagagaatggaggacttccagatctacgagaagtactgccagaacaagcccagaagcgagagcctgtggagacagtgcagcgactgccccttcttccaggagtgccagagaaagctggaccacaagctgagcctggacagctacctgctgaagcccgtgcagagaatcaccaagtaccagctgctgctgaaggagatgctgaagtacagcagaaactgcgagggcgccgaggacctgcaggaggccctgagcagcatcctgggcatcctgaaggccgtgaacgacagcatgcacctgatcgccatcaccggctacgacggcaacctgggcgacctgggcaagctgctgatgcagggcagcttcagcgtgtggaccgaccacaagagaggccacaccaaggtgaaggagctggccagattcaagcccatgcagagacacctgttcctgcacgagaaggccgtgctgttctgcaagaagagagaggagaacggcgagggctacgagaaggcccccagctacagctacaagcagagcctgaacatggccgccgtgggcatcaccgagaacgtgaagggcgacgccaagaagttcgagatctggtacaacgccagagaggaggtgtacatcgtgcaggcccccacccccgagatcaaggccgcctgggtgaacgagatcagaaaggtgctgaccagccagctgcaggcctgcagagaggccagccagcacagagccctggagcagagccagagcctgcccctgcccgcccccaccagcaccagccccagcagaggcaacagcagaaacatcaagaagctggaggagagaaagaccgaccccctgagcctggagggctacgtgagcagcgcccccctgaccaagccccccgagaagggcaagggctggagcaagaccagccacagcctggaggcccccgaggacgacggcggctggagcagcgccgaggagcagatcaacagcagcgacgccgaggaggacggcggcctgggccccaagaagctggtgcccggcaagtacaccgtggtggccgaccacgagaagggcggccccgacgccctgagagtgagaagcggcgacgtggtggagctggtgcaggagggcgacgagggcctgtag

SEQ ID NO: 88180 - DNA, 3414 bp, synthetic construct; identical to SEQ ID NO: 88172
  misc_feature 1..3414: note = Description of Artificial Sequence: Synthetic coding sequence
  source 1..3414: mol_type = other DNA

SEQ ID NO: 88181 - DNA, 3378 bp, synthetic construct
  misc_feature 1..3378: note = Description of Artificial Sequence: Synthetic coding sequence
  source 1..3378: mol_type = other DNA
atgagattctggctgagaaccgaggagatggccctggaggagatggtgcagagactgaacgccgtgagcaagcacaccgacgagatcatgcaccaggacatcgtgcccctgtgcgccgccgacatccaggaccagctgaagaagagattcgcctacctgagcggcggcagaggccaggacggcagccccgtgatcaccttccccgactaccccgccttcagcgagatccccgacaaggagttccagaacgtgatgacctacctgaccagcatccccagcctgcaggacgccggcatcggcttcatcctggtgatcgacagaagaagagacaagtggaccagcgtgaaggccagcgtgctgagaatcgccgccagcttccccgccaacctgcagctggtgctggtgctgagacccaccggcttcttccagagaaccctgagcgacatcgccttcaagttcaacagagacgacttcaagatgaaggtgcccgtgatcatgctgagcagcgtgcccgacctgcacggctacatcgacaagagccagctgaccgaggacctgggcggcaccctggactactgccacagcagatggctgtgccagagaaccgccatcgagagcttcgccctgatggtgaagcagaccgcccagatgctgcagagcttcggcaccgagctggccgagaccgagctgcccaacgacgtgcagagcaccagcagcgtgctgtgcgcccacaccgagaagaaggacaaggccaaggaggacctgagactggccctgaaggagggccacagcgtgctggagagcctgagagagctgcaggccgagggcagcgagcccagcgtgaaccaggaccagctggacaaccaggccaccgtgcagagactgctggcccagctgaacgagaccgaggccgccttcgacgagttctgggccaagcaccagcagaagctggagcagtgcctgcagctgagacacttcgagcagggcttcagagaggtgaaggccatcctggacgccgccagccagaagatcgccaccttcaccgacatcggcaacagcctggcccacgtggagcacctgctgagagacctggccagcttcgaggagaagagcggcgtggccgtggagagagccagagccctgagcctggacggcgagcagctgatcggcaacaagcactacgccgtggacagcatcagacccaagtgccaggagctgagacacctgtgcgaccagttcagcgccgagatcgccagaagaagaggcctgctgagcaagagcctggagctgcacagaagactggagaccagcatgaagtggtgcgacgagggcatctacctgctggccagccagcccgtggacaagtgccagagccaggacggcgccgaggccgccctgcaggagatcgagaagttcctggagaccggcgccgagaacaagatccaggagctgaacgccatctacaaggagtacgagagcatcctgaaccaggacctgatggagcacgtgagaaaggtgttccagaagcaggccagcatggaggaggtgttccacagaagacaggccagcctgaagaagctggccgccagacagaccagacccgtgcagcccgtggcccccagacccgaggccctggccaagagcccctgccccagccccggcatcagaagaggcagcgagaacagcagcagcgagggcggcgccctgagaagaggcccctacagaagagccaagagcgagatgagcgagagcagacagggcagaggcagcgccggcgaggaggaggagagcctggccatcctgagaagacacgtgatgagcgagctgctggacaccgagagagcctacgtggaggagctgctgtgcgtgctggagggctacgccgccgagatggacaaccccctgatggcccacctgctgagcaccggcctgcacaacaagaaggacgtgctgttcggcaacatggaggagatctaccacttccacaacagaatcttcctgagagagctggagaactacaccgactgccccgagctggtgggcagatgcttcctggagagaatggaggacttccagatctacgagaagtactgccagaacaagcccagaagcgagagcctgtggagacagtgcagcgactgccccttcttccaggagtgccagagaaagctggaccacaagctgagcctggacagctacctgctgaagcccgtgcagagaatcaccaagtaccagctgctgctgaaggagatgctgaagtacagcagaaactgcgagggcgccgaggacctgcaggaggccctgagcagcatcctgggcatcctgaaggccgtgaacgacagcatgcacctgatcgccatcaccggctacgacggcaacctgggcgacctgggcaagctgctgatgcagggcagcttcagcgtgtggaccgaccacaagagaggccacaccaaggtgaaggagctggccagattcaagcccatgcagagacacctgttcctgcacgagaaggccgtgctgttctgcaagaagagagaggagaacggcgagggctacgagaaggcccccagctacagctacaagcagagcctgaacatggccgccgtgggcatcaccgagaacgtgaagggcgacgccaagaagttcgagatctggtacaacgccagagaggaggtgtacatcgtgcaggcccccacccccgagatcaaggccgcctgggtgaacgagatcagaaaggtgctgaccagccagctgcaggcctgcagagaggccagccagcacagagccctggagcagagccagagcctgcccctgcccgcccccaccagcaccagccccagcagaggcaacagcagaaacatcaagaagctggaggagagaaagaccgaccccctgagcctggagggctacgtgagcagcgcccccctgaccaagccccccgagaagggcaagggctggagcaagaccagccacagcctggaggcccccgaggacgacggcggctggagcagcgccgaggagcagatcaacagcagcgacgccgaggaggacggcggcctgggccccaagaagctggtgcccggcaagtacaccgtggtggccgaccacgagaagggcggccccgacgccctgagagtgagaagcggcgacgtggtggagctggtgcaggagggcgacgagggcctgtggtacgtgagagaccccaccaccggcaaggagggctgggtgcccgccagcagcctgagcgtgagactgggccccagcggcagcgcccagtgcctgagcagcagcgagagcagccccggcagcgccgtgctgagcaacagcagcagctgcagcgagggcggccaggcccccttcagcgacctgcagggctag

SEQ ID NO: 88182 - DNA, 1713 bp, synthetic construct
  misc_feature 1..1713: note = Description of Artificial Sequence: Synthetic coding sequence
  source 1..1713: mol_type = other DNA
atgagcagactggaggccaagaagcccagcctgtgcaagagcgagcccctgaccaccgagagagtgagaaccaccctgagcgtgctgaagagaatcgtgaccagctgctacggccccagcggcagactgaagcagctgcacaacggcttcggcggctacgtgtgcaccaccagccagagcagcgccctgctgagccacctgctggtgacccaccccatcctgaagatcctgaccgccagcatccagaaccacgtgagcagcttcagcgactgcggcctgttcaccgccatcctgtgctgcaacctgatcgagaacgtgcagagactgggcctgacccccaccaccgtgatcagactgaacaagcacctgctgagcctgtgcatcagctacctgaagagcgagacctgcggctgcagaatccccgtggacttcagcagcacccagatcctgctgtgcctggtgagaagcatcctgaccagcaagcccgcctgcatgctgaccagaaaggagaccgagcacgtgagcgccctgatcctgagagccttcctgctgaccatccccgagaacgccgagggccacatcatcctgggcaagagcctgatcgtgcccctgaagggccagagagtgatcgacagcaccgtgctgcccggcatcctgatcgagatgagcgaggtgcagctgatgagactgctgcccatcaagaagagcaccgccctgaaggtggccctgttctgcaccaccctgagcggcgacaccagcgacaccggcgagggcaccgtggtggtgagctacggcgtgagcctggagaacgccgtgctggaccagctgctgaacctgggcagacagctgatcagcgaccacgtggacctggtgctgtgccagaaggtgatccaccccagcctgaagcagttcctgaacatgcacagaatcatcgccatcgacagaatcggcgtgaccctgatggagcccctgaccaagatgaccggcacccagcccatcggcagcctgggcagcatctgccccaacagctacggcagcgtgaaggacgtgtgcaccgccaagttcggcagcaagcacttcttccacctgatccccaacgaggccaccatctgcagcctgctgctgtgcaacagaaacgacaccgcctgggacgagctgaagctgacctgccagaccgccctgcacgtgctgcagctgaccctgaaggagccctgggccctgctgggcggcggctgcaccgagacccacctggccgcctacatcagacacaagacccacaacgaccccgagagcatcctgaaggacgacgagtgcacccagaccgagctgcagctgatcgccgaggccttctgcagcgccctggagagcgtggtgggcagcctggagcacgacggcggcgagatcctgaccgacatgaagtacggccacctgtggagcgtgcaggccgacagcccctgcgtggccaactggcccgacctgctgagccagtgcggctgcggcctgtacaacagccaggaggagctgaactggagcttcctgagaagcaccagaagacccttcgtgccccagagctgcctgccccacgaggccgtgggcagcgccagcaacctgaccctggactgcctgaccgccaagctgagcggcctgcaggtggccgtggagaccgccaacctgatcctggacctgagctacgtgatcgaggacaagaactag

SEQ ID NO: 88183 - DNA, 1713 bp, synthetic construct; identical to SEQ ID NO: 88182
  misc_feature 1..1713: note = Description of Artificial Sequence: Synthetic coding sequence
  source 1..1713: mol_type = other DNA

SEQ ID NO: 88184 - DNA, 2145 bp, synthetic construct
  misc_feature 1..2145: note = Description of Artificial Sequence: Synthetic coding sequence
  source 1..2145: mol_type = other DNA
atgcccgtgagattcaagggcctgagcgagtaccagagaaacttcctgtggaagaagagctacctgagcgagagctgcaacagcagcgtgggcagaaagtacccctgggccggcctgagaagcgaccagctgggcatcaccaaggagcccagcttcatcagcaagagaagagtgccctaccacgacccccagatcagcaagagcctggagtggaacggcgccatcagcgagagcaacgtggtggccagccccgagcccgaggcccccgagacccccaagagccaggaggccgagcagaaggacgtgacccaggagagagtgcacagcctggaggccagcagagtgcccaagagaaccagaagccacagcgccgacagcagagccgagggcgccagcgacgtggagaacaacgagggcgtgaccaaccacacccccgtgaacgagaacgtggagctggagcacagcaccaaggtgctgagcgagaacgtggacaacggcctggacagactgctgagaaagaaggccggcctgaccgtggtgcccagctacaacgccctgagaaacagcgagtaccagagacagttcgtgtggaagaccagcaaggagaccgcccccgccttcgccgccaaccaggtgttccacaacaagagccagttcgtgccccccttcaagggcaacagcgtgatccacgagaccgagtacaagagaaacttcaagggcctgagccccgtgaaggagcccaagctgagaaacgacctgagagagaacagaaacctggagaccgtgagccccgagagaaagagcaacaagatcgacgacagactgaagctggaggccgagatggagctgaaggacctgcaccagcccaagagaaagctgaccccctggaagcaccagagactgggcaaggtgaacagcgagtacagagccaagttcctgagccccgcccagtacctgtacaaggccggcgcctggacccacgtgaagggcaacatgcccaaccaggtgaaggagctgagagagaaggccgagttctacagaaagagagtgcagggcacccacttcagcagagaccacctgaaccagatcctgagcgacagcaactgctgctgggacgtgagcagcaccaccagcagcgagggcaccgtgagcagcaacatcagagccctggacctggccggcgaccccaccagccacaagaccctgcagaagtgccccagcaccgagcccgaggagaagggcaacatcgtggaggagcagccccagaagaacaccaccgagaagctgggcgtgagcgcccccaccatccccgtgagaagaagactggcctgggacaccgagaacaccagcgaggacgtgcagaagcagcccggcgagaaggaggaggaggacgacaacgaggaggagggcgacagaaagaccggcaagcaggccttcatgggcgagcaggagaagctggacgtgagagagaagagcaaggccgacaagatgaaggagggcagcgacagcagcgtgagcagcgagaagggcggcagactgcccacccccaagctgagagagctgggcggcatccagagaacccaccacgacctgaccacccccgccgtgggcggcgccgtgctggtgagccccagcaagatgaagccccccgcccccgagcagagaaagagaatgaccagccaggactgcctggagaccagcaagaacgacttcaccaagaaggagagcagagccgtgagcctgctgaccagccccgccgccggcatcaagaccgtggaccccctgcccctgagagaggacagcgaggacaacatccacaagttcgccgaggccaccctgcccgtgagcaagatccccaagtaccccaccaacccccccggccagctgcccagccccccccacgtgcccagctactggcaccccagcagaagaatccagggcagcctgagagaccccgagttccagcacaacgtgggcaaggccagaatgaacaacctgcagctgccccagcacgaggccttcaacgacgaggacgaggacagactgagcgagatcagcgccagaagcgccgccagcagcctgagagccttccagaccctggccagagccaagaagagaaaggagaacttctggggcaagacctag

SEQ ID NO: 88185 - DNA, 210 bp, synthetic construct
  misc_feature 1..210: note = Description of Artificial Sequence: Synthetic coding sequence
  source 1..210: mol_type = other DNA
atgcccgtgagattcaagggcctgagcgagtaccagagaaacttcctgtggaagaagagctacctgagcgagagctgcaacagcagcgtgggcagaaagtacccctgggccggcctgagaagcgaccagctgggcaaccagggcagatgcagaaccaagatccagcacagcgacatcagcagcctgctgatcctggtgtgcagcacctag

SEQ ID NO: 88186 - DNA, 669 bp, synthetic construct
  misc_feature 1..669: note = Description of Artificial Sequence: Synthetic coding sequence
  source 1..669: mol_type = other DNA
atgcccgtgagattcaagggcctgagcgagtaccagagaaacttcctgtggaagaagagctacctgagcgagagctgcaacagcagcgtgggcagaaagtacccctgggccggcctgagaagcgaccagctgggcatcaccaaggagcccagcttcatcagcaagagaagagtgccctaccacgacccccagatcagcaagagcctggagtggaacggcgccatcagcgagagcaacgtggtggccagccccgagcccgaggcccccgagacccccaagagccaggaggccgagcagaaggacgtgacccaggagagagtgcacagcctggaggccagcagagtgcccaagagaaccagaagccacagcgccgacagcagagccgagggcgccagcgacgtggagaacaacgagggcgtgaccaaccacacccccgtgaacgagaacgtggagctggagcacagcaccaaggtgctgagcgagaacgtggacaacggcgtgggcatcttcaccgccttcctgttcaagagcatcgagttcttcatcggcttcatcgtgatcagcgtgatcctgcacttcgtgttccagaacttccccctgctgttcagctgcctgatgagcatcagaatcgtggacaacagactgctgaccctggtgatcgtgaactag

SEQ ID NO: 88187 - DNA, 2040 bp, synthetic construct
  misc_feature 1..2040: note = Description of Artificial Sequence: Synthetic coding sequence
  source 1..2040: mol_type = other DNA
atgcccgtgagattcaagggcctgagcgagtaccagagaaacttcctgtggaagaagagctacctgagcgagagctgcaacagcagcgtgggcagaaagtacccctgggccggcctgagaagcgaccagctgggcatcaccaaggagcccagcttcatcagcaagagaagagtgccctaccacgacccccagatcagcaagagcctggagtggaacggcgccatcagcgagagcaacgtggtggccagccccgagcccgaggcccccgagacccccaagagccaggaggccgagcagaaggacgtgacccaggagagagtgcacagcctggaggccagcagagtgcccaagagaaccagaagccacagcgccgacagcagagccgagggcgccagcgacgtggagaacaacgagggcgtgaccaaccacacccccgtgaacgagaacgtggagctggagcacagcaccaaggtgctgagcgagaacgtggacaacggcgtgttccacaacaagagccagttcgtgccccccttcaagggcaacagcgtgatccacgagaccgagtacaagagaaacttcaagggcctgagccccgtgaaggagcccaagctgagaaacgacctgagagagaacagaaacctggagaccgtgagccccgagagaaagagcaacaagatcgacgacagactgaagctggaggccgagatggagctgaaggacctgcaccagcccaagagaaagctgaccccctggaagcaccagagactgggcaaggtgaacagcgagtacagagccaagttcctgagccccgcccagtacctgtacaaggccggcgcctggacccacgtgaagggcaacatgcccaaccagggcagcctgaacgccatgtggtacgccgaggtgaaggagctgagagagaaggccgagttctacagaaagagagtgcagggcacccacttcagcagagaccacctgaaccagatcctgagcgacagcaactgctgctgggacgtgagcagcaccaccagcagcgagggcaccgtgagcagcaacatcagagccctggacctggccggcgaccccaccagccacaagaccctgcagaagtgccccagcaccgagcccgaggagaagggcaacatcgtggaggagcagccccagaagaacaccaccgagaagctgggcgtgagcgcccccaccatccccgtgagaagaagactggcctgggacaccgagaacaccagcgaggacgtgcagaagcagcccggcgagaaggaggaggaggacgacaacgaggaggagggcgacagaaagaccggcaagcaggccttcatgggcgagcaggagaagctggacgtgagagagaagagcaaggccgacaagatgaaggagggcagcgacagcagcgtgagcagcgagaagggcggcagactgcccacccccaagctgagagagctgggcggcatccagagaacccaccacgacctgaccacccccgccgtgggcggcgccgtgctggtgagccccagcaagatgaagccccccgcccccgagcagagaaagagaatgaccagccaggactgcctggagaccagcaagaacgacttcaccaagaaggagagcagagccgtgagcctgctgaccagccccgccgccggcatcaagaccgtggaccccctgcccctgagagaggacagcgaggacaacatccacaagttcgccgaggccaccctgcccgtgagcaagatccccaagtaccccaccaacccccccggccagctgcccagccccccccacgtgcccagctactggcaccccagcagaagaatccagggcagcctgagagaccccgagttccagcacaacgtgggcaaggccagaatgaacaacctgcagctgccccagcacgaggccttcaacgacgaggacgaggacagactgagcgagatcagcgccagaagcgccgccagcagcctgagagccttccagaccctggccagagccaagaagagaaaggagaacttctggggcaagacctag

SEQ ID NO: 88188 - DNA, 2715 bp, synthetic construct
  misc_feature 1..2715: note = Description of Artificial Sequence: Synthetic coding sequence
  source 1..2715: mol_type = other DNA
atggacagatacctgctgctggtgatctggggcgagggcaagttccccagcgccgccagcagagaggccgagcacggccccgaggtgagcagcggcgagggcaccgagaaccagcccgacttcaccgccgccaacgtgtaccacctgctgaagagaagcatcagcgccagcatcaaccccgaggacagcaccttccccgcctgcagcgtgggcggcatccccggcagcaagaagtggttcttcgccgtgcaggccatctacggcttctaccagttctgcagcagcgactggcaggagatccacttcgacaccgagaaggacaagatcgaggacgtgctgcagaccaacatcgaggagtgcctgggcgccgtggagtgcttcgaggaggaggacagcaacagcagagagagcctgagcctggccgacctgtacgaggaggccgccgagaacctgcaccagctgagcgacaagctgcccgcccccggcagagccatggtggacatcatcctgctgctgagcgacaaggacccccccaagctgaaggactacctgcccaccgtgggcgccctgaagcacctgagagagtggtacagcgccaagatcaccatcgccggcaaccactgcgagatcaactgccagaagatcgccgagtacctgagcgccaacgtggtgagcctggaggacctgagaaacgtgatcgacagcaaggagctgtggagaggcaagatccagatctgggagagaaagttcggcttcgagatcagcttccccgagttctgcctgaagggcgtgaccctgaagaacttcagcaccagcaacctgaacaccgacttcctggccaagaagatcatccccagcaaggacaagaacatcctgcccaaggtgttccactactacggccccgccctggagttcgtgcagatgatcaagctgagcgacctgcccagctgctacatgagcgacatcgagttcgagctgggcctgaccaacagcaccaagcagaacagcgtgctgctgctggagcagatcagcagcctgtgcagcaaggtgggcgccctgttcgtgctgccctgcaccatcagcaacatcctgatccccccccccaaccagctgagcagcagaaagtggaaggagtacatcgccaagaagcccaagaccatcagcgtgcccgacgtggaggtgaagggcgagtgcagcagctactacctgctgctgcagggcaacggcaacagaagatgcaaggccaccctgatccacagcgccaaccagatcaacggcagcttcgccctgaacctgatccacggcaagatgaagaccaagaccgaggaggccaagctgagcttccccttcgacctgctgagcctgccccacttcagcggcgagcagatcgtgcagagagagaagcagctggccaacgtgcaggtgctggccctggaggagtgcctgaagagaagaaagctggccaagcagcccgagaccgtgagcgtggccgagctgaagagcctgctggtgctgaccagaaagcacttcctggactacttcgacgccgtgatccccaagatgatcctgagaaagatggacaagatcaagaccttcaacatcctgaacgacttcagccccgtggagcccaacagcagcagcctgatggagaccaaccccctggagtggcccgagagacacgtgctgcagaacctggagaccttcgagaagaccaagcagaagatgagaaccggcagcctgccccacagcagcgagcagctgctgggccacaaggagggccccagagacagcatcaccctgctggacgccaaggagctgctgaagtacttcaccagcgacggcctgcccatcggcgacctgcagcccctgcccatccagaagggcgagaagaccttcgtgctgacccccgagctgagccccggcaagctgcaggtgctgcccttcgagaaggccagcgtgtgccactaccacggcatcgagtactgcctggacgacagaaaggccctggagagagacggcggcttcagcgagctgcagagcagactgatcagatacgagacccagaccacctgcaccagagagagcttccccgtgcccaccgtgctgagccccctgcccagccccgtggtgagcagcgaccccggcagcgtgcccgacggcgaggtgctgcagaacgagctgagaaccgaggtgagcagactgaagagaagaagcaaggacctgaactgcctgtaccccagaaagagactggtgaagagcgagagcagcgagagcctgctgagccagaccaccggcaacagcaaccactaccaccaccacgtgaccagcagaaagccccagaccgagagaagcctgcccgtgacctgccccctggtgcccatccccagctgcgagacccccaagctggccaccaagaccagcagcggccagaagagcatgcacgagagcaagaccagcagacagatcaaggagagcagaagccagaagcacaccagaatcctgaaggaggtggtgaccgagaccctgaagaagcacagcatcaccgagacccacgagtgcttcaccgcctgcagccagagactgttcgagatcagcaagttctacctgaaggacctgaagaccagcagaggcctgttcgaggagatgaagaagaccgccaacaacaacgccgtgcaggtgatcgactgggtgctggagaagaccagcaagaagtag

SEQ ID NO: 88189 - DNA, 1374 bp, synthetic construct
  misc_feature 1..1374: note = Description of Artificial Sequence: Synthetic coding sequence
  source 1..1374: mol_type = other DNA
tgaatggccgagaccgtgtggagcaccgacaccggcgaggccgtgtacagaagcagagaccccgtgagaaacctgagactgagagtgcacctgcagagaatcaccagcagcaacttcctgcactaccagcccgccgccgagctgggcaaggacctgatcgacctggccaccttcagaccccagcccaccgccagcggccacagacccgaggaggacgaggaggaggagatcgtgatcggctggcaggagaagctgttcagccagttcgaggtggacctgtaccagaacgagaccgcctgccagagccccctggactaccagtacagacaggagatcctgaagctggagaacagcggcggcaagaagaacagaagaatcttcacctacaccgacagcgacagatacaccaacctggaggagcactgccagagaatgaccaccgccgccagcgaggtgcccagcttcctggtggagagaatggccaacgtgagaagaagaagacaggacagaagaggcatggagggcggcatcctgaagagcagaatcgtgacctgggagcccagcgaggagttcgtgagaaacaaccacgtgatcaacacccccctgcagaccatgcacatcatggccgacctgggcccctacaagaagctgggctacaagaagtacgagcacgtgctgtgcaccctgaaggtggacagcaacggcgtgatcaccgtgaagcccgacttcaccggcctgaagggcccctacagaatcgagaccgagggcgagaagcaggagctgtggaagtacaccatcgacaacgtgagcccccacgcccagcccgaggaggaggagagagagagaagagtgttcaaggacctgtacggcagacacaaggagtacctgagcagcctggtgggcaccgacttcgagatgaccgtgcccggcgccctgagactgttcgtgaacggcgaggtggtgagcgcccagggctacgagtacgacaacctgtacgtgcacttcttcgtggagctgcccaccgcccactggagcagccccgccttccagcagctgagcggcgtgacccagacctgcaccaccaagagcctggccatggacaaggtggcccacttcagctaccccttcaccttcgaggccttcttcctgcacgaggacgagagcagcgacgccctgcccgagtggcccgtgctgtactgcgaggtgctgagcctggacttctggcagagatacagagtggagggctacggcgccgtggtgctgcccgccacccccggccccagctggaacagagcccccttcagaaagggctgcggcgtgtgctggaccgtgtggaagggcagcgccagcagagtgcccttcaccatgtgctag

SEQ ID NO: 88190 - DNA, 1566 bp, synthetic construct
  misc_feature 1..1566: note = Description of Artificial Sequence: Synthetic coding sequence
  source 1..1566: mol_type = other DNA
atggccgagaccgtgtggagcaccgacaccggcgaggccgtgtacagaagcagagaccccgtgagaaacctgagactgagagtgcacctgcagagaatcaccagcagcaacttcctgcactaccagcccgccgccgagctgggcaaggacctgatcgacctggccaccttcagaccccagcccaccgccagcggccacagacccgaggaggacgaggaggaggagatcgtgatcggctggcaggagaagctgttcagccagttcgaggtggacctgtaccagaacgagaccgcctgccagagccccctggactaccagtacagacaggagatcctgaagctggagaacagcggcggcaagaagaacagaagaatcttcacctacaccgacagcgacagatacaccaacctggaggagcactgccagagaatgaccaccgccgccagcgaggtgcccagcttcctggtggagagaatggccaacgtgagaagaagaagacaggacagaagaggcatggagggcggcatcctgaagagcagaatcgtgacctgggagcccagcgaggagttcgtgagaaacaaccacgtgatcaacacccccctgcagaccatgcacatcatggccgacctgggcccctacaagaagctgggctacaagaagtacgagcacgtgctgtgcaccctgaaggtggacagcaacggcgtgatcaccgtgaagcccgacttcaccggcctgaagggcccctacagaatcgagaccgagggcgagaagcaggagctgtggaagtacaccatcgacaacgtgagcccccacgcccagcccgaggaggaggagagagagagaagagtgttcaaggacctgtacggcagacacaaggagtacctgagcagcctggtgggcaccgacttcgagatgaccgtgcccggcgccctgagactgttcgtgaacggcgaggtggtgagcgcccagggctacgagtacgacaacctgtacgtgcacttcttcgtggagctgcccaccgcccactggagcagccccgccttccagcagctgagcggcgtgacccagacctgcaccaccaagagcctggccatggacaaggtggcccacttcagctaccccttcaccttcgaggccttcttcctgcacgaggacgagagcagcgacgccctgcccgagtggcccgtgctgtactgcgaggtgctgagcctggacttctggcagagatacagagtggagggctacggcgccgtggtgctgcccgccacccccggcagccacaccctgaccgtgagcacctggagacccgtggagctgggcaccgtggccgagctgagaagattcttcatcggcggcagcctggagctggaggacctgagctacgtgagaatccccggcagcttcaaggccctgctgagcagcagcaagaccaaggagggcagaaaggtggacggcgagagagtgctgaacccccagcccgtgagcctgagcctgttccccggcaagccccacagcaccgcctggggcctgctgagactgagatacgagctgttcctgagcaagtag

SEQ ID NO: 88191 - DNA, 1680 bp, synthetic construct
  misc_feature 1..1680: note = Description of Artificial Sequence: Synthetic coding sequence
  source 1..1680: mol_type = other DNA
atggccgagaccgtgtggagcaccgacaccggcgaggccgtgtacagaagcagagaccccgtgagaaacctgagactgagagtgcacctgcagagaatcaccagcagcaacttcctgcactaccagcccgccgccgagctgggcaaggacctgatcgacctggccaccttcagaccccagcccaccgccagcggccacagacccgaggaggacgaggaggaggagatcgtgatcggctggcaggagaagctgttcagccagttcgaggtggacctgtaccagaacgagaccgcctgccagagccccctggactaccagtacagacaggagatcctgaagctggagaacagcggcggcaagaagaacagaagaatcttcacctacaccgacagcgacagatacaccaacctggaggagcactgccagagaatgaccaccgccgccagcgaggtgcccagcttcctggtggagagaatggccaacgtgagaagaagaagacaggacagaagaggcatggagggcggcatcctgaagagcagaatcgtgacctgggagcccagcgaggagttcgtgagaaacaaccacgtgatcaacacccccctgcagaccatgcacatcatggccgacctgggcccctacaagaagctgggctacaagaagtacgagcacgtgctgtgcaccctgaaggtggacagcaacggcgtgatcaccgtgaagcccgacttcaccggcctgaagggcccctacagaatcgagaccgagggcgagaagcaggagctgtggaagtacaccatcgacaacgtgagcccccacgcccagcccgaggaggaggagagagagagaagagtgttcaaggacctgtacggcagacacaaggagtacctgagcagcctggtgggcaccgacttcgagatgaccgtgcccggcgccctgagactgttcgtgaacggcgaggtggtgagcgcccagggctacgagtacgacaacctgtacgtgcacttcttcgtggagctgcccaccgcccactggagcagccccgccttccagcagctgagcggcgtgacccagacctgcaccaccaagagcctggccatggacaaggtggcccacttcagctaccccttcaccttcgaggccttcttcctgcacgaggacgagagcagcgacgccctgcccgagtggcccgtgctgtactgcgaggtgctgagcctggacttctggcagagatacagagtggagggctacggcgccgtggtgctgcccgccacccccggcagccacaccctgaccgtgagcacctggagacccgtggagctgggcaccgtggccgagctgagaagattcttcatcggcggcagcctggagctggaggacctgagctacgtgagaatccccggcagcttcaagggcgagagactgagcagattcggcctgagaaccgagaccaccggcaccgtgaccttcagactgcactgcctgcagcagagcagagccttcatggagagcagcagcctgcagaagagaatgagaagcgtgctggacagactggagggcttcagccagcagagcagcatccacaacgtgctggaggccttcagaagagccagaagaagaatgcaggaggccagagagagcctgccccaggacctggtgagccccagcggcaccctggtgagctag

SEQ ID NO: 88192 - DNA, 1563 bp, synthetic construct
  misc_feature 1..1563: note = Description of Artificial Sequence: Synthetic coding sequence
  source 1..1563: mol_type = other DNA
atggccgagaccgtgtggagcaccgacaccggcgaggccgtgtacagaagcagagaccccgtgagaaacctgagactgagagtgcacctgcagagaatcaccagcagcaacttcctgcactaccagcccgccgccgagctgggcaaggacctgatcgacctggccaccttcagaccccagcccaccgccagcggccacagacccgaggaggacgaggaggaggagatcgtgatcggctggcaggagaagctgttcagccagttcgaggtggacctgtaccagaacgagaccgcctgccagagccccctggactaccagtacagacaggagatcctgaagctggagaacagcggcggcaagaagaacagaagaatcttcacctacaccgacagcgacagatacaccaacctggaggagcactgccagagaatgaccaccgccgccagcgaggtgcccagcttcctggtggagagaatggccaacgtgagaagaagaagacaggacagaagaggcatggagggcggcatcctgaagagcagaatcgtgacctgggagcccagcgaggagttcgtgagaaacaaccacgtgatcaacacccccctgcagaccatgcacatcatggccgacctgggcccctacaagaagctgggctacaagaagtacgagcacgtgctgtgcaccctgaaggtggacagcaacggcgtgatcaccgtgaagcccgacttcaccggcctgaagggcccctacagaatcgagaccgagggcgagaagcaggagctgtggaagtacaccatcgacaacgtgagcccccacgcccagcccgaggaggaggagagagagagaagagtgttcaaggacctgtacggcagacacaaggagtacctgagcagcctggtgggcaccgacttcgagatgaccgtgcccggcgccctgagactgttcgtgaacggcgaggtggtgagcgcccagggctacgagtacgacaacctgtacgtgcacttcttcgtggagctgcccaccgcccactggagcagccccgccttccagcagctgagcggcgtgacccagacctgcaccaccaagagcctggccatggacaaggtggcccacttcagctaccccttcaccttcgaggccttcttcctgcacgaggacgagagcagcgacgccctgcccgagtggcccgtgctgtactgcgaggtgctgagcctggacttctggcagagatacagagtggagggctacggcgccgtggtgctgcccgccacccccggcagccacaccctgaccgtgagcacctggagacccgtggagctgggcaccgtggccgagctgagaagattcttcatcggcggcagcctggagctggaggacctgagctacgtgagaatccccggcagcttcaagggcctgagcagcagcaagaccaaggagggcagaaaggtggacggcgagagagtgctgaacccccagcccgtgagcctgagcctgttccccggcaagccccacagcaccgcctggggcctgctgagactgagatacgagctgttcctgagcaagtag

SEQ ID NO: 88193 - DNA, 1650 bp, synthetic construct
  misc_feature 1..1650: note = Description of Artificial Sequence: Synthetic coding sequence
  source 1..1650: mol_type = other DNA
atggccgtgcccgtgagcagcttcgcccagagaaccagaagcagattcagagtgcacctgcagagaatcaccagcagcaacttcctgcactaccagcccgccgccgagctgggcaaggacctgatcgacctggccaccttcagaccccagcccaccgccagcggccacagacccgaggaggacgaggaggaggagatcgtgatcggctggcaggagaagctgttcagccagttcgaggtggacctgtaccagaacgagaccgcctgccagagccccctggactaccagtacagacaggagatcctgaagctggagaacagcggcggcaagaagaacagaagaatcttcacctacaccgacagcgacagatacaccaacctggaggagcactgccagagaatgaccaccgccgccagcgaggtgcccagcttcctggtggagagaatggccaacgtgagaagaagaagacaggacagaagaggcatggagggcggcatcctgaagagcagaatcgtgacctgggagcccagcgaggagttcgtgagaaacaaccacgtgatcaacacccccctgcagaccatgcacatcatggccgacctgggcccctacaagaagctgggctacaagaagtacgagcacgtgctgtgcaccctgaaggtggacagcaacggcgtgatcaccgtgaagcccgacttcaccggcctgaagggcccctacagaatcgagaccgagggcgagaagcaggagctgtggaagtacaccatcgacaacgtgagcccccacgcccagcccgaggaggaggagagagagagaagagtgttcaaggacctgtacggcagacacaaggagtacctgagcagcctggtgggcaccgacttcgagatgaccgtgcccggcgccctgagactgttcgtgaacggcgaggtggtgagcgcccagggctacgagtacgacaacctgtacgtgcacttcttcgtggagctgcccaccgcccactggagcagccccgccttccagcagctgagcggcgtgacccagacctgcaccaccaagagcctggccatggacaaggtggcccacttcagctaccccttcaccttcgaggccttcttcctgcacgaggacgagagcagcgacgccctgcccgagtggcccgtgctgtactgcgaggtgctgagcctggacttctggcagagatacagagtggagggctacggcgccgtggtgctgcccgccacccccggcagccacaccctgaccgtgagcacctggagacccgtggagctgggcaccgtggccgagctgagaagattcttcatcggcggcagcctggagctggaggacctgagctacgtgagaatccccggcagcttcaagggcgagagactgagcagattcggcctgagaaccgagaccaccggcaccgtgaccttcagactgcactgcctgcagcagagcagagccttcatggagagcagcagcctgcagaagagaatgagaagcgtgctggacagactggagggcttcagccagcagagcagcatccacaacgtgctggaggccttcagaagagccagaagaagaatgcaggaggccagagagagcctgccccaggacctggtgagccccagcggcaccctggtgagctag

SEQ ID NO: 88194 - DNA, 1071 bp, synthetic construct
  misc_feature 1..1071: note = Description of Artificial Sequence: Synthetic coding sequence
  source 1..1071: mol_type = other DNA
atgcacatcatggccgacctgggcccctacaagaagctgggctacaagaagtacgagcacgtgctgtgcaccctgaaggtggacagcaacggcgtgatcaccgtgaagcccgacttcaccggcctgaagggcccctacagaatcgagaccgagggcgagaagcaggagctgtggaagtacaccatcgacaacgtgagcccccacgcccagcccgaggaggaggagagagagagaagagtgttcaaggacctgtacggcagacacaaggagtacctgagcagcctggtgggcaccgacttcgagatgaccgtgcccggcgccctgagactgttcgtgaacggcgaggtggtgagcgcccagggctacgagtacgacaacctgtacgtgcacttcttcgtggagctgcccaccgcccactggagcagccccgccttccagcagctgagcggcgtgacccagacctgcaccaccaagagcctggccatggacaaggtggcccacttcagctaccccttcaccttcgaggccttcttcctgcacgaggacgagagcagcgacgccctgcccgagtggcccgtgctgtactgcgaggtgctgagcctggacttctggcagagatacagagtggagggctacggcgccgtggtgctgcccgccacccccggcagccacaccctgaccgtgagcacctggagacccgtggagctgggcaccgtggccgagctgagaagattcttcatcggcggcagcctggagctggaggacctgagctacgtgagaatccccggcagcttcaagggcgagagactgagcagattcggcctgagaaccgagaccaccggcaccgtgaccttcagactgcactgcctgcagcagagcagagccttcatggagagcagcagcctgcagaagagaatgagaagcgtgctggacagactggagggcttcagccagcagagcagcatccacaacgtgctggaggccttcagaagagccagaagaagaatgcaggaggccagagagagcctgccccaggacctggtgagccccagcggcaccctggtgagctag

SEQ ID NO: 88195 - DNA, 4746 bp, synthetic construct
  misc_feature 1..4746: note = Description of Artificial Sequence: Synthetic coding sequence
  source 1..4746: mol_type = other DNA
atgaaggcccagggcgagaccgaggagagcgagaagctgagcaagatgagcagcctgctggagagactgcacgccaagttcaaccagaacagaccctggagcgagaccatcaagctggtgagacaggtgatggagaagagagtggtgatgagcagcggcggccaccagcacctggtgagctgcctggagaccctgcagaaggccctgaaggtgaccagcctgcccgccatgaccgacagactggagagcatcgccagacagaacggcctgggcagccacctgagcgccagcggcaccgagtgctacatcaccagcgacatgttctacgtggaggtgcagctggaccccgccggccagctgtgcgacgtgaaggtggcccaccacggcgagaaccccgtgagctgccccgagctggtgcagcagctgagagagaagaacttcgacgagttcagcaagcacctgaagggcctggtgaacctgtacaacctgcccggcgacaacaagctgaagaccaagatgtacctggccctgcagagcctggagcaggacctgagcaagatggccatcatgtactggaaggccaccaacgccggccccctggacaagatcctgcacggcagcgtgggctacctgacccccagaagcggcggccacctgatgaacctgaagtactacgtgagccccagcgacctgctggacgacaagaccgccagccccatcatcctgcacgagaacaacgtgagcagaagcctgggcatgaacgccagcgtgaccatcgagggcaccagcgccgtgtacaagctgcccatcgcccccctgatcatgggcagccaccccgtggacaacaagtggacccccagcttcagcagcatcaccagcgccaacagcgtggacctgcccgcctgcttcttcctgaagttcccccagcccatccccgtgagcagagccttcgtgcagaagctgcagaactgcaccggcatccccctgttcgagacccagcccacctacgcccccctgtacgagctgatcacccagttcgagctgagcaaggaccccgaccccatccccctgaaccacaacatgagattctacgccgccctgcccggccagcagcactgctacttcctgaacaaggacgcccccctgcccgacggcagaagcctgcagggcaccctggtgagcaagatcaccttccagcaccccggcagagtgcccctgatcctgaacctgatcagacaccaggtggcctacaacaccctgatcggcagctgcgtgaagagaaccatcctgaaggaggacagccccggcctgctgcagttcgaggtgtgccccctgagcgagagcagattcagcgtgagcttccagcaccccgtgaacgacagcctggtgtgcgtggtgatggacgtgcaggacagcacccacgtgagctgcaagctgtacaagggcctgagcgacgccctgatctgcaccgacgacttcatcgccaaggtggtgcagagatgcatgagcatccccgtgaccatgagagccatcagaagaaaggccgagaccatccaggccgacacccccgccctgagcctgatcgccgagaccgtggaggacatggtgaagaagaacctgccccccgccagcagccccggctacggcatgaccaccggcaacaaccccatgagcggcaccaccacccccaccaacaccttccccggcggccccatcaccaccctgttcaacatgagcatgagcatcaaggacagacacgagagcgtgggccacggcgaggacttcagcaaggtgagccagaaccccatcctgaccagcctgctgcagatcaccggcaacggcggcagcaccatcggcagcagccccacccccccccaccacacccccccccccgtgagcagcatggccggcaacaccaagaaccaccccatgctgatgaacctgctgaaggacaaccccgcccaggacttcagcaccctgtacggcagcagccccctggagagacagaacagcagcagcggcagccccagaatggagatctgcagcggcagcaacaagaccaagaagaagaagagcagcagactgccccccgagaagcccaagcaccagaccgaggacgacttccagagagagctgttcagcatggacgtggacagccagaaccccatcttcgacgtgaacatgaccgccgacaccctggacaccccccacatcacccccgcccccagccagtgcagcaccccccccaccacctacccccagcccgtgccccacccccagcccagcatccagagaatggtgagactgagcagcagcgacagcatcggccccgacgtgaccgacatcctgagcgacatcgccgaggaggccagcaagctgcccagcaccagcgacgactgccccgccatcggcacccccctgagagacagcagcagcagcggccacagccagagcaccctgttcgacagcgacgtgttccagaccaacaacaacgagaacccctacaccgaccccgccgacctgatcgccgacgccgccggcagccccagcagcgacagccccaccaaccacttcttccacgacggcgtggacttcaaccccgacctgctgaacagccagagccagagcggcttcggcgaggagtacttcgacgagagcagccagagcggcgacaacgacgacttcaagggcttcgccagccaggccctgaacaccctgggcgtgcccatgctgggcggcgacaacggcgagaccaagttcaagggcaacaaccaggccgacaccgtggacttcagcatcatcagcgtggccggcaaggccctggcccccgccgacctgatggagcaccacagcggcagccagggccccctgctgaccaccggcgacctgggcaaggagaagacccagaagagagtgaaggagggcaacggcaccagcaacagcaccctgagcggccccggcctggacagcaagcccggcaagagaagcagaacccccagcaacgacggcaagagcaaggacaagccccccaagagaaagaaggccgacaccgagggcaagagccccagccacagcagcagcaacagacccttcaccccccccaccagcaccggcggcagcaagagccccggcagcgccggcagaagccagaccccccccggcgtggccaccccccccatccccaagatcaccatccagatccccaagggcaccgtgatggtgggcaagcccagcagccacagccagtacaccagcagcggcagcgtgagcagcagcggcagcaagagccaccacagccacagcagcagcagcagcagcagcgccagcaccagcggcaagatgaagagcagcaagagcgagggcagcagcagcagcaagctgagcagcagcatgtacagcagccagggcagcagcggcagcagccagagcaagaacagcagccagagcggcggcaagcccggcagcagccccatcaccaagcacggcctgagcagcggcagcagcagcaccaagatgaagccccagggcaagcccagcagcctgatgaaccccagcctgagcaagcccaacatcagccccagccacagcagaccccccggcggcagcgacaagctggccagccccatgaagcccgtgcccggcaccccccccagcagcaaggccaagagccccatcagcagcggcagcggcggcagccacatgagcggcaccagcagcagcagcggcatgaagagcagcagcggcctgggcagcagcggcagcctgagccagaagaccccccccagcagcaacagctgcaccgccagcagcagcagcttcagcagcagcggcagcagcatgagcagcagccagaaccagcacggcagcagcaagggcaagagccccagcagaaacaagaagcccagcctgaccgccgtgatcgacaagctgaagcacggcgtggtgaccagcggccccggcggcgaggaccccctggacggccagatgggcgtgagcaccaacagcagcagccaccccatgagcagcaagcacaacatgagcggcggcgagttccagggcaagagagagaagagcgacaaggacaagagcaaggtgagcaccagcggcagcagcgtggacagcagcaagaagaccagcgagagcaagaacgtgggcagcaccggcgtggccaagatcatcatcagcaagcacgacggcggcagccccagcatcaaggccaaggtgaccctgcagaagcccggcgagagcagcggcgagggcctgagaccccagatggccagcagcaagaactacggcagccccctgatcagcggcagcacccccaagcacgagagaggcagccccagccacagcaagagccccgcctacaccccccagaacctggacagcgagagcgagagcggcagcagcatcgccgagaagagctaccagaacagccccagcagcgacgacggcatcagacccctgcccgagtacagcaccgagaagcacaagaagcacaagaaggagaagaagaaggtgaaggacaaggacagagacagagacagagacaaggacagagacaagaagaagagccacagcatcaagcccgagagctggagcaagagccccatcagcagcgaccagagcctgagcatgaccagcaacaccatcctgagcgccgacagacccagcagactgagccccgacttcatgatcggcgaggaggacgacgacctgatggacgtggccctgatcggcaactag

SEQ ID NO: 88196 - DNA, 1671 bp, synthetic construct
  misc_feature 1..1671: note = Description of Artificial Sequence: Synthetic coding sequence
  source 1..1671: mol_type = other DNA
atgaaggcccagggcgagaccgaggagagcgagaagctgagcaagatgagcagcctgctggagagactgcacgccaagttcaaccagaacagaccctggagcgagaccatcaagctggtgagacaggtgatggagaagagagtggtgatgagcagcggcggccaccagcacctggtgagctgcctggagaccctgcagaaggccctgaaggtgaccagcctgcccgccatgaccgacagactggagagcatcgccagacagaacggcctgggcagccacctgagcgccagcggcaccgagtgctacatcaccagcgacatgttctacgtggaggtgcagctggaccccgccggccagctgtgcgacgtgaaggtggcccaccacggcgagaaccccgtgagctgccccgagctggtgcagcagctgagagagaagaacttcgacgagttcagcaagcacctgaagggcctggtgaacctgtacaacctgcccggcgacaacaagctgaagaccaagatgtacctggccctgcagagcctggagcaggacctgagcaagatggccatcatgtactggaaggccaccaacgccggccccctggacaagatcctgcacggcagcgtgggctacctgacccccagaagcggcggccacctgatgaacctgaagtactacgtgagccccagcgacctgctggacgacaagaccgccagccccatcatcctgcacgagaacaacgtgagcagaagcctgggcatgaacgccagcgtgaccatcgagggcaccagcgccgtgtacaagctgcccatcgcccccctgatcatgggcagccaccccgtggacaacaagtggacccccagcttcagcagcatcaccagcgccaacagcgtggacctgcccgcctgcttcttcctgaagttcccccagcccatccccgtgagcagagccttcgtgcagaagctgcagaactgcaccggcatccccctgttcgagacccagcccacctacgcccccctgtacgagctgatcacccagttcgagctgagcaaggaccccgaccccatccccctgaaccacaacatgagattctacgccgccctgcccggccagcagcactgctacttcctgaacaaggacgcccccctgcccgacggcagaagcctgcagggcaccctggtgagcaagatcaccttccagcaccccggcagagtgcccctgatcctgaacctgatcagacaccaggtggcctacaacaccctgatcggcagctgcgtgaagagaaccatcctgaaggaggacagccccggcctgctgcagttcgaggtgtgccccctgagcgagagcagattcagcgtgagcttccagcaccccgtgaacgacagcctggtgtgcgtggtgatggacgtgcaggacagcacccacgtgagctgcaagctgtacaagggcctgagcgacgccctgatctgcaccgacgacttcatcgccaaggtggtgcagagatgcatgagcatccccgtgaccatgagagccatcagaagaaaggccgagaccatccaggccgacacccccgccctgagcctgatcgccgagaccgtggaggacatggtgaagaagaacctgccccccgccagcagccccggcagcaagaaccccgagctgggcagcggctag

SEQ ID NO: 88197 - DNA, 408 bp, synthetic construct
  misc_feature 1..408: note = Description of Artificial Sequence: Synthetic coding sequence
  source 1..408: mol_type = other DNA
atggccgagaagttcgaccacctggaggagcacctggagaagttcgtggagaacatcagacagctgggcatcatcgtgagcgacttccagcccagcagccaggccggcctgaaccagaagctgaacttcatcgtgaccggcctgcaggacatcgacaagtgcagacagcagctgcacgacatcaccgtgcccctggaggtgttcgagtacatcgaccagggcagaaacccccagctgtacaccaaggagtgcctggagagagccctggccaagaacgagcaggtgaagggcaagatcgacaccatgaagaagttcaagagcctgctgatccaggagctgagcaaggtgttccccgaggacatggccaagtacagaagcatcagaggcgaggaccacccccccagctag

SEQ ID NO: 88198 - DNA, 354 bp, synthetic construct
  misc_feature 1..354: note = Description of Artificial Sequence: Synthetic coding sequence
  source 1..354: mol_type = other DNA
atggccacctacagcctggccaacgagagactgagagccctggaggacatcgagagagagatcggcgccatcctgcagaacgccggcaccgtgatcctggagctgagcaaggagaagaccaacgagagactgctggacagacaggccgccgccttcaccgccagcgtgcagcacgtggaggccgagctgagcgcccagatcagatacctgacccaggtggccaccggccagccccacgagggcagcagctacagcagcagaaaggactgccagatggccctgaagagagtggactacgccagactgaagctgagcgacgtggccagaacctgcgagcagatgctggagaactag

SEQ ID NO: 88199 - DNA, 6543 bp, synthetic construct
  misc_feature 1..6543: note = Description of Artificial Sequence: Synthetic coding sequence
  source 1..6543: mol_type = other DNA
atggccgccttcggcatcctgagctacgagcacagacccctgaagagacccagactgggcccccccgacgtgtacccccaggaccccaagcagaaggaggacgagctgaccgccctgaacgtgaagcagggcttcaacaaccagcccgccgtgagcggcgacgagcacggcagcgccaagaacgtgagcttcaaccccgccaagatcagcagcaacttcagcagcatcatcgccgagaagctgagatgcaacaccctgcccgacaccggcagaagaaagccccaggtgaaccagaaggacaacttctggctggtgaccgccagaagccagagcgccatcaacacctggttcaccgacctggccggcaccaagcccctgacccagctggccaagaaggtgcccatcttcagcaagaaggaggaggtgttcggctacctggccaagtacaccgtgcccgtgatgagagccgcctggctgatcaagatgacctgcgcctactacgccgccatcagcgagaccaaggtgaagaagagacacgtggaccccttcatggagtggacccagatcatcaccaagtacctgtgggagcagctgcagaagatggccgagtactacagacccggccccgccggcagcggcggctgcggcagcaccatcggccccctgccccacgacgtggaggtggccatcagacagtgggactacaccgagaagctggccatgttcatgttccaggacggcatgctggacagacacgagttcctgacctgggtgctggagtgcttcgagaagatcagacccggcgaggacgagctgctgaagctgctgctgcccctgctgctgagatacagcggcgagttcgtgcagagcgcctacctgagcagaagactggcctacttctgcaccagaagactggccctgcagctggacggcgtgagcagccacagcagccacgtgatcagcgcccagagcaccagcaccctgcccaccacccccgccccccagccccccaccagcagcacccccagcacccccttcagcgacctgctgatgtgcccccagcacagacccctggtgttcggcctgagctgcatcctgcagaccatcctgctgtgctgccccagcgccctggtgtggcactacagcctgaccgacagcagaatcaagaccggcagccccctggaccacctgcccatcgcccccagcaacctgcccatgcccgagggcaacagcgccttcacccagcaggtgagagccaagctgagagagatcgagcagcagatcaaggagagaggccaggccgtggaggtgagatggagcttcgacaagtgccaggaggccaccgccggcttcaccatcggcagagtgctgcacaccctggaggtgctggacagccacagcttcgagagaagcgacttcagcaacagcctggacagcctgtgcaacagaatcttcggcctgggccccagcaaggacggccacgagatcagcagcgacgacgacgccgtggtgagcctgctgtgcgagtgggccgtgagctgcaagagaagcggcagacacagagccatggtggtggccaagctgctggagaagagacaggccgagatcgaggccgagagatgcggcgagagcgaggccgccgacgagaagggcagcatcgccagcggcagcctgagcgcccccagcgcccccatcttccaggacgtgctgctgcagttcctggacacccaggcccccatgctgaccgaccccagaagcgagagcgagagagtggagttcttcaacctggtgctgctgttctgcgagctgatcagacacgacgtgttcagccacaacatgtacacctgcaccctgatcagcagaggcgacctggccttcggcgcccccggccccagaccccccagccccttcgacgaccccgccgacgaccccgagcacaaggaggccgagggcagcagcagcagcaagctggaggaccccggcctgagcgagagcatggacatcgaccccagcagcagcgtgctgttcgaggacatggagaagcccgacttcagcctgttcagccccaccatgccctgcgagggcaagggcagccccagccccgagaagcccgacgtggagaaggaggtgaagcccccccccaaggagaagatcgagggcaccctgggcgtgctgtacgaccagcccagacacgtgcagtacgccacccacttccccatcccccaggaggagagctgcagccacgagtgcaaccagagactggtggtgctgttcggcgtgggcaagcagagagacgacgccagacacgccatcaagaagatcaccaaggacatcctgaaggtgctgaacagaaagggcaccgccgagaccgaccagctggcccccatcgtgcccctgaaccccggcgacctgaccttcctgggcggcgaggacggccagaagagaagaagaaacagacccgaggccttccccaccgccgaggacatcttcgccaagttccagcacctgagccactacgaccagcaccaggtgaccgcccaggtgagcagaaacgtgctggagcagatcaccagcttcgccctgggcatgagctaccacctgcccctggtgcagcacgtgcagttcatcttcgacctgatggagtacagcctgagcatcagcggcctgatcgacttcgccatccagctgctgaacgagctgagcgtggtggaggccgagctgctgctgaagagcagcgacctggtgggcagctacaccaccagcctgtgcctgtgcatcgtggccgtgctgagacactaccacgcctgcctgatcctgaaccaggaccagatggcccaggtgttcgagggcctgtgcggcgtggtgaagcacggcatgaacagaagcgacggcagcagcgccgagagatgcatcctggcctacctgtacgacctgtacaccagctgcagccacctgaagaacaagttcggcgagctgttcagcgacttctgcagcaaggtgaagaacaccatctactgcaacgtggagcccagcgagagcaacatgagatgggcccccgagttcatgatcgacaccctggagaaccccgccgcccacaccttcacctacaccggcctgggcaagagcctgagcgagaaccccgccaacagatacagcttcgtgtgcaacgccctgatgcacgtgtgcgtgggccaccacgaccccgacagagtgaacgacatcgccatcctgtgcgccgagctgaccggctactgcaagagcctgagcgccgagtggctgggcgtgctgaaggccctgtgctgcagcagcaacaacggcacctgcggcttcaacgacctgctgtgcaacgtggacgtgagcgacctgagcttccacgacagcctggccaccttcgtggccatcctgatcgccagacagtgcctgctgctggaggacctgatcagatgcgccgccatccccagcctgctgaacgccgcctgcagcgagcaggacagcgagcccggcgccagactgacctgcagaatcctgctgcacctgttcaagaccccccagctgaacccctgccagagcgacggcaacaagcccaccgtgggcatcagaagcagctgcgacagacacctgctggccgccagccagaacagaatcgtggacggcgccgtgttcgccgtgctgaaggccgtgttcgtgctgggcgacgccgagctgaagggcagcggcttcaccgtgaccggcggcaccgaggagctgcccgaggaggagggcggcggcggcagcggcggcagaagacagggcggcagaaacatcagcgtggagaccgccagcctggacgtgtacgccaagtacgtgctgagaagcatctgccagcaggagtgggtgggcgagagatgcctgaagagcctgtgcgaggacagcaacgacctgcaggaccccgtgctgagcagcgcccaggcccagagactgatgcagctgatctgctacccccacagactgctggacaacgaggacggcgagaacccccagagacagagaatcaagagaatcctgcagaacctggaccagtggaccatgagacagagcagcctggagctgcagctgatgatcaagcagacccccaacaacgagatgaacagcctgctggagaacatcgccaaggccaccatcgaggtgttccagcagagcgccgagaccggcagcagcagcggcagcaccgccagcaacatgcccagcagcagcaagaccaagcccgtgctgagcagcctggagagaagcggcgtgtggctggtggcccccctgatcgccaagctgcccaccagcgtgcagggccacgtgctgaaggccgccggcgaggagctggagaagggccagcacctgggcagcagcagcagaaaggagagagacagacagaagcagaagagcatgagcctgctgagccagcagcccttcctgagcctggtgctgacctgcctgaagggccaggacgagcagagagagggcctgctgaccagcctgtacagccaggtgcaccagatcgtgaacaactggagagacgaccagtacctggacgactgcaagcccaagcagctgatgcacgaggccctgaagctgagactgaacctggtgggcggcatgttcgacaccgtgcagagaagcacccagcagaccaccgagtgggccatgctgctgctggagatcatcatcagcggcaccgtggacatgcagagcaacaacgagctgttcaccaccgtgctggacatgctgagcgtgctgatcaacggcaccctggccgccgacatgagcagcatcagccagggcagcatggaggagaacaagagagcctacatgaacctggccaagaagctgcagaaggagctgggcgagagacagagcgacagcctggagaaggtgagacagctgctgcccctgcccaagcagaccagagacgtgatcacctgcgagccccagggcagcctgatcgacaccaagggcaacaagatcgccggcttcgacagcatcttcaagaaggagggcctgcaggtgagcaccaagcagaagatcagcccctgggacctgttcgagggcctgaagcccagcgcccccctgagctggggctggttcggcaccgtgagagtggacagaagagtggccagaggcgaggagcagcagagactgctgctgtaccacacccacctgagacccagacccagagcctactacctggagcccctgcccctgccccccgaggacgaggagccccccgcccccaccctgctggagcccgagaagaaggcccccgagccccccaagaccgacaagcccggcgccgccccccccagcaccgaggagagaaagaagaagagcaccaagggcaagaagagaagccagcccgccaccaagaccgaggactacggcatgggccccggcagaagcggcccctacggcgtgaccgtgccccccgacctgctgcaccaccccaaccccggcagcatcacccacctgaactacagacagggcagcatcggcctgtacacccagaaccagcccctgcccgccggcggccccagagtggacccctacagacccgtgagactgcccatgcagaagctgcccaccagacccacctaccccggcgtgctgcccaccaccatgaccggcgtgatgggcctggagcccagcagctacaagaccagcgtgtacagacagcagcagcccgccgtgccccagggccagagactgagacagcagctgcaggccaagatccagagccagggcatgctgggccagagcagcgtgcaccagatgacccccagcagcagctacggcctgcagaccagccagggctacaccccctacgtgagccacgtgggcctgcagcagcacaccggccccgccggcaccatggtgccccccagctacagcagccagccctaccagagcacccaccccagcaccaaccccaccctggtggaccccaccagacacctgcagcagagacccagcggctacgtgcaccagcaggcccccacctacggccacggcctgaccagcacccagagattcagccaccagaccctgcagcagacccccatgatcagcaccatgacccccatgagcgcccagggcgtgcaggccggcgtgagaagcaccgccatcctgcccgagcagcagcagcagcagcagcagcagcagcagcagcagcagcagcagcagcagcagcagcagcagcagcagcagcagcagtaccacatcagacagcagcagcagcagcagatcctgagacagcagcagcagcagcagcagcagcagcagcagcagcagcagcagcagcagcagcagcagcagcagcagcagcagcagcaccagcagcagcagcagcagcaggccgcccccccccagccccagccccagagccagccccagttccagagacagggcctgcagcagacccagcagcagcagcagaccgccgccctggtgagacagctgcagcagcagctgagcaacacccagccccagcccagcaccaacatcttcggcagatactag

SEQ ID NO: 88200 - DNA, 6534 bp, synthetic construct
  misc_feature 1..6534: note = Description of Artificial Sequence: Synthetic coding sequence
  source 1..6534: mol_type = other DNA
atggccgccttcggcatcctgagctacgagcacagacccctgaagagacccagactgggcccccccgacgtgtacccccaggaccccaagcagaaggaggacgagctgaccgccctgaacgtgaagcagggcttcaacaaccagcccgccgtgagcggcgacgagcacggcagcgccaagaacgtgagcttcaaccccgccaagatcagcagcaacttcagcagcatcatcgccgagaagctgagatgcaacaccctgcccgacaccggcagaagaaagccccaggtgaaccagaaggacaacttctggctggtgaccgccagaagccagagcgccatcaacacctggttcaccgacctggccggcaccaagcccctgacccagctggccaagaaggtgcccatcttcagcaagaaggaggaggtgttcggctacctggccaagtacaccgtgcccgtgatgagagccgcctggctgatcaagatgacctgcgcctactacgccgccatcagcgagaccaaggtgaagaagagacacgtggaccccttcatggagtggacccagatcatcaccaagtacctgtgggagcagctgcagaagatggccgagtactacagacccggccccgccggcagcggcggctgcggcagcaccatcggccccctgccccacgacgtggaggtggccatcagacagtgggactacaccgagaagctggccatgttcatgttccaggacggcatgctggacagacacgagttcctgacctgggtgctggagtgcttcgagaagatcagacccggcgaggacgagctgctgaagctgctgctgcccctgctgctgagatacagcggcgagttcgtgcagagcgcctacctgagcagaagactggcctacttctgcaccagaagactggccctgcagctggacggcgtgagcagccacagcagccacgtgatcagcgcccagagcaccagcaccctgcccaccacccccgccccccagccccccaccagcagcacccccagcacccccttcagcgacctgctgatgtgcccccagcacagacccctggtgttcggcctgagctgcatcctgcagaccatcctgctgtgctgccccagcgccctggtgtggcactacagcctgaccgacagcagaatcaagaccggcagccccctggaccacctgcccatcgcccccagcaacctgcccatgcccgagggcaacagcgccttcacccagcaggtgagagccaagctgagagagatcgagcagcagatcaaggagagaggccaggccgtggaggtgagatggagcttcgacaagtgccaggaggccaccgccggcttcaccatcggcagagtgctgcacaccctggaggtgctggacagccacagcttcgagagaagcgacttcagcaacagcctggacagcctgtgcaacagaatcttcggcctgggccccagcaaggacggccacgagatcagcagcgacgacgacgccgtggtgagcctgctgtgcgagtgggccgtgagctgcaagagaagcggcagacacagagccatggtggtggccaagctgctggagaagagacaggccgagatcgaggccgagagatgcggcgagagcgaggccgccgacgagaagggcagcatcgccagcggcagcctgagcgcccccagcgcccccatcttccaggacgtgctgctgcagttcctggacacccaggcccccatgctgaccgaccccagaagcgagagcgagagagtggagttcttcaacctggtgctgctgttctgcgagctgatcagacacgacgtgttcagccacaacatgtacacctgcaccctgatcagcagaggcgacctggccttcggcgcccccggccccagaccccccagccccttcgacgaccccgccgacgaccccgagcacaaggaggccgagggcagcagcagcagcaagctggaggaccccggcctgagcgagagcatggacatcgaccccagcagcagcgtgctgttcgaggacatggagaagcccgacttcagcctgttcagccccaccatgccctgcgagggcaagggcagccccagccccgagaagcccgacgtggagaaggaggtgaagcccccccccaaggagaagatcgagggcaccctgggcgtgctgtacgaccagcccagacacgtgcagtacgccacccacttccccatcccccaggaggagagctgcagccacgagtgcaaccagagactggtggtgctgttcggcgtgggcaagcagagagacgacgccagacacgccatcaagaagatcaccaaggacatcctgaaggtgctgaacagaaagggcaccgccgagaccgaccagctggcccccatcgtgcccctgaaccccggcgacctgaccttcctgggcggcgaggacggccagaagagaagaagaaacagacccgaggccttccccaccgccgaggacatcttcgccaagttccagcacctgagccactacgaccagcaccaggtgaccgcccaggtgagcagaaacgtgctggagcagatcaccagcttcgccctgggcatgagctaccacctgcccctggtgcagcacgtgcagttcatcttcgacctgatggagtacagcctgagcatcagcggcctgatcgacttcgccatccagctgctgaacgagctgagcgtggtggaggccgagctgctgctgaagagcagcgacctggtgggcagctacaccaccagcctgtgcctgtgcatcgtggccgtgctgagacactaccacgcctgcctgatcctgaaccaggaccagatggcccaggtgttcgagggcctgtgcggcgtggtgaagcacggcatgaacagaagcgacggcagcagcgccgagagatgcatcctggcctacctgtacgacctgtacaccagctgcagccacctgaagaacaagttcggcgagctgttcagcgacttctgcagcaaggtgaagaacaccatctactgcaacgtggagcccagcgagagcaacatgagatgggcccccgagttcatgatcgacaccctggagaaccccgccgcccacaccttcacctacaccggcctgggcaagagcctgagcgagaaccccgccaacagatacagcttcgtgtgcaacgccctgatgcacgtgtgcgtgggccaccacgaccccgacagagtgaacgacatcgccatcctgtgcgccgagctgaccggctactgcaagagcctgagcgccgagtggctgggcgtgctgaaggccctgtgctgcagcagcaacaacggcacctgcggcttcaacgacctgctgtgcaacgtggacgtgagcgacctgagcttccacgacagcctggccaccttcgtggccatcctgatcgccagacagtgcctgctgctggaggacctgatcagatgcgccgccatccccagcctgctgaacgccgcctgcagcgagcaggacagcgagcccggcgccagactgacctgcagaatcctgctgcacctgttcaagaccccccagctgaacccctgccagagcgacggcaacaagcccaccgtgggcatcagaagcagctgcgacagacacctgctggccgccagccagaacagaatcgtggacggcgccgtgttcgccgtgctgaaggccgtgttcgtgctgggcgacgccgagctgaagggcagcggcttcaccgtgaccggcggcaccgaggagctgcccgaggaggagggcggcggcggcagcggcggcagaagacagggcggcagaaacatcagcgtggagaccgccagcctggacgtgtacgccaagtacgtgctgagaagcatctgccagcaggagtgggtgggcgagagatgcctgaagagcctgtgcgaggacagcaacgacctgcaggaccccgtgctgagcagcgcccaggcccagagactgatgcagctgatctgctacccccacagactgctggacaacgaggacggcgagaacccccagagacagagaatcaagagaatcctgcagaacctggaccagtggaccatgagacagagcagcctggagctgcagctgatgatcaagcagacccccaacaacgagatgaacagcctgctggagaacatcgccaaggccaccatcgaggtgttccagcagagcgccgagaccggcagcagcagcggcagcaccgccagcaacatgcccagcagcagcaagaccaagcccgtgctgagcagcctggagagaagcggcgtgtggctggtggcccccctgatcgccaagctgcccaccagcgtgcagggccacgtgctgaaggccgccggcgaggagctggagaagggccagcacctgggcagcagcagcagaaaggagagagacagacagaagcagaagagcatgagcctgctgagccagcagcccttcctgagcctggtgctgacctgcctgaagggccaggacgagcagagagagggcctgctgaccagcctgtacagccaggtgcaccagatcgtgaacaactggagagacgaccagtacctggacgactgcaagcccaagcagctgatgcacgaggccctgaagctgagactgaacctggtgggcggcatgttcgacaccgtgcagagaagcacccagcagaccaccgagtgggccatgctgctgctggagatcatcatcagcggcaccgtggacatgcagagcaacaacgagctgttcaccaccgtgctggacatgctgagcgtgctgatcaacggcaccctggccgccgacatgagcagcatcagccagggcagcatggaggagaacaagagagcctacatgaacctggccaagaagctgcagaaggagctgggcgagagacagagcgacagcctggagaaggtgagacagctgctgcccctgcccaagcagaccagagacgtgatcacctgcgagccccagggcagcctgatcgacaccaagggcaacaagatcgccggcttcgacagcatcttcaagaaggagggcctgcaggtgagcaccaagcagaagatcagcccctgggacctgttcgagggcctgaagcccagcgcccccctgagctggggctggttcggcaccgtgagagtggacagaagagtggccagaggcgaggagcagcagagactgctgctgtaccacacccacctgagacccagacccagagcctactacctggagcccctgcccctgccccccgaggacgaggagccccccgcccccaccctgctggagcccgagaagaaggcccccgagccccccaagaccgacaagcccggcgccgccccccccagcaccgaggagagaaagaagaagagcaccaagggcaagaagagaagccagcccgccaccaagaccgaggactacggcatgggccccggcagaagcggcccctacggcgtgaccgtgccccccgacctgctgcaccaccccaaccccggcagcatcacccacctgaactacagacagggcagcatcggcctgtacacccagaaccagcccctgcccgccggcggccccagagtggacccctacagacccgtgagactgcccatgcagaagctgcccaccagacccacctaccccggcgtgctgcccaccaccatgaccggcgtgatgggcctggagcccagcagctacaagaccagcgtgtacagacagcagcagcccgccgtgccccagggccagagactgagacagcagctgcagcagagccagggcatgctgggccagagcagcgtgcaccagatgacccccagcagcagctacggcctgcagaccagccagggctacaccccctacgtgagccacgtgggcctgcagcagcacaccggccccgccggcaccatggtgccccccagctacagcagccagccctaccagagcacccaccccagcaccaaccccaccctggtggaccccaccagacacctgcagcagagacccagcggctacgtgcaccagcaggcccccacctacggccacggcctgaccagcacccagagattcagccaccagaccctgcagcagacccccatgatcagcaccatgacccccatgagcgcccagggcgtgcaggccggcgtgagaagcaccgccatcctgcccgagcagcagcagcagcagcagcagcagcagcagcagcagcagcagcagcagcagcagcagcagcagcagcagcagcagcagtaccacatcagacagcagcagcagcagcagatcctgagacagcagcagcagcagcagcagcagcagcagcagcagcagcagcagcagcagcagcagcagcagcagcagcagcagcagcaccagcagcagcagcagcagcaggccgcccccccccagccccagccccagagccagccccagttccagagacagggcctgcagcagacccagcagcagcagcagaccgccgccctggtgagacagctgcagcagcagctgagcaacacccagccccagcccagcaccaacatcttcggcagatactag

SEQ ID NO: 88201 - DNA, 6531 bp, synthetic construct
  misc_feature 1..6531: note = Description of Artificial Sequence: Synthetic coding sequence
  source 1..6531: mol_type = other DNA
atggccgccttcggcatcctgagctacgagcacagacccctgaagagacccagactgggcccccccgacgtgtacccccaggaccccaagcagaaggaggacgagctgaccgccctgaacgtgaagcagggcttcaacaaccagcccgccgtgagcggcgacgagcacggcagcgccaagaacgtgagcttcaaccccgccaagatcagcagcaacttcagcagcatcatcgccgagaagctgagatgcaacaccctgcccgacaccggcagaagaaagccccaggtgaaccagaaggacaacttctggctggtgaccgccagaagccagagcgccatcaacacctggttcaccgacctggccggcaccaagcccctgacccagctggccaagaaggtgcccatcttcagcaagaaggaggaggtgttcggctacctggccaagtacaccgtgcccgtgatgagagccgcctggctgatcaagatgacctgcgcctactacgccgccatcagcgagaccaaggtgaagaagagacacgtggaccccttcatggagtggacccagatcatcaccaagtacctgtgggagcagctgcagaagatggccgagtactacagacccggccccgccggcagcggcggctgcggcagcaccatcggccccctgccccacgacgtggaggtggccatcagacagtgggactacaccgagaagctggccatgttcatgttccaggacggcatgctggacagacacgagttcctgacctgggtgctggagtgcttcgagaagatcagacccggcgaggacgagctgctgaagctgctgctgcccctgctgctgagatacagcggcgagttcgtgcagagcgcctacctgagcagaagactggcctacttctgcaccagaagactggccctgcagctggacggcgtgagcagccacagcagccacgtgatcagcgcccagagcaccagcaccctgcccaccacccccgccccccagccccccaccagcagcacccccagcacccccttcagcgacctgctgatgtgcccccagcacagacccctggtgttcggcctgagctgcatcctgcagaccatcctgctgtgctgccccagcgccctggtgtggcactacagcctgaccgacagcagaatcaagaccggcagccccctggaccacctgcccatcgcccccagcaacctgcccatgcccgagggcaacagcgccttcacccagcaggtgagagccaagctgagagagatcgagcagcagatcaaggagagaggccaggccgtggaggtgagatggagcttcgacaagtgccaggaggccaccgccggcttcaccatcggcagagtgctgcacaccctggaggtgctggacagccacagcttcgagagaagcgacttcagcaacagcctggacagcctgtgcaacagaatcttcggcctgggccccagcaaggacggccacgagatcagcagcgacgacgacgccgtggtgagcctgctgtgcgagtgggccgtgagctgcaagagaagcggcagacacagagccatggtggtggccaagctgctggagaagagacaggccgagatcgaggccgagagatgcggcgagagcgaggccgccgacgagaagggcagcatcgccagcggcagcctgagcgcccccagcgcccccatcttccaggacgtgctgctgcagttcctggacacccaggcccccatgctgaccgaccccagaagcgagagcgagagagtggagttcttcaacctggtgctgctgttctgcgagctgatcagacacgacgtgttcagccacaacatgtacacctgcaccctgatcagcagaggcgacctggccttcggcgcccccggccccagaccccccagccccttcgacgaccccgccgacgaccccgagcacaaggaggccgagggcagcagcagcagcaagctggaggaccccggcctgagcgagagcatggacatcgaccccagcagcagcgtgctgttcgaggacatggagaagcccgacttcagcctgttcagccccaccatgccctgcgagggcaagggcagccccagccccgagaagcccgacgtggagaaggaggtgaagcccccccccaaggagaagatcgagggcaccctgggcgtgctgtacgaccagcccagacacgtgcagtacgccacccacttccccatcccccaggaggagagctgcagccacgagtgcaaccagagactggtggtgctgttcggcgtgggcaagcagagagacgacgccagacacgccatcaagaagatcaccaaggacatcctgaaggtgctgaacagaaagggcaccgccgagaccgaccagctggcccccatcgtgcccctgaaccccggcgacctgaccttcctgggcggcgaggacggccagaagagaagaagaaacagacccgaggccttccccaccgccgaggacatcttcgccaagttccagcacctgagccactacgaccagcaccaggtgaccgcccaggtgagcagaaacgtgctggagcagatcaccagcttcgccctgggcatgagctaccacctgcccctggtgcagcacgtgcagttcatcttcgacctgatggagtacagcctgagcatcagcggcctgatcgacttcgccatccagctgctgaacgagctgagcgtggtggaggccgagctgctgctgaagagcagcgacctggtgggcagctacaccaccagcctgtgcctgtgcatcgtggccgtgctgagacactaccacgcctgcctgatcctgaaccaggaccagatggcccaggtgttcgagggcctgtgcggcgtggtgaagcacggcatgaacagaagcgacggcagcagcgccgagagatgcatcctggcctacctgtacgacctgtacaccagctgcagccacctgaagaacaagttcggcgagctgttcagcgacttctgcagcaaggtgaagaacaccatctactgcaacgtggagcccagcgagagcaacatgagatgggcccccgagttcatgatcgacaccctggagaaccccgccgcccacaccttcacctacaccggcctgggcaagagcctgagcgagaaccccgccaacagatacagcttcgtgtgcaacgccctgatgcacgtgtgcgtgggccaccacgaccccgacagagtgaacgacatcgccatcctgtgcgccgagctgaccggctactgcaagagcctgagcgccgagtggctgggcgtgctgaaggccctgtgctgcagcagcaacaacggcacctgcggcttcaacgacctgctgtgcaacgtggacgtgagcgacctgagcttccacgacagcctggccaccttcgtggccatcctgatcgccagacagtgcctgctgctggaggacctgatcagatgcgccgccatccccagcctgctgaacgccgcctgcagcgagcaggacagcgagcccggcgccagactgacctgcagaatcctgctgcacctgttcaagaccccccagctgaacccctgccagagcgacggcaacaagcccaccgtgggcatcagaagcagctgcgacagacacctgctggccgccagccagaacagaatcgtggacggcgccgtgttcgccgtgctgaaggccgtgttcgtgctgggcgacgccgagctgaagggcagcggcttcaccgtgaccggcggcaccgaggagctgcccgaggaggagggcggcggcggcagcggcggcagaagacagggcggcagaaacatcagcgtggagaccgccagcctggacgtgtacgccaagtacgtgctgagaagcatctgccagcaggagtgggtgggcgagagatgcctgaagagcctgtgcgaggacagcaacgacctgcaggaccccgtgctgagcagcgcccaggcccagagactgatgcagctgatctgctacccccacagactgctggacaacgaggacggcgagaacccccagagacagagaatcaagagaatcctgcagaacctggaccagtggaccatgagacagagcagcctggagctgcagctgatgatcaagcagacccccaacaacgagatgaacagcctgctggagaacatcgccaaggccaccatcgaggtgttccagcagagcgccgagaccggcagcagcagcggcagcaccgccagcaacatgcccagcagcagcaagaccaagcccgtgctgagcagcctggagagaagcggcgtgtggctggtggcccccctgatcgccaagctgcccaccagcgtgcagggccacgtgctgaaggccgccggcgaggagctggagaagggccagcacctgggcagcagcagcagaaaggagagagacagacagaagcagaagagcatgagcctgctgagccagcagcccttcctgagcctggtgctgacctgcctgaagggccaggacgagcagagagagggcctgctgaccagcctgtacagccaggtgcaccagatcgtgaacaactggagagacgaccagtacctggacgactgcaagcccaagcagctgatgcacgaggccctgaagctgagactgaacctggtgggcggcatgttcgacaccgtgcagagaagcacccagcagaccaccgagtgggccatgctgctgctggagatcatcatcagcggcaccgtggacatgcagagcaacaacgagctgttcaccaccgtgctggacatgctgagcgtgctgatcaacggcaccctggccgccgacatgagcagcatcagccagggcagcatggaggagaacaagagagcctacatgaacctggccaagaagctgcagaaggagctgggcgagagacagagcgacagcctggagaaggtgagacagctgctgcccctgcccaagcagaccagagacgtgatcacctgcgagccccagggcagcctgatcgacaccaagggcaacaagatcgccggcttcgacagcatcttcaagaaggagggcctgcaggtgagcaccaagcagaagatcagcccctgggacctgttcgagggcctgaagcccagcgcccccctgagctggggctggttcggcaccgtgagagtggacagaagagtggccagaggcgaggagcagcagagactgctgctgtaccacacccacctgagacccagacccagagcctactacctggagcccctgcccctgccccccgaggacgaggagccccccgcccccaccctgctggagcccgagaagaaggcccccgagccccccaagaccgacaagcccggcgccgccccccccagcaccgaggagagaaagaagaagagcaccaagggcaagaagagaagccagcccgccaccaagaccgaggactacggcatgggccccggcagaagcggcccctacggcgtgaccgtgccccccgacctgctgcaccaccccaaccccggcagcatcacccacctgaactacagacagggcagcatcggcctgtacacccagaaccagcccctgcccgccggcggccccagagtggacccctacagacccgtgagactgcccatgcagaagctgcccaccagacccacctaccccggcgtgctgcccaccaccatgaccggcgtgatgggcctggagcccagcagctacaagaccagcgtgtacagacagcagcagcccgccgtgccccagggccagagactgagacagcagctgcagagccagggcatgctgggccagagcagcgtgcaccagatgacccccagcagcagctacggcctgcagaccagccagggctacaccccctacgtgagccacgtgggcctgcagcagcacaccggccccgccggcaccatggtgccccccagctacagcagccagccctaccagagcacccaccccagcaccaaccccaccctggtggaccccaccagacacctgcagcagagacccagcggctacgtgcaccagcaggcccccacctacggccacggcctgaccagcacccagagattcagccaccagaccctgcagcagacccccatgatcagcaccatgacccccatgagcgcccagggcgtgcaggccggcgtgagaagcaccgccatcctgcccgagcagcagcagcagcagcagcagcagcagcagcagcagcagcagcagcagcagcagcagcagcagcagcagcagcagcagtaccacatcagacagcagcagcagcagcagatcctgagacagcagcagcagcagcagcagcagcagcagcagcagcagcagcagcagcagcagcagcagcagcagcagcagcagcagcaccagcagcagcagcagcagcaggccgcccccccccagccccagccccagagccagccccagttccagagacagggcctgcagcagacccagcagcagcagcagaccgccgccctggtgagacagctgcagcagcagctgagcaacacccagccccagcccagcaccaacatcttcggcagatactag

SEQ ID NO: 88202 - DNA, 393 bp, synthetic construct
  misc_feature 1..393: note = Description of Artificial Sequence: Synthetic coding sequence
  source 1..393: mol_type = other DNA
tgaacccccaacagaagaagaaagaagcagctgaacgccgccttcctgccccaggacgagctgaccgccctgaacgtgaagcagggcttcaacaaccagcccgccgtgagcggcgacgagcacggcagcgccaagaacgtgagcttcaaccccgccaagatcagcagcaacttcagcagcatcatcgccgagaagctgagatgcaacaccctgcccgacaccggcagaagaaagccccaggtgaaccagaaggacaacttctggctggtgaccgccagaagccagagcgccatcaacacctggttcaccgacctggccggcaccaagcccctgacccagctggccaagaaggtgcccatcttcagcaagaaggaggaggtgttcggctactag

SEQ ID NO: 88203 - DNA, 6384 bp, synthetic construct
  misc_feature 1..6384: note = Description of Artificial Sequence: Synthetic coding sequence
  source 1..6384: mol_type = other DNA
gaggacgagctgaccgccctgaacgtgaagcagggcttcaacaaccagcccgccgtgagcggcgacgagcacggcagcgccaagaacgtgagcttcaaccccgccaagatcagcagcaacttcagcagcatcatcgccgagaagctgagatgcaacaccctgcccgacaccggcagaagaaagccccaggtgaaccagaaggacaacttctggctggtgaccgccagaagccagagcgccatcaacacctggttcaccgacctggccggcaccaagcccctgacccagctggccaagaaggtgcccatcttcagcaagaaggaggaggtgttcggctacctggccaagtacaccgtgcccgtgatgagagccgcctggctgatcaagatgacctgcgcctactacgccgccatcagcgagaccaaggtgaagaagagacacgtggaccccttcatggagtggacccagatcatcaccaagtacctgtgggagcagctgcagaagatggccgagtactacagacccggccccgccggcagcggcggctgcggcagcaccatcggccccctgccccacgacgtggaggtggccatcagacagtgggactacaccgagaagctggccatgttcatgttccaggacggcatgctggacagacacgagttcctgacctgggtgctggagtgcttcgagaagatcagacccggcgaggacgagctgctgaagctgctgctgcccctgctgctgagatacagcggcgagttcgtgcagagcgcctacctgagcagaagactggcctacttctgcaccagaagactggccctgcagctggacggcgtgagcagccacagcagccacgtgatcagcgcccagagcaccagcaccctgcccaccacccccgccccccagccccccaccagcagcacccccagcacccccttcagcgacctgctgatgtgcccccagcacagacccctggtgttcggcctgagctgcatcctgcagaccatcctgctgtgctgccccagcgccctggtgtggcactacagcctgaccgacagcagaatcaagaccggcagccccctggaccacctgcccatcgcccccagcaacctgcccatgcccgagggcaacagcgccttcacccagcaggtgagagccaagctgagagagatcgagcagcagatcaaggagagaggccaggccgtggaggtgagatggagcttcgacaagtgccaggaggccaccgccggcttcaccatcggcagagtgctgcacaccctggaggtgctggacagccacagcttcgagagaagcgacttcagcaacagcctggacagcctgtgcaacagaatcttcggcctgggccccagcaaggacggccacgagatcagcagcgacgacgacgccgtggtgagcctgctgtgcgagtgggccgtgagctgcaagagaagcggcagacacagagccatggtggtggccaagctgctggagaagagacaggccgagatcgaggccgagagatgcggcgagagcgaggccgccgacgagaagggcagcatcgccagcggcagcctgagcgcccccagcgcccccatcttccaggacgtgctgctgcagttcctggacacccaggcccccatgctgaccgaccccagaagcgagagcgagagagtggagttcttcaacctggtgctgctgttctgcgagctgatcagacacgacgtgttcagccacaacatgtacacctgcaccctgatcagcagaggcgacctggccttcggcgcccccggccccagaccccccagccccttcgacgaccccgccgacgaccccgagcacaaggaggccgagggcagcagcagcagcaagctggaggaccccggcctgagcgagagcatggacatcgaccccagcagcagcgtgctgttcgaggacatggagaagcccgacttcagcctgttcagccccaccatgccctgcgagggcaagggcagccccagccccgagaagcccgacgtggagaaggaggtgaagcccccccccaaggagaagatcgagggcaccctgggcgtgctgtacgaccagcccagacacgtgcagtacgccacccacttccccatcccccaggaggagagctgcagccacgagtgcaaccagagactggtggtgctgttcggcgtgggcaagcagagagacgacgccagacacgccatcaagaagatcaccaaggacatcctgaaggtgctgaacagaaagggcaccgccgagaccgaccagctggcccccatcgtgcccctgaaccccggcgacctgaccttcctgggcggcgaggacggccagaagagaagaagaaacagacccgaggccttccccaccgccgaggacatcttcgccaagttccagcacctgagccactacgaccagcaccaggtgaccgcccaggtgagcagaaacgtgctggagcagatcaccagcttcgccctgggcatgagctaccacctgcccctggtgcagcacgtgcagttcatcttcgacctgatggagtacagcctgagcatcagcggcctgatcgacttcgccatccagctgctgaacgagctgagcgtggtggaggccgagctgctgctgaagagcagcgacctggtgggcagctacaccaccagcctgtgcctgtgcatcgtggccgtgctgagacactaccacgcctgcctgatcctgaaccaggaccagatggcccaggtgttcgagggcctgtgcggcgtggtgaagcacggcatgaacagaagcgacggcagcagcgccgagagatgcatcctggcctacctgtacgacctgtacaccagctgcagccacctgaagaacaagttcggcgagctgttcagcgacttctgcagcaaggtgaagaacaccatctactgcaacgtggagcccagcgagagcaacatgagatgggcccccgagttcatgatcgacaccctggagaaccccgccgcccacaccttcacctacaccggcctgggcaagagcctgagcgagaaccccgccaacagatacagcttcgtgtgcaacgccctgatgcacgtgtgcgtgggccaccacgaccccgacagagtgaacgacatcgccatcctgtgcgccgagctgaccggctactgcaagagcctgagcgccgagtggctgggcgtgctgaaggccctgtgctgcagcagcaacaacggcacctgcggcttcaacgacctgctgtgcaacgtggacgtgagcgacctgagcttccacgacagcctggccaccttcgtggccatcctgatcgccagacagtgcctgctgctggaggacctgatcagatgcgccgccatccccagcctgctgaacgccgcctgcagcgagcaggacagcgagcccggcgccagactgacctgcagaatcctgctgcacctgttcaagaccccccagctgaacccctgccagagcgacggcaacaagcccaccgtgggcatcagaagcagctgcgacagacacctgctggccgccagccagaacagaatcgtggacggcgccgtgttcgccgtgctgaaggccgtgttcgtgctgggcgacgccgagctgaagggcagcggcttcaccgtgaccggcggcaccgaggagctgcccgaggaggagggcggcggcggcagcggcggcagaagacagggcggcagaaacatcagcgtggagaccgccagcctggacgtgtacgccaagtacgtgctgagaagcatctgccagcaggagtgggtgggcgagagatgcctgaagagcctgtgcgaggacagcaacgacctgcaggaccccgtgctgagcagcgcccaggcccagagactgatgcagctgatctgctacccccacagactgctggacaacgaggacggcgagaacccccagagacagagaatcaagagaatcctgcagaacctggaccagtggaccatgagacagagcagcctggagctgcagctgatgatcaagcagacccccaacaacgagatgaacagcctgctggagaacatcgccaaggccaccatcgaggtgttccagcagagcgccgagaccggcagcagcagcggcagcaccgccagcaacatgcccagcagcagcaagaccaagcccgtgctgagcagcctggagagaagcggcgtgtggctggtggcccccctgatcgccaagctgcccaccagcgtgcagggccacgtgctgaaggccgccggcgaggagctggagaagggccagcacctgggcagcagcagcagaaaggagagagacagacagaagcagaagagcatgagcctgctgagccagcagcccttcctgagcctggtgctgacctgcctgaagggccaggacgagcagagagagggcctgctgaccagcctgtacagccaggtgcaccagatcgtgaacaactggagagacgaccagtacctggacgactgcaagcccaagcagctgatgcacgaggccctgaagctgagactgaacctggtgggcggcatgttcgacaccgtgcagagaagcacccagcagaccaccgagtgggccatgctgctgctggagatcatcatcagcggcaccgtggacatgcagagcaacaacgagctgttcaccaccgtgctggacatgctgagcgtgctgatcaacggcaccctggccgccgacatgagcagcatcagccagggcagcatggaggagaacaagagagcctacatgaacctggccaagaagctgcagaaggagctgggcgagagacagagcgacagcctggagaaggtgagacagctgctgcccctgcccaagcagaccagagacgtgatcacctgcgagccccagggcagcctgatcgacaccaagggcaacaagatcgccggcttcgacagcatcttcaagaaggagggcctgcaggtgagcaccaagcagaagatcagcccctgggacctgttcgagggcctgaagcccagcgcccccctgagctggggctggttcggcaccgtgagagtggacagaagagtggccagaggcgaggagcagcagagactgctgctgtaccacacccacctgagacccagacccagagcctactacctggagcccctgcccctgccccccgaggacgaggagccccccgcccccaccctgctggagcccgagaagaaggcccccgagccccccaagaccgacaagcccggcgccgccccccccagcaccgaggagagaaagaagaagagcaccaagggcaagaagagaagccagcccgccaccaagaccgaggactacggcatgggccccggcagaagcggcccctacggcgtgaccgtgccccccgacctgctgcaccaccccaaccccggcagcatcacccacctgaactacagacagggcagcatcggcctgtacacccagaaccagcccctgcccgccggcggccccagagtggacccctacagacccgtgagactgcccatgcagaagctgcccaccagacccacctaccccggcgtgctgcccaccaccatgaccggcgtgatgggcctggagcccagcagctacaagaccagcgtgtacagacagcagcagcccgccgtgccccagggccagagactgagacagcagctgcagcagagccagggcatgctgggccagagcagcgtgcaccagatgacccccagcagcagctacggcctgcagaccagccagctgagccccagcagcctgcagggctacaccccctacgtgagccacgtgggcctgcagcagcacaccggccccgccgaccccaccagacacctgcagcagagacccagcggctacgtgcaccagcaggcccccacctacggccacggcctgaccagcacccagagattcagccaccagaccctgcagcagacccccatgatcagcaccatgacccccatgagcgcccagggcgtgcaggccggcgtgagaagcaccgccatcctgcccgagcagcagcagcagcagcagcagcagcagcagcagcagcagcagcagcagcagcagcagcagcagcagcagcagcagcagtaccacatcagacagcagcagcagcagcagatcctgagacagcagcagcagcagcagcagcagcagcagcagcagcagcagcagcagcagcagcagcagcagcagcagcagcagcagcaccagcagcagcagcagcagcaggccgcccccccccagccccagccccagagccagccccagttccagagacagggcctgcagcagacccagcagcagcagcagaccgccgccctggtgagacagctgcagcagcagctgagcaacacccagccccagcccagcaccaacatcttcggcagatactag

SEQ ID NO: 88204 - DNA, 2778 bp, synthetic construct
  misc_feature 1..2778: note = Description of Artificial Sequence: Synthetic coding sequence
  source 1..2778: mol_type = other DNA
ggcggcagcggcggcagaagacagggcggcagaaacatcagcgtggagaccgccagcctggacgtgtacgccaagtacgtgctgagaagcatctgccagcaggagtgggtgggcgagagatgcctgaagagcctgtgcgaggacagcaacgacctgcaggaccccgtgctgagcagcgcccaggcccagagactgatgcagctgatctgctacccccacagactgctggacaacgaggacggcgagaacccccagagacagagaatcaagagaatcctgcagaacctggaccagtggaccatgagacagagcagcctggagctgcagctgatgatcaagcagacccccaacaacgagatgaacagcctgctggagaacatcgccaaggccaccatcgaggtgttccagcagagcgccgagaccggcagcagcagcggcagcaccgccagcaacatgcccagcagcagcaagaccaagcccgtgctgagcagcctggagagaagcggcgtgtggctggtggcccccctgatcgccaagctgcccaccagcgtgcagggccacgtgctgaaggccgccggcgaggagctggagaagggccagcacctgggcagcagcagcagaaaggagagagacagacagaagcagaagagcatgagcctgctgagccagcagcccttcctgagcctggtgctgacctgcctgaagggccaggacgagcagagagagggcctgctgaccagcctgtacagccaggtgcaccagatcgtgaacaactggagagacgaccagtacctggacgactgcaagcccaagcagctgatgcacgaggccctgaagctgagactgaacctggtgggcggcatgttcgacaccgtgcagagaagcacccagcagaccaccgagtgggccatgctgctgctggagatcatcatcagcggcaccgtggacatgcagagcaacaacgagctgttcaccaccgtgctggacatgctgagcgtgctgatcaacggcaccctggccgccgacatgagcagcatcagccagggcagcatggaggagaacaagagagcctacatgaacctggccaagaagctgcagaaggagctgggcgagagacagagcgacagcctggagaaggtgagacagctgctgcccctgcccaagcagaccagagacgtgatcacctgcgagccccagggcagcctgatcgacaccaagggcaacaagatcgccggcttcgacagcatcttcaagaaggagggcctgcaggtgagcaccaagcagaagatcagcccctgggacctgttcgagggcctgaagcccagcgcccccctgagctggggctggttcggcaccgtgagagtggacagaagagtggccagaggcgaggagcagcagagactgctgctgtaccacacccacctgagacccagacccagagcctactacctggagcccctgcccctgccccccgaggacgaggagccccccgcccccaccctgctggagcccgagaagaaggcccccgagccccccaagaccgacaagcccggcgccgccccccccagcaccgaggagagaaagaagaagagcaccaagggcaagaagagaagccagcccgccaccaagaccgaggactacggcatgggccccggcagaagcggcccctacggcgtgaccgtgccccccgacctgctgcaccaccccaaccccggcagcatcacccacctgaactacagacagggcagcatcggcctgtacacccagaaccagcccctgcccgccggcggccccagagtggacccctacagacccgtgagactgcccatgcagaagctgcccaccagacccacctaccccggcgtgctgcccaccaccatgaccggcgtgatgggcctggagcccagcagctacaagaccagcgtgtacagacagcagcagcccgccgtgccccagggccagagactgagacagcagctgcaggccaagatccagagccagggcatgctgggccagagcagcgtgcaccagatgacccccagcagcagctacggcctgcagaccagccagggctacaccccctacgtgagccacgtgggcctgcagcagcacaccggccccgccggcaccatggtgccccccagctacagcagccagccctaccagagcacccaccccagcaccaaccccaccctggtggaccccaccagacacctgcagcagagacccagcggctacgtgcaccagcaggcccccacctacggccacggcctgaccagcacccagagattcagccaccagaccctgcagcagacccccatgatcagcaccatgacccccatgagcgcccagggcgtgcaggccggcgtgagaagcaccgccatcctgcccgagcagcagcagcagcagcagcagcagcagcagcagcagcagcagcagcagcagcagcagcagcagcagcagcagcagcagtaccacatcagacagcagcagcagcagcagatcctgagacagcagcagcagcagcagcagcagcagcagcagcagcagcagcagcagcagcagcagcagcagcagcagcagcagcagcaccagcagcagcagcagcagcaggccgcccccccccagccccagccccagagccagccccagttccagagacagggcctgcagcagacccagcagcagcagcagaccgccgccctggtgagacagctgcagcagcagctgagcaacacccagccccagcccagcaccaacatcttcggcagatactag

SEQ ID NO: 88205 - DNA, 756 bp, synthetic construct
  misc_feature 1..756: note = Description of Artificial Sequence: Synthetic coding sequence
  source 1..756: mol_type = other DNA
tgagagagaaagaagaagagcaccaagggcaagaagagaagccagcccgccaccaagaccgaggactacggcatgggccccggcagaagcggcccctacggcgtgaccgtgccccccgacctgctgcaccaccccaaccccggcagcatcacccacctgaactacagacagggcagcatcggcctgtacacccagaaccagcccctgcccgccggcggccccagagtggacccctacagacccgtgagactgcccatgcagaagctgcccaccagacccacctaccccggcgtgctgcccaccaccatgaccggcgtgatgggcctggagcccagcagctacaagaccagcgtgtacagacagcagcagcccgccgtgccccagggccagagactgagacagcagctgcagcagagccagggcatgctgggccagagcagcgtgcaccagatgacccccagcagcagctacggcctgcagaccagccagggctacaccccctacgtgagccacgtgggcctgcagcagcacaccggccccgccgaccccaccagacacctgcagcagagacccagcggctacgtgcaccagcaggcccccacctacggccacggcctgaccagcacccagagattcagccaccagaccctgcagcagacccccatgatcagcaccatgacccccatgagcgcccagggcgtgcaggccggcgtgagaagcaccgccatcctgcccgagcagcagcagcagcagtag

SEQ ID NO: 88206 - DNA, 6003 bp, synthetic construct
  misc_feature 1..6003: note = Description of Artificial Sequence: Synthetic coding sequence
  source 1..6003: mol_type = other DNA
atggccgccttcggcatcctgagctacgagcacagacccctgaagagacccagactgggcccccccgacgtgtacccccaggaccccaagcagaaggaggacgagctgaccgccctgaacgtgaagcagggcttcaacaaccagcccgccgtgagcggcgacgagcacggcagcgccaagaacgtgagcttcaaccccgccaagatcagcagcaacttcagcagcatcatcgccgagaagctgagatgcaacaccctgcccgacaccggcagaagaaagccccaggtgaaccagaaggacaacttctggctggtgaccgccagaagccagagcgccatcaacacctggttcaccgacctggccggcaccaagcccctgacccagctggccaagaaggtgcccatcttcagcaagaaggaggaggtgttcggctacctggccaagtacaccgtgcccgtgatgagagccgcctggctgatcaagatgacctgcgcctactacgccgccatcagcgagaccaaggtgaagaagagacacgtggaccccttcatggagtggacccagatcatcaccaagtacctgtgggagcagctgcagaagatggccgagtactacagacccggccccgccggcagcggcggctgcggcagcaccatcggccccctgccccacgacgtggaggtggccatcagacagtgggactacaccgagaagctggccatgttcatgttccaggacggcatgctggacagacacgagttcctgacctgggtgctggagtgcttcgagaagatcagacccggcgaggacgagctgctgaagctgctgctgcccctgctgctgagatacagcggcgagttcgtgcagagcgcctacctgagcagaagactggcctacttctgcaccagaagactggccctgcagctggacggcgtgagcagccacagcagccacgtgatcagcgcccagagcaccagcaccctgcccaccacccccgccccccagccccccaccagcagcacccccagcacccccttcagcgacctgctgatgtgcccccagcacagacccctggtgttcggcctgagctgcatcctgcagaccatcctgctgtgctgccccagcgccctggtgtggcactacagcctgaccgacagcagaatcaagaccggcagccccctggaccacctgcccatcgcccccagcaacctgcccatgcccgagggcaacagcgccttcacccagcaggtgagagccaagctgagagagatcgagcagcagatcaaggagagaggccaggccgtggaggtgagatggagcttcgacaagtgccaggaggccaccgccggcttcaccatcggcagagtgctgcacaccctggaggtgctggacagccacagcttcgagagaagcgacttcagcaacagcctggacagcctgtgcaacagaatcttcggcctgggccccagcaaggacggccacgagatcagcagcgacgacgacgccgtggtgagcctgctgtgcgagtgggccgtgagctgcaagagaagcggcagacacagagccatggtggtggccaagctgctggagaagagacaggccgagatcgaggccgagagatgcggcgagagcgaggccgccgacgagaagggcagcatcgccagcggcagcctgagcgcccccagcgcccccatcttccaggacgtgctgctgcagttcctggacacccaggcccccatgctgaccgaccccagaagcgagagcgagagagtggagttcttcaacctggtgctgctgttctgcgagctgatcagacacgacgtgttcagccacaacatgtacacctgcaccctgatcagcagaggcgacctggccttcggcgcccccggccccagaccccccagccccttcgacgaccccgccgacgaccccgagcacaaggaggccgagggcagcagcagcagcaagctggaggaccccggcctgagcgagagcatggacatcgaccccagcagcagcgtgctgttcgaggacatggagaagcccgacttcagcctgttcagccccaccatgccctgcgagggcaagggcagccccagccccgagaagcccgacgtggagaaggaggtgaagcccccccccaaggagaagatcgagggcaccctgggcgtgctgtacgaccagcccagacacgtgcagtacgccacccacttccccatcccccaggaggagagctgcagccacgagtgcaaccagagactggtggtgctgttcggcgtgggcaagcagagagacgacgccagacacgccatcaagaagatcaccaaggacatcctgaaggtgctgaacagaaagggcaccgccgagaccgaccagctggcccccatcgtgcccctgaaccccggcgacctgaccttcctgggcggcgaggacggccagaagagaagaagaaacagacccgaggccttccccaccgccgaggacatcttcgccaagttccagcacctgagccactacgaccagcaccaggtgaccgcccaggtgagcagaaacgtgctggagcagatcaccagcttcgccctgggcatgagctaccacctgcccctggtgcagcacgtgcagttcatcttcgacctgatggagtacagcctgagcatcagcggcctgatcgacttcgccatccagctgctgaacgagctgagcgtggtggaggccgagctgctgctgaagagcagcgacctggtgggcagctacaccaccagcctgtgcctgtgcatcgtggccgtgctgagacactaccacgcctgcctgatcctgaaccaggaccagatggcccaggtgttcgagggcctgtgcggcgtggtgaagcacggcatgaacagaagcgacggcagcagcgccgagagatgcatcctggcctacctgtacgacctgtacaccagctgcagccacctgaagaacaagttcggcgagctgttcagcgacttctgcagcaaggtgaagaacaccatctactgcaacgtggagcccagcgagagcaacatgagatgggcccccgagttcatgatcgacaccctggagaaccccgccgcccacaccttcacctacaccggcctgggcaagagcctgagcgagaaccccgccaacagatacagcttcgtgtgcaacgccctgatgcacgtgtgcgtgggccaccacgaccccgacagagtgaacgacatcgccatcctgtgcgccgagctgaccggctactgcaagagcctgagcgccgagtggctgggcgtgctgaaggccctgtgctgcagcagcaacaacggcacctgcggcttcaacgacctgctgtgcaacgtggacgtgagcgacctgagcttccacgacagcctggccaccttcgtggccatcctgatcgccagacagtgcctgctgctggaggacctgatcagatgcgccgccatccccagcctgctgaacgccgcctgcagcgagcaggacagcgagcccggcgccagactgacctgcagaatcctgctgcacctgttcaagaccccccagctgaacccctgccagagcgacggcaacaagcccaccgtgggcatcagaagcagctgcgacagacacctgctggccgccagccagaacagaatcgtggacggcgccgtgttcgccgtgctgaaggccgtgttcgtgctgggcgacgccgagctgaagggcagcggcttcaccgtgaccggcggcaccgaggagctgcccgaggaggagggcggcggcggcagcggcggcagaagacagggcggcagaaacatcagcgtggagaccgccagcctggacgtgtacgccaagtacgtgctgagaagcatctgccagcaggagtgggtgggcgagagatgcctgaagagcctgtgcgaggacagcaacgacctgcaggaccccgtgctgagcagcgcccaggcccagagactgatgcagctgatctgctacccccacagactgctggacaacgaggacggcgagaacccccagagacagagaatcaagagaatcctgcagaacctggaccagtggaccatgagacagagcagcctggagctgcagctgatgatcaagcagacccccaacaacgagatgaacagcctgctggagaacatcgccaaggccaccatcgaggtgttccagcagagcgccgagaccggcagcagcagcggcagcaccgccagcaacatgcccagcagcagcaagaccaagcccgtgctgagcagcctggagagaagcggcgtgtggctggtggcccccctgatcgccaagctgcccaccagcgtgcagggccacgtgctgaaggccgccggcgaggagctggagaagggccagcacctgggcagcagcagcagaaaggagagagacagacagaagcagaagagcatgagcctgctgagccagcagcccttcctgagcctggtgctgacctgcctgaagggccaggacgagcagagagagggcctgctgaccagcctgtacagccaggtgcaccagatcgtgaacaactggagagacgaccagtacctggacgactgcaagcccaagcagctgatgcacgaggccctgaagctgagactgaacctggtgggcggcatgttcgacaccgtgcagagaagcacccagcagaccaccgagtgggccatgctgctgctggagatcatcatcagcggcaccgtggacatgcagagcaacaacgagctgttcaccaccgtgctggacatgctgagcgtgctgatcaacggcaccctggccgccgacatgagcagcatcagccagggcagcatggaggagaacaagagagcctacatgaacctggccaagaagctgcagaaggagctgggcgagagacagagcgacagcctggagaaggtgagacagctgctgcccctgcccaagcagaccagagacgtgatcacctgcgagccccagggcagcctgatcgacaccaagggcaacaagatcgccggcttcgacagcatcttcaagaaggagggcctgcaggtgagcaccaagcagaagatcagcccctgggacctgttcgagggcctgaagcccagcgcccccctgagctggggctggttcggcaccgtgagagtggacagaagagtggccagaggcgaggagcagcagagactgctgctgtaccacacccacctgagacccagacccagagcctactacctggagcccctgcccctgccccccgaggacgaggagccccccgcccccaccctgctggagcccgagaagaaggcccccgagccccccaagaccgacaagcccggcgccgccccccccagcaccgaggagagaaagaagaagagcaccaagggcaagaagagaagccagcccgccaccaagaccgaggactacggcatgggccccggcagaagcggcccctacggcgtgaccgtgccccccgacctgctgcaccaccccaaccccggcagcatcacccacctgaactacagacagggcagcatcggcctgtacacccagaaccagcccctgcccgccggcggccccagagtggacccctacagacccgtgagactgcccatgcagaagctgcccaccagacccacctaccccggcgtgctgcccaccaccatgaccggcgtgatgggcctggagcccagcagctacaagaccagcgtgtacagacagcagcagcccgccgtgccccagggccagagactgagacagcagctgcagcagagccagggcatgctgggccagagcagcgtgcaccagatgacccccagcagcagctacggcctgcagaccagccagggctacaccccctacgtgagccacgtgggcctgcagcagcacaccggccccgccgaccccaccagacacctgcagcagagacccagcggctacgtgcaccagcaggcccccacctacggccacggcctgaccagcacccagagcttccacaccagacactgcagcagacacccctag

SEQ ID NO: 88207 - DNA, 2271 bp, synthetic construct
  misc_feature 1..2271: note = Description of Artificial Sequence: Synthetic coding sequence
  source 1..2271: mol_type = other DNA
atggccgccttcggcctgctgagctacgagcagagacccctgaagagacccagactgggcccccccgacgtgtacccccaggaccccaagcagaaggaggacgagctgaccgccgtgaacgtgaagcagggcttcaacaaccagcccgccttcaccggcgacgagcacggcagcgccagaaacatcgtgatcaaccccagcaagatcggcgcctacttcagcagcatcctggccgagaagctgaagctgaacaccttccaggacaccggcaagaagaagccccaggtgaacgccaaggacaactactggctggtgaccgccagaagccagagcgccatccacagctggttcagcgacctggccggcaacaagcccctgagcatcctggccaagaaggtgcccatcctgagcaagaaggaggacgtgttcgcctacctggccaagtacagcgtgcccatggtgagagccacctggctgatcaagatgacctgcgcctactacagcgccatcagcgaggccaagatcaagaagagacaggcccccgaccccaacctggagtggacccagatcagcaccagatacctgagagagcagctggccaagatcagcgacttctaccacatggccagcagcaccggcgacggccccgtgcccgtgccccccgaggtggagcaggccatgaagcagtgggagtacaacgagaagctggccttccacatgttccaggagggcatgctggagaagcacgagtacctgacctggatcctggacgtgctggagaagatcagacccatggacgacgacctgctgaagctgctgctgcccctgatgctgcagtacagcgacgagttcgtgcagagcgcctacctgagcagaagactggcctacttctgcgccagaagactgagcctgctgctgagcgacagccccaacctgctggccgcccacagcccccacatgatgatcggccccaacaacagcagcatcggcgcccccagccccggcccccccggccccggcatgagccccgtgcagctggccttcagcgacttcctgagctgcgcccagcacggccccctggtgtacggcctgagctgcatgctgcagaccgtgaccctgtgctgccccagcgccctggtgtggaactacagcaccaacgagaacaagagcgccaaccccggcagccccctggacctgctgcaggtggcccccagcagcctgcccatgcccggcggcaacaccgccttcaaccagcaggtgagagccagaatctacgaggtggagcagcagatcaagcagagaggcagagccgtggaggtgagatggagcttcgacaagtgccaggagagcaccgccggcgtgaccatcagcagagtgctgcacaccctggaggtgctggacagacactgcttcgacagaaccgacagcagcaacagcatggagaccctgtaccacaagatcttctgggccaaccagaacaaggacaaccaggaggtggcccccaacgacgaggccgtggtgaccctgctgtgcgagtgggccgtgagctgcaagagaagcggcaagcacagagccatggccgtggccaagctgctggagaagagacaggccgagatcgaggccgagagatgcggcgagagcgaggtgctggacgagaaggagagcatcagcagcagcagcctggccggcagcagcctgcccgtgttccagaacgtgctgctgagattcctggacacccaggcccccagcctgagcgaccccaacagcgagtgcgagaaggtggagttcgtgaacctggtgctgctgttctgcgagttcatcagacacgacgtgttcagccacgacgcctacatgtgcaccctgatcagcagaggcgacctgagcgtgaccgccagcaccagacccagaagccccgtgggcgagaacgccgacgagcactacagcaaggaccacgacgtgaagatggaggagcagagcatcatggcccacatgggcatcgacagcggcaccaccaacatcttcgacgaggtggacaagagcgacttcaagaccgacttcggcagcgagttccccatcttcagccccatgcccggcgagagctgcgagaacgccaacaccagcctgggcagaagaatgagcgtgaactgcgagaagctggtgaagagagagaagcccagagagctgatcttccccagcaactacgacctgctgagacacctgcagtacgccacccacttccccatccccctggtgagccactgcttcagctag

SEQ ID NO: 88208 - DNA, 2166 bp, synthetic construct
  misc_feature 1..2166: note = Description of Artificial Sequence: Synthetic coding sequence
  source 1..2166: mol_type = other DNA
atggccgccttcggcctgctgagctacgagcagagacccctgaagagacccagactgggcccccccgacgtgtacccccaggaccccaagcagaaggaggacgagctgaccgccgtgaacgtgaagcagggcttcaacaaccagcccgccttcaccggcgacgagcacggcagcgccagaaacatcgtgatcaaccccagcaagatcggcgcctacttcagcagcatcctggccgagaagctgaagctgaacaccttccaggacaccggcaagaagaagccccaggtgaacgccaaggacaactactggctggtgaccgccagaagccagagcgccatccacagctggttcagcgacctggccggcaacaagcccctgagcatcctggccaagaaggtgcccatcctgagcaagaaggaggacgtgttcgcctacctggccaagtacagcgtgcccatggtgagagccacctggctgatcaagatgacctgcgcctactacagcgccatcagcgaggccaagatcaagaagagacaggcccccgaccccaacctggagtggacccagatcagcaccagatacctgagagagcagctggccaagatcagcgacttctaccacatggccagcagcaccggcgacggccccgtgcccgtgccccccgaggtggagcaggccatgaagcagtgggagtacaacgagaagctggccttccacatgttccaggagggcatgctggagaagcacgagtacctgacctggatcctggacgtgctggagaagatcagacccatggacgacgacctgctgaagctgctgctgcccctgatgctgcagtacagcgacgagttcgtgcagagcgcctacctgagcagaagactggcctacttctgcgccagaagactgagcctgctgctgagcgacagccccaacctgctggccgcccacagcccccacatgatgatcggccccaacaacagcagcatcggcgcccccagccccggcccccccggccccggcatgagccccgtgcagctggccttcagcgacttcctgagctgcgcccagcacggccccctggtgtacggcctgagctgcatgctgcagaccgtgaccctgtgctgccccagcgccctggtgtggaactacagcaccaacgagaacaagagcgccaaccccggcagccccctggacctgctgcaggtggcccccagcagcctgcccatgcccggcggcaacaccgccttcaaccagcaggtgagagccagaatctacgaggtggagcagcagatcaagcagagaggcagagccgtggaggtgagatggagcttcgacaagtgccaggagagcaccgccggcgtgaccatcagcagagtgctgcacaccctggaggtgctggacagacactgcttcgacagaaccgacagcagcaacagcatggagaccctgtaccacaagatcttctgggccaaccagaacaaggacaaccaggaggtggcccccaacgacgaggccgtggtgaccctgctgtgcgagtgggccgtgagctgcaagagaagcggcaagcacagagccatggccgtggccaagctgctggagaagagacaggccgagatcgaggccgagagatgcggcgagagcgaggtgctggacgagaaggagagcatcagcagcagcagcctggccggcagcagcctgcccgtgttccagaacgtgctgctgagattcctggacacccaggcccccagcctgagcgaccccaacagcgagtgcgagaaggtggagttcgtgaacctggtgctgctgttctgcgagttcatcagacacgacgtgttcagccacgacgcctacatgtgcaccctgatcagcagaggcgacctgagcgtgaccgccagcaccagacccagaagccccgtgggcgagaacgccgacgagcactacagcaaggaccacgacgtgaagatggagatcttcagccccatgcccggcgagagctgcgagaacgccaacaccagcctgggcagaagaatgagcgtgaactgcgagaagctggtgaagagagagaagcccagagagctgatcttccccagcaactacgacctgctgagacacctgcagtacgccacccacttccccatccccctggtgagccactgcttcagctag

SEQ ID NO: 88209 - DNA, 6438 bp, synthetic construct
  misc_feature 1..6438: note = Description of Artificial Sequence: Synthetic coding sequence
  source 1..6438: mol_type = other DNA
atggccgccttcggcctgctgagctacgagcagagacccctgaagagacccagactgggcccccccgacgtgtacccccaggaccccaagcagaaggaggacgagctgaccgccgtgaacgtgaagcagggcttcaacaaccagcccgccttcaccggcgacgagcacggcagcgccagaaacatcgtgatcaaccccagcaagatcggcgcctacttcagcagcatcctggccgagaagctgaagctgaacaccttccaggacaccggcaagaagaagccccaggtgaacgccaaggacaactactggctggtgaccgccagaagccagagcgccatccacagctggttcagcgacctggccggcaacaagcccctgagcatcctggccaagaaggtgcccatcctgagcaagaaggaggacgtgttcgcctacctggccaagtacagcgtgcccatggtgagagccacctggctgatcaagatgacctgcgcctactacagcgccatcagcgaggccaagatcaagaagagacaggcccccgaccccaacctggagtggacccagatcagcaccagatacctgagagagcagctggccaagatcagcgacttctaccacatggccagcagcaccggcgacggccccgtgcccgtgccccccgaggtggagcaggccatgaagcagtgggagtacaacgagaagctggccttccacatgttccaggagggcatgctggagaagcacgagtacctgacctggatcctggacgtgctggagaagatcagacccatggacgacgacctgctgaagctgctgctgcccctgatgctgcagtacagcgacgagttcgtgcagagcgcctacctgagcagaagactggcctacttctgcgccagaagactgagcctgctgctgagcgacagccccaacctgctggccgcccacagcccccacatgatgatcggccccaacaacagcagcatcggcgcccccagccccggcccccccggccccggcatgagccccgtgcagctggccttcagcgacttcctgagctgcgcccagcacggccccctggtgtacggcctgagctgcatgctgcagaccgtgaccctgtgctgccccagcgccctggtgtggaactacagcaccaacgagaacaagagcgccaaccccggcagccccctggacctgctgcaggtggcccccagcagcctgcccatgcccggcggcaacaccgccttcaaccagcaggtgagagccagaatctacgaggtggagcagcagatcaagcagagaggcagagccgtggaggtgagatggagcttcgacaagtgccaggagagcaccgccggcgtgaccatcagcagagtgctgcacaccctggaggtgctggacagacactgcttcgacagaaccgacagcagcaacagcatggagaccctgtaccacaagatcttctgggccaaccagaacaaggacaaccaggaggtggcccccaacgacgaggccgtggtgaccctgctgtgcgagtgggccgtgagctgcaagagaagcggcaagcacagagccatggccgtggccaagctgctggagaagagacaggccgagatcgaggccgagagatgcggcgagagcgaggtgctggacgagaaggagagcatcagcagcagcagcctggccggcagcagcctgcccgtgttccagaacgtgctgctgagattcctggacacccaggcccccagcctgagcgaccccaacagcgagtgcgagaaggtggagttcgtgaacctggtgctgctgttctgcgagttcatcagacacgacgtgttcagccacgacgcctacatgtgcaccctgatcagcagaggcgacctgagcgtgaccgccagcaccagacccagaagccccgtgggcgagaacgccgacgagcactacagcaaggaccacgacgtgaagatggagatcttcagccccatgcccggcgagagctgcgagaacgccaacaccagcctgggcagaagaatgagcgtgaactgcgagaagctggtgaagagagagaagcccagagagctgatcttccccagcaactacgacctgctgagacacctgcagtacgccacccacttccccatccccctggacgagagcagcagccacgagtgcaaccagagaaccatcctgctgtacggcgtgggcaaggagagagacgaggccagacaccagctgaagaagatcaccaaggacatcctgaagatcctgaacaagaagagcaccaccgagaccggcgtgggcgacgagggccagaaggccagaaagaacaagcaggagaccttccccaccctggagaccgtgttcaccaagctgcagctgctgagctacttcgaccagcaccaggtgaccagccagatcagcaacaacgtgctggagcagatcaccagcttcgccagcggcaccagctaccacctgcccctggcccaccacatccagctgatcttcgacctgatggagcccgccctgaacatcaacggcctgatcgacttcgccatccagctgctgaacgagctgagcgtggtggaggccgagctgctgctgaagagcagcagcctggccggcagctacaccaccggcctgtgcgtgtgcatcgtggccgtgctgagaagataccacagctgcctgatcctgaaccccgaccagaccgcccaggtgttcgagggcctgtgcggcgtggtgaagcacgtggtgaaccccagcgagtgcagcagccccgagagatgcatcctggcctacctgtacgacctgtacgtgagctgcagccacctgagaagcaagttcggcgacctgttcagcagcgcctgcagcaaggtgaagcagaccatctacaacaacgtgatgcccgccaacagcaacctgagatgggaccccgacttcatgatggacttcatcgagaaccccagcgccagaagcatcaactacagcatgctgggcaagatcctgagcgacaacgccgccaacagatacagcttcgtgtgcaacaccctgatgaacgtgtgcatgggccaccaggacgccggcagaatcaacgacatcgccaacttcagcagcgagctgaccgcctgctgcaccgtgctgagcagcgagtggctgggcgtgctgaaggccctgtgctgcagcagcaaccacgtgtggggcttcaacgacgtgctgtgcaccgtggacgtgagcgacctgagcttccacgacagcctggccaccttcatcgccatcctgatcgccagacagtgcttcagcctggaggacgtggtgcagcacgtggccctgcccagcctgctggccgccgcctgcggcgacgccgacgccgagcccggcgccagaatgacctgcagactgctgctgcacctgttcagagccccccaggcctgcttcctgccccaggccaccggcaagcccttccccggcatcagaagcagctgcgacagacacctgctggccgccgcccacaacagcatcgaggtgggcgccgtgttcgccgtgctgaaggccatcatgatgctgggcgacgccaagatcggcaacaacagcgtgagcagcctgaagaacgacgacttcaccatgagaggcctgagatgcgacggcaacgccgacgacatctggaccgccagccagaaccccaagagctgcggcaagagcatcagcatcgagaccgccaacctgagagagtacgccagatacgtgctgagaaccatctgccagcaggagtgggtgggcgagcactgcctgaaggagcccgagagactgtgcaccgacaaggagctgatcctggaccccgtgctgagcaacatgcaggcccagaagctgctgcagctgatctgctacccccacggcatcaaggagtgcaccgagggcgacaacctgcagagacagcacatcaagagaatcctgcagaacctggagcagtggaccctgagacagagctggctggagctgcagctgatgatcaagcagtgcctgaaggaccccggcagcggcagcgtggccgagatgaacaacctgctggacaacatcgccaaggccaccatcgaggtgttccagcagagcgccgacctgaacaacagcagcaacagcggcatgagcctgttcaaccccaacagcatcggcagcgccgacaccagcagcaccagacagaacggcatcaagaccttcctgagcagcagcgagagaagaggcgtgtggctggtggcccccctgatcgccagactgcccaccagcgtgcagggcagagtgctgaaggccgccggcgaggagctggagaagggccagcacctgggcagcagcagcaagaaggagagagacagacagaagcagaagagcatgagcctgctgagccagcagcccttcctgagcctggtgctgacctgcctgaagggccaggacgagcagagagagggcctgctgaccagcctgcagaaccaggtgaaccagatcctgagcaactggagagaggagagataccaggacgacatcaaggccagacagatgatgcacgaggccctgcagctgagactgaacctggtgggcggcatgttcgacaccgtgcagagaagcacccagtggaccaccgactgggccctgctgctgctgcagatcatcaccagcggcaccgtggacatgcacaccaacaacgagctgttcaccaccgtgctggacatgctgggcgtgctgatcaacggcaccctggccagcgacctgagcaacgccagccccggcggcagcgaggagaacaagagagcctacatgaacctggtgaagaagctgaagaaggagctgggcgacaagagaagcgagagcatcgacaaggtgagacagctgctgcccctgcccaagcagacctgcgacgtgatcacctgcgagcccatgggcagcctgatcgacaccaagggcaacaagatcgccggcttcgacagcatcgacaagaagcagggcctgcaggtgagcaccaagcagaaggtgagcccctgggacctgttcgagggccagaagaaccccgcccccctgagctgggcctggttcggcaccgtgagagtggacagaagagtgatcaagtacgaggagcagcaccacctgctgctgtaccacacccaccccatgcccaagcccagaagctactacctgcagcccctgcccctgccccccgaggaggaggaggaggagcccaccagccccgtgagccaggagcccgagagaaagagcgccgagctgagcgaccagggcaagaccaccaccgacgaggagaagaagaccaagggcagaaagagaaagaccaagagcagcagcagagtggacgagtacccccagagcaacatctacagagtgccccccaactacagccccatcagcagccagatgatgcaccacccccagagcaccctgtggggctacaacctggtgggccagccccagcagcccggcttcttcctgcagaaccagagcctgacccccggcggcagcagactggaccccgccggcagcttcgtgcccaccaacaccaagcaggccctgagcaacatgctgcagagaagaagcggcgccatgatgcagccccccagcctgcacgccatcaccagccagcagcagctgatccagatgaagctgctgcagcagcagcagcagcagagactgctgagacaggcccagaccagacccttccagcagggccagcccggcgaccaggccgccctgttcgccgcccaggccagacccagcccccagctgccccagtaccccggcctgcagcaggcccagaccatgccccagggctacaccatgtacggcacccagatgcccctgcagcagaccagccagcagcaggccggcagcgtggtgctgagccccagctacaacagcagagcctaccccgccgcccacagcaaccccgtgctgatggagagactgagacagatccagcagcagcccagcggctacgtgcagcagcaggccagcccctacctgcagcccctgaccggcagccagagactgaaccaccaggccctgcagcagagccccctggtgggcggcggcatcgacgccgtgctgaccagcgcccaccccaacctgcccagcgtgcccctgccccaggaccccatgagacccagacagccccaggtgagacagcagcagagactgctgcagatgcagcagccccagcagccccagccccagcagcccccccagccccagcagagcagccagagccagagccagaccctgggcctgcaggccatgcagccccagcagcccctgttccccagacagggcctgcagcagacccagcagcagcagcagaccgccgccctggtgagacagctgcagaagcagctgagcagcaaccagccccagcagggcgtgaccccctacggccaccccagccacttctag

SEQ ID NO: 88210 - DNA, 6522 bp, synthetic construct
  misc_feature 1..6522: note = Description of Artificial Sequence: Synthetic coding sequence
  source 1..6522: mol_type = other DNA
atgagcgccagcttcgtgcccaacggcgccagcctggaggactgccactgcaacctgttctgcctggccgacctgaccggcatcaagtggaagaagtacgtgtggcagggccccaccagcgcccccatcctgttccccgtgaccgaggaggaccccatcctgagcagcttcagcagatgcctgaaggccgacgtgctgggcgtgtggagaagagaccagagacccggcagaagagagctgtggatcttctggtggggcgaggaccccgtgctgctgaccctgttcaccatgacctaccagaagaagaagatggagtgcggcagaatggacttccccatgaacgccgtgctgtgcttccaggccgtgcacaacctgctggagagatgcctgatgaacagaaacttcgtgagaatcggcaagtggttcgtgaagccctacgagaaggacgagaagcccatcaacaagagcgagcacctgagctgcagcttcaccttcttcctgcacggcgacagcaacgtgtgcaccagcgtggagatcaaccagcaccagcccgtgtacctgctgagcgaggagcacatcaccctggcccagcagagcaacagccccttccaggtgatcctgtgccccttcggcctgaacggcaccctgaccggccaggccttcaagatgagcgacagcgccaccaagaagctgatcggcgagtggaagcagttctaccccatcagctgctgcctgaaggagatgagcgaggagaagcaggaggacatggactgggaggacgacagcctggccgccgtggaggtgctggtggccggcgtgagaatgatctaccccgcctgcttcgtgctggtgccccagagcgacatccccacccccagccccgtgggcagcacccactgcagcagcagctgcctgggcgtgcaccaggtgcccgccagcaccagagaccccgccatgagcagcgtgaccctgaccccccccaccagccccgaggaggtgcagaccgtggacccccagagcgtgcagaagtgggtgaagttcagcagcgtgagcgacggcttcaacagcgacagcaccagccaccacggcggcaagatccccagaaagctggccaaccacgtggtggacagagtgtggcaggagtgcaacatgaacagagcccagaacaagagaaagtacagcgccagcagcggcggcctgtgcgaggaggccaccgccgccaaggtggccagctgggacttcgtggaggccacccagagaaccaactgcagctgcctgagacacaagaacctgaagagcagaaacgccggccagcagggccaggcccccagcctgggccagcagcagcagatcctgcccaagcacaagaccaacgagaagcaggagaagagcgagaagccccagaagagacccctgacccccttccaccacagagtgagcgtgagcgacgacgtgggcatggacgccgacagcgccagccagagactggtgatcagcgcccccgacagccaggtgagattcagcaacatcagaaccaacgacgtggccaagaccccccagatgcacggcaccgagatggccaacagcccccagcccccccccctgagcccccacccctgcgacgtggtggacgagggcgtgaccaagacccccagcaccccccagagccagcacttctaccagatgcccacccccgaccccctggtgcccagcaagcccatggaggacagaatcgacagcctgagccagagcttccccccccagtaccaggaggccgtggagcccaccgtgtacgtgggcaccgccgtgaacctggaggaggacgaggccaacatcgcctggaagtactacaagttccccaagaagaaggacgtggagttcctgcccccccagctgcccagcgacaagttcaaggacgaccccgtgggccccttcggccaggagagcgtgaccagcgtgaccgagctgatggtgcagtgcaagaagcccctgaaggtgagcgacgagctggtgcagcagtaccagatcaagaaccagtgcctgagcgccatcgccagcgacgccgagcaggagcccaagatcgacccctacgccttcgtggagggcgacgaggagttcctgttccccgacaagaaggacagacagaacagcgagagagaggccggcaagaagcacaaggtggaggacggcaccagcagcgtgaccgtgctgagccacgaggaggacgccatgagcctgttcagccccagcatcaagcaggacgcccccagacccaccagccacgccagaccccccagcaccagcctgatctacgacagcgacctggccgtgagctacaccgacctggacaacctgttcaacagcgacgaggacgagctgacccccggcagcaagaagagcgccaacggcagcgacgacaaggccagctgcaaggagagcaagaccggcaacctggaccccctgagctgcatcagcaccgccgacctgcacaagatgtaccccaccccccccagcctggagcagcacatcatgggcttcagccccatgaacatgaacaacaaggagtacggcagcatggacaccacccccggcggcaccgtgctggagggcaacagcagcagcatcggcgcccagttcaagatcgaggtggacgagggcttctgcagccccaagcccagcgagatcaaggacttcagctacgtgtacaagcccgagaactgccagatcctggtgggctgcagcatgttcgcccccctgaagaccctgcccagccagtacctgccccccatcaagctgcccgaggagtgcatctacagacagagctggaccgtgggcaagctggagctgctgagcagcggccccagcatgcccttcatcaaggagggcgacggcagcaacatggaccaggagtacggcaccgcctacaccccccagacccacaccagcttcggcatgccccccagcagcgccccccccagcaacagcggcgccggcatcctgcccagccccagcacccccagattccccacccccagaacccccagaacccccagaacccccagaggcgccggcggccccgccagcgcccagggcagcgtgaagtacgagaacagcgacctgtacagccccgccagcacccccagcacctgcagacccctgaacagcgtggagcccgccaccgtgcccagcatccccgaggcccacagcctgtacgtgaacctgatcctgagcgagagcgtgatgaacctgttcaaggactgcaacttcgacagctgctgcatctgcgtgtgcaacatgaacatcaagggcgccgacgtgggcgtgtacatccccgaccccacccaggaggcccagtacagatgcacctgcggcttcagcgccgtgatgaacagaaagttcggcaacaacagcggcctgttcctggaggacgagctggacatcatcggcagaaacaccgactgcggcaaggaggccgagaagagattcgaggccctgagagccaccagcgccgagcacgtgaacggcggcctgaaggagagcgagaagctgagcgacgacctgatcctgctgctgcaggaccagtgcaccaacctgttcagccccttcggcgccgccgaccaggaccccttccccaagagcggcgtgatcagcaactgggtgagagtggaggagagagactgctgcaacgactgctacctggccctggagcacggcagacagttcatggacaacatgagcggcggcaaggtggacgaggccctggtgaagagcagctgcctgcacccctggagcaagagaaacgacgtgagcatgcagtgcagccaggacatcctgagaatgctgctgagcctgcagcccgtgctgcaggacgccatccagaagaagagaaccgtgagaccctggggcgtgcagggccccctgacctggcagcagttccacaagatggccggcagaggcagctacggcaccgacgagagccccgagcccctgcccatccccaccttcctgctgggctacgactacgactacctggtgctgagccccttcgccctgccctactgggagagactgatgctggagccctacggcagccagagagacatcgcctacgtggtgctgtgccccgagaacgaggccctgctgaacggcgccaagagcttcttcagagacctgaccgccatctacgagagctgcagactgggccagcacagacccgtgagcagactgctgaccgacggcatcatgagagtgggcagcaccgccagcaagaagctgagcgagaagctggtggccgagtggttcagccaggccgccgacggcaacaacgaggccttcagcaagctgaagctgtacgcccaggtgtgcagatacgacctgggcccctacctggccagcctgcccctggacagcagcctgctgagccagcccaacctggtggcccccaccagccagagcctgatcacccccccccagatgaccaacaccggcaacgccaacacccccagcgccaccctggccagcgccgccagcagcaccatgaccgtgaccagcggcgtggccatcagcaccagcgtggccaccgccaacagcaccctgaccaccgccagcaccagcagcagcagcagcagcaacctgaacagcggcgtgagcagcaacaagctgcccagcttcccccccttcggcagcatgaacagcaacgccgccggcagcatgagcacccaggccaacaccgtgcagagcggccagctgggcggccagcagaccagcgccctgcagaccgccggcatcagcggcgagagcagcagcctgcccacccagccccaccccgacgtgagcgagagcaccatggacagagacaaggtgggcatccccaccgacggcgacagccacgccgtgacctacccccccgccatcgtggtgtacatcatcgaccccttcacctacgagaacaccgacgagagcaccaacagcagcagcgtgtggaccctgggcctgctgagatgcttcctggagatggtgcagaccctgcccccccacatcaagagcaccgtgagcgtgcagatcatcccctgccagtacctgctgcagcccgtgaagcacgaggacagagagatctacccccagcacctgaagagcctggccttcagcgccttcacccagtgcagaagacccctgcccaccagcaccaacgtgaagaccctgaccggcttcggccccggcctggccatggagaccgccctgagaagccccgacagacccgagtgcatcagactgtacgccccccccttcatcctggcccccgtgaaggacaagcagaccgagctgggcgagaccttcggcgaggccggccagaagtacaacgtgctgttcgtgggctactgcctgagccacgaccagagatggatcctggccagctgcaccgacctgtacggcgagctgctggagacctgcatcatcaacatcgacgtgcccaacagagccagaagaaagaagagcagcgccagaaagttcggcctgcagaagctgtgggagtggtgcctgggcctggtgcagatgagcagcctgccctggagagtggtgatcggcagactgggcagaatcggccacggcgagctgaaggactggagctgcctgctgagcagaagaaacctgcagagcctgagcaagagactgaaggacatgtgcagaatgtgcggcatcagcgccgccgacagccccagcatcctgagcgcctgcctggtggccatggagccccagggcagcttcgtgatcatgcccgacagcgtgagcaccggcagcgtgttcggcagaagcaccaccctgaacatgcagaccagccagctgaacaccccccaggacaccagctgcacccacatcctggtgttccccaccagcgccagcgtgcaggtggccagcgccacctacaccaccgagaacctggacctggccttcaaccccaacaacgacggcgccgacggcatgggcatcttcgacctgctggacaccggcgacgacctggaccccgacatcatcaacatcctgcccgccagccccaccggcagccccgtgcacagccccggcagccactacccccacggcggcgacgccggcaagggccagagcaccgacagactgctgagcaccgagccccacgaggaggtgcccaacatcctgcagcagcccctggccctgggctacttcgtgagcaccgccaaggccggccccctgcccgactggttctggagcgcctgcccccaggcccagtaccagtgccccctgttcctgaaggccagcctgcacctgcacgtgcccagcgtgcagagcgacgagctgctgcacagcaagcacagccaccccctggacagcaaccagaccagcgacgtgctgagattcgtgctggagcagtacaacgccctgagctggctgacctgcgaccccgccacccaggacagaagaagctgcctgcccatccacttcgtggtgctgaaccagctgtacaacttcatcatgaacatgctgtag

SEQ ID NO: 88211 - DNA, 6525 bp, synthetic construct
  misc_feature 1..6525: note = Description of Artificial Sequence: Synthetic coding sequence
  source 1..6525: mol_type = other DNA
atgagcgccagcttcgtgcccaacggcgccagcctggaggactgccactgcaacctgttctgcctggccgacctgaccggcatcaagtggaagaagtacgtgtggcagggccccaccagcgcccccatcctgttccccgtgaccgaggaggaccccatcctgagcagcttcagcagatgcctgaaggccgacgtgctgggcgtgtggagaagagaccagagacccggcagaagagagctgtggatcttctggtggggcgaggaccccagcttcgccgacctgatccaccacgacctgagcgaggaggaggacggcgtgtgggagaacggcctgagctacgagtgcagaaccctgctgttcaaggccgtgcacaacctgctggagagatgcctgatgaacagaaacttcgtgagaatcggcaagtggttcgtgaagccctacgagaaggacgagaagcccatcaacaagagcgagcacctgagctgcagcttcaccttcttcctgcacggcgacagcaacgtgtgcaccagcgtggagatcaaccagcaccagcccgtgtacctgctgagcgaggagcacatcaccctggcccagcagagcaacagccccttccaggtgatcctgtgccccttcggcctgaacggcaccctgaccggccaggccttcaagatgagcgacagcgccaccaagaagctgatcggcgagtggaagcagttctaccccatcagctgctgcctgaaggagatgagcgaggagaagcaggaggacatggactgggaggacgacagcctggccgccgtggaggtgctggtggccggcgtgagaatgatctaccccgcctgcttcgtgctggtgccccagagcgacatccccacccccagccccgtgggcagcacccactgcagcagcagctgcctgggcgtgcaccaggtgcccgccagcaccagagaccccgccatgagcagcgtgaccctgaccccccccaccagccccgaggaggtgcagaccgtggacccccagagcgtgcagaagtgggtgaagttcagcagcgtgagcgacggcttcaacagcgacagcaccagccaccacggcggcaagatccccagaaagctggccaaccacgtggtggacagagtgtggcaggagtgcaacatgaacagagcccagaacaagagaaagtacagcgccagcagcggcggcctgtgcgaggaggccaccgccgccaaggtggccagctgggacttcgtggaggccacccagagaaccaactgcagctgcctgagacacaagaacctgaagagcagaaacgccggccagcagggccaggcccccagcctgggccagcagcagcagatcctgcccaagcacaagaccaacgagaagcaggagaagagcgagaagccccagaagagacccctgacccccttccaccacagagtgagcgtgagcgacgacgtgggcatggacgccgacagcgccagccagagactggtgatcagcgcccccgacagccaggtgagattcagcaacatcagaaccaacgacgtggccaagaccccccagatgcacggcaccgagatggccaacagcccccagcccccccccctgagcccccacccctgcgacgtggtggacgagggcgtgaccaagacccccagcaccccccagagccagcacttctaccagatgcccacccccgaccccctggtgcccagcaagcccatggaggacagaatcgacagcctgagccagagcttccccccccagtaccaggaggccgtggagcccaccgtgtacgtgggcaccgccgtgaacctggaggaggacgaggccaacatcgcctggaagtactacaagttccccaagaagaaggacgtggagttcctgcccccccagctgcccagcgacaagttcaaggacgaccccgtgggccccttcggccaggagagcgtgaccagcgtgaccgagctgatggtgcagtgcaagaagcccctgaaggtgagcgacgagctggtgcagcagtaccagatcaagaaccagtgcctgagcgccatcgccagcgacgccgagcaggagcccaagatcgacccctacgccttcgtggagggcgacgaggagttcctgttccccgacaagaaggacagacagaacagcgagagagaggccggcaagaagcacaaggtggaggacggcaccagcagcgtgaccgtgctgagccacgaggaggacgccatgagcctgttcagccccagcatcaagcaggacgcccccagacccaccagccacgccagaccccccagcaccagcctgatctacgacagcgacctggccgtgagctacaccgacctggacaacctgttcaacagcgacgaggacgagctgacccccggcagcaagaagagcgccaacggcagcgacgacaaggccagctgcaaggagagcaagaccggcaacctggaccccctgagctgcatcagcaccgccgacctgcacaagatgtaccccaccccccccagcctggagcagcacatcatgggcttcagccccatgaacatgaacaacaaggagtacggcagcatggacaccacccccggcggcaccgtgctggagggcaacagcagcagcatcggcgcccagttcaagatcgaggtggacgagggcttctgcagccccaagcccagcgagatcaaggacttcagctacgtgtacaagcccgagaactgccagatcctggtgggctgcagcatgttcgcccccctgaagaccctgcccagccagtacctgccccccatcaagctgcccgaggagtgcatctacagacagagctggaccgtgggcaagctggagctgctgagcagcggccccagcatgcccttcatcaaggagggcgacggcagcaacatggaccaggagtacggcaccgcctacaccccccagacccacaccagcttcggcatgccccccagcagcgccccccccagcaacagcggcgccggcatcctgcccagccccagcacccccagattccccacccccagaacccccagaacccccagaacccccagaggcgccggcggccccgccagcgcccagggcagcgtgaagtacgagaacagcgacctgtacagccccgccagcacccccagcacctgcagacccctgaacagcgtggagcccgccaccgtgcccagcatccccgaggcccacagcctgtacgtgaacctgatcctgagcgagagcgtgatgaacctgttcaaggactgcaacttcgacagctgctgcatctgcgtgtgcaacatgaacatcaagggcgccgacgtgggcgtgtacatccccgaccccacccaggaggcccagtacagatgcacctgcggcttcagcgccgtgatgaacagaaagttcggcaacaacagcggcctgttcctggaggacgagctggacatcatcggcagaaacaccgactgcggcaaggaggccgagaagagattcgaggccctgagagccaccagcgccgagcacgtgaacggcggcctgaaggagagcgagaagctgagcgacgacctgatcctgctgctgcaggaccagtgcaccaacctgttcagccccttcggcgccgccgaccaggaccccttccccaagagcggcgtgatcagcaactgggtgagagtggaggagagagactgctgcaacgactgctacctggccctggagcacggcagacagttcatggacaacatgagcggcggcaaggtggacgaggccctggtgaagagcagctgcctgcacccctggagcaagagaaacgacgtgagcatgcagtgcagccaggacatcctgagaatgctgctgagcctgcagcccgtgctgcaggacgccatccagaagaagagaaccgtgagaccctggggcgtgcagggccccctgacctggcagcagttccacaagatggccggcagaggcagctacggcaccgacgagagccccgagcccctgcccatccccaccttcctgctgggctacgactacgactacctggtgctgagccccttcgccctgccctactgggagagactgatgctggagccctacggcagccagagagacatcgcctacgtggtgctgtgccccgagaacgaggccctgctgaacggcgccaagagcttcttcagagacctgaccgccatctacgagagctgcagactgggccagcacagacccgtgagcagactgctgaccgacggcatcatgagagtgggcagcaccgccagcaagaagctgagcgagaagctggtggccgagtggttcagccaggccgccgacggcaacaacgaggccttcagcaagctgaagctgtacgcccaggtgtgcagatacgacctgggcccctacctggccagcctgcccctggacagcagcctgctgagccagcccaacctggtggcccccaccagccagagcctgatcacccccccccagatgaccaacaccggcaacgccaacacccccagcgccaccctggccagcgccgccagcagcaccatgaccgtgaccagcggcgtggccatcagcaccagcgtggccaccgccaacagcaccctgaccaccgccagcaccagcagcagcagcagcagcaacctgaacagcggcgtgagcagcaacaagctgcccagcttcccccccttcggcagcatgaacagcaacgccgccggcagcatgagcacccaggccaacaccgtgcagagcggccagctgggcggccagcagaccagcgccctgcagaccgccggcatcagcggcgagagcagcagcctgcccacccagccccaccccgacgtgagcgagagcaccatggacagagacaaggtgggcatccccaccgacggcgacagccacgccgtgacctacccccccgccatcgtggtgtacatcatcgaccccttcacctacgagaacaccgacgagagcaccaacagcagcagcgtgtggaccctgggcctgctgagatgcttcctggagatggtgcagaccctgcccccccacatcaagagcaccgtgagcgtgcagatcatcccctgccagtacctgctgcagcccgtgaagcacgaggacagagagatctacccccagcacctgaagagcctggccttcagcgccttcacccagtgcagaagacccctgcccaccagcaccaacgtgaagaccctgaccggcttcggccccggcctggccatggagaccgccctgagaagccccgacagacccgagtgcatcagactgtacgccccccccttcatcctggcccccgtgaaggacaagcagaccgagctgggcgagaccttcggcgaggccggccagaagtacaacgtgctgttcgtgggctactgcctgagccacgaccagagatggatcctggccagctgcaccgacctgtacggcgagctgctggagacctgcatcatcaacatcgacgtgcccaacagagccagaagaaagaagagcagcgccagaaagttcggcctgcagaagctgtgggagtggtgcctgggcctggtgcagatgagcagcctgccctggagagtggtgatcggcagactgggcagaatcggccacggcgagctgaaggactggagctgcctgctgagcagaagaaacctgcagagcctgagcaagagactgaaggacatgtgcagaatgtgcggcatcagcgccgccgacagccccagcatcctgagcgcctgcctggtggccatggagccccagggcagcttcgtgatcatgcccgacagcgtgagcaccggcagcgtgttcggcagaagcaccaccctgaacatgcagaccagccagctgaacaccccccaggacaccagctgcacccacatcctggtgttccccaccagcgccagcgtgcaggtggccagcgccacctacaccaccgagaacctggacctggccttcaaccccaacaacgacggcgccgacggcatgggcatcttcgacctgctggacaccggcgacgacctggaccccgacatcatcaacatcctgcccgccagccccaccggcagccccgtgcacagccccggcagccactacccccacggcggcgacgccggcaagggccagagcaccgacagactgctgagcaccgagccccacgaggaggtgcccaacatcctgcagcagcccctggccctgggctacttcgtgagcaccgccaaggccggccccctgcccgactggttctggagcgcctgcccccaggcccagtaccagtgccccctgttcctgaaggccagcctgcacctgcacgtgcccagcgtgcagagcgacgagctgctgcacagcaagcacagccaccccctggacagcaaccagaccagcgacgtgctgagattcgtgctggagcagtacaacgccctgagctggctgacctgcgaccccgccacccaggacagaagaagctgcctgcccatccacttcgtggtgctgaaccagctgtacaacttcatcatgaacatgctgtag

SEQ ID NO: 88212 - DNA, 6633 bp, synthetic construct
  misc_feature 1..6633: note = Description of Artificial Sequence: Synthetic coding sequence
  source 1..6633: mol_type = other DNA
atgaccgccgccgccaactgggtggccaacggcgccagcctggaggactgccacagcaacctgttcagcctggccgagctgaccggcatcaagtggagaagatacaacttcggcggccacggcgactgcggccccatcatcagcgcccccgcccaggacgaccccatcctgctgagcttcatcagatgcctgcaggccaacctgctgtgcgtgtggagaagagacgtgaagcccgactgcaaggagctgtggatcttctggtggggcgacgagcccaacctggtgggcgtgatccaccacgagctgcaggtggtggaggagggcctgtgggagaacggcctgagctacgagtgcagaaccctgctgttcaaggccatccacaacctgctggagagatgcctgatggacaagaacttcgtgagaatcggcaagtggttcgtgagaccctacgagaaggacgagaagcccgtgaacaagagcgagcacctgagctgcgccttcaccttcttcctgcacggcgagagcaacgtgtgcaccagcgtggagatcgcccagcaccagcccatctacctgatcaacgaggagcacatccacatggcccagagcagccccgcccccttccaggtgctggtgagcccctacggcctgaacggcaccctgaccggccaggcctacaagatgagcgaccccgccaccagaaagctgatcgaggagtggcagtacttctaccccatggtgctgaagaagaaggaggagagcaaggaggaggacgagctgggctacgacgacgacttccccgtggccgtggaggtgatcgtgggcggcgtgagaatggtgtaccccagcgccttcgtgctgatcagccagaacgacatccccgtgccccagagcgtggccagcgccggcggccacatcgccgtgggccagcagggcctgggcagcgtgaaggaccccagcaactgcggcatgcccctgaccccccccaccagccccgagcaggccatcctgggcgagagcggcggcatgcagagcgccgccagccacctggtgagccaggacggcggcatgatcaccatgcacagccccaagagaagcggcaagatcccccccaagctgcacaaccacatggtgcacagagtgtggaaggagtgcatcctgaacagaacccagagcaagagaagccagatgagcacccccaccctggaggaggagcccgccagcaaccccgccacctgggacttcgtggaccccacccagagagtgagctgcagctgcagcagacacaagctgctgaagagatgcgccgtgggccccaacagaccccccaccgtgagccagcccggcttcagcgccggccccagcagcagcagcagcctgcccccccccgccagcagcaagcacaagaccgccgagagacaggagaagggcgacaagctgcagaagagacccctgatccccttccaccacagacccagcgtggccgaggagctgtgcatggagcaggacacccccggccagaagctgggcctggccggcatcgacagcagcctggaggtgagcagcagcagaaagtacgacaagcagatggccgtgcccagcagaaacaccagcaagcagatgaacctgaaccccatggacagcccccacagccccatcagccccctgccccccaccctgagcccccagcccagaggccaggagaccgagagcctggacccccccagcgtgcccgtgaaccccgccctgtacggcaacggcctggagctgcagcagctgagcaccctggacgacagaaccgtgctggtgggccagagactgcccctgatggccgaggtgagcgagaccgccctgtactgcggcatcagacccagcaaccccgagagcagcgagaagtggtggcacagctacagactgccccccagcgacgacgccgagttcagaccccccgagctgcagggcgagagatgcgacgccaagatggaggtgaacagcgagagcaccgccctgcagagactgctggcccagcccaacaagagattcaagatctggcaggacaagcagccccagctgcagcccctgcacttcctggaccccctgcccctgagccagcagcccggcgacagcctgggcgaggtgaacgacccctacaccttcgaggacggcgacatcaagtacatcttcaccgccaacaagaagtgcaagcagggcaccgagaaggacagcctgaagaagaacaagagcgaggacggcttcggcaccaaggacgtgaccacccccggccacagcacccccgtgcccgacggcaagaacgccatgagcatcttcagcagcgccaccaagaccgacgtgagacaggacaacgccgccggcagagccggcagcagcagcctgacccaggtgaccgacctggcccccagcctgcacgacctggacaacatcttcgacaacagcgacgacgacgagctgggcgccgtgagccccgccctgagaagcagcaagatgcccgccgtgggcaccgaggacagacccctgggcaaggacggcagagccgccgtgccctacccccccaccgtggccgacctgcagagaatgttccccaccccccccagcctggagcagcaccccgccttcagccccgtgatgaactacaaggacggcatcagcagcgagaccgtgaccgccctgggcatgatggagagccccatggtgagcatggtgagcacccagctgaccgagttcaagatggaggtggaggacggcctgggcagccccaagcccgaggagatcaaggacttcagctacgtgcacaaggtgcccagcttccagcccttcgtgggcagcagcatgttcgcccccctgaagatgctgcccagccactgcctgctgcccctgaagatccccgacgcctgcctgttcagacccagctgggccatcccccccaagatcgagcagctgcccatgccccccgccgccaccttcatcagagacggctacaacaacgtgcccagcgtgggcagcctggccgaccccgactacctgaacaccccccagatgaacacccccgtgaccctgaacagcgccgcccccgccagcaacagcggcgccggcgtgctgcccagccccgccacccccagattcagcgtgcccacccccagaacccccagaacccccagaacccccagaggcggcggcaccgccagcggccagggcagcgtgaagtacgacagcaccgaccagggcagccccgccagcacccccagcaccaccagacccctgaacagcgtggagcccgccaccatgcagcccatccccgaggcccacagcctgtacgtgaccctgatcctgagcgacagcgtgatgaacatcttcaaggacagaaacttcgacagctgctgcatctgcgcctgcaacatgaacatcaagggcgccgacgtgggcctgtacatccccgacagcagcaacgaggaccagtacagatgcacctgcggcttcagcgccatcatgaacagaaagctgggctacaacagcggcctgttcctggaggacgagctggacatcttcggcaagaacagcgacatcggccaggccgccgagagaagactgatgatgtgccagagcaccttcctgccccaggtggagggcaccaagaagccccaggagccccccatcagcctgctgctgctgctgcagaaccagcacacccagcccttcgccagcctgaacttcctggactacatcagcagcaacaacagacagaccctgccctgcgtgagctggagctacgacagagtgcaggccgacaacaacgactactggaccgagtgcttcaacgccctggagcagggcagacagtacgtggacaaccccaccggcggcaaggtggacgaggccctggtgagaagcgccaccgtgcacagctggccccacagcaacgtgctggacatcagcatgctgagcagccaggacgtggtgagaatgctgctgagcctgcagcccttcctgcaggacgccatccagaagaagagaaccggcagaacctgggagaacatccagcacgtgcagggccccctgacctggcagcagttccacaagatggccggcagaggcacctacggcagcgaggagagccccgagcccctgcccatccccaccctgctggtgggctacgacaaggacttcctgaccatcagccccttcagcctgcccttctgggagagactgctgctggacccctacggcggccacagagacgtggcctacatcgtggtgtgccccgagaacgaggccctgctggagggcgccaagaccttcttcagagacctgagcgccgtgtacgagatgtgcagactgggccagcacaagcccatctgcaaggtgctgagagacggcatcatgagagtgggcaagaccgtggcccagaagctgaccgacgagctggtgagcgagtggttcaaccagccctggagcggcgaggagaacgacaaccacagcagactgaagctgtacgcccaggtgtgcagacaccacctggccccctacctggccaccctgcagctggacagcagcctgctgatcccccccaagtaccagaccccccccgccgccgcccagggccaggccacccccggcaacgccggccccctggcccccaacggcagcgccgccccccccgccggcagcgccttcaaccccaccagcaacagcagcagcaccaaccccgccgccagcagcagcgccagcggcagcagcgtgccccccgtgagcagcagcgccagcgcccccggcatcagccagatcagcaccaccagcagcagcggcttcagcggcagcgtgggcggccagaaccccagcaccggcggcatcagcgccgacagaacccagggcaacatcggctgcggcggcgacaccgaccccggccagagcagcagccagcccagccaggacggccaggagagcgtgaccgagagagagagaatcggcatccccaccgagcccgacagcgccgacagccacgcccacccccccgccgtggtgatctacatggtggaccccttcacctacgccgccgaggaggacagcaccagcggcaacttctggctgctgagcctgatgagatgctacaccgagatgctggacaacctgcccgagcacatgagaaacagcttcatcctgcagatcgtgccctgccagtacatgctgcagaccatgaaggacgagcaggtgttctacatccagtacctgaagagcatggccttcagcgtgtactgccagtgcagaagacccctgcccacccagatccacatcaagagcctgaccggcttcggccccgccgccagcatcgagatgaccctgaagaaccccgagagacccagccccatccagctgtacagcccccccttcatcctggcccccatcaaggacaagcagaccgagctgggcgagaccttcggcgaggccagccagaagtacaacgtgctgttcgtgggctactgcctgagccacgaccagagatggctgctggccagctgcaccgacctgcacggcgagctgctggagacctgcgtggtgaacatcgccctgcccaacagaagcagaagaagcaaggtgagcgccagaaagatcggcctgcagaagctgtgggagtggtgcatcggcatcgtgcagatgaccagcctgccctggagagtggtgatcggcagactgggcagactgggccacggcgagctgaaggactggagcatcctgctgggcgagtgcagcctgcagaccatcagcaagaagctgaaggacgtgtgcagaatgtgcggcatcagcgccgccgacagccccagcatcctgagcgcctgcctggtggccatggagccccagggcagcttcgtggtgatgcccgacgccgtgaccatgggcagcgtgttcggcagaagcaccgccctgaacatgcagagcagccagctgaacaccccccaggacgccagctgcacccacatcctggtgttccccaccagcagcaccatccaggtggcccccgccaactaccccaacgaggacggcttcagccccaacaacgacgacatgttcgtggacctgcccttccccgacgacatggacaacgacatcggcatcctgatgaccggcaacctgcacagcagccccaacagcagccccgtgcccagccccggcagccccagcggcatcggcgtgggcagccacttccagcacagcagaagccagggcgagagactgctgagcagagaggcccccgaggagctgaagcagcagcccctggccctgggctacttcgtgagcaccgccaaggccgagaacctgccccagtggttctggagcagctgcccccaggcccagaaccagtgccccctgttcctgaaggccagcctgcaccaccacatcagcgtggcccagaccgacgagctgctgcccgccagaaacagccagagagtgccccaccccctggacagcaagaccaccagcgacgtgctgagattcgtgctggagcagtacaacgccctgagctggctgacctgcaaccccgccacccaggacagaaccagctgcctgcccgtgcacttcgtggtgctgacccagctgtacaacgccatcatgaacatcctgtag

SEQ ID NO: 88213 - DNA, 4365 bp, synthetic construct
  misc_feature 1..4365: note = Description of Artificial Sequence: Synthetic coding sequence
  source 1..4365: mol_type = other DNA
atggcccccgtgcagctggagaaccaccagctggtgccccccggcggcggcggcggcggcagcggcggcccccccagcgcccccgccccccccccccccggcgccgccgtggccgccgccgccgccgccgccgccagccccggctacagactgagcaccctgatcgagttcctgctgcacagagcctacagcgagctgatggtgctgaccgacctgctgcccagaaagagcgacgtggagagaaagatcgagatcgtgcagttcgccagcagaaccagacagctgttcgtgagactgctggccctggtgaagtgggccaacaacgccggcaaggtggagaagtgcgccatgatcagcagcttcctggaccagcaggccatcctgttcgtggacaccgccgacagactggccagcctggccagagacgccctggtgcacgccagactgcccagcttcgccatcccctacgccatcgacgtgctgaccaccggcagctaccccagactgcccacctgcatcagagacaagatcatcccccccgaccccatcaccaagatcgagaagcaggccaccctgcaccagctgaaccagatcctgagacacagactggtgaccaccgacctgcccccccagctggccaacctgaccgtggccaacggcagagtgaagttcagagtggagggcgagttcgaggccaccctgaccgtgatgggcgacgaccccgacgtgccctggagactgctgaagctggagatcctggtggaggacaaggagaccggcgacggcagagccctggtgcacagcatgcagatcagcttcatccaccagctggtgcagagcagactgttcgccgacgagaagcccctgcaggacatgtacaactgcctgcacagcttctgcctgagcctgcagctggaggtgctgcacagccagaccctgatgctgatcagagagagatggggcgacctggtgcaggtggagagataccacgccggcaagtgcctgagcctgagcgtgtggaaccagcaggtgctgggcagaaagaccggcaccgccagcgtgcacaaggtgaccatcaagatcgacgagaacgacgtgagcaagcccctgcagatcttccacgacccccccctgcccgccagcgacagcaagctggtggagagagccatgaagatcgaccacctgagcatcgagaagctgctgatcgacagcgtgcacgccagagcccaccagaagctgcaggagctgaaggccatcctgagaggcttcaacgccaacgagaacagcagcatcgagaccgccctgcccgccctggtggtgcccatcctggagccctgcggcaacagcgagtgcctgcacatcttcgtggacctgcacagcggcatgttccagctgatgctgtacggcctggaccaggccaccctggacgacatggagaagagcgtgaacgacgacatgaagagaatcatcccctggatccagcagctgaagttctggctgggccagcagagatgcaagcagagcatcaagcacctgcccaccatcagcagcgagaccctgcagctgagcaactacagcacccaccccatcggcaacctgagcaagaacaagctgttcatcaagctgaccagactgccccagtactacatcgtggtggagatgctggaggtgcccaacaagcccacccagctgagctacaagtactacttcatgagcgtgaacgccgccgacagagaggacagccccgccatggccctgctgctgcagcagttcaaggagaacatccaggacctggtgttcagaaccaagaccggcaagcagaccagaaccaacgccaagagaaagctgagcgacgacccctgccccgtggagagcaagaagaccaagagagccggcgagatgtgcgccttcaacaaggtgctggcccacttcgtggccatgtgcgacaccaacatgcccttcgtgggcctgagactggagctgagcaacctggagatcccccaccagggcgtgcaggtggagggcgacggcttcagccacgccatcagactgctgaagatccccccctgcaagggcatcaccgaggagacccagaaggccctggacagaagcctgctggactgcaccttcagactgcagggcagaaacaacagaacctgggtggccgagctggtgttcgccaactgccccctgaacggcaccagcaccagagagcagggccccagcagacacgtgtacctgacctacgagaacctgctgagcgagcccgtgggcggcagaaaggtggtggagatgttcctgaacgactggaacagcatcgccagactgtacgagtgcgtgctggagttcgccagaagcctgcccgacatccccgcccacctgaacatcttcagcgaggtgagagtgtacaactacagaaagctgatcctgtgctacggcaccaccaagggcagcagcatcagcatccagtggaacagcatccaccagaagttccacatcagcctgggcaccgtgggccccaacagcggctgcagcaactgccacaacaccatcctgcaccagctgcaggagatgttcaacaagacccccaacgtggtgcagctgctgcaggtgctgttcgacacccaggcccccctgaacgccatcaacaagctgcccaccgtgcccatgctgggcctgacccagagaaccaacaccgcctaccagtgcttcagcatcctgccccagagcagcacccacatcagactggccttcagaaacatgtactgcatcgacatctactgcagaagcagaggcgtggtggccatcagagacggcgcctacagcctgttcgacaacagcaagctggtggagggcttctaccccgcccccggcctgaagaccttcctgaacatgttcgtggacagcaaccaggacgccagaagaagaagcgtgaacgaggacgacaacccccccagccccatcggcggcgacatgatggacagcctgatcagccagctgcagccccccccccagcagcagcccttccccaagcagcccggcaccagcggcgcctaccccctgaccagcccccccaccagctaccacagcaccgtgaaccagagccccagcatgatgcacacccagagccccggcaacctgcacgccgccagcagccccagcggcgccctgagagcccccagccccgccagcttcgtgcccacccccccccccagcagccacggcatcagcatcggccccggcgccagcttcgccagcccccacggcaccctggaccccagcagcccctacaccatggtgagccccagcggcagagccggcaactggcccggcagcccccaggtgagcggccccagccccgccgccagaatgcccggcatgagccccgccaaccccagcctgcacagccccgtgcccgacgccagccacagccccagagccggcaccagcagccagaccatgcccaccaacatgcccccccccagaaagctgccccagagaagctgggccgccagcatccccaccatcctgacccacagcgccctgaacatcctgctgctgcccagccccacccccggcctggtgcccggcctggccggcagctacctgtgcagccccctggagagattcctgggcagcgtgatcatgagaagacacctgcagagaatcatccagcaggagaccctgcagctgatcaacagcaacgagcccggcgtgatcatgttcaagaccgacgccctgaagtgcagagtggccctgagccccaagaccaaccagaccctgcagctgaaggtgacccccgagaacgccggccagtggaagcccgacgagctgcaggtgctggagaagttcttcgagaccagagtggccggcccccccttcaaggccaacaccctgatcgccttcaccaagctgctgggcgcccccacccacatcctgagagactgcgtgcacatcatgaagctggagctgttccccgaccaggccacccagctgaagtggaacgtgcagttctgcctgaccatcccccccagcgccccccccatcgccccccccggcacccccgccgtggtgctgaagagcaagatgctgttcttcctgcagctgacccagaagaccagcgtgcccccccaggagcccgtgagcatcatcgtgcccatcatctacgacatggccagcggcaccacccagcaggccgacatccccagacagcagaacagcagcgtggccgcccccatgatggtgagcaacatcctgaagagattcgccgagatgaacccccccagacagggcgagtgcaccatcttcgccgccgtgagagacctgatggccaacctgaccctgccccccggcggcagaccctag

SEQ ID NO: 88214 - DNA, 468 bp, synthetic construct
  misc_feature 1..468: note = Description of Artificial Sequence: Synthetic coding sequence
  source 1..468: mol_type = other DNA
gtggccggcccccccttcaaggccaacaccctgatcgccttcaccaagctgctgggcgcccccacccacatcctgagagactgcgtgcacatcatgaagctggagctgttccccgaccaggccacccagctgaagtggaacgtgcagttctgcctgaccatcccccccagcgccccccccatcgccccccccggcacccccgccgtggtgctgaagagcaagatgctgttcttcctgcagctgacccagaagaccagcgtgcccccccaggagcccgtgagcatcatcgtgcccatcatctacgacatggccagcggcaccacccagcaggccgacatccccagacagcagaacagcagcgtggccgcccccatgatggtgagcaacatcctgaagagattcgccgagatgaacccccccagacagggcagcatcaagggcaccggctgccccagcgacttcctgtag

SEQ ID NO: 88215 - DNA, 996 bp, synthetic construct
  misc_feature 1..996: note = Description of Artificial Sequence: Synthetic coding sequence
  source 1..996: mol_type = other DNA
cccagcggcagagccggcaactggcccggcagcccccaggtgagcggccccagccccgccgccagaatgcccggcatgagccccgccaaccccagcctgcacagccccgtgcccgacgccagccacagccccagagccggcaccagcagccagaccatgcccaccaacatgcccccccccagaaagctgccccagagaagctgggccgccagcatccccaccatcctgacccacagcgccctgaacatcctgctgctgcccagccccacccccggcctggtgcccggcctggccggcagctacctgtgcagccccctggagagattcctgggcagcgtgatcatgagaagacacctgcagagaatcatccagcaggagaccctgcagctgatcaacagcaacgagcccggcgtgatcatgttcaagaccgacgccctgaagtgcagagtggccctgagccccaagaccaaccagaccctgcagctgaaggtgacccccgagaacgccggccagtggaagcccgacgagctgcaggtgctggagaagttcttcgagaccagagtggccggcccccccttcaaggccaacaccctgatcgccttcaccaagctgctgggcgcccccacccacatcctgagagactgcgtgcacatcatgaagctggagctgttccccgaccaggccacccagctgaagtggaacgtgcagttctgcctgaccatcccccccagcgccccccccatcgccccccccggcacccccgccgtggtgctgaagagcaagatgctgttcttcctgcagctgacccagaagaccagcgtgcccccccaggagcccgtgagcatcatcgtgcccatcatctacgacatggccagcggcaccacccagcaggccgacatccccagacagcagaacagcagcgtggccgcccccatgatggtgagcaacatcctgaagagattcgccgagatgaacccccccagacagggcacctag

SEQ ID NO: 88216 - DNA, 2367 bp, synthetic construct
  misc_feature 1..2367: note = Description of Artificial Sequence: Synthetic coding sequence
  source 1..2367: mol_type = other DNA
atggacgtgagcggccaggagaccgactggagaagcaccgccttcagacagaagctggtgagccagatcgaggacgccatgagaaaggccggcgtggcccacagcaagagcagcaaggacatggagagccacgtgttcctgaaggccaagaccagagacgagtacctgagcctggtggccagactgatcatccacttcagagacatccacaacaagaagagccaggccagcgtgagcgaccccatgaacgccctgcagagcctgaccggcggccccgccgccggcgccgccggcatcggcatgccccccagaggccccggccagagcctgggcggcatgggcagcctgggcgccatgggccagcccatgagcctgagcggccagcccccccccggcaccagcggcatggccccccacagcatggccgtggtgagcaccgccaccccccagacccagctgcagctgcagcaggtggccctgcagcagcagcagcagcagcagcagttccagcagcagcagcaggccgccctgcagcagcagcagcagcagcagcagcagcagcagttccaggcccagcagagcgccatgcagcagcagttccaggccgtggtgcagcagcagcagcagctgcagcagcagcagcagcagcagcagcacctgatcaagctgcaccaccagaaccagcagcagatccagcagcagcagcagcagctgcagagaatcgcccagctgcagctgcagcagcagcagcagcagcagcagcagcagcagcagcagcagcagcaggccctgcaggcccagccccccatccagcagccccccatgcagcagccccagcccccccccagccaggccctgccccagcagctgcagcagatgcaccacacccagcaccaccagccccccccccagccccagcagccccccgtggcccagaaccagcccagccagctgcccccccagagccagacccagcccctggtgagccaggcccaggccctgcccggccagatgctgtacacccagccccccctgaagttcgtgagagcccccatggtggtgcagcagccccccgtgcagccccaggtgcagcagcagcagaccgccgtgcagaccgcccaggccgcccagatggtggcccccggcgtgcagatgatcaccgaggccctggcccagggcggcatgcacatcagagccagattcccccccaccaccgccgtgagcgccatccccagcagcagcatccccctgggcagacagcccatggcccaggtgagccagagcagcctgcccatgctgagcagccccagccccggccagcaggtgcagaccccccagagcatgcccccccccccccagcccagcccccagcccggccagcccagcagccagcccaacagcaacgtgagcagcggccccgcccccagccccagcagcttcctgcccagccccagcccccagcccagccagagccccgtgaccgccagaaccccccagaacttcagcgtgcccagccccggccccctgaacacccccgtgaaccccagcagcgtgatgagccccgccggcagcagccaggccgaggagcagcagtacctggacaagctgaagcagctgagcaagtacatcgagcccctgagaagaatgatcaacaagatcgacaagaacgaggacagaaagaaggacctgagcaagatgaagagcctgctggacatcctgaccgaccccagcaagagatgccccctgaagaccctgcagaagtgcgagatcgccctggagaagctgaagaacgacatggccgtgcccacccccccccccccccccgtgccccccaccaagcagcagtacctgtgccagcccctgctggacgccgtgctggccaacatcagaagccccgtgttcaaccacagcctgtacagaaccttcgtgcccgccatgaccgccatccacggcccccccatcaccgcccccgtggtgtgcaccagaaagagaagactggaggacgacgagagacagagcatccccagcgtgctgcagggcgaggtggccagactggaccccaagttcctggtgaacctggaccccagccactgcagcaacaacggcaccgtgcacctgatctgcaagctggacgacaaggacctgcccagcgtgccccccctggagctgagcgtgcccgccgactaccccgcccagagccccctgtggatcgacagacagtggcagtacgacgccaaccccttcctgcagagcgtgcacagatgcatgaccagcagactgctgcagctgcccgacaagcacagcgtgaccgccctgctgaacacctgggcccagagcgtgcaccaggcctgcctgagcgccgcctag

SEQ ID NO: 88217 - DNA, 2247 bp, synthetic construct
  misc_feature 1..2247: note = Description of Artificial Sequence: Synthetic coding sequence
  source 1..2247: mol_type = other DNA
atggacgtgagcggccaggagaccgactggagaagcaccgccttcagacagaagctggtgagccagatcgaggacgccatgagaaaggccggcgtggcccacagcaagagcagcaaggacatggagagccacgtgttcctgaaggccaagaccagagacgagtacctgagcctggtggccagactgatcatccacttcagagacatccacaacaagaagagccaggccagcgtgagcgaccccatgaacgccctgcagagcctgaccggcggccccgccgccggcgccgccggcatcggcatgccccccagaggccccggccagagcctgggcggcatgggcagcctgggcgccatgggccagcccatgagcctgagcggccagcccccccccggcaccagcggcatggccccccacagcatggccgtggtgagcaccgccaccccccagacccagctgcagctgcagcaggtggccctgcagcagcagcagcagcagcagcagttccagcagcagcagcaggccgccctgcagcagcagcagcagcagcagcagcagcagcagttccaggcccagcagagcgccatgcagcagcagttccaggccgtggtgcagcagcagcagcagctgcagcagcagcagcagcagcagcagcacctgatcaagctgcaccaccagaaccagcagcagatccagcagcagcagcagcagctgcagagaatcgcccagctgcagctgcagcagcagcagcagcagcagcagcagcagcagcagcagcagcagcaggccctgcaggcccagccccccatccagcagccccccatgcagcagccccagcccccccccagccaggccctgccccagcagctgcagcagatgcaccacacccagcaccaccagccccccccccagccccagcagccccccgtggcccagaaccagcccagccagctgcccccccagagccagacccagcccctggtgagccaggcccaggccctgcccggccagatgctgtacacccagccccccctgaagttcgtgagagcccccatggtggtgcagcagccccccgtgcagccccaggtgcagcagcagcagaccgccgtgcagaccgcccaggccgcccagatggtggcccccggcgtgcaggtgagccagagcagcctgcccatgctgagcagccccagccccggccagcaggtgcagaccccccagagcatgcccccccccccccagcccagcccccagcccggccagcccagcagccagcccaacagcaacgtgagcagcggccccgcccccagccccagcagcttcctgcccagccccagcccccagcccagccagagccccgtgaccgccagaaccccccagaacttcagcgtgcccagccccggccccctgaacacccccgtgaaccccagcagcgtgatgagccccgccggcagcagccaggccgaggagcagcagtacctggacaagctgaagcagctgagcaagtacatcgagcccctgagaagaatgatcaacaagatcgacaagaacgaggacagaaagaaggacctgagcaagatgaagagcctgctggacatcctgaccgaccccagcaagagatgccccctgaagaccctgcagaagtgcgagatcgccctggagaagctgaagaacgacatggccgtgcccacccccccccccccccccgtgccccccaccaagcagcagtacctgtgccagcccctgctggacgccgtgctggccaacatcagaagccccgtgttcaaccacagcctgtacagaaccttcgtgcccgccatgaccgccatccacggcccccccatcaccgcccccgtggtgtgcaccagaaagagaagactggaggacgacgagagacagagcatccccagcgtgctgcagggcgaggtggccagactggaccccaagttcctggtgaacctggaccccagccactgcagcaacaacggcaccgtgcacctgatctgcaagctggacgacaaggacctgcccagcgtgccccccctggagctgagcgtgcccgccgactaccccgcccagagccccctgtggatcgacagacagtggcagtacgacgccaaccccttcctgcagagcgtgcacagatgcatgaccagcagactgctgcagctgcccgacaagcacagcgtgaccgccctgctgaacacctgggcccagagcgtgcaccaggcctgcctgagcgccgcctag

SEQ ID NO: 88218 - DNA, 2034 bp, synthetic construct
  misc_feature 1..2034: note = Description of Artificial Sequence: Synthetic coding sequence
  source 1..2034: mol_type = other DNA
atggacgtgagcggccaggagaccgactggagaagcaccgccttcagacagaagctggtgagccagatcgaggacgccatgagaaaggccggcgtggcccacagcaagagcagcaaggacatggagagccacgtgttcctgaaggccaagaccagagacgagtacctgagcctggtggccagactgatcatccacttcagagacatccacaacaagaagagccaggccagcgtgagcgcccagctgcagctgcagcaggtggccctgcagcagcagcagcagcagcagcagttccagcagcagcagcaggccgccctgcagcagcagcagcagcagcagcagcagcagcagttccaggcccagcagagcgccatgcagcagcagttccaggccgtggtgcagcagcagcagcagctgcagcagcagcagcagcagcagcagcacctgatcaagctgcaccaccagaaccagcagcagatccagcagcagcagcagcagctgcagagaatcgcccagctgcagctgcagcagcagcagcagcagcagcagcagcagcagcagcagcagcagcaggccctgcaggcccagccccccatccagcagccccccatgcagcagccccagcccccccccagccaggccctgccccagcagctgcagcagatgcaccacacccagcaccaccagccccccccccagccccagcagccccccgtggcccagaaccagcccagccagctgcccccccagagccagacccagcccctggtgagccaggcccaggccctgcccggccagatgctgtacacccagccccccctgaagttcgtgagagcccccatggtggtgcagcagccccccgtgcagccccaggtgcagcagcagcagaccgccgtgcagaccgcccaggccgcccagatggtggcccccggcgtgcaggtgagccagagcagcctgcccatgctgagcagccccagccccggccagcaggtgcagaccccccagagcatgcccccccccccccagcccagcccccagcccggccagcccagcagccagcccaacagcaacgtgagcagcggccccgcccccagccccagcagcttcctgcccagccccagcccccagcccagccagagccccgtgaccgccagaaccccccagaacttcagcgtgcccagccccggccccctgaacacccccgtgaaccccagcagcgtgatgagccccgccggcagcagccaggccgaggagcagcagtacctggacaagctgaagcagctgagcaagtacatcgagcccctgagaagaatgatcaacaagatcgacaagaacgaggacagaaagaaggacctgagcaagatgaagagcctgctggacatcctgaccgaccccagcaagagatgccccctgaagaccctgcagaagtgcgagatcgccctggagaagctgaagaacgacatggccgtgcccacccccccccccccccccgtgccccccaccaagcagcagtacctgtgccagcccctgctggacgccgtgctggccaacatcagaagccccgtgttcaaccacagcctgtacagaaccttcgtgcccgccatgaccgccatccacggcccccccatcaccgcccccgtggtgtgcaccagaaagagaagactggaggacgacgagagacagagcatccccagcgtgctgcagggcgaggtggccagactggaccccaagttcctggtgaacctggaccccagccactgcagcaacaacggcaccgtgcacctgatctgcaagctggacgacaaggacctgcccagcgtgccccccctggagctgagcgtgcccgccgactaccccgcccagagccccctgtggatcgacagacagtggcagtacgacgccaaccccttcctgcagagcgtgcacagatgcatgaccagcagactgctgcagctgcccgacaagcacagcgtgaccgccctgctgaacacctgggcccagagcgtgcaccaggcctgcctgagcgccgcctag

SEQ ID NO: 88219 - DNA, 2169 bp, synthetic construct
  misc_feature 1..2169: note = Description of Artificial Sequence: Synthetic coding sequence
  source 1..2169: mol_type = other DNA
atgagaaaggccggcgtggcccacagcaagagcagcaaggacatggagagccacgtgttcctgaaggccaagaccagagacgagtacctgagcctggtggccagactgatcatccacttcagagacatccacaacaagaagagccaggccagcgtgagcgaccccatgaacgccctgcagagcctgaccggcggccccgccgccggcgccgccggcatcggcatgccccccagaggccccggccagagcctgggcggcatgggcagcctgggcgccatgggccagcccatgagcctgagcggccagcccccccccggcaccagcggcatggccccccacagcatggccgtggtgagcaccgccaccccccagacccagctgcagctgcagcaggtggccctgcagcagcagcagcagcagcagcagttccagcagcagcagcaggccgccctgcagcagcagcagcagcagcagcagcagcagcagttccaggcccagcagagcgccatgcagcagcagttccaggccgtggtgcagcagcagcagcagctgcagcagcagcagcagcagcagcagcacctgatcaagctgcaccaccagaaccagcagcagatccagcagcagcagcagcagctgcagagaatcgcccagctgcagctgcagcagcagcagcagcagcagcagcagcagcagcagcagcagcagcaggccctgcaggcccagccccccatccagcagccccccatgcagcagccccagcccccccccagccaggccctgccccagcagctgcagcagatgcaccacacccagcaccaccagccccccccccagccccagcagccccccgtggcccagaaccagcccagccagctgcccccccagagccagacccagcccctggtgagccaggcccaggccctgcccggccagatgctgtacacccagccccccctgaagttcgtgagagcccccatggtggtgcagcagccccccgtgcagccccaggtgcagcagcagcagaccgccgtgcagaccgcccaggccgcccagatggtggcccccggcgtgcaggtgagccagagcagcctgcccatgctgagcagccccagccccggccagcaggtgcagaccccccagagcatgcccccccccccccagcccagcccccagcccggccagcccagcagccagcccaacagcaacgtgagcagcggccccgcccccagccccagcagcttcctgcccagccccagcccccagcccagccagagccccgtgaccgccagaaccccccagaacttcagcgtgcccagccccggccccctgaacacccccgtgaaccccagcagcgtgatgagccccgccggcagcagccaggccgaggagcagcagtacctggacaagctgaagcagctgagcaagtacatcgagcccctgagaagaatgatcaacaagatcgacaagaacgaggacagaaagaaggacctgagcaagatgaagagcctgctggacatcctgaccgaccccagcaagagatgccccctgaagaccctgcagaagtgcgagatcgccctggagaagctgaagaacgacatggccgtgcccacccccccccccccccccgtgccccccaccaagcagcagtacctgtgccagcccctgctggacgccgtgctggccaacatcagaagccccgtgttcaaccacagcctgtacagaaccttcgtgcccgccatgaccgccatccacggcccccccatcaccgcccccgtggtgtgcaccagaaagagaagactggaggacgacgagagacagagcatccccagcgtgctgcagggcgaggtggccagactggaccccaagttcctggtgaacctggaccccagccactgcagcaacaacggcaccgtgcacctgatctgcaagctggacgacaaggacctgcccagcgtgccccccctggagctgagcgtgcccgccgactaccccgcccagagccccctgtggatcgacagacagtggcagtacgacgccaaccccttcctgcagagcgtgcacagatgcatgaccagcagactgctgcagctgcccgacaagcacagcgtgaccgccctgctgaacacctgggcccagagcgtgcaccaggcctgcctgagcgccgcctag

SEQ ID NO: 88220 - DNA, 1914 bp, synthetic construct
  misc_feature 1..1914: note = Description of Artificial Sequence: Synthetic coding sequence
  source 1..1914: mol_type = other DNA
atggagagccacgtgttcctgaaggccaagaccagagacgagtacctgagcctggtggccagactgatcatccacttcagagacatccacaacaagaagagccaggccagcgtgagcgcccagctgcagctgcagcaggtggccctgcagcagcagcagcagcagcagcagttccagcagcagcagcaggccgccctgcagcagcagcagcagcagcagcagcagcagcagttccaggcccagcagagcgccatgcagcagcagttccaggccgtggtgcagcagcagcagcagctgcagcagcagcagcagcagcagcagcacctgatcaagctgcaccaccagaaccagcagcagatccagcagcagcagcagcagctgcagagaatcgcccagctgcagctgcagcagcagcagcagcagcagcagcagcagcagcagcagcagcagcaggccctgcaggcccagccccccatccagcagccccccatgcagcagccccagcccccccccagccaggccctgccccagcagctgcagcagatgcaccacacccagcaccaccagccccccccccagccccagcagccccccgtggcccagaaccagcccagccagctgcccccccagagccagacccagcccctggtgagccaggcccaggccctgcccggccagatgctgtacacccagccccccctgaagttcgtgagagcccccatggtggtgcagcagccccccgtgcagccccaggtgcagcagcagcagaccgccgtgcagaccgcccaggccgcccagatggtggcccccggcgtgcaggtgagccagagcagcctgcccatgctgagcagccccagccccggccagcaggtgcagaccccccagagcatgcccccccccccccagcccagcccccagcccggccagcccagcagccagcccaacagcaacgtgagcagcggccccgcccccagccccagcagcttcctgcccagccccagcccccagcccagccagagccccgtgaccgccagaaccccccagaacttcagcgtgcccagccccggccccctgaacacccccgtgaaccccagcagcgtgatgagccccgccggcagcagccaggccgaggagcagcagtacctggacaagctgaagcagctgagcaagtacatcgagcccctgagaagaatgatcaacaagatcgacaagaacgaggacagaaagaaggacctgagcaagatgaagagcctgctggacatcctgaccgaccccagcaagagatgccccctgaagaccctgcagaagtgcgagatcgccctggagaagctgaagaacgacatggccgtgcccacccccccccccccccccgtgccccccaccaagcagcagtacctgtgccagcccctgctggacgccgtgctggccaacatcagaagccccgtgttcaaccacagcctgtacagaaccttcgtgcccgccatgaccgccatccacggcccccccatcaccgcccccgtggtgtgcaccagaaagagaagactggaggacgacgagagacagagcatccccagcgtgctgcagggcgaggtggccagactggaccccaagttcctggtgaacctggaccccagccactgcagcaacaacggcaccgtgcacctgatctgcaagctggacgacaaggacctgcccagcgtgccccccctggagctgagcgtgcccgccgactaccccgcccagagccccctgtggatcgacagacagtggcagtacgacgccaaccccttcctgcagagcgtgcacagatgcatgaccagcagactgctgcagctgcccgacaagcacagcgtgaccgccctgctgaacacctgggcccagagcgtgcaccaggcctgcctgagcgccgcctag

SEQ ID NO: 88221 - DNA, 2169 bp, synthetic construct; identical to SEQ ID NO: 88219
  misc_feature 1..2169: note = Description of Artificial Sequence: Synthetic coding sequence
  source 1..2169: mol_type = other DNA

SEQ ID NO: 88222 - DNA, 2157 bp, synthetic construct
  misc_feature 1..2157: note = Description of Artificial Sequence: Synthetic coding sequence
  source 1..2157: mol_type = other DNA
atgagaaaggccggcgtggcccacagcaagagcagcaaggacatggagagccacgtgttcctgaaggccaagaccagagacgagtacctgagcctggtggccagactgatcatccacttcagagacatccacaacaagaagagccaggccagcgtgagcgaccccatgaacgccctgcagagcctgaccggcggccccgccgccggcgccgccggcatcggcatgccccccagaggccccggccagagcctgggcggcatgggcagcctgggcgccatgggccagcccatgagcctgagcggccagcccccccccggcaccagcggcatggccccccacagcatggccgtggtgagcaccgccaccccccagacccagctgcagctgcagcaggtggccctgcagcagcagcagcagcagcagcagttccagcagcagcagcaggccgccctgcagcagcagcagcagcagcagcagcagcagcagttccaggcccagcagagcgccatgcagcagcagttccaggccgtggtgcagcagcagcagcagctgcagcagcagcagcagcagcagcagcacctgatcaagctgcaccaccagaaccagcagcagcagcagcagcaggccctgcaggcccagccccccatccagcagccccccatgcagcagccccagcccccccccagccaggccctgccccagcagctgcagcagatgcaccacacccagcaccaccagccccccccccagccccagcagccccccgtggcccagaaccagcccagccagctgcccccccagagccagacccagcccctggtgagccaggcccaggccctgcccggccagatgctgtacacccagccccccctgaagttcgtgagagcccccatggtggtgcagcagccccccgtgcagccccaggtgcagcagcagcagaccgccgtgcagaccgcccaggccgcccagatggtggcccccggcgtgcagatgatcaccgaggccctggcccagggcggcatgcacatcagagccagattcccccccaccaccgccgtgagcgccatccccagcagcagcatccccctgggcagacagcccatggcccagcaggtgcagaccccccagagcatgcccccccccccccagcccagcccccagcccggccagcccagcagccagcccaacagcaacgtgagcagcggccccgcccccagccccagcagcttcctgcccagccccagcccccagcccagccagagccccgtgaccgccagaaccccccagaacttcagcgtgcccagccccggccccctgaacacccccgtgaaccccagcagcgtgatgagccccgccggcagcagccaggccgaggagcagcagtacctggacaagctgaagcagctgagcaagtacatcgagcccctgagaagaatgatcaacaagatcgacaagaacgaggacagaaagaaggacctgagcaagatgaagagcctgctggacatcctgaccgaccccagcaagagatgccccctgaagaccctgcagaagtgcgagatcgccctggagaagctgaagaacgacatggccgtgcccacccccccccccccccccgtgccccccaccaagcagcagtacctgtgccagcccctgctggacgccgtgctggccaacatcagaagccccgtgttcaaccacagcctgtacagaaccttcgtgcccgccatgaccgccatccacggcccccccatcaccgcccccgtggtgtgcaccagaaagagaagactggaggacgacgagagacagagcatccccagcgtgctgcagggcgaggtggccagactggaccccaagttcctggtgaacctggaccccagccactgcagcaacaacggcaccgtgcacctgatctgcaagctggacgacaaggacctgcccagcgtgccccccctggagctgagcgtgcccgccgactaccccgcccagagccccctgtggatcgacagacagtggcagtacgacgccaaccccttcctgcagagcgtgcacagatgcatgaccagcagactgctgcagctgcccgacaagcacagcgtgaccgccctgctgaacacctgggcccagagcgtgcaccaggcctgcctgagcgccgcctag

SEQ ID NO: 88223 - DNA, 570 bp, synthetic construct
  misc_feature 1..570: note = Description of Artificial Sequence: Synthetic coding sequence
  source 1..570: mol_type = other DNA
atgcagcagcagttccaggccgtggtgcagcagcagcagcagctgcagcagcagcagcagcagcagcagcacctgatcaagctgcaccaccagaaccagcagcagatccagcagcagcagcagcagctgcagagaatcgcccagctgcagctgcagcagcagcagcagcagcagcagcagcagcagcagcagcagcagcaggccctgcaggcccagccccccatccagcagccccccatgcagcagccccagcccccccccagccaggccctgccccagcagctgcagcagatgcaccacacccagcaccaccagccccccccccagccccagcagccccccgtggcccagaaccagcccagccagctgcccccccagagccagacccagcccctggtgagccaggcccaggccctgcccggccagatgctgtacacccagccccccctgaagttcgtgagagcccccatggtggtgcagcagccccccgtgcagccccaggtgcagcagcagcagaccgccgtgcagaccgcccaggccgcccagatggtggcccccggcgtgcagtag

SEQ ID NO: 88224 - DNA, 1956 bp, synthetic construct
  misc_feature 1..1956: note = Description of Artificial Sequence: Synthetic coding sequence
  source 1..1956: mol_type = other DNA
atgagcggcgtgagagccgtgagaatcagcatcgagagcgcctgcgagaagcaggtgcacgaggtgggcctggacggcaccgagacctacctgccccccctgagcatgagccagaacctggccagactggcccagagaatcgacttcagccagggcagcggcagcgaggaggaggaggccgccggcaccgagggcgacgcccaggagtggcccggcgccggcagcagcgccgaccaggacgacgaggagggcgtggtgaagttccagcccagcctgtggccctgggacagcgtgagaaacaacctgagaagcgccctgaccgagatgtgcgtgctgtacgacgtgctgagcatcgtgagagacaagaagttcatgaccctggaccccgtgagccaggacgccctgccccccaagcagaacccccagaccctgcagctgatcagcaagaagaagagcctggccggcgccgcccagatcctgctgaagggcgccgagagactgaccaagagcgtgaccgagaaccaggagaacaagctgcagagagacttcaacagcgagctgctgagactgagacagcactggaagctgagaaaggtgggcgacaagatcctgggcgacctgagctacagaagcgccggcagcctgttcccccaccacggcaccttcgaggtgatcaagaacaccgacctggacctggacaagaagatccccgaggactactgccccctggacgtgcagatccccagcgacctggagggcagcgcctacatcaaggtgagcatccagaagcaggcccccgacatcggcgacctgggcaccgtgaacctgttcaagagacccctgcccaagagcaagcccggcagcccccactggcagaccaagctggaggccgcccagaacgtgctgctgtgcaaggagatcttcgcccagctgagcagagaggccgtgcagatcaagagccaggtgccccacatcgtggtgaagaaccagatcatcagccagcccttccccagcctgcagctgagcatcagcctgtgccacagcagcaacgacaagaagagccagaagttcgccaccgagaagcagtgccccgaggaccacctgtacgtgctggagcacaacctgcacctgctgatcagagagttccacaagcagaccctgagcagcatcatgatgccccaccccgccagcgcccccttcggccacaagagaatgagactgagcggcccccaggccttcgacaagaacgagatcaacagcctgcagagcagcgagggcctgctggagaagatcatcaagcaggccaagcacatcttcctgagaagcagagccgccgccaccatcgacagcctggccagcagaatcgaggacccccagatccaggcccactggagcaacatcaacgacgtgtacgagagcagcgtgaaggtgctgatcaccagccagggctacgagcagatctgcaagagcatccagctgcagctgaacatcggcgtggagcagatcagagtggtgcacagagacggcagagtgatcaccctgagctaccaggagcaggagctgcaggacttcctgctgagccagatgagccagcaccaggtgcacgccgtgcagcagctggccaaggtgatgggctggcaggtgctgagcttcagcaaccacgtgggcctgggccccatcgagagcatcggcaacgccagcgccatcaccgtggccagccccagcggcgactacgccatcagcgtgagaaacggccccgagagcggcagcaagatcatggtgcagttccccagaaaccagtgcaaggacctgcccaagagcgacgtgctgcaggacaacaagtggagccacctgagaggccccttcaaggaggtgcagtggaacaagatggagggcagaaacttcgtgtacaagatggagctgctgatgagcgccctgagcccctgcctgctgtag

SEQ ID NO: 88225 - DNA, 1866 bp, synthetic construct
  misc_feature 1..1866: note = Description of Artificial Sequence: Synthetic coding sequence
  source 1..1866: mol_type = other DNA
atgagcggcgtgagagccgtgagaatcagcatcgagagcgcctgcgagaagcaggtgcacgaggtgggcctggacggcaccgagacctacctgccccccctgagcatgagccaggagtggcccggcgccggcagcagcgccgaccaggacgacgaggagggcgtggtgaagttccagcccagcctgtggccctgggacagcgtgagaaacaacctgagaagcgccctgaccgagatgtgcgtgctgtacgacgtgctgagcatcgtgagagacaagaagttcatgaccctggaccccgtgagccaggacgccctgccccccaagcagaacccccagaccctgcagctgatcagcaagaagaagagcctggccggcgccgcccagatcctgctgaagggcgccgagagactgaccaagagcgtgaccgagaaccaggagaacaagctgcagagagacttcaacagcgagctgctgagactgagacagcactggaagctgagaaaggtgggcgacaagatcctgggcgacctgagctacagaagcgccggcagcctgttcccccaccacggcaccttcgaggtgatcaagaacaccgacctggacctggacaagaagatccccgaggactactgccccctggacgtgcagatccccagcgacctggagggcagcgcctacatcaaggtgagcatccagaagcaggcccccgacatcggcgacctgggcaccgtgaacctgttcaagagacccctgcccaagagcaagcccggcagcccccactggcagaccaagctggaggccgcccagaacgtgctgctgtgcaaggagatcttcgcccagctgagcagagaggccgtgcagatcaagagccaggtgccccacatcgtggtgaagaaccagatcatcagccagcccttccccagcctgcagctgagcatcagcctgtgccacagcagcaacgacaagaagagccagaagttcgccaccgagaagcagtgccccgaggaccacctgtacgtgctggagcacaacctgcacctgctgatcagagagttccacaagcagaccctgagcagcatcatgatgccccaccccgccagcgcccccttcggccacaagagaatgagactgagcggcccccaggccttcgacaagaacgagatcaacagcctgcagagcagcgagggcctgctggagaagatcatcaagcaggccaagcacatcttcctgagaagcagagccgccgccaccatcgacagcctggccagcagaatcgaggacccccagatccaggcccactggagcaacatcaacgacgtgtacgagagcagcgtgaaggtgctgatcaccagccagggctacgagcagatctgcaagagcatccagctgcagctgaacatcggcgtggagcagatcagagtggtgcacagagacggcagagtgatcaccctgagctaccaggagcaggagctgcaggacttcctgctgagccagatgagccagcaccaggtgcacgccgtgcagcagctggccaaggtgatgggctggcaggtgctgagcttcagcaaccacgtgggcctgggccccatcgagagcatcggcaacgccagcgccatcaccgtggccagccccagcggcgactacgccatcagcgtgagaaacggccccgagagcggcagcaagatcatggtgcagttccccagaaaccagtgcaaggacctgcccaagagcgacgtgctgcaggacaacaagtggagccacctgagaggccccttcaaggaggtgcagtggaacaagatggagggcagaaacttcgtgtacaagatggagctgctgatgagcgccctgagcccctgcctgctgtag

SEQ ID NO: 88226 - DNA, 438 bp, synthetic construct
  misc_feature 1..438: note = Description of Artificial Sequence: Synthetic coding sequence
  source 1..438: mol_type = other DNA
atgagcggcgtgagagccgtgagaatcagcatcgagagcgcctgcgagaagcaggtgcacgaggtgggcctggacggcaccgagacctacctgccccccctgagcatgagccagaacctggccagactggcccagagaatcgacttcagccagggcagcggcagcgaggaggaggaggccgccggcaccgagggcgacgcccaggagtggcccggcgccggcagcagcgccgaccaggacgacgaggagggcgtggtgaagttccagcccagcctgtggccctgggacagcgtgagaaacaacctgagaagcgccctgaccgagatgtgcgtgctgtacgacgtgctgagcatcgtgagagacaagaagttcatgaccctggaccccgtgagccaggacgccctgccccccaagcaggtgttcgtggacttcaactag

SEQ ID NO: 88227 - DNA, 627 bp, synthetic construct
  misc_feature 1..627: note = Description of Artificial Sequence: Synthetic coding sequence
  source 1..627: mol_type = other DNA
atggaggccccccccgtgaccatgatgcccgtgaccggcggcaccatcaacatgatggagtacctgctgcagggcagcgtgctggaccacagcctggagagcctgatccacagactgagaggcctgtgcgacaacatggagcccgagaccttcctggaccacgagatggtgttcctgctgaagggccagcaggccagccccttcgtgctgagagccagaagaagcatggacagagccggcgccccctggcacctgagatacctgggccagcccgagatgggcgacaagaacagacacgccctggtgagaaactgcgtggacatcgccaccagcgagaacctgaccgacttcctgatggagatgggcttcagaatggaccacgagttcgtggccaagggccacctgttcagaaagggcatcatgaagatcatggtgtacaagatcttcagaatcctggtgcccggcaacaccgacagcaccgaggccctgagcctgagctacctggtggagctgagcgtggtggcccccgccggccaggacatggtgagcgacgacatgaagaacttcgccgagcagctgaagcccctggtgcacctggagaagatcgaccccaagagactgatgtag

SEQ ID NO: 88228 - DNA, 627 bp, synthetic construct; identical to SEQ ID NO: 88227
  misc_feature 1..627: note = Description of Artificial Sequence: Synthetic coding sequence
  source 1..627: mol_type = other DNA

SEQ ID NO: 88229 - DNA, 585 bp, synthetic construct
  misc_feature 1..585: note = Description of Artificial Sequence: Synthetic coding sequence
  source 1..585: mol_type = other DNA
atggagaacttcaccgccctgttcggcgcccaggccgaccccccccccccccccaccgccctgggcttcggccccggcaagccccccccccccccccccccccccgccggcggcggccccggcaccgcccccccccccaccgccgccaccgccccccccggcgccgacaagagcggcgccggctgcggccccttctacctgatgagagagctgcccggcagcaccgagctgaccggcagcaccaacctgatcacccactacaacctggagcaggcctacaacaagttctgcggcaagaaggtgaaggagaagctgagcaacttcctgcccgacctgcccggcatgatcgacctgcccggcagccacgacaacagcagcctgagaagcctgatcgagaagccccccatcctgagcagcagcttcaaccccatcaccggcaccatgctggccggcttcagactgcacaccggccccctgcccgagcagtgcagactgatgcacatccagccccccaagaagaagaacaagcacaagcacaagcagagcagaacccaggaccccgtgccccccggcaagcccagctag

SEQ ID NO: 88230 - DNA, 735 bp, synthetic construct
  misc_feature 1..735: note = Description of Artificial Sequence: Synthetic coding sequence
  source 1..735: mol_type = other DNA
atggagaacttcaccgccctgttcggcgcccaggccgaccccccccccccccccaccgccctgggcttcggccccggcaagccccccccccccccccccccccccgccggcggcggccccggcaccgcccccccccccaccgccgccaccgccccccccggcgccgacaagagcggcgccggctgcggccccttctacctgatgagagagctgcccggcagcaccgagctgaccggcagcaccaacctgatcacccactacaacctggagcaggcctacaacaagttctgcggcaagaaggtgaaggagaagctgagcaacttcctgcccgacctgcccggcatgatcgacctgcccggcagccacgacaacagcagcctgagaagcctgatcgagaagccccccatcctgagcagcagcttcaaccccatcaccggcaccatgctggccggcttcagactgcacaccggccccctgcccgagcagtgcagactgatgcacatccagccccccaagaagaagaacaagcacaagcacaagcagagcagaacccaggaccccgtgccccccgagacccccagcgacagcgaccacaagaagaagaagaagaagaaggaggaggaccccgagagaaagagaaagaagaaggagaagaagaagaagaagaacagacacagccccgaccaccccggcatgggcagcagccaggccagcagcagcagcagcctgagatag

SEQ ID NO: 88231 - DNA, 639 bp, synthetic construct
  misc_feature 1..639: note = Description of Artificial Sequence: Synthetic coding sequence
  source 1..639: mol_type = other DNA
atgggcgtgacctgcgtgagccagatgcccgtggccgagggcaagagcgtgcagcagaccgtggagctgctgaccagaaagctggagatgctgggcgccgagaagcagggcaccttctgcgtggactgcgagacctaccacaccgccgccagcaccctgggcagccagggccagaccggcaagctgatgtacgtgatgcacaacagcgagtaccccctgagctgcttcgccctgttcgagaacggcccctgcctgatcgccgacaccaacttcgacgtgctgatggtgaagctgaagggcttcttccagagcgccaaggccagcaagatcgagaccagaggcaccagataccagtactgcgacttcctggtgaaggtgggcaccgtgaccatgggccccagcgccagaggcatcagcgtggaggtggagtacggcccctgcgtggtggccagcgactgctggagcctgctgctggagttcctgcagagcttcctgggcagccacacccccggcgcccccgccgtgttcggcaacagacacgacgccgtgtacggccccgccgacaccatggtgcagtacatggagctgttcaacaagatcagaaagcagcagcaggtgcccgtggccggcatcagatag

SEQ ID NO: 88232 - DNA, 423 bp, synthetic construct
  misc_feature 1..423: note = Description of Artificial Sequence: Synthetic coding sequence
  source 1..423: mol_type = other DNA
atgcccgtggccgagggcaagagcgtgcagcagaccgtggagctgctgaccagaaagctggagatgctgggcgccgagaagcagggcaccttctgcgtggactgcgagacctaccacaccgccgccagcaccctgggcagccagggccagaccggcaagctgatgtacgtgatgcacaacagcgagtaccccctgagctgcttcgccctgttcgagaacggcccctgcctgatcgccgacaccaacttcgacgtgctgatggtgaagctgaagggcttcttccagagcgccaaggccagcaagatcgagaccagaggcaccagataccagtactgcgacttcctggtgaaggtgggcaccgtgaccatgggccccagcgccagaggcatcagcgtggaggtggagtacggcccctgcgtgtag

SEQ ID NO: 88233 - DNA, 438 bp, synthetic construct
  misc_feature 1..438: note = Description of Artificial Sequence: Synthetic coding sequence
  source 1..438: mol_type = other DNA
atgggcgtgacctgcgtgagccagatgcccgtggccgagggcaagagcgtgcagcagaccgtggagctgctgaccagaaagctggagatgctgggcgccgagaagcagggcaccttctgcgtggactgcgagacctaccacaccgccgccagcaccctgggcagccagggccagaccggcaagctgatgtacgtgatgcacaacagcgagtaccccctgagctgcttcgccctgttcgagaacggcccctgcctgatcgccgacaccaacttcgacgtgctgatggtgaagctgaagggcttcttccagagcgccaaggccagcaagatcgagaccagaggcaccagataccagtactgcgacttcctggtgaaggtgggcaccgtgaccatgggccccagcgccagaggcatcagcgtggaggtgagaccctggtag

SEQ ID NO: 88234 - DNA, 372 bp, synthetic construct
  misc_feature 1..372: note = Description of Artificial Sequence: Synthetic coding sequence
  source 1..372: mol_type = other DNA
atgggcgtgacctgcgtgagccagatgcccgtggccgagggcaagagcgtgcagcagaccgtggagctgctgaccagaaagctggagatgctgggcgccgagaagcagggcaccttctgcgtggactgcgagacctaccacaccgccgccagcaccctgggcagccagggccagaccggcaagctgatgtacgtgatgcacaacagcgagtaccccctgagctgcttcgccctgttcgagaacggcccctgcctgatcgccgacaccaacttcgacgtgctgatggtgaagctgaagggcttcttccagagcgccaaggccagcaagatcgagaccagaggcaccagatggagcatggcccccgtgtggtag

SEQ ID NO: 88235 - DNA, 435 bp, synthetic construct
  misc_feature 1..435: note = Description of Artificial Sequence: Synthetic coding sequence
  source 1..435: mol_type = other DNA
atggccgacagactgacccagctgcaggacgccgtgaacagcctggccgaccagttctgcaacgccatcggcgtgctgcagcagtgcggcccccccgccagcttcaacaacatccagaccgccatcaacaaggaccagcccgccaaccccaccgaggagtacgcccagctgttcgccgccctgatcgccagaaccgccaaggacatcgacgtgctgatcgacagcctgcccagcgaggagagcaccgccgccctgcaggccgccagcctgtacaagctggaggaggagaaccacgaggccgccacctgcctggaggacgtggtgtacagaggcgacatgctgctggagaagatccagagcgccctggccgacatcgcccagagccagctgaagaccagaagcggcacccacagccagagcctgcccgacagctag

SEQ ID NO: 88236 - DNA, 4098 bp, synthetic construct
  misc_feature 1..4098: note = Description of Artificial Sequence: Synthetic coding sequence
  source 1..4098: mol_type = other DNA
atggagacccagctgcagagcatcttcgaggaggtggtgaagaccgaggtgatcgaggaggccttccccggcatgttcatggacacccccgaggacgagaagaccaagctgatcagctgcctgggcgccttcagacagttctggggcggcctgagccaggagagccacgagcagtgcatccagtggatcgtgaagttcatccacggccagcacagccccaagagaatcagcttcctgtacgactgcctggccatggccgtggagaccggcctgctgccccccagactggtgtgcgagagcctgatcaacagcgacaccctggagtgggagagaacccagctgtgggccctgaccttcaagctggtgagaaagatcatcggcggcgtggactacaagggcgtgagagacctgctgaaggtgatcctggagaagatcctgaccatccccaacaccgtgagcagcgccgtggtgcagcagctgctggccgccagagaggtgatcgcctacatcctggagagaaacgcctgcctgctgcccgcctacttcgccgtgaccgagatcagaaagctgtaccccgagggcaagctgccccactggctgctgggcaacctggtgagcgacttcgtggacaccttcagacccaccgccagaatcaacagcatctgcggcagatgcagcctgctgcccgtggtgaacaacagcggcgccatctgcaacagctggaagctggaccccgccaccctgagattccccctgaagggcctgctgccctacgacaaggacctgttcgagccccagaccgccctgctgagatacgtgctggagcagccctacagcagagacatggtgtgcaacatgctgggcctgaacaagcagaccctgaacatcgcccagcacaagcagagatgccccgtgctggaggaccagctggtggacctggtggtgtacgccatggagagaagcgagaccgaggagaagttcgacgacggcggcaccagccagctgctgtggcagcacctgagcagccagctgatcttcttcgtgctgttccagttcgccagcttcccccacatggtgctgagcctgcaccagaagctggccggcagaggcctgatcaagggcagagaccacctgatgtgggtgctgctgcagttcatcagcggcagcatccagaagaacgccctggccgacttcctgcccgtgatgaagctgttcgacctgctgtaccccgagaaggagtacatccccgtgcccgacatcaacaagccccagagcacccacgccttcgccatgacctgcatctggatccacctgaacagaaaggcccagaacgacaacagcaagctgcagatccccatcccccacagcctgagactgcaccacgagttcctgcagcagagcctgagaaacaagagcctgcagatgaacgactacaagatcgccctgctgtgcaacgcctacagcaccaacagcgagtgcttcaccctgcccatgggcgccctggtggagaccatctacggcaacggcatcatgagaatccccctgcccggcaccaactgcatggccagcggcagcatcacccccctgcccatgaacctgctggacagcctgaccgtgcacgccaagatgagcctgatccacagcatcgccaccagagtgatcaagctggcccacgccaagagcagcgtggccctggcccccgccctggtggagacctacagcagactgctggtgtacatggagatcgagagcctgggcatcaagggcttcatcagccagctgctgcccaccgtgttcaagagccacgcctggggcatcctgcacaccctgctggagatgttcagctacagaatgcaccacatccagccccactacagagtgcagctgctgagccacctgcacaccctggccgccgtggcccagaccaaccagaaccagctgcacctgtgcgtggagagcaccgccctgagactgatcaccgccctgggcagcagcgaggtgcagccccagttcaccagattcctgagcgaccccaagaccgtgctgagcgccgagagcgaggagctgaacagagccctgatcctgaccctggccagagccacccacgtgaccgacttcttcaccggcagcgacagcatccagggcacctggtgcaaggacatcctgcagaccatcatgagcttcaccccccacaactgggccagccacaccctgagctgcttccccggccccctgcaggccttcttcaagcagaacaacgtgccccaggagagcagattcaacctgaagaagaacgtggaggaggagtacagaaagtggaagagcatgagcaacgagaacgacatcatcacccacttcagcatgcagggcagcccccccctgttcctgtgcctgctgtggaagatgctgctggagaccgaccacatcaaccagatcggctacagagtgctggagagaatcggcgccagagccctggtggcccacgtgagaaccttcgccgacttcctggtgtacgagttcagcaccagcgccggcggccagcagctgaacaagtgcatcgagatcctgaacgacatggtgtggaagtacaacatcgtgaccctggacagactgatcctgtgcctggccatgagaagccacgagggcaacgaggcccaggtgtgctacttcatcatccagctgctgctgctgaagcccaacgacttcagaaacagagtgagcgacttcgtgaaggagaacagccccgagcactggctgcagaacgactggcacaccaagcacatgaactaccacaagaagtaccccgagaagctgtacttcgagggcctggccgagcaggtggacccccccgtgcagatccagagcccctacctgcccatctacttcggcaacgtgtgcctgagattcctgcccgtgttcgacatcgtgatccacagattcctggagctgctgcccgtgagcaagagcctggagaccctgctggaccacctgggcggcctgtacaagttccacgacagacccgtgacctacctgtacaacaccctgcactactacgagatgcacctgagagacagagccttcctgaagagaaagctggtgcacgccatcatcggcagcctgaaggacaacagaccccagggctggtgcctgagcgacacctacctgaagtgcgccatgaacgccagagaggagaacccctgggtgcccgacgacacctactactgcagactgatcggcagactggtggacaccatggccggcaagagccccggccccttccccaactgcgactggagattcaacgagttccccaaccccgccgcccacgccctgcacgtgacctgcgtggagctgatggccctggccgtgagcggcaaggaggtgggcaacgccctgctgaacgtggtgctgaagagccagcccctggtgcccagagagaacatcaccgcctggatgaacgccatcggcctgatcatcaccgccctgcccgagccctactggatcgtgctgcacgacagaatcgtgagcgtgatcagcagccccagcctgaccagcgagaccgagtgggtgggctaccccttcagactgttcgacttcaccgcctgccaccagagctacagcgagatgagctgcagctacaccctggccctggcccacgccgtgtggcaccacagcagcatcggccagctgagcctgatccccaagttcctgaccgaggtgctgctgcccatcgtgaagaccgagttccagctgctgtacgtgtaccacctggtgggccccttcctgcagagattccagcaggagagaaccagatgcatgatcgagatcggcgtggccttctacgacatgctgctgaacgtggaccagtgcagcacccacctgaactacatggaccccatctgcgacttcctgtaccacatgaagtacatgttcaccggcgacagcgtgaaggagcaggtggagaagatcatctgcaacctgaagcccgccctgaagctgagactgagattcatcacccacatcagcaagatggagcccgccgccgtgcccccccaggccatgaacagcggcagccccgccccccagagcaaccagtag

SEQ ID NO: 88237 - DNA, 2661 bp, synthetic construct
  misc_feature 1..2661: note = Description of Artificial Sequence: Synthetic coding sequence
  source 1..2661: mol_type = other DNA
atggagacccagctgcagagcatcttcgaggaggtggtgaagaccgaggtgatcgaggaggccttccccggcatgttcatggacacccccgaggacgagaagaccaagctgatcagctgcctgggcgccttcagacagttctggggcggcctgagccaggagagccacgagcagtgcatccagtggatcgtgaagttcatccacggccagcacagccccaagagaatcagcttcctgtacgactgcctggccatggccgtggagaccggcctgctgccccccagactggtgtgcgagagcctgatcaacagcgacaccctggagtgggagagaacccagctgtgggccctgaccttcaagctggtgagaaagatcatcggcggcgtggactacaagggcgtgagagacctgctgaaggtgatcctggagaagatcctgaccatccccaacaccgtgagcagcgccgtggtgcagcagctgctggccgccagagaggtgatcgcctacatcctggagagaaacgcctgcctgctgcccgcctacttcgccgtgaccgagatcagaaagctgtaccccgagggcaagctgccccactggctgctgggcaacctggtgagcgacttcgtggacaccttcagacccaccgccagaatcaacagcatctgcggcagatgcagcctgctgcccgtggtgaacaacagcggcgccatctgcaacagctggaagctggaccccgccaccctgagattccccctgaagggcctgctgccctacgacaaggacctgttcgagccccagaccgccctgctgagatacgtgctggagcagccctacagcagagacatggtgtgcaacatgctgggcctgaacaagcagaccctgaacatcgcccagcacaagcagagatgccccgtgctggaggaccagctggtggacctggtggtgtacgccatggagagaagcgagaccgaggagaagttcgacgacggcggcaccagccagctgctgtggcagcacctgagcagccagctgatcttcttcgtgctgttccagttcgccagcttcccccacatggtgctgagcctgcaccagaagctggccggcagaggcctgatcaagggcagagaccacctgatgtgggtgctgctgcagttcatcagcggcagcatccagaagaacgccctggccgacttcctgcccgtgatgaagctgttcgacctgctgtaccccgagaaggagtacatccccgtgcccgacatcaacaagccccagagcacccacgccttcgccatgacctgcatctggatccacctgaacagaaaggcccagaacgacaacagcaagctgcagatccccatcccccacagcctgagactgcaccacgagttcctgcagcagagcctgagaaacaagagcctgcagatgaacgactacaagatcgccctgctgtgcaacgcctacagcaccaacagcgagtgcttcaccctgcccatgggcgccctggtggagaccatctacggcaacggcatcatgagaatccccctgcccggcaccaactgcatggccagcggcagcatcacccccctgcccatgaacctgctggacagcctgaccgtgcacgccaagatgagcctgatccacagcatcgccaccagagtgatcaagctggcccacgccaagagcagcgtggccctggcccccgccctggtggagacctacagcagactgctggtgtacatggagatcgagagcctgggcatcaagggcttcatcagccagctgctgcccaccgtgttcaagagccacgcctggggcatcctgcacaccctgctggagatgttcagctacagaatgcaccacatccagccccactacagagtgcagctgctgagccacctgcacaccctggccgccgtggcccagaccaaccagaaccagctgcacctgtgcgtggagagcaccgccctgagactgatcaccgccctgggcagcagcgaggtgcagccccagttcaccagattcctgagcgaccccaagaccgtgctgagcgccgagagcgaggagctgaacagagccctgatcctgaccctggccagagccacccacgtgaccgacttcttcaccggcagcgacagcatccagggcacctggtgcaaggacatcctgcagaccatcatgagcttcaccccccacaactgggccagccacaccctgagctgcttccccggccccctgcaggccttcttcaagcagaacaacgtgccccaggagagcagattcaacctgaagaagaacgtggaggaggagtacagaaagtggaagagcatgagcaacgagaacgacatcatcacccacttcagcatgcagggcagcccccccctgttcctgtgcctgctgtggaagatgctgctggagaccgaccacatcaaccagatcggctacagagtgctggagagaatcggcgccagagccctggtggcccacgtgagaaccttcgccgacttcctggtgtacgagttcagcaccagcgccggcggccagcagctgaacaagtgcatcgagatcctgaacgacatggtgtggaagtacaacatcgtgaccctggacagactgatcctgtgcctggtgagaatcaacaccttcctgagcctgttcagctag

SEQ ID NO: 88238 - DNA, 4125 bp, synthetic construct
  misc_feature 1..4125: note = Description of Artificial Sequence: Synthetic coding sequence
  source 1..4125: mol_type = other DNA
atggagacccagctgcagagcatcttcgaggaggtggtgaagaccgaggtgatcgaggaggccttccccggcatgttcatggacacccccgaggacgagaagaccaagctgatcagctgcctgggcgccttcagacagttctggggcggcctgagccaggagagccacgagcagtgcatccagtggatcgtgaagttcatccacggccagcacagccccaagagaatcagcttcctgtacgactgcctggccatggccgtggagaccggcctgctgccccccagactggtgtgcgagagcctgatcaacagcgacaccctggagtgggagagaacccagctgtgggccctgaccttcaagctggtgagaaagatcatcggcggcgtggactacaagggcgtgagagacctgctgaaggtgatcctggagaagatcctgaccatccccaacaccgtgagcagcgccgtggtgcagcagctgctggccgccagagaggtgatcgcctacatcctggagagaaacgcctgcctgctgcccgcctacttcgccgtgaccgagatcagaaagctgtaccccgagggcaagctgccccactggctgctgggcaacctggtgagcgacttcgtggacaccttcagacccaccgccagaatcaacagcatctgcggcagatgcagcctgctgcccgtggtgaacaacagcggcgccatctgcaacagctggaagctggaccccgccaccctgagattccccctgaagggcctgctgccctacgacaaggacctgttcgagccccagaccgccctgctgagatacgtgctggagcagccctacagcagagacatggtgtgcaacatgctgggcctgaacaagcagaccctgaacatcgcccagcacaagcagagatgccccgtgctggaggaccagctggtggacctggtggtgtacgccatggagagaagcgagaccgaggagaagttcgacgacggcggcaccagccagctgctgtggcagcacctgagcagccagctgatcttcttcgtgctgttccagttcgccagcttcccccacatggtgctgagcctgcaccagaagctggccggcagaggcctgatcaagggcagagaccacctgatgtgggtgctgctgcagttcatcagcggcagcatccagaagaacgccctggccgacttcctgcccgtgatgaagctgttcgacctgctgtaccccgagaaggagtacatccccgtgcccgacatcaacaagccccagagcacccacgccttcgccatgacctgcatctggatccacctgaacagaaaggcccagaacgacaacagcaagctgcagatccccatcccccacagcctgagactgcaccacgagttcctgcagcagagcctgagaaacaagagcctgcagatgaacgactacaagatcgccctgctgtgcaacgcctacagcaccaacagcgagtgcttcaccctgcccatgggcgccctggtggagaccatctacggcaacggcatcatgagaatccccctgcccggcaccaactgcatggccagcggcagcatcacccccctgcccatgaacctgctggacagcctgaccgtgcacgccaagatgagcctgatccacagcatcgccaccagagtgatcaagctggcccacgccaagagcagcgtggccctggcccccgccctggtggagacctacagcagactgctggtgtacatggagatcgagagcctgggcatcaagggcttcatcagccagctgctgcccaccgtgttcaagagccacgcctggggcatcctgcacaccctgctggagatgttcagctacagaatgcaccacatccagccccactacagagtgcagctgctgagccacctgcacaccctggccgccgtggcccagaccaaccagaaccagctgcacctgtgcgtggagagcaccgccctgagactgatcaccgccctgggcagcagcgaggtgcagccccagttcaccagattcctgagcgaccccaagaccgtgctgagcgccgagagcgaggagctgaacagagccctgatcctgaccctggccagagccacccacgtgaccgacttcttcaccggcagcgacagcatccagggcacctggtgcaaggacatcctgcagaccatcatgagcttcaccccccacaactgggccagccacaccctgagctgcttccccggccccctgcaggccttcttcaagcagaacaacgtgccccaggagagcagattcaacctgaagaagaacgtggaggaggagtacagaaagtggaagagcatgagcaacgagaacgacatcatcacccacttcagcatgcagggcagcccccccctgttcctgtgcctgctgtggaagatgctgctggagaccgaccacatcaaccagatcggctacagagtgctggagagaatcggcgccagagccctggtggcccacgtgagaaccttcgccgacttcctggtgtacgagttcagcaccagcgccggcggccagcagctgaacaagtgcatcgagatcctgaacgacatggtgtggaagtacaacatcgtgaccctggacagactgatcctgtgcctggccatgagaagccacgagggcaacgaggcccaggtgtgctacttcatcatccagctgctgctgctgaagcccaacgacttcagaaacagagtgagcgacttcgtgaaggagaacagccccgagcactggctgcagaacgactggcacaccaagcacatgaactaccacaagaagtaccccgagaagctgtacttcgagggcctggccgagcaggtggacccccccgtgcagatccagagcccctacctgcccatctacttcggcaacgtgtgcctgagattcctgcccgtgttcgacatcgtgatccacagattcctggagctgctgcccgtgagcaagagcctggagaccctgctggaccacctgggcggcctgtacaagttccacgacagacccgtgacctacctgtacaacaccctgcactactacgagatgcacctgagagacagagccttcctgaagagaaagctggtgcacgccatcatcggcagcctgaaggacaacagaccccagggctggtgcctgagcgacacctacctgaagtgcgccatgaacgccagagaggagaacccctgggtgcccgacgacacctactactgcagactgatcggcagactggtggacaccatggccggcaagagccccggccccttccccaactgcgactggagattcaacgagttccccaaccccgccgcccacgccctgcacgtgacctgcgtggagctgatggccctggccgtgagcggcaaggaggtgggcaacgccctgctgaacgtggtgctgaagagccagcccctggtgcccagagagaacatcaccgcctggatgaacgccatcggcctgatcatcaccgccctgcccgagccctactggatcgtgctgcacgacagaatcgtgagcgtgatcagcagccccagcctgaccagcgagaccgagtgggtgggctaccccttcagactgttcgacttcaccgcctgccaccagagctacagcgagatgagctgcagctacaccctggccctggcccacgccgtgtggcaccacagcagcatcggccagctgagcctgatccccaagttcctgaccgaggtgctgctgcccatcgtgaagaccgagttccagctgctgtacgtgtaccacctggtgggccccttcctgcagagattccagcaggagagaaccagatgcatgatcgagatcggcgtggccttctacgacatgctgctgaacgtggaccagtgcagcacccacctgaactacatggaccccatctgcgacttcctgtaccacatgaagtacatgttcaccggcgacagcgtgaaggagcaggtgaagaagatcatctgcaacctgaagcccgccctgaagctgagactgagattcatcacccacatcagcaagatggagcccgccgccgtgcccccccaggccatgaacagcggcagccccgccccccagagcaaccaggtgcccgtgagcctgcccgtgacccagtag

SEQ ID NO: 88239 - DNA, 4095 bp, synthetic construct
  misc_feature 1..4095: note = Description of Artificial Sequence: Synthetic coding sequence
  source 1..4095: mol_type = other DNA
atggagacccagctgcagagcatcttcgaggaggtggtgaagaccgaggtgatcgaggaggccttccccggcatgttcatggacacccccgaggacgagaagaccaagctgatcagctgcctgggcgccttcagacagttctggggcggcctgagccaggagagccacgagcagtgcatccagtggatcgtgaagttcatccacggccagcacagccccaagagaatcagcttcctgtacgactgcctggccatggccgtggagaccggcctgctgccccccagactggtgtgcgagagcctgatcaacagcgacaccctggagtgggagagaacccagctgtgggccctgaccttcaagctggtgagaaagatcatcggcggcgtggactacaagggcgtgagagacctgctgaaggtgatcctggagaagatcctgaccatccccaacaccgtgagcagcgccgtggtgcagcagctgctggccgccagagaggtgatcgcctacatcctggagagaaacgcctgcctgctgcccgcctacttcgccgtgaccgagatcagaaagctgtaccccgagggcaagctgccccactggctgctgggcaacctggtgagcgacttcgtggacaccttcagacccaccgccagaatcaacagcatctgcggcagatgcagcctgctgcccgtggtgaacaacagcggcgccatctgcaacagctggaagctggaccccgccaccctgagattccccctgaagggcctgctgccctacgacaaggacctgttcgagccccagaccgccctgctgagatacgtgctggagcagccctacagcagagacatggtgtgcaacatgctgggcctgaacaagcagcacaagcagagatgccccgtgctggaggaccagctggtggacctggtggtgtacgccatggagagaagcgagaccgaggagaagttcgacgacggcggcaccagccagctgctgtggcagcacctgagcagccagctgatcttcttcgtgctgttccagttcgccagcttcccccacatggtgctgagcctgcaccagaagctggccggcagaggcctgatcaagggcagagaccacctgatgtgggtgctgctgcagttcatcagcggcagcatccagaagaacgccctggccgacttcctgcccgtgatgaagctgttcgacctgctgtaccccgagaaggagtacatccccgtgcccgacatcaacaagccccagagcacccacgccttcgccatgacctgcatctggatccacctgaacagaaaggcccagaacgacaacagcaagctgcagatccccatcccccacagcctgagactgcaccacgagttcctgcagcagagcctgagaaacaagagcctgcagatgaacgactacaagatcgccctgctgtgcaacgcctacagcaccaacagcgagtgcttcaccctgcccatgggcgccctggtggagaccatctacggcaacggcatcatgagaatccccctgcccggcaccaactgcatggccagcggcagcatcacccccctgcccatgaacctgctggacagcctgaccgtgcacgccaagatgagcctgatccacagcatcgccaccagagtgatcaagctggcccacgccaagagcagcgtggccctggcccccgccctggtggagacctacagcagactgctggtgtacatggagatcgagagcctgggcatcaagggcttcatcagccagctgctgcccaccgtgttcaagagccacgcctggggcatcctgcacaccctgctggagatgttcagctacagaatgcaccacatccagccccactacagagtgcagctgctgagccacctgcacaccctggccgccgtggcccagaccaaccagaaccagctgcacctgtgcgtggagagcaccgccctgagactgatcaccgccctgggcagcagcgaggtgcagccccagttcaccagattcctgagcgaccccaagaccgtgctgagcgccgagagcgaggagctgaacagagccctgatcctgaccctggccagagccacccacgtgaccgacttcttcaccggcagcgacagcatccagggcacctggtgcaaggacatcctgcagaccatcatgagcttcaccccccacaactgggccagccacaccctgagctgcttccccggccccctgcaggccttcttcaagcagaacaacgtgccccaggagagcagattcaacctgaagaagaacgtggaggaggagtacagaaagtggaagagcatgagcaacgagaacgacatcatcacccacttcagcatgcagggcagcccccccctgttcctgtgcctgctgtggaagatgctgctggagaccgaccacatcaaccagatcggctacagagtgctggagagaatcggcgccagagccctggtggcccacgtgagaaccttcgccgacttcctggtgtacgagttcagcaccagcgccggcggccagcagctgaacaagtgcatcgagatcctgaacgacatggtgtggaagtacaacatcgtgaccctggacagactgatcctgtgcctggccatgagaagccacgagggcaacgaggcccaggtgtgctacttcatcatccagctgctgctgctgaagcccaacgacttcagaaacagagtgagcgacttcgtgaaggagaacagccccgagcactggctgcagaacgactggcacaccaagcacatgaactaccacaagaagtaccccgagaagctgtacttcgagggcctggccgagcaggtggacccccccgtgcagatccagagcccctacctgcccatctacttcggcaacgtgtgcctgagattcctgcccgtgttcgacatcgtgatccacagattcctggagctgctgcccgtgagcaagagcctggagaccctgctggaccacctgggcggcctgtacaagttccacgacagacccgtgacctacctgtacaacaccctgcactactacgagatgcacctgagagacagagccttcctgaagagaaagctggtgcacgccatcatcggcagcctgaaggacaacagaccccagggctggtgcctgagcgacacctacctgaagtgcgccatgaacgccagagaggagaacccctgggtgcccgacgacacctactactgcagactgatcggcagactggtggacaccatggccggcaagagccccggccccttccccaactgcgactggagattcaacgagttccccaaccccgccgcccacgccctgcacgtgacctgcgtggagctgatggccctggccgtgagcggcaaggaggtgggcaacgccctgctgaacgtggtgctgaagagccagcccctggtgcccagagagaacatcaccgcctggatgaacgccatcggcctgatcatcaccgccctgcccgagccctactggatcgtgctgcacgacagaatcgtgagcgtgatcagcagccccagcctgaccagcgagaccgagtgggtgggctaccccttcagactgttcgacttcaccgcctgccaccagagctacagcgagatgagctgcagctacaccctggccctggcccacgccgtgtggcaccacagcagcatcggccagctgagcctgatccccaagttcctgaccgaggtgctgctgcccatcgtgaagaccgagttccagctgctgtacgtgtaccacctggtgggccccttcctgcagagattccagcaggagagaaccagatgcatgatcgagatcggcgtggccttctacgacatgctgctgaacgtggaccagtgcagcacccacctgaactacatggaccccatctgcgacttcctgtaccacatgaagtacatgttcaccggcgacagcgtgaaggagcaggtggagaagatcatctgcaacctgaagcccgccctgaagctgagactgagattcatcacccacatcagcaagatggagcccgccgccgtgcccccccaggccatgaacagcggcagccccgccccccagagcaaccaggtggacaccctgacctag

SEQ ID NO: 88240 - DNA, 4107 bp, synthetic construct
  misc_feature 1..4107: note = Description of Artificial Sequence: Synthetic coding sequence
  source 1..4107: mol_type = other DNA
atggagacccagctgcagagcatcttcgaggaggtggtgaagaccgaggtgatcgaggaggccttccccggcatgttcatggacacccccgaggacgagaagaccaagctgatcagctgcctgggcgccttcagacagttctggggcggcctgagccaggagagccacgagcagtgcatccagtggatcgtgaagttcatccacggccagcacagccccaagagaatcagcttcctgtacgactgcctggccatggccgtggagaccggcctgctgccccccagactggtgtgcgagagcctgatcaacagcgacaccctggagtgggagagaacccagctgtgggccctgaccttcaagctggtgagaaagatcatcggcggcgtggactacaagggcgtgagagacctgctgaaggtgatcctggagaagatcctgaccatccccaacaccgtgagcagcgccgtggtgcagcagctgctggccgccagagaggtgatcgcctacatcctggagagaaacgcctgcctgctgcccgcctacttcgccgtgaccgagatcagaaagctgtaccccgagggcaagctgccccactggctgctgggcaacctggtgagcgacttcgtggacaccttcagacccaccgccagaatcaacagcatctgcggcagatgcagcctgctgcccgtggtgaacaacagcggcgccatctgcaacagctggaagctggaccccgccaccctgagattccccctgaagggcctgctgccctacgacaaggacctgttcgagccccagaccgccctgctgagatacgtgctggagcagccctacagcagagacatggtgtgcaacatgctgggcctgaacaagcagcacaagcagagatgccccgtgctggaggaccagctggtggacctggtggtgtacgccatggagagaagcgagaccgaggagaagttcgacgacggcggcaccagccagctgctgtggcagcacctgagcagccagctgatcttcttcgtgctgttccagttcgccagcttcccccacatggtgctgagcctgcaccagaagctggccggcagaggcctgatcaagggcagagaccacctgatgtgggtgctgctgcagttcatcagcggcagcatccagaagaacgccctggccgacttcctgcccgtgatgaagctgttcgacctgctgtaccccgagaaggagtacatccccgtgcccgacatcaacaagccccagagcacccacgccttcgccatgacctgcatctggatccacctgaacagaaaggcccagaacgacaacagcaagctgcagatccccatcccccacagcctgagactgcaccacgagttcctgcagcagagcctgagaaacaagagcctgcagatgaacgactacaagatcgccctgctgtgcaacgcctacagcaccaacagcgagtgcttcaccctgcccatgggcgccctggtggagaccatctacggcaacggcatcatgagaatccccctgcccggcaccaactgcatggccagcggcagcatcacccccctgcccatgaacctgctggacagcctgaccgtgcacgccaagatgagcctgatccacagcatcgccaccagagtgatcaagctggcccacgccaagagcagcgtggccctggcccccgccctggtggagacctacagcagactgctggtgtacatggagatcgagagcctgggcatcaagggcttcatcagccagctgctgcccaccgtgttcaagagccacgcctggggcatcctgcacaccctgctggagatgttcagctacagaatgcaccacatccagccccactacagagtgcagctgctgagccacctgcacaccctggccgccgtggcccagaccaaccagaaccagctgcacctgtgcgtggagagcaccgccctgagactgatcaccgccctgggcagcagcgaggtgcagccccagttcaccagattcctgagcgaccccaagaccgtgctgagcgccgagagcgaggagctgaacagagccctgatcctgaccctggccagagccacccacgtgaccgacttcttcaccggcagcgacagcatccagggcacctggtgcaaggacatcctgcagaccatcatgagcttcaccccccacaactgggccagccacaccctgagctgcttccccggccccctgcaggccttcttcaagcagaacaacgtgccccaggagagcagattcaacctgaagaagaacgtggaggaggagtacagaaagtggaagagcatgagcaacgagaacgacatcatcacccacttcagcatgcagggcagcccccccctgttcctgtgcctgctgtggaagatgctgctggagaccgaccacatcaaccagatcggctacagagtgctggagagaatcggcgccagagccctggtggcccacgtgagaaccttcgccgacttcctggtgtacgagttcagcaccagcgccggcggccagcagctgaacaagtgcatcgagatcctgaacgacatggtgtggaagtacaacatcgtgaccctggacagactgatcctgtgcctggccatgagaagccacgagggcaacgaggcccaggtgtgctacttcatcatccagctgctgctgctgaagcccaacgacttcagaaacagagtgagcgacttcgtgaaggagaacagccccgagcactggctgcagaacgactggcacaccaagcacatgaactaccacaagaagtaccccgagaagctgtacttcgagggcctggccgagcaggtggacccccccgtgcagatccagagcccctacctgcccatctacttcggcaacgtgtgcctgagattcctgcccgtgttcgacatcgtgatccacagattcctggagctgctgcccgtgagcaagagcctggagaccctgctggaccacctgggcggcctgtacaagttccacgacagacccgtgacctacctgtacaacaccctgcactactacgagatgcacctgagagacagagccttcctgaagagaaagctggtgcacgccatcatcggcagcctgaaggacaacagaccccagggctggtgcctgagcgacacctacctgaagtgcgccatgaacgccagagaggagaacccctgggtgcccgacgacacctactactgcagactgatcggcagactggtggacaccatggccggcaagagccccggccccttccccaactgcgactggagattcaacgagttccccaaccccgccgcccacgccctgcacgtgacctgcgtggagctgatggccctggccgtgagcggcaaggaggtgggcaacgccctgctgaacgtggtgctgaagagccagcccctggtgcccagagagaacatcaccgcctggatgaacgccatcggcctgatcatcaccgccctgcccgagccctactggatcgtgctgcacgacagaatcgtgagcgtgatcagcagccccagcctgaccagcgagaccgagtgggtgggctaccccttcagactgttcgacttcaccgcctgccaccagagctacagcgagatgagctgcagctacaccctggccctggcccacgccgtgtggcaccacagcagcatcggccagctgagcctgatccccaagttcctgaccgaggtgctgctgcccatcgtgaagaccgagttccagctgctgtacgtgtaccacctggtgggccccttcctgcagagattccagcaggagagaaccagatgcatgatcgagatcggcgtggccttctacgacatgctgctgaacgtggaccagtgcagcacccacctgaactacatggaccccatctgcgacttcctgtaccacatgaagtacatgttcaccggcgacagcgtgaaggagcaggtggagaagatcatctgcaacctgaagcccgccctgaagctgagactgagattcatcacccacatcagcaagatggagcccgccgccgtgcccccccaggccatgaacagcggcagccccgccccccagagcaaccaggtgcccgtgagcctgcccgtgacccagtag

SEQ ID NO: 88241 - DNA, 4125 bp, synthetic construct
  misc_feature 1..4125: note = Description of Artificial Sequence: Synthetic coding sequence
  source 1..4125: mol_type = other DNA
atggagacccagctgcagagcatcttcgaggaggtggtgaagaccgaggtgatcgaggaggccttccccggcatgttcatggacacccccgaggacgagaagaccaagctgatcagctgcctgggcgccttcagacagttctggggcggcctgagccaggagagccacgagcagtgcatccagtggatcgtgaagttcatccacggccagcacagccccaagagaatcagcttcctgtacgactgcctggccatggccgtggagaccggcctgctgccccccagactggtgtgcgagagcctgatcaacagcgacaccctggagtgggagagaacccagctgtgggccctgaccttcaagctggtgagaaagatcatcggcggcgtggactacaagggcgtgagagacctgctgaaggtgatcctggagaagatcctgaccatccccaacaccgtgagcagcgccgtggtgcagcagctgctggccgccagagaggtgatcgcctacatcctggagagaaacgcctgcctgctgcccgcctacttcgccgtgaccgagatcagaaagctgtaccccgagggcaagctgccccactggctgctgggcaacctggtgagcgacttcgtggacaccttcagacccaccgccagaatcaacagcatctgcggcagatgcagcctgctgcccgtggtgaacaacagcggcgccatctgcaacagctggaagctggaccccgccaccctgagattccccctgaagggcctgctgccctacgacaaggacctgttcgagccccagaccgccctgctgagatacgtgctggagcagccctacagcagagacatggtgtgcaacatgctgggcctgaacaagcagctgatcagcgccctgcagcacaagcagagatgccccgtgctggaggaccagctggtggacctggtggtgtacgccatggagagaagcgagaccgaggagaagttcgacgacggcggcaccagccagctgctgtggcagcacctgagcagccagctgatcttcttcgtgctgttccagttcgccagcttcccccacatggtgctgagcctgcaccagaagctggccggcagaggcctgatcaagggcagagaccacctgatgtgggtgctgctgcagttcatcagcggcagcatccagaagaacgccctggccgacttcctgcccgtgatgaagctgttcgacctgctgtaccccgagaaggagtacatccccgtgcccgacatcaacaagccccagagcacccacgccttcgccatgacctgcatctggatccacctgaacagaaaggcccagaacgacaacagcaagctgcagatccccatcccccacagcctgagactgcaccacgagttcctgcagcagagcctgagaaacaagagcctgcagatgaacgactacaagatcgccctgctgtgcaacgcctacagcaccaacagcgagtgcttcaccctgcccatgggcgccctggtggagaccatctacggcaacggcatcatgagaatccccctgcccggcaccaactgcatggccagcggcagcatcacccccctgcccatgaacctgctggacagcctgaccgtgcacgccaagatgagcctgatccacagcatcgccaccagagtgatcaagctggcccacgccaagagcagcgtggccctggcccccgccctggtggagacctacagcagactgctggtgtacatggagatcgagagcctgggcatcaagggcttcatcagccagctgctgcccaccgtgttcaagagccacgcctggggcatcctgcacaccctgctggagatgttcagctacagaatgcaccacatccagccccactacagagtgcagctgctgagccacctgcacaccctggccgccgtggcccagaccaaccagaaccagctgcacctgtgcgtggagagcaccgccctgagactgatcaccgccctgggcagcagcgaggtgcagccccagttcaccagattcctgagcgaccccaagaccgtgctgagcgccgagagcgaggagctgaacagagccctgatcctgaccctggccagagccacccacgtgaccgacttcttcaccggcagcgacagcatccagggcacctggtgcaaggacatcctgcagaccatcatgagcttcaccccccacaactgggccagccacaccctgagctgcttccccggccccctgcaggccttcttcaagcagaacaacgtgccccaggagagcagattcaacctgaagaagaacgtggaggaggagtacagaaagtggaagagcatgagcaacgagaacgacatcatcacccacttcagcatgcagggcagcccccccctgttcctgtgcctgctgtggaagatgctgctggagaccgaccacatcaaccagatcggctacagagtgctggagagaatcggcgccagagccctggtggcccacgtgagaaccttcgccgacttcctggtgtacgagttcagcaccagcgccggcggccagcagctgaacaagtgcatcgagatcctgaacgacatggtgtggaagtacaacatcgtgaccctggacagactgatcctgtgcctggccatgagaagccacgagggcaacgaggcccaggtgtgctacttcatcatccagctgctgctgctgaagcccaacgacttcagaaacagagtgagcgacttcgtgaaggagaacagccccgagcactggctgcagaacgactggcacaccaagcacatgaactaccacaagaagtaccccgagaagctgtacttcgagggcctggccgagcaggtggacccccccgtgcagatccagagcccctacctgcccatctacttcggcaacgtgtgcctgagattcctgcccgtgttcgacatcgtgatccacagattcctggagctgctgcccgtgagcaagagcctggagaccctgctggaccacctgggcggcctgtacaagttccacgacagacccgtgacctacctgtacaacaccctgcactactacgagatgcacctgagagacagagccttcctgaagagaaagctggtgcacgccatcatcggcagcctgaaggacaacagaccccagggctggtgcctgagcgacacctacctgaagtgcgccatgaacgccagagaggagaacccctgggtgcccgacgacacctactactgcagactgatcggcagactggtggacaccatggccggcaagagccccggccccttccccaactgcgactggagattcaacgagttccccaaccccgccgcccacgccctgcacgtgacctgcgtggagctgatggccctggccgtgagcggcaaggaggtgggcaacgccctgctgaacgtggtgctgaagagccagcccctggtgcccagagagaacatcaccgcctggatgaacgccatcggcctgatcatcaccgccctgcccgagccctactggatcgtgctgcacgacagaatcgtgagcgtgatcagcagccccagcctgaccagcgagaccgagtgggtgggctaccccttcagactgttcgacttcaccgcctgccaccagagctacagcgagatgagctgcagctacaccctggccctggcccacgccgtgtggcaccacagcagcatcggccagctgagcctgatccccaagttcctgaccgaggtgctgctgcccatcgtgaagaccgagttccagctgctgtacgtgtaccacctggtgggccccttcctgcagagattccagcaggagagaaccagatgcatgatcgagatcggcgtggccttctacgacatgctgctgaacgtggaccagtgcagcacccacctgaactacatggaccccatctgcgacttcctgtaccacatgaagtacatgttcaccggcgacagcgtgaaggagcaggtggagaagatcatctgcaacctgaagcccgccctgaagctgagactgagattcatcacccacatcagcaagatggagcccgccgccgtgcccccccaggccatgaacagcggcagccccgccccccagagcaaccaggtgcccgtgagcctgcccgtgacccagtag

SEQ ID NO: 88242 - DNA, 114 bp, synthetic construct
  misc_feature 1..114: note = Description of Artificial Sequence: Synthetic coding sequence
  source 1..114: mol_type = other DNA
atggagacccagctgcagagcatcttcgaggaggtggtgaagaccgaggtgatcgaggaggccttccccggcatgttcatggacacccccgaggacgagaagagcagcaagtag

SEQ ID NO: 88243 - DNA, 132 bp, synthetic construct
  misc_feature 1..132: note = Description of Artificial Sequence: Synthetic coding sequence
  source 1..132: mol_type = other DNA
atggagacccagctgcagagcatcttcgaggaggtggtgaagaccgaggtgatcgaggaggccttccccggcatgttcatggacacccccgaggacgagaagaccaagctgttcatggagatggagctgtag

SEQ ID NO: 88244 - DNA, 1428 bp, synthetic construct
  misc_feature 1..1428: note = Description of Artificial Sequence: Synthetic coding sequence
  source 1..1428: mol_type = other DNA
atggagacccagctgcagagcatcttcgaggaggtggtgaagaccgaggtgatcgaggaggccttccccggcatgttcatggacacccccgaggacgagaagaccaagctgatcagctgcctgggcgccttcagacagttctggggcggcctgagccaggagagccacgagcagtgcatccagtggatcgtgaagttcatccacggccagcacagccccaagagaatcagcttcctgtacgactgcctggccatggccgtggagaccggcctgctgccccccagactggtgtgcgagagcctgatcaacagcgacaccctggagtgggagagaacccagctgtgggccctgaccttcaagctggtgagaaagatcatcggcggcgtggactacaagggcgtgagagacctgctgaaggtgatcctggagaagatcctgaccatccccaacaccgtgagcagcgccgtggtgcagcagctgctggccgccagagaggtgatcgcctacatcctggagagaaacgcctgcctgctgcccgcctacttcgccgtgaccgagatcagaaagctgtaccccgagggcaagctgccccactggctgctgggcaacctggtgagcgacttcgtggacaccttcagacccaccgccagaatcaacagcatctgcggcagatgcagcctgctgcccgtggtgaacaacagcggcgccatctgcaacagctggaagctggaccccgccaccctgagattccccctgaagggcctgctgccctacgacaaggacctgttcgagccccagaccgccctgctgagatacgtgctggagcagccctacagcagagacatggtgtgcaacatgctgggcctgaacaagcagcacaagcagagatgccccgtgctggaggaccagctggtggacctggtggtgtacgccatggagagaagcgagaccgaggagaagttcgacgacggcggcaccagccagctgctgtggcagcacctgagcagccagctgatcttcttcgtgctgttccagttcgccagcttcccccacatggtgctgagcctgcaccagaagctggccggcagaggcctgatcaagggcagagaccacctgatgtgggtgctgctgcagttcatcagcggcagcatccagaagaacgccctggccgacttcctgcccgtgatgaagctgttcgacctgctgtaccccgagaaggagtacatccccgtgcccgacatcaacaagccccagagcacccacgccttcgccatgacctgcatctggatccacctgaacagaaaggcccagaacgacaacagcaagctgcagatccccatcccccacagcctgagactgcaccacgagagcgccttcgccaactgcttccagatcacctgcatgggcgacctgacccacaccccctag

SEQ ID NO: 88245 - DNA, 429 bp, synthetic construct
  misc_feature 1..429: note = Description of Artificial Sequence: Synthetic coding sequence
  source 1..429: mol_type = other DNA
atgcaccacatccagccccactacagagtgcagctgctgagccacctgcacaccctggccgccgtggcccagaccaaccagaaccagctgcacctgtgcgtggagagcaccgccctgagactgatcaccgccctgggcagcagcgaggtgcagccccagttcaccagattcctgagcgaccccaagaccgtgctgagcgccgagagcgaggagctgaacagagccctgatcctgaccctggccagagccacccacgtgaccgacttcttcaccggcagcgacagcatccagggcacctggtgcaaggacatcctgcagaccatcatgagcttcaccccccacaactgggccagccacaccctgagctgcttccccggccccctgcagaccctgctgatcctgggcgagctggccctgagaaagacctag

SEQ ID NO: 88246 - DNA, 2661 bp, synthetic construct
  misc_feature 1..2661: note = Description of Artificial Sequence: Synthetic coding sequence
  source 1..2661: mol_type = other DNA
atggagacccagctgcagagcatcttcgaggaggtggtgaagaccgaggtgatcgaggaggccttccccggcatgttcatggacacccccgaggacgagaagaccaagctgatcagctgcctgggcgccttcagacagttctggggcggcctgagccaggagagccacgagcagtgcatccagtggatcgtgaagttcatccacggccagcacagccccaagagaatcagcttcctgtacgactgcctggccatggccgtggagaccggcctgctgccccccagactggtgtgcgagagcctgatcaacagcgacaccctggagtgggagagaacccagctgtgggccctgaccttcaagctggtgagaaagatcatcggcggcgtggactacaagggcgtgagagacctgctgaaggtgatcctggagaagatcctgaccatccccaacaccgtgagcagcgccgtggtgcagcagctgctggccgccagagaggtgatcgcctacatcctggagagaaacgcctgcctgctgcccgcctacttcgccgtgaccgagatcagaaagctgtaccccgagggcaagctgccccactggctgctgggcaacctggtgagcgacttcgtggacaccttcagacccaccgccagaatcaacagcatctgcggcagatgcagcctgctgcccgtggtgaacaacagcggcgccatctgcaacagctggaagctggaccccgccaccctgagattccccctgaagggcctgctgccctacgacaaggacctgttcgagccccagaccgccctgctgagatacgtgctggagcagccctacagcagagacatggtgtgcaacatgctgggcctgaacaagcaggtgctgaagatcttcaagcacaagcagagatgccccgtgctggaggaccagctggtggacctggtggtgtacgccatggagagaagcgagaccgaggagaagttcgacgacggcggcaccagccagctgctgtggcagcacctgagcagccagctgatcttcttcgtgctgttccagttcgccagcttcccccacatggtgctgagcctgcaccagaagctggccggcagaggcctgatcaagggcagagaccacctgatgtgggtgctgctgcagttcatcagcggcagcatccagaagaacgccctggccgacttcctgcccgtgatgaagctgttcgacctgctgtaccccgagaaggagtacatccccgtgcccgacatcaacaagccccagagcacccacgccttcgccatgacctgcatctggatccacctgaacagaaaggcccagaacgacaacagcaagctgcagatccccatcccccacagcctgagactgcaccacgagttcctgcagcagagcctgagaaacaagagcctgcagatgaacgactacaagatcgccctgctgtgcaacgcctacagcaccaacagcgagtgcttcaccctgcccatgggcgccctggtggagaccatctacggcaacggcatcatgagaatccccctgcccggcaccaactgcatggccagcggcagcatcacccccctgcccatgaacctgctggacagcctgaccgtgcacgccaagatgagcctgatccacagcatcgccaccagagtgatcaagctggcccacgccaagagcagcgtggccctggcccccgccctggtggagacctacagcagactgctggtgtacatggagatcgagagcctgggcatcaagggcttcatcagccagctgctgcccaccgtgttcaagagccacgcctggggcatcctgcacaccctgctggagatgttcagctacagaatgcaccacatccagccccactacagagtgcagctgctgagccacctgcacaccctggccgccgtggcccagaccaaccagaaccagctgcacctgtgcgtggagagcaccgccctgagactgatcaccgccctgggcagcagcgaggtgcagccccagttcaccagattcctgagcgaccccaagaccgtgctgagcgccgagagcgaggagctgaacagagccctgatcctgaccctggccagagccacccacgtgaccgacttcttcaccggcagcgacagcatccagggcacctggtgcaaggacatcctgcagaccatcatgagcttcaccccccacaactgggccagccacaccctgagctgcttccccggccccctgcaggccttcttcaagcagaacaacgtgccccaggagagcagattcaacctgaagaagaacgtggaggaggagtacagaaagtggaagagcatgagcaacgagaacgacatcatcacccacttcagcatgcagggcagcccccccctgttcctgtgcctgctgtggaagatgctgctggagaccgaccacatcaaccagatcggctacagagtgctggagagaatcggcgccagagccctggtggcccacgtgagaaccttcgccgacttcctggtgtacgagttcagcaccagcgccggcggccagcagctgaacaagtgcatcgagatcctgaacgacatggtgtggaagtacaacatcgtgaccctggacagactgatcctgtgcctggtgagaatcaacaccttcctgagcctgttcagctag

SEQ ID NO: 88247 - DNA, 3030 bp, synthetic construct
  misc_feature 1..3030: note = Description of Artificial Sequence: Synthetic coding sequence
  source 1..3030: mol_type = other DNA
atggagagaagcgagaccgaggagaagttcgacgacggcggcaccagccagctgctgtggcagcacctgagcagccagctgatcttcttcgtgctgttccagttcgccagcttcccccacatggtgctgagcctgcaccagaagtacatccccgtgcccgacatcaacaagccccagagcacccacgccttcgccatgacctgcatctggatccacctgaacagaaaggcccagaacgacaacagcaagctgcagatccccatcccccacagcctgagactgcaccacgagttcctgcagcagagcctgagaaacaagagcctgcagatgaacgactacaagatcgccctgctgtgcaacgcctacagcaccaacagcgagtgcttcaccctgcccatgggcgccctggtggagaccatctacggcaacggcatcatgagaatccccctgcccggcaccaactgcatggccagcggcagcatcacccccctgcccatgaacctgctggacagcctgaccgtgcacgccaagatgagcctgatccacagcatcgccaccagagtgatcaagctggcccacgccaagagcagcgtggccctggcccccgccctggtggagacctacagcagactgctggtgtacatggagatcgagagcctgggcatcaagggcttcatcagccagctgctgcccaccgtgttcaagagccacgcctggggcatcctgcacaccctgctggagatgttcagctacagaatgcaccacatccagccccactacagagtgcagctgctgagccacctgcacaccctggccgccgtggcccagaccaaccagaaccagctgcacctgtgcgtggagagcaccgccctgagactgatcaccgccctgggcagcagcgaggtgcagccccagttcaccagattcctgagcgaccccaagaccgtgctgagcgccgagagcgaggagctgaacagagccctgatcctgaccctggccagagccacccacgtgaccgacttcttcaccggcagcgacagcatccagggcacctggtgcaaggacatcctgcagaccatcatgagcttcaccccccacaactgggccagccacaccctgagctgcttccccggccccctgcaggccttcttcaagcagaacaacgtgccccaggagagcagattcaacctgaagaagaacgtggaggaggagtacagaaagtggaagagcatgagcaacgagaacgacatcatcacccacttcagcatgcagggcagcccccccctgttcctgtgcctgctgtggaagatgctgctggagaccgaccacatcaaccagatcggctacagagtgctggagagaatcggcgccagagccctggtggcccacgtgagaaccttcgccgacttcctggtgtacgagttcagcaccagcgccggcggccagcagctgaacaagtgcatcgagatcctgaacgacatggtgtggaagtacaacatcgtgaccctggacagactgatcctgtgcctggccatgagaagccacgagggcaacgaggcccaggtgtgctacttcatcatccagctgctgctgctgaagcccaacgacttcagaaacagagtgagcgacttcgtgaaggagaacagccccgagcactggctgcagaacgactggcacaccaagcacatgaactaccacaagaagtaccccgagaagctgtacttcgagggcctggccgagcaggtggacccccccgtgcagatccagagcccctacctgcccatctacttcggcaacgtgtgcctgagattcctgcccgtgttcgacatcgtgatccacagattcctggagctgctgcccgtgagcaagagcctggagaccctgctggaccacctgggcggcctgtacaagttccacgacagacccgtgacctacctgtacaacaccctgcactactacgagatgcacctgagagacagagccttcctgaagagaaagctggtgcacgccatcatcggcagcctgaaggacaacagaccccagggctggtgcctgagcgacacctacctgaagtgcgccatgaacgccagagaggagaacccctgggtgcccgacgacacctactactgcagactgatcggcagactggtggacaccatggccggcaagagccccggccccttccccaactgcgactggagattcaacgagttccccaaccccgccgcccacgccctgcacgtgacctgcgtggagctgatggccctggccgtgagcggcaaggaggtgggcaacgccctgctgaacgtggtgctgaagagccagcccctggtgcccagagagaacatcaccgcctggatgaacgccatcggcctgatcatcaccgccctgcccgagccctactggatcgtgctgcacgacagaatcgtgagcgtgatcagcagccccagcctgaccagcgagaccgagtgggtgggctaccccttcagactgttcgacttcaccgcctgccaccagagctacagcgagatgagctgcagctacaccctggccctggcccacgccgtgtggcaccacagcagcatcggccagctgagcctgatccccaagttcctgaccgaggtgctgctgcccatcgtgaagaccgagttccagctgctgtacgtgtaccacctggtgggccccttcctgcagagattccagcaggagagaaccagatgcatgatcgagatcggcgtggccttctacgacatgctgctgaacgtggaccagtgcagcacccacctgaactacatggaccccatctgcgacttcctgtaccacatgaagtacatgttcaccggcgacagcgtgaaggagcaggtggagaagatcatctgcaacctgaagcccgccctgaagctgagactgagattcatcacccacatcagcaagatggagcccgccgccgtgcccccccaggccatgaacagcggcagccccgccccccagagcaaccaggtgcccgtgagcctgcccgtgacccagtag

SEQ ID NO: 88248 - DNA, 2970 bp, synthetic construct
  misc_feature 1..2970: note = Description of Artificial Sequence: Synthetic coding sequence
  source 1..2970: mol_type = other DNA
atgaaggtggtgaacctgaagcaggccatcctgcaggcctggaaggagagatggagcgactaccagtgggccatcaacatgaagaagttcttccccaagggcgccacctgggacatcctgaacctggccgacgccctgctggagcaggccatgatcggccccagccccaaccccctgatcctgagctacctgaagtacgccatcagcagccagatggtgagctacagcagcgtgctgaccgccatcagcaagttcgacgacttcagcagagacctgtgcgtgcaggccctgctggacatcatggacatgttctgcgacagactgagctgccacggcaaggccgaggagtgcatcggcctgtgcagagccctgctgagcgccctgcactggctgctgagatgcaccgccgccagcgccgagagactgagagagggcctggaggccggcacccccgccgccggcgagaagcagctggccatgtgcctgcagagactggagaagaccctgagcagcaccaagaacagagccctgctgcacatcgccaagctggaggaggccagcagctggaccgccatcgagcacagcctgctgaagctgggcgagatcctggccaacctgagcaacccccagctgagaagccaggccgagcagtgcggcaccctgatcagaagcatccccaccatgctgagcgtgcacgccgagcagatgcacaagaccggcttccccaccgtgcacgccgtgatcctgctggagggcaccatgaacctgaccggcgagacccagagcctggtggagcagctgaccatggtgaagagaatgcagcacatccccacccccctgttcgtgctggagatctggaaggcctgcttcgtgggcctgatcgagagccccgagggcaccgaggagctgaagtggaccgccttcaccttcctgaagatcccccaggtgctggtgaagctgaagaagtacagccacggcgacaaggacttcaccgaggacgtgaactgcgccttcgagttcctgctgaagctgacccccctgctggacaaggccgaccagagatgcaactgcgactgcaccaacttcctgctgcaggagtgcggcaagcagggcctgctgagcgaggccagcgtgaacaacctgatggccaagagaaaggccgacagagagcacgccccccagcagaagagcggcgagaacgccaacatccagcccaacatccagctgatcctgagagccgagcccaccgtgaccaacatcctgaagaccatggacgccgaccacagcaagagccccgagggcctgctgggcgtgctgggccacatgctgagcggcaagagcctggacctgctgctggccgccgccgccgccaccggcaagctgaagagcttcgccagaaagttcatcaacctgaacgagttcaccacctacggcagcgaggagagcaccaagcccgccagcgtgagagccctgctgttcgacatcagcttcctgatgctgtgccacgtggcccagacctacggcagcgaggtgatcctgagcgagagcagaaccggcgccgaggtgcccttcttcgagacctggatgcagacctgcatgcccgaggagggcaagatcctgaaccccgaccacccctgcttcagacccgacagcaccaaggtggagagcctggtggccctgctgaacaacagcagcgagatgaagctggtgcagatgaagtggcacgaggcctgcctgagcatcagcgccgccatcctggagatcctgaacgcctgggagaacggcgtgctggccttcgagagcatccagaagatcaccgacaacatcaagggcaaggtgtgcagcctggccgtgtgcgccgtggcctggctggtggcccacgtgagaatgctgggcctggacgagagagagaagagcctgcagatgatcagacagctggccggccccctgttcagcgagaacaccctgcagttctacaacgagagagtggtgatcatgaacagcatcctggagagaatgtgcgccgacgtgctgcagcagaccgccacccagatcaagttccccagcaccggcgtggacaccatgccctactggaacctgctgccccccaagagacccatcaaggaggtgctgaccgacatcttcgccaaggtgctggagaagggctgggtggacagcagaagcatccacatcttcgacaccctgctgcacatgggcggcgtgtactggttctgcaacaacctgatcaaggagctgctgaaggagaccagaaaggagcacaccctgagagccgtggagctgctgtacagcatcttctgcctggacatgcagcaggtgaccctggtgctgctgggccacatcctgcccggcctgctgaccgacagcagcaagtggcacagcctgatggacccccccggcaccgccctggccaagctggccgtgtggtgcgccctgagcagctacagcagccacaagggccaggccagcaccagacagaagaagagacacagagaggacatcgaggactacatcagcctgttccccctggacgacgtgcagcccagcaagctgatgagactgctgagcagcaacgaggacgacgccaacatcctgagcagccccaccgacagaagcatgagcagcagcctgagcgccagccagctgcacaccgtgaacatgagagaccccctgaacagagtgctggccaacctgttcctgctgatcagcagcatcctgggcagcagaaccgccggcccccacacccagttcgtgcagtggttcatggaggagtgcgtggactgcctggagcagggcggcagaggcagcgtgctgcagttcatgcccttcaccaccgtgagcgagctggtgaaggtgagcgccatgagcagccccaaggtggtgctggccatcaccgacctgagcctgcccctgggcagacaggtggccgccaaggccatcgccgccctgtag

SEQ ID NO: 88249 - DNA, 2970 bp, synthetic construct; identical to SEQ ID NO: 88248
  misc_feature 1..2970: note = Description of Artificial Sequence: Synthetic coding sequence
  source 1..2970: mol_type = other DNA

SEQ ID NO: 88250 - DNA, 2931 bp, synthetic construct
  misc_feature 1..2931: note = Description of Artificial Sequence: Synthetic coding sequence
  source 1..2931: mol_type = other DNA
atgaaggtggtgaacctgaagcaggccatcctgcaggcctggaaggagagatggagcgactaccagtgggccatcaacatgaagaagttcttccccaagggcgccacctgggacatcctgaacctggccgacgccctgctggagcaggccatgatcggccccagccccaaccccctgatcctgagctacctgaagtacgccatcagcagccagttcgacgacttcagcagagacctgtgcgtgcaggccctgctggacatcatggacatgttctgcgacagactgagctgccacggcaaggccgaggagtgcatcggcctgtgcagagccctgctgagcgccctgcactggctgctgagatgcaccgccgccagcgccgagagactgagagagggcctggaggccggcacccccgccgccggcgagaagcagctggccatgtgcctgcagagactggagaagaccctgagcagcaccaagaacagagccctgctgcacatcgccaagctggaggaggccagcagctggaccgccatcgagcacagcctgctgaagctgggcgagatcctggccaacctgagcaacccccagctgagaagccaggccgagcagtgcggcaccctgatcagaagcatccccaccatgctgagcgtgcacgccgagcagatgcacaagaccggcttccccaccgtgcacgccgtgatcctgctggagggcaccatgaacctgaccggcgagacccagagcctggtggagcagctgaccatggtgaagagaatgcagcacatccccacccccctgttcgtgctggagatctggaaggcctgcttcgtgggcctgatcgagagccccgagggcaccgaggagctgaagtggaccgccttcaccttcctgaagatcccccaggtgctggtgaagctgaagaagtacagccacggcgacaaggacttcaccgaggacgtgaactgcgccttcgagttcctgctgaagctgacccccctgctggacaaggccgaccagagatgcaactgcgactgcaccaacttcctgctgcaggagtgcggcaagcagggcctgctgagcgaggccagcgtgaacaacctgatggccaagagaaaggccgacagagagcacgccccccagcagaagagcggcgagaacgccaacatccagcccaacatccagctgatcctgagagccgagcccaccgtgaccaacatcctgaagaccatggacgccgaccacagcaagagccccgagggcctgctgggcgtgctgggccacatgctgagcggcaagagcctggacctgctgctggccgccgccgccgccaccggcaagctgaagagcttcgccagaaagttcatcaacctgaacgagttcaccacctacggcagcgaggagagcaccaagcccgccagcgtgagagccctgctgttcgacatcagcttcctgatgctgtgccacgtggcccagacctacggcagcgaggtgatcctgagcgagagcagaaccggcgccgaggtgcccttcttcgagacctggatgcagacctgcatgcccgaggagggcaagatcctgaaccccgaccacccctgcttcagacccgacagcaccaaggtggagagcctggtggccctgctgaacaacagcagcgagatgaagctggtgcagatgaagtggcacgaggcctgcctgagcatcagcgccgccatcctggagatcctgaacgcctgggagaacggcgtgctggccttcgagagcatccagaagatcaccgacaacatcaagggcaaggtgtgcagcctggccgtgtgcgccgtggcctggctggtggcccacgtgagaatgctgggcctggacgagagagagaagagcctgcagatgatcagacagctggccggccccctgttcagcgagaacaccctgcagttctacaacgagagagtggtgatcatgaacagcatcctggagagaatgtgcgccgacgtgctgcagcagaccgccacccagatcaagttccccagcaccggcgtggacaccatgccctactggaacctgctgccccccaagagacccatcaaggaggtgctgaccgacatcttcgccaaggtgctggagaagggctgggtggacagcagaagcatccacatcttcgacaccctgctgcacatgggcggcgtgtactggttctgcaacaacctgatcaaggagctgctgaaggagaccagaaaggagcacaccctgagagccgtggagctgctgtacagcatcttctgcctggacatgcagcaggtgaccctggtgctgctgggccacatcctgcccggcctgctgaccgacagcagcaagtggcacagcctgatggacccccccggcaccgccctggccaagctggccgtgtggtgcgccctgagcagctacagcagccacaagggccaggccagcaccagacagaagaagagacacagagaggacatcgaggactacatcagcctgttccccctggacgacgtgcagcccagcaagctgatgagactgctgagcagcaacgaggacgacgccaacatcctgagcagccccaccgacagaagcatgagcagcagcctgagcgccagccagctgcacaccgtgaacatgagagaccccctgaacagagtgctggccaacctgttcctgctgatcagcagcatcctgggcagcagaaccgccggcccccacacccagttcgtgcagtggttcatggaggagtgcgtggactgcctggagcagggcggcagaggcagcgtgctgcagttcatgcccttcaccaccgtgagcgagctggtgaaggtgagcgccatgagcagccccaaggtggtgctggccatcaccgacctgagcctgcccctgggcagacaggtggccgccaaggccatcgccgccctgtag

SEQ ID NO: 88251 - DNA, 2970 bp, synthetic construct; identical to SEQ ID NO: 88248
  misc_feature 1..2970: note = Description of Artificial Sequence: Synthetic coding sequence
  source 1..2970: mol_type = other DNA

SEQ ID NO: 88252 - DNA, 864 bp, synthetic construct
  misc_feature 1..864: note = Description of Artificial Sequence: Synthetic coding sequence
  source 1..864: mol_type = other DNA
tgaaacctgatcaaggagctgctgaaggagaccagaaaggagcacaccctgagagccgtggagctgctgtacagcatcttctgcctggacatgcagcaggtgaccctggtgctgctgggccacatcctgcccggcctgctgaccgacagcagcaagtggcacagcctgatggacccccccggcaccgccctggccaagctggccgtgtggtgcgccctgagcagctacagcagccacaagggccaggccagcaccagacagaagaagagacacagagaggacatcgaggactacatcagcctgttccccctggacgacgtgcagcccagcaagctgatgagactgctgagcagcaacgaggacgacgccaacatcctgagcagccccagaagcagcctgggcagcccctgcaccagctacctgagatgggtgaaggtgggcctgggccaccccagaggcgcccccctgctgcacagcgccggctgcttccccgccctgcacctgctgagacccaccgccgacagaagcatgagcagcagcctgagcgccagccagctgcacaccgtgaacatgagagaccccctgaacagagtgctggccaacctgttcctgctgatcagcagcatcctgggcagcagaaccgccggcccccacacccagttcgtgcagtggttcatggaggagtgcgtggactgcctggagcagggcggcagaggcagcgtgctgcagttcatgcccttcaccaccgtgagcgagctggtgaaggtgagcgccatgagcagccccaaggtggtgctggccatcaccgacctgagcctgcccctgggcagacaggtggccgccaaggccatcgccgccctgtag

SEQ ID NO: 88253 - DNA, 906 bp, synthetic construct
  misc_feature 1..906: note = Description of Artificial Sequence: Synthetic coding sequence
  source 1..906: mol_type = other DNA
atgaaggtggtgaacctgaagcaggccatcctgcaggcctggaaggagagatggagcgactaccagtgggccatcaacatgaagaagttcttccccaagggcgccacctgggacatcctgaacctggccgacgccctgctggagcaggccatgatcggccccagccccaaccccctgatcctgagctacctgaagtacgccatcagcagccagatggtgagctacagcagcgtgctgaccgccatcagcaagttcgacgacttcagcagagacctgtgcgtgcaggccctgctggacatcatggacatgttctgcgacagactgagctgccacggcaaggccgaggagtgcatcggcctgtgcagagccctgctgagcgccctgcactggctgctgagatgcaccgccgccagcgccgagagactgagagagggcctggaggccggcacccccgccgccggcgagaagcagctggccatgtgcctgcagagactggagaagaccctgagcagcaccaagaacagagccctgctgcacatcgccaagctggaggaggccagcctgcacaccagccagggcctgggccagggcggcaccagagccaaccagcccaccgccagctggaccgccatcgagcacagcctgctgaagctgggcgagatcctggccaacctgagcaacccccagctgagaagccaggccgagcagtgcggcaccctgatcagaagcatccccaccatgctgagcgtgcacgccgagcagatgcacaagaccggcttccccaccgtgcacgccgtgatcctgctggagggcaccatgaacctgaccggcgagacccagagcctggtggagcagctgaccatggtgaagagaatgcagcacatccccacccccctgttcgtgtag

SEQ ID NO: 88254 - DNA, 2700 bp, synthetic construct
  misc_feature 1..2700: note = Description of Artificial Sequence: Synthetic coding sequence
  source 1..2700: mol_type = other DNA
atgcccctggtgcccagatggtgccccaccctgctgagcagccagcccagcgtgagctgccacggcaaggccgaggagtgcatcggcctgtgcagagccctgctgagcgccctgcactggctgctgagatgcaccgccgccagcgccgagagactgagagagggcctggaggccggcacccccgccgccggcgagaagcagctggccatgtgcctgcagagactggagaagaccctgagcagcaccaagaacagagccctgctgcacatcgccaagctggaggaggccagcagctggaccgccatcgagcacagcctgctgaagctgggcgagatcctggccaacctgagcaacccccagctgagaagccaggccgagcagtgcggcaccctgatcagaagcatccccaccatgctgagcgtgcacgccgagcagatgcacaagaccggcttccccaccgtgcacgccgtgatcctgctggagggcaccatgaacctgaccggcgagacccagagcctggtggagcagctgaccatggtgaagagaatgcagcacatccccacccccctgttcgtgctggagatctggaaggcctgcttcgtgggcctgatcgagagccccgagggcaccgaggagctgaagtggaccgccttcaccttcctgaagatcccccaggtgctggtgaagctgaagaagtacagccacggcgacaaggacttcaccgaggacgtgaactgcgccttcgagttcctgctgaagctgacccccctgctggacaaggccgaccagagatgcaactgcgactgcaccaacttcctgctgcaggagtgcggcaagcagggcctgctgagcgaggccagcgtgaacaacctgatggccaagagaaaggccgacagagagcacgccccccagcagaagagcggcgagaacgccaacatccagcccaacatccagctgatcctgagagccgagcccaccgtgaccaacatcctgaagaccatggacgccgaccacagcaagagccccgagggcctgctgggcgtgctgggccacatgctgagcggcaagagcctggacctgctgctggccgccgccgccgccaccggcaagctgaagagcttcgccagaaagttcatcaacctgaacgagttcaccacctacggcagcgaggagagcaccaagcccgccagcgtgagagccctgctgttcgacatcagcttcctgatgctgtgccacgtggcccagacctacggcagcgaggtgatcctgagcgagagcagaaccggcgccgaggtgcccttcttcgagacctggatgcagacctgcatgcccgaggagggcaagatcctgaaccccgaccacccctgcttcagacccgacagcaccaaggtggagagcctggtggccctgctgaacaacagcagcgagatgaagctggtgcagatgaagtggcacgaggcctgcctgagcatcagcgccgccatcctggagatcctgaacgcctgggagaacggcgtgctggccttcgagagcatccagaagatcaccgacaacatcaagggcaaggtgtgcagcctggccgtgtgcgccgtggcctggctggtggcccacgtgagaatgctgggcctggacgagagagagaagagcctgcagatgatcagacagctggccggccccctgttcagcgagaacaccctgcagttctacaacgagagagtggtgatcatgaacagcatcctggagagaatgtgcgccgacgtgctgcagcagaccgccacccagatcaagttccccagcaccggcgtggacaccatgccctactggaacctgctgccccccaagagacccatcaaggaggtgctgaccgacatcttcgccaaggtgctggagaagggctgggtggacagcagaagcatccacatcttcgacaccctgctgcacatgggcggcgtgtactggttctgcaacaacctgatcaaggagctgctgaaggagaccagaaaggagcacaccctgagagccgtggagctgctgtacagcatcttctgcctggacatgcagcaggtgaccctggtgctgctgggccacatcctgcccggcctgctgaccgacagcagcaagtggcacagcctgatggacccccccggcaccgccctggccaagctggccgtgtggtgcgccctgagcagctacagcagccacaagggccaggccagcaccagacagaagaagagacacagagaggacatcgaggactacatcagcctgttccccctggacgacgtgcagcccagcaagctgatgagactgctgagcagcaacgaggacgacgccaacatcctgagcagccccaccgacagaagcatgagcagcagcctgagcgccagccagctgcacaccgtgaacatgagagaccccctgaacagagtgctggccaacctgttcctgctgatcagcagcatcctgggcagcagaaccgccggcccccacacccagttcgtgcagtggttcatggaggagtgcgtggactgcctggagcagggcggcagaggcagcgtgctgcagttcatgcccttcaccaccgtgagcgagctggtgaaggtgagcgccatgagcagccccaaggtggtgctggccatcaccgacctgagcctgcccctgggcagacaggtggccgccaaggccatcgccgccctgtag

SEQ ID NO: 88255 - DNA, 756 bp, synthetic construct
  misc_feature 1..756: note = Description of Artificial Sequence: Synthetic coding sequence
  source 1..756: mol_type = other DNA
atgaagaagttcttccccaagggcgccacctgggacatcctgaacctggccgacgccctgctggagcaggccatgatcggccccagccccaaccccctgatcctgagctacctgaagtacgccatcagcagccagatggtgagctacagcagcgtgctgaccgccatcatggagatcctgaacgcctgggagaacggcgtgctggccttcgagagcatccagaagatcaccgacaacatcaagggcaaggtgtgcagcctggccgtgtgcgccgtggcctggctggtggcccacgtgagaatgctgggcctggacgagagagagaagagcctgcagatgatcagacagctggccggccccctgttcagcgagaacaccctgcagttctacaacgagagagtggtgatcatgaacagcatcctggagagaatgtgcgccgacgtgctgcagcagaccgccacccagatcaagttccccagcaccggcgtggacaccatgccctactggaacctgctgccccccaagagacccatcaaggaggtgctgaccgacatcttcgccaaggtgctggagaagggctgggtggacagcagaagcatccacatcttcgacaccctgctgcacatgggcggcgtgtactggttctgcaacaacctgatcaaggagctgctgaaggagaccagaaaggagcacaccctgagagccgtggagctgctgtacagcatcttctgcctggacatgcagcaggtgacctag

SEQ ID NO: 88256 - DNA, 2466 bp, synthetic construct
  misc_feature 1..2466: note = Description of Artificial Sequence: Synthetic coding sequence
  source 1..2466: mol_type = other DNA
atgatcggccccagccccaaccccctgatcctgagctacctgaagtacgccatcagcagccagatggtgagctacagcagcgtgctgaccgccatcagcaagttcgacgacttcagcagagacctgtgcgtgcaggccctgctggacatcatggacatgttctgcgacagactgagctgccacggcaaggccgaggagtgcatcggcctgtgcagagccctgctgagcgccctgcactggctgctgagatgcaccgccgccagcgccgagagactgagagagggcctggaggccggcacccccgccgccggcgagaagcagctggccatgtgcctgcagagactggagaagaccctgagcagcaccaagaacagagccctgctgcacatcgccaagctggaggaggccagcagctggaccgccatcgagcacagcctgctgaagctgggcgagatcctggccaacctgagcaacccccagctgagaagccaggccgagcagtgcggcaccctgatcagaagcatccccaccatgctgagcgtgcacgccgagcagatgcacaagaccggcttccccaccgtgcacgccgtgatcctgctggagggcaccatgaacctgaccggcgagacccagagcctggtggagcagctgaccatggtgaagagaatgcagcacatccccacccccctgttcgtgctggagatctggaaggcctgcttcgtgggcctgatcgagagccccgagggcaccgaggagctgaagtggaccgccttcaccttcctgaagatcccccaggtgctggtgaagctgaagaagtacagccacggcgacaaggacttcaccgaggacgtgaactgcgccttcgagttcctgctgaagctgacccccctgctggacaaggccgaccagagatgcaactgcgactgcaccaacttcctgctgcaggagtgcggcaagcagggcctgctgagcgaggccagcgtgaacaacctgatggccaagagaaaggccgacagagagcacgccccccagcagaagagcggcgagaacgccaacatccagcccaacatccagctgatcctgagagccgagcccaccgtgaccaacatcctgaagaccatggacgccgaccacagcaagagccccgagggcctgctgggcgtgctgggccacatgctgagcggcaagagcctggacctgctgctggccgccgccgccgccaccggcaagctgaagagcttcgccagaaagttcatcaacctgaacgagttcaccacctacggcagcgaggagagcaccaagcccgccagcgtgagagccctgctgttcgacatcagcttcctgatgctgtgccacgtggcccagacctacggcagcgaggtgatcctgagcgagagcagaaccggcgccgaggtgcccttcttcgagacctggatgcagacctgcatgcccgaggagggcaagatcctgaaccccgaccacccctgcttcagacccgacagcaccaaggtggagagcctggtggccctgctgaacaacagcagcgagatgaagctggtgcagatgaagtggcacgaggcctgcctgagcatcagcgccgccatcctggagatcctgaacgcctgggagaacggcgtgctggccttcgagagcatccagaagatcaccgacaacatcaagggcaaggtgtgcagcctggccgtgtgcgccgtggcctggctggtggcccacgtgagaatgctgggcctggacgagagagagaagagcctgcagatgatcagacagctggccggccccctgttcagcgagaacaccctgcagttctacaacgagagagtggtgatcatgaacagcatcctggagagaatgtgcgccgacgtgctgcagcagaccgccacccagatcaagttccccagcaccggcgtggacaccatgccctactggaacctgctgccccccaagagacccatcaaggaggtgctgaccgacatcttcgccaaggtgctggagaagggctgggtggacagcagaagcatccacatcttcgacaccctgctgcacatgggcggcgtgtactggttctgcaacaacctgatcaaggagctgctgaaggagaccagaaaggagcacaccctgagagccgtggagctgctgtacagcatcttctgcctggacatgcagcaggtgaccctggtgctgctgggccacatcctgcccggcctgctgaccgacagcagcaagtggcacagcctgatggacccccccggcaccgccctggccaagctggccgtgtggtgcgccctgagcagctacagcagccacaagggccaggccagcaccagacagaagaagagacacagagaggacatcgaggactacatcagccccaaggtggtgctggccatcaccgacctgagcctgcccctgggcagacaggtggccgccaaggccatcgccgccctgtag

SEQ ID NO: 88257 - DNA, 1026 bp, synthetic construct
  misc_feature 1..1026: note = Description of Artificial Sequence: Synthetic coding sequence
  source 1..1026: mol_type = other DNA
atgaagaagttcttccccaagggcgccacctgggacatcctgaacctggccgacgccctgctggagcaggccatgatcggccccagccccaaccccctgatcctgagctacctgaagtacgccatcagcagccagatggtgagctacagcagcgtgctgaccgccatcagcaagttcgacgacttcagcagagacctgtgcgtgcaggccctgctggacatcatggacatgttctgcgacagactgagctgccacggcaaggccgaggagtgcatcggcctgtgcagagccctgctgagcgccctgcactggctgctgagatgcaccgccgccagcgccgagagactgagagagggcctggaggccggcacccccgccgccggcgagaagcagctggccatgtgcctgcagagactggagaagaccctgagcagcaccaagaacagagccctgctgcacatcgccaagctggaggaggccagcagctggaccgccatcgagcacagcctgctgaagctgggcgagatcctggccaacctgagcaacccccagctgagaagccaggccgagcagtgcggcaccctgatcagaagcatccccaccatgctgagcgtgcacgccgagcagatgcacaagaccggcttccccaccgtgcacgccgtgatcctgctggagggcaccatgaacctgaccggcgagacccagagcctggtggagcagcagaccgccacccagatcaagttccccagcaccggcgtggacaccatgccctactggaacctgctgccccccaagagacccatcaaggaggtgctgaccgacatcttcgccaaggtgctggagaagggctgggtggacagcagaagcatccacatcttcgacaccctgctgcacatgggcggcgtgtactggttctgcaacaacctgatcaaggagctgctgaaggagaccagaaaggagcacaccctgagagccgtggagctgctgtacagcatcttctgcctggacatgcagcaggtgacctag

SEQ ID NO: 88258 - DNA, 2796 bp, synthetic construct
  misc_feature 1..2796: note = Description of Artificial Sequence: Synthetic coding sequence
  source 1..2796: mol_type = other DNA
atgaaggtggtgaacctgaagcaggccatcctgcaggcctggaaggagagatggagcgactaccagtgggccatcaacatgaagaagttcttccccaagggcgccacctgggacatcctgaacctggccgacgccctgctggagcaggccatgatcggccccagccccaaccccctgatcctgagctacctgaagtacgccatcagcagccagatggtgagctacagcagcgtgctgaccgccatcatgtgcctgcagagactggagaagaccctgagcagcaccaagaacagagccctgctgcacatcgccaagctggaggaggccagcctgcacaccagccagggcctgggccagggcggcaccagagccaaccagcccaccgccagctggaccgccatcgagcacagcctgctgaagctgggcgagatcctggccaacctgagcaacccccagctgagaagccaggccgagcagtgcggcaccctgatcagaagcatccccaccatgctgagcgtgcacgccgagcagatgcacaagaccggcttccccaccgtgcacgccgtgatcctgctggagggcaccatgaacctgaccggcgagacccagagcctggtggagcagctgaccatggtgaagagaatgcagcacatccccacccccctgttcgtgctggagatctggaaggcctgcttcgtgggcctgatcgagagccccgagggcaccgaggagctgaagtggaccgccttcaccttcctgaagatcccccaggtgctggtgaagctgaagaagtacagccacggcgacaaggacttcaccgaggacgtgaactgcgccttcgagttcctgctgaagctgacccccctgctggacaaggccgaccagagatgcaactgcgactgcaccaacttcctgctgcaggagtgcggcaagcagggcctgctgagcgaggccagcgtgaacaacctgatggccaagagaaaggccgacagagagcacgccccccagcagaagagcggcgagaacgccaacatccagcccaacatccagctgatcctgagagccgagcccaccgtgaccaacatcctgaagaccatggacgccgaccacagcaagagccccgagggcctgctgggcgtgctgggccacatgctgagcggcaagagcctggacctgctgctggccgccgccgccgccaccggcaagctgaagagcttcgccagaaagttcatcaacctgaacgagttcaccacctacggcagcgaggagagcaccaagcccgccagcgtgagagccctgctgttcgacatcagcttcctgatgctgtgccacgtggcccagacctacggcagcgaggtgatcctgagcgagagcagaaccggcgccgaggtgcccttcttcgagacctggatgcagacctgcatgcccgaggagggcaagatcctgaaccccgaccacccctgcttcagacccgacagcaccaaggtggagagcctggtggccctgctgaacaacagcagcgagatgaagctggtgcagatgaagtggcacgaggcctgcctgagcatcagcgccgccatcctggagatcctgaacgcctgggagaacggcgtgctggccttcgagagcatccagaagatcaccgacaacatcaagggcaaggtgtgcagcctggccgtgtgcgccgtggcctggctggtggcccacgtgagaatgctgggcctggacgagagagagaagagcctgcagatgatcagacagctggccggccccctgttcagcgagaacaccctgcagttctacaacgagagagtggtgatcatgaacagcatcctggagagaatgtgcgccgacgtgctgcagcagaccgccacccagatcaagttccccagcaccggcgtggacaccatgccctactggaacctgctgccccccaagagacccatcaaggaggtgctgaccgacatcttcgccaaggtgctggagaagggctgggtggacagcagaagcatccacatcttcgacaccctgctgcacatgggcggcgtgtactggttctgcaacaacctgatcaaggagctgctgaaggagaccagaaaggagcacaccctgagagccgtggagctgctgtacagcatcttctgcctggacatgcagcaggtgaccctggtgctgctgggccacatcctgcccggcctgctgaccgacagcagcaagtggcacagcctgatggacccccccggcaccgccctggccaagctggccgtgtggtgcgccctgagcagctacagcagccacaagggccaggccagcaccagacagaagaagagacacagagaggacatcgaggactacatcagcctgttccccctggacgacgtgcagcccagcaagctgatgagactgctgagcagcaacgaggacgacgccaacatcctgagcagccccaccgacagaagcatgagcagcagcctgagcgccagccagctgcacaccgtgaacatgagagaccccctgaacagagtgctggccaacctgttcctgctgatcagcagcatcctgggcagcagaaccgccggcccccacacccagttcgtgcagtggttcatggaggagtgcgtggactgcctggagcagggcggcagaggcagcgtgctgcagttcatgcccttcaccaccgtgagcgagctggtgaaggtgagcgccatgagcagccccaaggtggtgctggccatcaccgacctgagcctgcccctgggcagacaggtggccgccaaggccatcgccgccctgtag

SEQ ID NO: 88259 - DNA, 444 bp, synthetic construct
  misc_feature 1..444: note = Description of Artificial Sequence: Synthetic coding sequence
  source 1..444: mol_type = other DNA
atgaagaagttcttccccaagggcgccacctgggacatcctgaacctggccgacgccctgctggagcaggccatgatcggccccagccccaaccccctgatcctgagctacctgaagtacgccatcagcagccagatggtgagctacagcagcgtgctgaccgccatcagcaagttcgacgacttcagcagagacctgtgcgtgcaggccctgctggacatcatggacatgttctgcgacagactgagctgccacggcaaggccgaggagtgcatcggcctgtgcagagccctgctgagcgccctgcacttcatgcccttcaccaccgtgagcgagctggtgaaggtgagcgccatgagcagccccaaggtggtgctggccatcaccgacctgagcctgcccctgggcagacaggtggccgccaaggccatcgccgccctgtag

SEQ ID NO: 88260 - DNA, 921 bp, synthetic construct
  misc_feature 1..921: note = Description of Artificial Sequence: Synthetic coding sequence
  source 1..921: mol_type = other DNA
atgaagaagttcttccccaagggcgccacctgggacatcctgaacctggccgacgccctgctggagcaggccatgatcggccccagccccaaccccctgatcctgagctacctgaagtacgccatcagcagccagatggtgagctacagcagcgtgctgaccgccatcagcaagttcgacgacttcagcagagacctgtgcgtgcaggccctgctggacatcatggacatgttctgcgacagactgagctgccacggcaaggccgaggagtgcatcggcctgtgcagagccctgctgagcgccctgcactggctgctgagatgcaccgccgccagcgccgagagactgagagagggcctggaggccggcacccccgccgccggcgagaagcagctggccatgtgcctgcagagactggagaagaccctgagcagcaccaagaacagagccctgctgcacatcgccaagctggaggaggccagcagctggaccgccatcgagcacagcctgctgaagctgggcgagatcctggccaacctgagcaacccccagctgagaagccaggccgagcagtgcggcaccctgatcagaagcatccccaccatgctgagcgtgcacgccgagcagatgcacaagaccggcttccccaccgtgcacgccgtgatcctgctggagggcaccatgaacctgaccggcgagacccagagcctggtggagcagctgaccatggtgaagagaatgcagcacatccccacccccctgttcggcagaggcagcgtgctgcagttcatgcccttcaccaccgtgagcgagctggtgaaggtgagcgccatgagcagccccaaggtggtgctggccatcaccgacctgagcctgcccctgggcagacaggtggccgccaaggccatcgccgccctgtag

SEQ ID NO: 88261 - DNA, 2244 bp, synthetic construct
  misc_feature 1..2244: note = Description of Artificial Sequence: Synthetic coding sequence
  source 1..2244: mol_type = other DNA
atggtgcccggcagcgagggccccgccagagccggcagcgtggtggccgacgtggtgttcgtgatcgagggcaccgccaacctgggcccctacttcgagggcctgagaaagcactacctgctgcccgccatcgagtacttcaacggcggcccccccgccgagaccgacttcggcggcgactacggcggcacccagtacagcctggtggtgttcaacaccgtggactgcgcccccgagagctacgtgcagtgccacgcccccaccagcagcgcctacgagttcgtgacctggctggacggcatcaagttcatgggcggcggcggcgagagctgcagcctgatcgccgagggcctgagcaccgccctgcagctgttcgacgacttcaagaagatgagagagcagatcggccagacccacagagtgtgcctgctgatctgcaacagccccccctacctgctgcccgccgtggagagcaccacctacagcggctgcaccaccgagaacctggtgcagcagatcggcgagagaggcatccacttcagcatcgtgagccccagaaagctgcccgccctgagactgctgttcgagaaggccgccccccccgccctgctggagcccctgcagccccccaccgacgtgagccaggaccccagacacatggtgctggtgagaggcctggtgctgcccgtgggcggcggcagcgcccccggccccctgcagagcaagcagcccgtgcccctgccccccgccgcccccagcggcgccaccctgagcgccgccccccagcagcccctgccccccgtgcccccccagtaccaggtgcccggcaacctgagcgccgcccaggtggccgcccagaacgccgtggaggccgccaagaaccagaaggccggcctgggccccagattcagccccatcacccccctgcagcaggccgcccccggcgtgggcccccccttcagccaggcccccgccccccagctgccccccggcccccccggcgcccccaagcccccccccgccagccagcccagcctggtgagcaccgtggcccccggcagcggcctggcccccaccgcccagcccggcgcccccagcatggccggcaccgtggcccccggcggcgtgagcggccccagccccgcccagctgggcgcccccgccctgggcggccagcagagcgtgagcaacaagctgctggcctggagcggcgtgctggagtggcaggagaagcccaagcccgccagcgtggacgccaacaccaagctgaccagaagcctgccctgccaggtgtacgtgaaccacggcgagaacctgaagaccgagcagtggccccagaagctgatcatgcagctgatcccccagcagctgctgaccaccctgggccccctgttcagaaacagcagaatggtgcagttccacttcaccaacaaggacctggagagcctgaagggcctgtacagaatcatgggcaacggcttcgccggctgcgtgcacttcccccacaccgccccctgcgaggtgagagtgctgatgctgctgtacagcagcaagaagaagatcttcatgggcctgatcccctacgaccagagcggcttcgtgaacggcatcagacaggtgatcaccaaccacaagcaggtgcagcagcagaagctggagcagcagcagagaggcatgggcggccagcaggccccccccggcctgggccccatcctggaggaccaggccagacccagccagaacctgctgcagctgagacccccccagccccagccccagggcaccgtgggcgccagcggcgccaccggccagccccagccccagggcaccgcccagcccccccccggcgccccccagggcccccccggcgccgccagcggcccccccccccccggccccatcctgagaccccagaaccccggcgccaacccccagctgagaagcctgctgctgaaccccccccccccccagaccggcgtgccccccccccaggccagcctgcaccacctgcagccccccggcgcccccgccctgctgccccccccccaccagggcctgggccagccccagctgggcccccccctgctgcaccccccccccgcccagagctggcccgcccagctgccccccagagcccccctgcccggccagatgctgctgagcggcggccccagaggccccgtgccccagcccggcctgcagcccagcgtgatggaggacgacatcctgatggacctgatctag

SEQ ID NO: 88262 - DNA, 2268 bp, synthetic construct
  misc_feature 1..2268: note = Description of Artificial Sequence: Synthetic coding sequence
  source 1..2268: mol_type = other DNA
atggtgcccggcagcgagggccccgccagagccggcagcgtggtggccgacgtggtgttcgtgatcgagggcaccgccaacctgggcccctacttcgagggcctgagaaagcactacctgctgcccgccatcgagtacttcaacggcggcccccccgccgagaccgacttcggcggcgactacggcggcacccagtacagcctggtggtgttcaacaccgtggactgcgcccccgagagctacgtgcagtgccacgcccccaccagcagcgcctacgagttcgtgacctggctggacggcatcaagttcatgggcggcggcggcgagagctgcagcctgatcgccgagggcctgagcaccgccctgcagctgttcgacgacttcaagaagatgagagagcagatcggccagacccacagagtgtgcctgctgatctgcaacagccccccctacctgctgcccgccgtggagagcaccacctacagcggctgcaccaccgagaacctggtgcagcagatcggcgagagaggcatccacttcagcatcgtgagccccagaaagctgcccgccctgagactgctgttcgagaaggccgccccccccgccctgctggagcccctgcagccccccaccgacgtgagccaggaccccagacacatggtgctggtgagaggcctggtgctgcccgtgggcggcggcagcgcccccggccccctgcagagcaagcagcccgtgcccctgccccccgccgcccccagcggcgccaccctgagcgccgccccccagcagcccctgccccccgtgcccccccagtaccaggtgcccggcaacctgagcgccgcccaggtggccgcccagaacgccgtggaggccgccaagaaccagaaggccggcctgggccccagattcagccccatcacccccctgcagcaggccgcccccggcgtgggcccccccttcagccaggcccccgccccccagctgccccccggcccccccggcgcccccaagcccccccccgccagccagcccagcctggtgagcaccgtggcccccggcagcggcctggcccccaccgcccagcccggcgcccccagcatggccggcaccgtggcccccggcggcgtgagcggccccagccccgcccagctgggcgcccccgccctgggcggccagcagagcgtgagcaacaagctgctggcctggagcggcgtgctggagtggcaggagaagcccaagcccgccagcgtggacgccaacaccaagctgaccagaagcctgccctgccaggtgtacgtgaaccacggcgagaacctgaagaccgagcagtggccccagaagctgatcatgcagctgatcccccagcagctgctgaccaccctgggccccctgttcagaaacagcagaatggtgcagttccacttcaccaacaaggacctggagagcctgaagggcctgtacagaatcatgggcaacggcttcgccggctgcgtgcacttcccccacaccgccccctgcgaggtgagagtgctgatgctgctgtacagcagcaagaagaagatcttcatgggcctgatcccctacgaccagagcggcttcgtgaacggcatcagacaggtgatcaccaaccacaagcaggtgcagcagcagaagctggagcagcagcagagaggcatgggcggccagcaggccccccccggcctgggccccatcctggaggaccaggccagacccagccagaacctgctgcagctgagacccccccagccccagccccagggcaccgtgggcgccagcggcgccaccggccagccccagccccagggcaccgcccagcccccccccggcgccccccagggcccccccggcgccgccagcggcccccccccccccggccccatcctgagaccccagaaccccggcgccaacccccagctgagaagcctgctgctgaaccccccccccccccagaccggcgtgccccccccccaggccagcctgcaccaccacctgcccagccccggcccccacaacttccccctgggcctgcactgccaggtgagaggccccggcggcggccagagaagcggcctgagcgtgcccgccgcccccggcctggagcaccaggacagagtgctgctgggcagcaaggacatcggcagcaagaacgagggcagccccatcagagcctgcagccccgccagctggagaaccaccagcagctggatcagcagcgagagccccacccccaacaaggtgcccttctag

SEQ ID NO: 88263 - DNA, 2349 bp, synthetic construct
  misc_feature 1..2349: note = Description of Artificial Sequence: Synthetic coding sequence
  source 1..2349: mol_type = other DNA
atggtgcccggcagcgagggccccgccagagccggcagcgtggtggccgacgtggtgttcgtgatcgagggcaccgccaacctgggcccctacttcgagggcctgagaaagcactacctgctgcccgccatcgagtacttcaacggcggcccccccgccgagaccgacttcggcggcgactacggcggcacccagtacagcctggtggtgttcaacaccgtggactgcgcccccgagagctacgtgcagtgccacgcccccaccagcagcgcctacgagttcgtgacctggctggacggcatcaagttcatgggcggcggcggcgagagctgcagcctgatcgccgagggcctgagcaccgccctgcagctgttcgacgacttcaagaagatgagagagcagatcggccagacccacagagtgtgcctgctgatctgcaacagccccccctacctgctgcccgccgtggagagcaccacctacagcggctgcaccaccgagaacctggtgcagcagatcggcgagagaggcatccacttcagcatcgtgagccccagaaagctgcccgccctgagactgctgttcgagaaggccgccccccccgccctgctggagcccctgcagccccccaccgacgtgagccaggaccccagacacatggtgctggtgagaggcctggtgctgcccgtgggcggcggcagcgcccccggccccctgcagagcaagcagcccgtgcccctgccccccgccgcccccagcggcgccaccctgagcgccgccccccagcagcccctgccccccgtgcccccccagtaccaggtgcccggcaacctgagcgccgcccaggtggccgcccagaacgccgtggaggccgccaagaaccagaaggccggcctgggccccagattcagccccatcacccccctgcagcaggccgcccccggcgtgggcccccccttcagccaggcccccgccccccagctgccccccggcccccccggcgcccccaagcccccccccgccagccagcccagcctggtgagcaccgtggcccccggcagcggcctggcccccaccgcccagcccggcgcccccagcatggccggcaccgtggcccccggcggcgtgagcggccccagccccgcccagctgggcgcccccgccctgggcggccagcagagcgtgagcaacaagctgctggcctggagcggcgtgctggagtggcaggagaagcccaagcccgccagcgtggacgccaacaccaagctgaccagaagcctgccctgccaggtgtacgtgaaccacggcgagaacctgaagaccgagcagtggccccagaagctgatcatgcagctgatcccccagcagctgctgaccaccctgggccccctgttcagaaacagcagaatggtgcagttccacttcaccaacaaggacctggagagcctgaagggcctgtacagaatcatgggcaacggcttcgccggctgcgtgcacttcccccacaccgccccctgcgaggtgagagtgctgatgctgctgtacagcagcaagaagaagatcttcatgggcctgatcccctacgaccagagcggcttcgtgaacggcatcagacaggtgatcaccaaccacaagcaggtgcagcagcagaagctggagcagcagcagagaggcatgggcggccagcaggccccccccggcctgggccccatcctggaggaccaggccagacccagccagaacctgctgcagctgagacccccccagccccagccccagggcaccgtgggcgccagcggcgccaccggccagccccagccccagggcaccgcccagcccccccccggcgccccccagggcccccccggcgccgccagcggcccccccccccccggccccatcctgagaccccagaaccccggcgccaacccccagctgagaagcctgctgctgaaccccccccccccccagaccggcgtgccccccccccaggccagcctgcaccacctgcagccccccggcgcccccgccctgctgccccccccccaccagggcctgggccagccccagctgggcccccccctgctgcaccccccccccgcccagagctggcccgcccagctgccccccagagcccccctgcccgccgccaagagaaagagagagggcgagggcagagtgttcagagagaagtgggagagagcctacttcttcgtggaggtgaagagcatgcccatgtgcctgatctgcaagcagatcgtgagcgtgctgaaggagtacaacctgaagagacactacgagagcaagcacagcaagagctacgaccagtacaccgagcagaccagatag

SEQ ID NO: 88264 - DNA, 1449 bp, synthetic construct
  misc_feature 1..1449: note = Description of Artificial Sequence: Synthetic coding sequence
  source 1..1449: mol_type = other DNA
atggtgcccggcagcgagggccccgccagagccggcagcgtggtggccgacgtggtgttcgtgatcgagggcaccgccaacctgggcccctacttcgagggcctgagaaagcactacctgctgcccgccatcgagtacttcaacggcggcccccccgcccccttcagccaggcccccgccccccagctgccccccggcccccccggcgcccccaagcccccccccgccagccagcccagcctggtgagcaccgtggcccccggcagcggcctggcccccaccgcccagcccggcgcccccagcatggccggcaccgtggcccccggcggcgtgagcggccccagccccgcccagctgggcgcccccgccctgggcggccagcagagcgtgagcaacaagctgctggcctggagcggcgtgctggagtggcaggagaagcccaagcccgccagcgtggacgccaacaccaagctgaccagaagcctgccctgccaggtgtacgtgaaccacggcgagaacctgaagaccgagcagtggccccagaagctgatcatgcagctgatcccccagcagctgctgaccaccctgggccccctgttcagaaacagcagaatggtgcagttccacttcaccaacaaggacctggagagcctgaagggcctgtacagaatcatgggcaacggcttcgccggctgcgtgcacttcccccacaccgccccctgcgaggtgagagtgctgatgctgctgtacagcagcaagaagaagatcttcatgggcctgatcccctacgaccagagcggcttcgtgaacggcatcagacaggtgatcaccaaccacaagcaggtgcagcagcagaagctggagcagcagcagagaggcatgggcggccagcaggccccccccggcctgggccccatcctggaggaccaggccagacccagccagaacctgctgcagctgagacccccccagccccagccccagggcaccgtgggcgccagcggcgccaccggccagccccagccccagggcaccgcccagcccccccccggcgccccccagggcccccccggcgccgccagcggcccccccccccccggccccatcctgagaccccagaaccccggcgccaacccccagctgagaagcctgctgctgaaccccccccccccccagaccggcgtgccccccccccaggccagcctgcaccacctgcagccccccggcgcccccgccctgctgccccccccccaccagggcctgggccagccccagctgggcccccccctgctgcaccccccccccgcccagagctggcccgcccagctgccccccagagcccccctgcccggccagatgctgctgagcggcggccccagaggccccgtgccccagcccggcctgcagcccagcgtgatggaggacgacatcctgatggacctgatctag

SEQ ID NO: 88265 - DNA, 2385 bp, synthetic construct
  misc_feature 1..2385: note = Description of Artificial Sequence: Synthetic coding sequence
  source 1..2385: mol_type = other DNA
atggtgcccggcagcgagggccccgccagagccggcagcgtggtggccgacgtggtgttcgtgatcgagggcaccgccaacctgggcccctacttcgagggcctgagaaagcactacctgctgcccgccatcgagtacttcaacggcggcccccccgccgagaccgacttcggcggcgactacggcggcacccagtacagcctggtggtgttcaacaccgtggactgcgcccccgagagctacgtgcagtgccacgcccccaccagcagcgcctacgagttcgtgacctggctggacggcatcaagttcatgggcggcggcggcgagagctgcagcctgatcgccgagggcctgagcaccgccctgcagctgttcgacgacttcaagaagatgagagagcagatcggccagacccacagagtgtgcctgctgatctgcaacagccccccctacctgctgcccgccgtggagagcaccacctacagcggctgcaccaccgagaacctggtgcagcagatcggcgagagaggcatccacttcagcatcgtgagccccagaaagctgcccgccctgagactgctgttcgagaaggccgccccccccgccctgctggagcccctgcagccccccaccgacgtgagccaggaccccagacacatggtgctggtgagaggcctggtgctgcccgtgggcggcggcagcgcccccggccccctgcagagcaagcagcccgtgcccctgccccccgccgcccccagcggcgccaccctgagcgccgccccccagcagcccctgccccccgtgcccccccagtaccaggtgcccggcaacctgagcgccgcccaggtggccgcccagaacgccgtggaggccgccaagaaccagaaggccggcctgggccccagattcagccccatcacccccctgcagcaggccgcccccggcgtgggcccccccttcagccaggcccccgccccccagctgccccccggcccccccggcgcccccaagcccccccccgccagccagcccagcctggtgagcaccgtggcccccggcagcggcctggcccccaccgcccagcccggcgcccccagcatggccggcaccgtggcccccggcggcgtgagcggccccagccccgcccagctgggcgcccccgccctgggcggccagcagagcgtgagcaacaagctgctggcctggagcggcgtgctggagtggcaggagaagcccaagcccgccagcgtggacgccaacaccaagctgaccagaagcctgccctgccaggtgtacgtgaaccacggcgagaacctgaagaccgagcagtggccccagaagctgatcatgcagctgatcccccagcagctgctgaccaccctgggccccctgttcagaaacagcagaatggtgcagttccacttcaccaacaaggacctggagagcctgaagggcctgtacagaatcatgggcaacggcttcgccggctgcgtgcacttcccccacaccgccccctgcgaggtgagagtgctgatgctgctgtacagcagcaagaagaagatcttcatgggcctgatcccctacgaccagagcggcttcgtgaacggcatcagacaggtgatcaccaaccacaagcaggtgcagcagcagaagctggagcagcagcagagaggcatgggcggccagcaggccccccccggcctgggccccatcctggaggaccaggccagacccagccagaacctgctgcagctgagacccccccagccccagccccagggcaccgtgggcgccagcggcgccaccggccagccccagccccagggcaccgcccagcccccccccggcgccccccagggcccccccggcgccgccagcggcccccccccccccggccccatcctgagaccccagaaccccggcgccaacccccagctgagaagcctgctgctgaaccccccccccccccagaccggcgtgccccccccccaggccagcctgcaccacctgcagccccccggcgcccccgccctgctgccccccccccaccagggcctgggccagccccagctgggcccccccctgctgcaccccccccccgacggcgccagaagaagcgacgccgccgagagaggcagccccggccccggcagaagcccccagagcccccccctgcccctgggcttccccgtgagacagagagtgaccgccttccacgtgagcatcaccagcggcaagaccaaggagagaagaagaggcccctgcgtgagcagaaagatgggcgccagcctgttcctgtgcggcagcgaggagcacgcctacgtgttcaacatgcagaccaacagagtgtgcgtggagagaatccagcccgagacccccctgtag

SEQ ID NO: 88266 - DNA, 2175 bp, synthetic construct
  misc_feature 1..2175: note = Description of Artificial Sequence: Synthetic coding sequence
  source 1..2175: mol_type = other DNA
atggtgcccggcagcgagggccccgccagagccggcagcgtggtggccgacgtggtgttcgtgatcgagggcaccgccaacctgggcccctacttcgagggcctgagaaagcactacctgctgcccgccatcgagtacttcaacggcggcccccccgccgagaccgacttcggcggcgactacggcggcacccagtacagcctggtggtgttcaacaccgtggactgcgcccccgagagctacgtgcagtgccacgcccccaccagcagcgcctacgagttcgtgacctggctggacggcatcaagttcatgggcggcggcggcgagagctgcagcctgatcgccgagggcctgagcaccgccctgcagctgttcgacgacttcaagaagatgagagagcagatcggccagacccacagagtgtgcctgctgatctgcaacagccccccctacctgctgcccgccgtggagagcaccacctacagcggctgcaccaccgagaacctggtgcagcagatcggcgagagaggcatccacttcagcatcgtgagccccagaaagctgcccgccctgagactgctgttcgagaaggccgccccccccgccctgctggagcccctgcagccccccaccgacgtgagccaggaccccagacacatggtgctggtgagaggcctggtgctgcccgtgggcggcggcagcgcccccggccccctgcagagcaagcagcccgtgcccctgccccccgccgcccccagcggcgccaccctgagcgccgccccccagcagcccctgccccccgtgcccccccagtaccaggtgcccggcaacctgagcgccgcccaggtggccgcccagaacgccgtggaggccgccaagaaccagaaggccggcctgggccccagattcagccccatcacccccctgcagcaggccgcccccggcgtgggcccccccttcagccaggcccccgccccccagctgccccccggcccccccggcgcccccaagcccccccccgccagccagcccagcctggtgagcaccgtggcccccggcagcggcctggcccccaccgcccagcccggcgcccccagcatggccggcaccgtggcccccggcggcgtgagcggccccagccccgcccagctgggcgcccccgccctgggcggccagcagagcgtgagcaacaagctgctggcctggagcggcgtgctggagtggcaggagaagcccaagcccgccagcgtggacgccaacaccaagctgaccagaagcctgccctgccaggtgtacgtgaaccacggcgagaacctgaagaccgagcagtggccccagaagctgatcatgcagctgatcccccagcagctgctgaccaccctgggccccctgttcagaaacagcagaatggtgcagttccacttcaccaacaaggacctggagagcctgaagggcctgtacagaatcatgggcaacggcttcgccggctgcgtgcacttcccccacaccgccccctgcgaggtgagagtgctgatgctgctgtacagcagcaagaagaagatcttcatgggcctgatcccctacgaccagagcggcttcgtgaacggcatcagacaggtgatcaccaaccacaagcaggtgcagcagcagaagctggagcagcagcagagaggcatgggcggccagcaggccccccccggcctgggccccatcctggaggaccaggccagacccagccagaacctgctgcagctgagacccccccagccccagcccccccccggcgccccccagggcccccccggcgccgccagcggcccccccccccccggccccatcctgagaccccagaaccccggcgccaacccccagctgagaagcctgctgctgaaccccccccccccccagaccggcgtgccccccccccaggccagcctgcaccacctgcagccccccggcgcccccgccctgctgccccccccccaccagggcctgggccagccccagctgggcccccccctgctgcaccccccccccgcccagagctggcccgcccagctgccccccagagcccccctgcccggcaagggcaccagaggcagagccgaggtgtggaccgagtgccccagcagcagctgggccagagcccccagacccagcgcccccggcaagtag

SEQ ID NO: 88267 - DNA, 753 bp, synthetic construct
  misc_feature 1..753: note = Description of Artificial Sequence: Synthetic coding sequence
  source 1..753: mol_type = other DNA
atgctgctgtacagcagcaagaagaagatcttcatgggcctgatcccctacgaccagagcggcttcgtgaacggcatcagacaggtgatcaccaaccacaagcaggtgcagcagcagaagctggagcagcagcagagaggcatgggcggccagcaggccccccccggcctgggccccatcctggaggaccaggccagacccagccagaacctgctgcagctgagacccccccagccccagccccagggcaccgtgggcgccagcggcgccaccggccagccccagccccagggcaccgcccagcccccccccggcgccccccagggcccccccggcgccgccagcggcccccccccccccggccccatcttcggccccagaaccctgggccccaccctgagctgcgaggccagcagcagcacccaccacagaagaagactgggctgcccccaccccagaccccccagcaccaccagcagccaccagggcctgctgagatgctgcctgagaagacagggcctgggccagccccagctgggcccccacagctgcatccaccacctgcccagccccggcccccacaacttccccctgggcctgcactgccaggtgagaggccccggcggcggccagagaagcggcctgagcgtgcccgccgcccccggcctggagcaccaggacagagtgctgctgggcagcaaggacatcggcagcaagaacgagggcagccccatggccttcgccgagctgtag

SEQ ID NO: 88268 - DNA, 1605 bp, synthetic construct
  misc_feature 1..1605: note = Description of Artificial Sequence: Synthetic coding sequence
  source 1..1605: mol_type = other DNA
atggtgcccggcagcgagggccccgccagagccggcagcgtggtggccgacgtggtgttcgtgatcgagggcaccgccaacctgggcccctacttcgagggcctgagaaagcactacctgctgcccgccatcgagtacttcaacggcggcccccccgccgagaccgacttcggcggcgacgtgcccggcaacctgagcgccgcccaggtggccgcccagaacgccgtggaggccgccaagaaccagaaggccggcctgggccccagattcagccccatcacccccctgcagcaggccgcccccggcgtgggcccccccttcagccaggcccccgccccccagctgccccccggcccccccggcgcccccaagcccccccccgccagccagcccagcctggtgagcaccgtggcccccggcagcggcctggcccccaccgcccagcccggcgcccccagcatggccggcaccgtggcccccggcggcgtgagcggccccagccccgcccagctgggcgcccccgccctgggcggccagcagagcgtgagcaacaagctgctggcctggagcggcgtgctggagtggcaggagaagcccaagcccgccagcgtggacgccaacaccaagctgaccagaagcctgccctgccaggtgtacgtgaaccacggcgagaacctgaagaccgagcagtggccccagaagctgatcatgcagctgatcccccagcagctgctgaccaccctgggccccctgttcagaaacagcagaatggtgcagttccacttcaccaacaaggacctggagagcctgaagggcctgtacagaatcatgggcaacggcttcgccggctgcgtgcacttcccccacaccgccccctgcgaggtgagagtgctgatgctgctgtacagcagcaagaagaagatcttcatgggcctgatcccctacgaccagagcggcttcgtgaacggcatcagacaggtgatcaccaaccacaagcaggtgcagcagcagaagctggagcagcagcagagaggcatgggcggccagcaggccccccccggcctgggccccatcctggaggaccaggccagacccagccagaacctgctgcagctgagacccccccagccccagccccagggcaccgtgggcgccagcggcgccaccggccagccccagccccagggcaccgcccagcccccccccggcgccccccagggcccccccggcgccgccagcggcccccccccccccggccccatcctgagaccccagaaccccggcgccaacccccagctgagaagcctgctgctgaaccccccccccccccagaccggcgtgccccccccccaggccagcctgcaccacctgcagccccccggcgcccccgccctgctgccccccccccaccagggcctgggccagccccagctgggcccccccctgctgcaccccccccccgcccagagctggcccgcccagctgccccccagagcccccctgcccggccagatgctgctgagcggcggccccagaggccccgtgccccagcccggcctgcagcccagcgtgatggaggacgacatcctgatggacctgatctag

SEQ ID NO: 88269 - DNA, 1194 bp, synthetic construct
  misc_feature 1..1194: note = Description of Artificial Sequence: Synthetic coding sequence
  source 1..1194: mol_type = other DNA
atggtgcccggcagcgagggccccgccagagccggcagcgtggtggccgacgtggtgttcgtgatcgagggcaccgccaacctgggcccctacttcgagggcctgagaaagcactacctgctgcccgccatcgagtacttcaacggcggcccccccgccgagaccgacttcggcggcgactacggcggcacccagtacagcctggtggtgttcaacaccgtggactgcgcccccgagagctacgtgcagtgccacgcccccaccagcagcgcctacgagttcgtgacctggctggacggcatcaagttcatgggcggcggcggcgagagctgcagcctgatcgccgagggcctgagcaccgccctgcagctgttcgacgacttcaagaagatgagagagcagatcggccagacccacagagtgtgcctgctgatctgcaacagccccccctacctgctgcccgccgtggagagcaccacctacagcggctgcaccaccgagaacctggtgcagcagatcggcgagagaggcatccacttcagcatcgtgagccccagaaagctgcccgccctgagactgctgttcgagaaggccgccccccccgccctgctggagcccctgcagccccccaccgacgtgagccaggaccccagacacatggtgctggtgagaggcctggtgctgcccgtgggcggcggcagcgcccccggccccctgcagagcaagcagcccgtgcccctgccccccgccgcccccagcggcgccaccctgagcgccgccccccagcagcccctgccccccgtgcccccccagtaccaggtgcccggcaacctgagcgccgcccaggtggccgcccagaacgccgtggaggccgccaagaaccagaaggccggcctgggccccagattcagccccatcacccccctgcagcaggccgcccccggcgtgggcccccccttcagccaggcccccgcccccgccctgctgccccccccccaccagggcctgggccagccccagctgggcccccccctgctgcaccccccccccgcccagagctggcccgcccagctgccccccagagcccccctgcccggccagatgctgctgagcggcggccccagaggccccgtgccccagcccggcctgcagcccagcgtgatggaggacgacatcctgatggacctgatctag

SEQ ID NO: 88270 - DNA, 780 bp, synthetic construct
  misc_feature 1..780: note = Description of Artificial Sequence: Synthetic coding sequence
  source 1..780: mol_type = other DNA
atggtgcccggcagcgagggccccgccagagccggcagcgtggtggccgacgtggtgttcgtgatcgagggcaccgccaacctgggcccctacttcgagggcctgagaaagcactacctgctgcccgccatcgagtacttcaacggcggcccccccgccgagaccgacttcggcggcgactacggcggcacccagtacagcctggtggtgttcaacaccgtggactgcgcccccgagagctacgtgcagtgccacgcccccaccagcagcgcctacgagttcgtgacctggctggacggcatcaagttcatgggcggcggcggcgagagctgcagcctgatcgccgagggcctgagcaccgccctgcagctgttcgacgacttcaagaagatgagagagcagatcggccagacccacagagtgtgcctgctgatctgcaacagccccccctacctgctgcccgccgtggagagcaccacctacagcggctgcaccaccgagaacctggtgcagcagatcggcgagagaggcatccacttcagcatcgtgagccccagaaagctgcccgccctgagactgctgttcgagaaggccgcccccggcctggccggcgccgccgccgccagcgacagatgcgagcccggccccgaggcccacggcgccggcagcggcaccagagccgcctgctggggctggctgagccccagacccccccccgtgaaggccgccagcccccccgccagcagaagaaccctgagatgccaggtgagatgctgctag

SEQ ID NO: 88271 - DNA, 1803 bp, synthetic construct
  misc_feature 1..1803: note = Description of Artificial Sequence: Synthetic coding sequence
  source 1..1803: mol_type = other DNA
atgaccgccgcccccgccagcccccagcagatcagagacagactgctgcaggccatcgacccccagagcaacatcagaaacatggtggccgtgctggaggtgatcagcagcctggagaagtaccccatcaccaaggaggccctggaggagaccagactgggcaagctgatcaacgacgtgagaaagaagaccaagaacgaggagctggccaagagagccaagaagctgctgagaagctggcagaagctgatcgagcccgcccaccagcacgaggccgccctgagaggcctggccggcgccaccggcagcgccaacggcggcgcccacaactgcagacccgaggtgggcgccgccggcccccccagaagcatccacgacctgaagagcagaaacgacctgcagagactgcccggccagagactggacagactgggcagcagaaagagaagaggcgaccagagagacctgggccaccccggccccccccccaaggtgagcaaggccagccacgaccccctggtgcccaacagcagccccctgcccaccaacggcatcagcggcagccccgagagcttcgccagcagcctggacggcagcggccacgccggccccgagggcagcagactggagagagacgagaacgacaagcacagcggcaagatccccgtgaacgccgtgagaccccacaccagcagccccggcctgggcaagccccccggcccctgcctgcagcccaaggccagcgtgctgcagcagctggacagagtggacgagacccccggccccccccaccccaagggcccccccagatgcagcttcagccccagaaacagcagacacgagggcagcttcgccagacagcagagcctgtacgcccccaagggcagcgtgcccagccccagccccagaccccaggccctggacgccacccaggtgcccagccccctgcccctggcccagcccagcaccccccccgtgagaagactggagctgctgcccagcgccgagagccccgtgtgctggctggagcagcccgagagccaccagagactggccggccccggctgcaaggccggcctgagccccgccgagcccctgctgagcagagccggcttcagccccgacagcagcaaggccgacagcgacgccgccagcagcggcggcagcgacagcaagaagaagaagagatacagacccagagactacaccgtgaacctggacggccaggtggccgaggccggcgtgaagcccgtgagactgaaggagagaaagctgaccttcgaccccatgaccagacagatcaagcccctgacccagaaggagcccgtgagagccgacagccccgtgcacatggagcagcagagcagaaccgagctggacaagcaggaggccaaggccagcctgcagagccccttcgagcagaccaactggaaggagctgagcagaaacgagatcatccagagctacctgagcagacagagcagcctgctgagcagcagcggcgcccagacccccggcgcccaccacttcatgagcgagtacctgaagcaggaggagagcaccagacagggcgccagacagctgcacgtgctggtgccccagagcccccccaccgacctgcccggcctgaccagagaggtgacccaggacgacctggacagaatccaggccagccagtggcccggcgtgaacggctgccaggacacccagggcaactggtacgactggacccagtgcatcagcctggacccccacggcgacgacggcagactgaacatcctgccctacgtgtgcctggactag

SEQ ID NO: 88272 - DNA, 282 bp, synthetic construct
  misc_feature 1..282: note = Description of Artificial Sequence: Synthetic coding sequence
  source 1..282: mol_type = other DNA
atgaccgccgcccccgccagcccccagcagatcagagacagactgctgcaggccatcgacccccagagcaacatcagaaacatggtggccgtgctggaggtgatcagcagcctggagaagtaccccatcaccaaggaggccctggaggagaccagactgggcaagctgatcaacgacgtgagaaagaagaccaagaacgaggagctggccaagagagccaagaagctgctgcccggctggcagtgggcctgcagacccagaggccagccccccggcgcctag

SEQ ID NO: 88273 - DNA, 936 bp, synthetic construct
  misc_feature 1..936: note = Description of Artificial Sequence: Synthetic coding sequence
  source 1..936: mol_type = other DNA
atggccgacgtgatcaacgtgagcgtgaacctggaggccttcagccaggccatcagcgccatccaggccctgagaagcagcgtgagcagagtgttcgactgcctgaaggacggcatgagaaacaaggagaccctggagggcagagagaaggccttcatcgcccacttccaggacaacctgcacagcgtgaacagagacctgaacgagctggagagactgagcaacctggtgggcaagcccagcgagaaccaccccctgcacaacagcggcctgctgagcctggaccccgtgcaggacaagacccccctgtacagccagctgctgcaggcctacaagtggagcaacaagctgcagtaccacgccggcctggccagcggcctgctgaaccagcagagcctgaagagaagcgccaaccagatgggcgtgagcgccaagagaagacccaaggcccagcccaccaccctggtgctgcccccccagtacgtggacgacgtgatcagcagaatcgacagaatgttccccgagatgagcatccacctgagcagacccaacggcaccagcgccatgctgctggtgaccctgggcaaggtgctgaaggtgatcgtggtgatgagaagcctgttcatcgacagaaccatcgtgaagggctacaacgagaacgtgtacaccgaggacggcaagctggacatctggagcaagagcaactaccaggtgttccagaaggtgaccgaccacgccaccaccgccctgctgcactaccagctgccccagatgcccgacgtggtggtgagaagcttcatgacctggctgagaagctacatcaagctgttccaggccccctgccagagatgcggcaagttcctgcaggacggcctgccccccacctggagagacttcagaaccctggaggccttccacgacacctgcagacagtag

SEQ ID NO: 88274 - DNA, 714 bp, synthetic construct
  misc_feature 1..714: note = Description of Artificial Sequence: Synthetic coding sequence
  source 1..714: mol_type = other DNA
atgagaaacaaggagaccctggagggcagagagaaggccttcatcgcccacttccaggacaacctgcacagcgtgaacagagacctgaacgagctggagagactgagcaacctggtgggcaagcccagcgagaaccaccccctgcacaacagcggcctgctgagcctggaccccgtgcaggacaagacccccctgtacagccagctgctgcaggcctacaagtggagcaacaagctgcagtaccacgccggcctggccagcggcctgctgaaccagcagagcctgaagagaagcgccaaccagatgggcgtgagcgccaagagaagacccaaggcccagcccaccaccctggtgctgcccccccagtacgtggacgacgtgatcagcagaatcgacagaatgttccccgagatgagcatccacctgagcagacccaacggcaccagcgccatgctgctgctggacatctggagcaagagcaactaccaggtgttccagaaggtgaccgaccacgccaccaccgccctgctgcactaccagctgccccagatgcccgacgtggtggtgagaagcttcatgacctggctgagaagctacatcaagctgttccaggccccctgccagagatgcggcaagttcctgcaggacggcctgccccccacctggagagacttcagaaccctggaggccttccacgacacctgcagacagtag

SEQ ID NO: 88275 - DNA, 828 bp, synthetic construct
  misc_feature 1..828: note = Description of Artificial Sequence: Synthetic coding sequence
  source 1..828: mol_type = other DNA
atggccgacgtgatcaacgtgagcgtgaacctggaggccttcagccaggccatcagcgccatccaggccctgagaagcagcgtgagcagagtgttcgactgcctgaaggacggcatgagaaacaaggagaccctggagggcagagagaaggccttcatcgcccacttccaggacaacctgcacagcgtgaacagagacctgaacgagctggagagactgagcaacctggtgggcaagcccagcgagaaccaccccctgcacaacagcggcctgctgagcctggaccccgtgcaggacaagacccccctgtacagccagctgctgcaggcctacaagtggagcaacaagctgcagtaccacgccggcctggccagcggcctgctgaaccagcagagcctgaagagaagcgccaaccagatgggcgtgagcgccaagagaagacccaaggcccagcccaccaccctggtgctgcccccccagtacgtggacgacgtgatcagcagaatcgacagaatgttccccgagatgagcatccacctgagcagacccaacggcaccagcgccatgctgctgctggacatctggagcaagagcaactaccaggtgttccagaaggtgaccgaccacgccaccaccgccctgctgcactaccagctgccccagatgcccgacgtggtggtgagaagcttcatgacctggctgagaagctacatcaagctgttccaggccccctgccagagatgcggcaagttcctgcaggacggcctgccccccacctggagagacttcagaaccctggaggccttccacgacacctgcagacagtag

SEQ ID NO: 88276 - DNA, 666 bp, synthetic construct
  misc_feature 1..666: note = Description of Artificial Sequence: Synthetic coding sequence
  source 1..666: mol_type = other DNA
atgctgaagagcaacggcgagagaagaagcagaaacgccctgcccgccgtgtacgccagaaagatggccgccagccagcagcaggccagcgccgccagcagcgccgccggcgtgagcggccccagcagcgccggcggccccggcccccagcagcagccccagccccccgcccagctggtgggccccgcccagagcggcctgctgcagcagcagcagcaggacttcgaccccgtgcagagatacaagatgctgatcccccagctgaaggagagcctgcagaccctgatgaaggtggccgcccagaacctgatccagaacaccaacatcgacaacggccagaagagcagcgacggccccatccagagattcgacaagtgcctggaggagttctacgccctgtgcgaccagctggagctgtgcctgagactggcccacgagtgcctgagccagagctgcgacagcgccaagcacagccccaccctggtgcccaccgccaccaagcccgacgccgtgcagcccgacagcctgccctacccccagtacctggccgtgatcaaggcccagatcagctgcgccaaggacatccacaccgccctgctggactgcgccaacaaggtgaccggcaagacccccgccccccccgccggccccggcggcaccctgtag

SEQ ID NO: 88277 - DNA, 420 bp, synthetic construct
  misc_feature 1..420: note = Description of Artificial Sequence: Synthetic coding sequence
  source 1..420: mol_type = other DNA
atgctgatcccccagctgaaggagagcctgcagaccctgatgaaggtggccgcccagaacctgatccagaacaccaacatcgacaacggccagaagagcagcgacggccccatccagagattcgacaagtgcctggaggagttctacgccctgtgcgaccagctggagctgtgcctgagactggcccacgagtgcctgagccagagctgcgacagcgccaagcacagccccaccctggtgcccaccgccaccaagcccgacgccgtgcagcccgacagcctgccctacccccagtacctggccgtgatcaaggcccagatcagctgcgccaaggacatccacaccgccctgctggactgcgccaacaaggtgaccggcaagacccccgccccccccgccggccccggcggcaccctgtag

SEQ ID NO: 88278 - DNA, 537 bp, synthetic construct
  misc_feature 1..537: note = Description of Artificial Sequence: Synthetic coding sequence
  source 1..537: mol_type = other DNA
atgagcaccccccccctggccgccagcggcatggcccccggccccttcgccggcccccaggcccagcaggccgccagagaggtgaacaccgccagcctgtgcagaatcggccaggagaccgtgcaggacatcgtgtacagaaccatggagatcttccagctgctgagaaacatgcagctgcccaacggcgtgacctaccacaccggcacctaccaggacagactgaccaagctgcaggacaacctgagacagctgagcgtgctgttcagaaagctgagactggtgtacgacaagtgcaacgagaactgcggcggcatggaccccatccccgtggagcagctgatcccctacgtggaggaggacggcagcaagaacgacgacagagccggcccccccagattcgccagcgaggagagaagagagatcgccgaggtgaacaagaagctgaagcagaagaaccagcagctgaagcagatcatggaccagctgagaaacctgatctgggacatcaacgccatgctggccatgagaaactag

SEQ ID NO: 88279 - DNA, 813 bp, synthetic construct
  misc_feature 1..813: note = Description of Artificial Sequence: Synthetic coding sequence
  source 1..813: mol_type = other DNA
atggccgccagcagcagcggcgagaaggagaaggagagactgggcggcggcctgggcgtggccggcggcaacagcaccagagagagactgctgagcgccctggaggacctggaggtgctgagcagagagctgatcgagatgctggccatcagcagaaaccagaagctgctgcaggccggcgaggagaaccaggtgctggagctgctgatccacagagacggcgagttccaggagctgatgaagctggccctgaaccagggcaagatccaccacgagatgcaggtgctggagaaggaggtggagaagagagacagcgacatccagcagctgcagaagcagctgaaggaggccgagcagatcctggccaccgccgtgtaccaggccaaggagaagctgaagagcatcgagaaggccagaaagggcgccatcagcagcgaggagatcatcaagtacgcccacagaatcagcgccagcaacgccgtgtgcgcccccctgacctgggtgcccggcgaccccagaagaccctaccccaccgacctggagatgagaagcggcctgctgggccagatgaacaaccccagcaccaacggcgtgaacggccacctgcccggcgacgccctggccgccggcagactgcccgacgtgctggccccccagtacccctggcagagcaacgacatgagcatgaacatgctgccccccaaccacagcagcgacttcctgctggagccccccggccacaacaaggagaacgaggacgacgtggagatcatgagcaccgacagcagcagcagcagcagcgagagcgactag

SEQ ID NO: 88280 - DNA, 675 bp, synthetic construct
  misc_feature 1..675: note = Description of Artificial Sequence: Synthetic coding sequence
  source 1..675: mol_type = other DNA
atgctggccatcagcagaaaccagaagctgctgcaggccggcgaggagaaccaggtgctggagctgctgatccacagagacggcgagttccaggagctgatgaagctggccctgaaccagggcaagatccaccacgagatgcaggtgctggagaaggaggtggagaagagagacagcgacatccagcagctgcagaagcagctgaaggaggccgagcagatcctggccaccgccgtgtaccaggccaaggagaagctgaagagcatcgagaaggccagaaagggcgccatcagcagcgaggagatcatcaagtacgcccacagaatcagcgccagcaacgccgtgtgcgcccccctgacctgggtgcccggcgaccccagaagaccctaccccaccgacctggagatgagaagcggcctgctgggccagatgaacaaccccagcaccaacggcgtgaacggccacctgcccggcgacgccctggccgccggcagactgcccgacgtgctggccccccagtacccctggcagagcaacgacatgagcatgaacatgctgccccccaaccacagcagcgacttcctgctggagccccccggccacaacaaggagaacgaggacgacgtggagatcatgagcaccgacagcagcagcagcagcagcgagagcgactag

SEQ ID NO: 88281 - DNA, 747 bp, synthetic construct
  misc_feature 1..747: note = Description of Artificial Sequence: Synthetic coding sequence
  source 1..747: mol_type = other DNA
atgaagctgctgtggtggtgcgactggctgcccgagagaagccacgtgttcacccagagagagctgatcgagatgctggccatcagcagaaaccagaagctgctgcaggccggcgaggagaaccaggtgctggagctgctgatccacagagacggcgagttccaggagctgatgaagctggccctgaaccagggcaagatccaccacgagatgcaggtgctggagaaggaggtggagaagagagacagcgacatccagcagctgcagaagcagctgaaggaggccgagcagatcctggccaccgccgtgtaccaggccaaggagaagctgaagagcatcgagaaggccagaaagggcgccatcagcagcgaggagatcatcaagtacgcccacagaatcagcgccagcaacgccgtgtgcgcccccctgacctgggtgcccggcgaccccagaagaccctaccccaccgacctggagatgagaagcggcctgctgggccagatgaacaaccccagcaccaacggcgtgaacggccacctgcccggcgacgccctggccgccggcagactgcccgacgtgctggccccccagtacccctggcagagcaacgacatgagcatgaacatgctgccccccaaccacagcagcgacttcctgctggagccccccggccacaacaaggagaacgaggacgacgtggagatcatgagcaccgacagcagcagcagcagcagcgagagcgactag

SEQ ID NO: 88282 - DNA, 717 bp, synthetic construct
  misc_feature 1..717: note = Description of Artificial Sequence: Synthetic coding sequence
  source 1..717: mol_type = other DNA
atgaagctgctgtggtggtgcgactggctgcccgagagaagccacgtgttcacccagagagagctgatcgagatgctggccatcagcagaaaccagaagctgctgcaggccggcgaggagaaccaggtgctggagctgctgatccacagagacggcgagttccaggagctgatgaagctggccctgaaccagggcaagatccaccacgagatgcaggtgctggagaaggaggtggagaagagagacagcgacatccagcagctgcagaagcagctgaaggaggccgagcagatcctggccaccgccgtgtaccaggccaaggagaagctgaagagcatcgagaaggccagaaagggcgccatcagcagcgaggagatcatcaagtacgcccacagaatcagcgccagcaacgccgtgtgcgcccccctgacctgggtgcccggcgaccccagaagaccctaccccaccgacctggagatgagaagcggcctgctgggccagatgaacaaccccagcaccaacggcgtgaacggccacctgcccggcgacgccctggccgccggcagactgcccgacgtgctggccccccagtacccctggcagagcaacgacatgagcatgaacatgctgccccccaaccacagcagcgacttcctgctggagccccccggccacaacaaggagaacgaggacgacgtggagatcatgagcacctag

SEQ ID NO: 88283 - DNA, 702 bp, synthetic construct
  misc_feature 1..702: note = Description of Artificial Sequence: Synthetic coding sequence
  source 1..702: mol_type = other DNA
atgggcgagccccagcaggtgagcgccctgccccccccccccatgcagtacatcaaggagtacaccgacgagaacatccaggagggcctggcccccaagccccccccccccatcaaggacagctacatgatgttcggcaaccagttccagtgcgacgacctgatcatcagacccctggagagccagggcatcgagagactgcaccccatgcagttcgaccacaagaaggagctgagaaagctgaacatgagcatcctgatcaacttcctggacctgctggacatcctgatcagaagccccggcagcatcaagagagaggagaagctggaggacctgaagctgctgttcgtgcacgtgcaccacctgatcaacgagtacagaccccaccaggccagagagaccctgagagtgatgatggaggtgcagaagagacagagactggagaccgccgagagattccagaagcacctggagagagtgatcgagatgatccagaactgcctggccagcctgcccgacgacctgccccacagcgaggccggcatgagagtgaagaccgagcccatggacgccgacgacagcaacaactgcaccggccagaacgagcaccagagagagaacagcggccacagaagagaccagatcatcgagaaggacgccgccctgtgcgtgctgatcgacgagatgaacgagagaccctag

SEQ ID NO: 88284 - DNA, 702 bp, synthetic construct; identical to SEQ ID NO: 88283
  misc_feature 1..702: note = Description of Artificial Sequence: Synthetic coding sequence
  source 1..702: mol_type = other DNA

SEQ ID NO: 88285 - DNA, 588 bp, synthetic construct
  misc_feature 1..588: note = Description of Artificial Sequence: Synthetic coding sequence
  source 1..588: mol_type = other DNA
atgggcgagccccagcaggtgagcgccctgccccccccccccatgcagtacatcaaggagtacaccgacgagaacatccaggagggcctggcccccaagccccccccccccatcaaggacagctacatgatgttcggcaaccagttccagtgcgacgacctgatcatcagacccctggagagccagggcatcgagagactgcaccccatgcagttcgaccacaagaaggagctgagaaagctgaacatgagcatcctgatcaacttcctggacctgctggacatcctgatcagaagccccggcagcatcaagagagaggagaagctggaggacctgaagctgctgttcgtgcacgtgcaccacctgatcaacgagtacagaccccaccaggccagagagaccctgagagtgatgatggaggtgcagaagagacagagactggagaccgccgagagattccagaagcacctggagagagtgatcgagatgatccagaactgcctggccagcctgcccgacgacctgccccacagcgaggccggcatgagagtgaagaccgagcccatggacgccgacgacagcaactag

SEQ ID NO: 88286 - DNA, 441 bp, synthetic construct
  misc_feature 1..441: note = Description of Artificial Sequence: Synthetic coding sequence
  source 1..441: mol_type = other DNA
atggccagcgccggcgtggccgccggcagacaggccgaggacgtgctgccccccaccagcgaccagcccctgcccgacaccaagcccctgccccccccccagcccccccccgtgcccgccccccagccccagcagagccccgcccccagaccccagagccccgccagagccagagaggaggagaactacagcttcctgcccctggtgcacaacatcatcaagtgcatggacaaggacagccccgaggtgcaccaggacctgaacgccctgaagagcaagttccaggagatgagaaagctgatcagcaccatgcccggcatccacctgagccccgagcagcagcagcagcagctgcagagcctgagagagcaggtgagaaccaagaacgagctgctgcagaagtacaagagcctgtgcatgttcgagatccccaaggagtag

SEQ ID NO: 88287 - DNA, 894 bp, synthetic construct
  misc_feature 1..894: note = Description of Artificial Sequence: Synthetic coding sequence
  source 1..894: mol_type = other DNA
atgagcaacagagtggtgtgcagagaggccagccacgccggcagctggtacaccgccagcggcccccagctgaacgcccagctggagggctggctgagccaggtgcagagcaccaagagacccgccagagccatcatcgccccccacgccggctacacctactgcggcagctgcgccgcccacgcctacaagcaggtggaccccagcatcaccagaagaatcttcatcctgggccccagccaccacgtgcccctgagcagatgcgccctgagcagcgtggacatctacagaacccccctgtacgacctgagaatcgaccagaagatctacggcgagctgtggaagaccggcatgttcgagagaatgagcctgcagaccgacgaggacgagcacagcatcgagatgcacctgccctacaccgccaaggccatggagagccacaaggacgagttcaccatcatccccgtgctggtgggcgccctgagcgagagcaaggagcaggagttcggcaagctgttcagcaagtacctggccgaccccagcaacctgttcgtggtgagcagcgacttctgccactggggccagagattcagatacagctactacgacgagagccagggcgagatctacagaagcatcgagcacctggacaagatgggcatgagcatcatcgagcagctggaccccgtgagcttcagcaactacctgaagaagtaccacaacaccatctgcggcagacaccccatcggcgtgctgctgaacgccatcaccgagctgcagaagaacggcatgaacatgagcttcagcttcctgaactacgcccagagcagccagtgcagaaactggcaggacagcagcgtgagctacgccgccggcgccctgaccgtgcactag

SEQ ID NO: 88288 - DNA, 903 bp, synthetic construct
  misc_feature 1..903: note = Description of Artificial Sequence: Synthetic coding sequence
  source 1..903: mol_type = other DNA
atgcccctgtggagagccgacaagtgccaggacgtgcagagcgccagctggagacccagaagagccgacggcccccagctgaacgcccagctggagggctggctgagccaggtgcagagcaccaagagacccgccagagccatcatcgccccccacgccggctacacctactgcggcagctgcgccgcccacgcctacaagcaggtggaccccagcatcaccagaagaatcttcatcctgggccccagccaccacgtgcccctgagcagatgcgccctgagcagcgtggacatctacagaacccccctgtacgacctgagaatcgaccagaagatctacggcgagctgtggaagaccggcatgttcgagagaatgagcctgcagaccgacgaggacgagcacagcatcgagatgcacctgccctacaccgccaaggccatggagagccacaaggacgagttcaccatcatccccgtgctggtgggcgccctgagcgagagcaaggagcaggagttcggcaagctgttcagcaagtacctggccgaccccagcaacctgttcgtggtgagcagcgacttctgccactggggccagagattcagatacagctactacgacgagagccagggcgagatctacagaagcatcgagcacctggacaagatgggcatgagcatcatcgagcagctggaccccgtgagcttcagcaactacctgaagaagtaccacaacaccatctgcggcagacaccccatcggcgtgctgctgaacgccatcaccgagctgcagaagaacggcatgaacatgagcttcagcttcctgaactacgcccagagcagccagtgcagaaactggcaggacagcagcgtgagctacgccgccggcgccctgaccgtgcactag

SEQ ID NO: 88289 - DNA, 894 bp, synthetic construct; identical to SEQ ID NO: 88287
  misc_feature 1..894: note = Description of Artificial Sequence: Synthetic coding sequence
  source 1..894: mol_type = other DNA

SEQ ID NO: 88290 - DNA, 825 bp, synthetic construct
  misc_feature 1..825: note = Description of Artificial Sequence: Synthetic coding sequence
  source 1..825: mol_type = other DNA
atgagcaacagagtggtgtgcagagaggccagccacgccggcagctggtacaccgccagcggcccccagctgaacgcccagctggagggctggctgagccaggtgcagagcaccaagagacccgccagagccatcatcgcccccagaagaatcttcatcctgggccccagccaccacgtgcccctgagcagatgcgccctgagcagcgtggacatctacagaacccccctgtacgacctgagaatcgaccagaagatctacggcgagctgtggaagaccggcatgttcgagagaatgagcctgcagaccgacgaggacgagcacagcatcgagatgcacctgccctacaccgccaaggccatggagagccacaaggacgagttcaccatcatccccgtgctggtgggcgccctgagcgagagcaaggagcaggagttcggcaagctgttcagcaagtacctggccgaccccagcaacctgttcgtggtgagcagcgacttctgccactggggccagagattcagatacagctactacgacgagagccagggcgagatctacagaagcatcgagcacctggacaagatgggcatgagcatcatcgagcagctggaccccgtgagcttcagcaactacctgaagaagtaccacaacaccatctgcggcagacaccccatcggcgtgctgctgaacgccatcaccgagctgcagaagaacggcatgaacatgagcttcagcttcctgaactacgcccagagcagccagtgcagaaactggcaggacagcagcgtgagctacgccgccggcgccctgaccgtgcactag

SEQ ID NO: 88291 - DNA, 63 bp, synthetic construct
  misc_feature 1..63: note = Description of Artificial Sequence: Synthetic coding sequence
  source 1..63: mol_type = other DNA
atgagcaacagagtggtgtgcagagaggccagccacgccggcagctggtacaccgccagctag

SEQ ID NO: 88292 - DNA, 5478 bp, synthetic construct
  misc_feature 1..5478: note = Description of Artificial Sequence: Synthetic coding sequence
  source 1..5478: mol_type = other DNA
atggaggacacccaggccatcgactgggacgtggaggaggaggaggagaccgagcagagcagcgagagcctgagatgcaacgtggagcccgtgggcagactgcacatcttcagcggcgcccacggccccgagaaggacttccccctgcacctgggcaagaacgtggtgggcagaatgcccgactgcagcgtggccctgcccttccccagcatcagcaagcagcacgccgagatcgagatcctggcctgggacaaggcccccatcctgagagactgcggcagcctgaacggcacccagatcctgagaccccccaaggtgctgagccccggcgtgagccacagactgagagaccaggagctgatcctgttcgccgacctgctgtgccagtaccacagactggacgtgagcctgcccttcgtgagcagaggccccctgaccgtggaggagacccccagagtgcagggcgagacccagccccagagactgctgctggccgaggacagcgaggaggaggtggacttcctgagcgagagaagaatggtgaagaagagcagaaccaccagcagcagcgtgatcgtgcccgagagcgacgaggagggccacagccccgtgctgggcggcctgggcccccccttcgccttcaacctgaacagcgacaccgacgtggaggagggccagcagcccgccaccgaggaggccagcagcgccgccagaagaggcgccaccgtggaggccaagcagagcgaggccgaggtggtgaccgagatccagctggagaaggaccagcccctggtgaaggagagagacaacgacaccaaggtgaagagaggcgccggcaacggcgtggtgcccgccggcgtgatcctggagagaagccagccccccggcgaggacagcgacaccgacgtggacgacgacagcagaccccccggcagacccgccgaggtgcacctggagagagcccagcccttcggcttcatcgacagcgacaccgacgccgaggaggagagaatccccgccacccccgtggtgatccccatgaagaagagaaagatcttccacggcgtgggcaccagaggccccggcgcccccggcctggcccacctgcaggagagccaggccggcagcgacaccgacgtggaggagggcaaggccccccaggccgtgcccctggagaagagccaggccagcatggtgatcaacagcgacaccgacgacgaggaggaggtgagcgccgccctgaccctggcccacctgaaggagagccagcccgccatctggaacagagacgccgaggaggacatgccccagagagtggtgctgctgcagagaagccagaccaccaccgagagagacagcgacaccgacgtggaggaggaggagctgcccgtggagaacagagaggccgtgctgaaggaccacaccaagatcagagccctggtgagagcccacagcgagaaggaccagccccccttcggcgacagcgacgacagcgtggaggccgacaagagcagccccggcatccacctggagagaagccaggccagcaccaccgtggacatcaacacccaggtggagaaggaggtgccccccggcagcgccatcatccacatcaagaagcaccaggtgagcgtggagggcaccaaccagaccgacgtgaaggccgtgggcggccccgccaagctgctggtggtgagcctggaggaggcctggcccctgcacggcgactgcgagaccgacgccgaggagggcaccagcctgaccgccagcgtggtggccgacgtgagaaagagccagctgcccgccgagggcgacgccggcgccgagtgggccgccgccgtgctgaagcaggagagagcccacgaggtgggcgcccagggcggcccccccgtggcccaggtggagcaggacctgcccatcagcagagagaacctgaccgacctggtggtggacaccgacaccctgggcgagagcacccagccccagagagagggcgcccaggtgcccaccggcagagagagagagcagcacgtgggcggcaccaaggacagcgaggacaactacggcgacagcgaggacctggacctgcaggccacccagtgcttcctggagaaccagggcctggaggccgtgcagagcatggaggacgagcccacccaggccttcatgctgacccccccccaggagctgggccccagccactgcagcttccagaccaccggcctgctgaactgcaagatgccccccgccgagaaggccagcagaatcagagccgccgagaaggtgagcagaggcgaccaggagagccccgacgcctgcctgccccccaccgtgcccgaggcccccgcccccccccagaagcccctgaacagccagagccagaagcacctggcccccccccccctgctgagccccctgctgcccagcatcaagcccaccgtgagaaagaccagacaggacggcagccaggaggcccccgaggcccccctgagcagcgagctggagcccttccaccccaagcccaagatcagaaccagaaagagcagcagaatgacccccttccccgccaccagcgccgcccccgagccccaccccagcaccagcaccgcccagcccgtgacccccaagcccaccagccaggccaccagaagcagaaccaacagaagcagcgtgaagacccccgagcccgtggtgcccaccgcccccgagctgcagcccagcaccagcaccgaccagcccgtgaccagcgagcccaccagccaggtgaccagaggcagaaagagcagaagcagcgtgaagacccccgagaccgtggtgcccaccgccctggagctgcagcccagcaccagcaccgacagacccgtgaccagcgagcccaccagccaggccaccagaggcagaaagaacagaagcagcgtgaagacccccgagcccgtggtgcccaccgcccccgagctgcagcccagcaccagcaccgaccagcccgtgaccagcgagcccacctaccaggccaccagaggcagaaagaacagaagcagcgtgaagacccccgagcccgtggtgcccaccgcccccgagctgagacccagcaccagcaccgacagacccgtgacccccaagcccaccagcagaaccaccagaagcagaaccaacatgagcagcgtgaagacccccgagaccgtggtgcccaccgcccccgagctgcagatcagcaccagcaccgaccagcccgtgacccccaagcccaccagcagaaccaccagaagcagaaccaacatgagcagcgtgaagaaccccgagagcaccgtgcccatcgcccccgagctgccccccagcaccagcaccgagcagcccgtgacccccgagcccaccagcagagccaccagaggcagaaagaacagaagcagcggcaagacccccgagaccctggtgcccaccgcccccaagctggagcccagcaccagcaccgaccagcccgtgacccccgagcccaccagccaggccaccagaggcagaaccaacagaagcagcgtgaagacccccgagaccgtggtgcccaccgcccccgagctgcagcccagcaccagcaccgaccagcccgtgacccccgagcccaccagccaggccaccagaggcagaaccgacagaagcagcgtgaagacccccgagaccgtggtgcccaccgcccccgagctgcaggccagcgccagcaccgaccagcccgtgaccagcgagcccaccagcagaaccaccagaggcagaaagaacagaagcagcgtgaagacccccgagaccgtggtgcccgccgcccccgagctgcagcccagcaccagcaccgaccagcccgtgacccccgagcccaccagcagagccaccagaggcagaaccaacagaagcagcgtgaagacccccgagagcatcgtgcccatcgcccccgagctgcagcccagcaccagcagaaaccagctggtgacccccgagcccaccagcagagccaccagatgcagaaccaacagaagcagcgtgaagacccccgagcccgtggtgcccaccgcccccgagccccaccccaccaccagcaccgaccagcccgtgacccccaagctgaccagcagagccaccagaagaaagaccaacagaagcagcgtgaagacccccaagcccgtggagcccgccgccagcgacctggagcccttcacccccaccgaccagagcgtgacccccgaggccatcgcccagggcggccagagcaagaccctgagaagcagcaccgtgagagccatgcccgtgcccaccacccccgagttccagagccccgtgaccaccgaccagcccatcagccccgagcccatcacccagcccagctgcatcaagagacagagagccgccggcaaccccggcagcctggccgcccccatcgaccacaagccctgcagcgcccccctggagcccaagagccaggccagcagaaaccagagatggggcgccgtgagagccgccgagagcctgaccgccatccccgagcccgccagcccccagctgctggagacccccatccacgccagccagatccagaaggtggagcccgccggcagaagcagattcacccccgagctgcagcccaaggccagccagagcagaaagagaagcctggccaccatggacagccccccccaccagaagcagccccagagaggcgaggtgagccagaagaccgtgatcatcaaggaggaggaggaggacaccgccgagaagcccggcaaggaggaggacgtggtgacccccaagcccggcaagagaaagagagaccaggccgaggaggagcccaacagaatccccagcagaagcctgagaagaaccaagctgaaccaggagagcaccgcccccaaggtgctgttcaccggcgtggtggacgccagaggcgagagagccgtgctggccctgggcggcagcctggccggcagcgccgccgaggccagccacctggtgaccgacagaatcagaagaaccgtgaagttcctgtgcgccctgggcagaggcatccccatcctgagcctggactggctgcaccagagcagaaaggccggcttcttcctgccccccgacgagtacgtggtgaccgaccccgagcaggagaagaacttcggcttcagcctgcaggacgccctgagcagagccagagagagaagactgctggagggctacgagatctacgtgacccccggcgtgcagcccccccccccccagatgggcgagatcatcagctgctgcggcggcacctacctgcccagcatgcccagaagctacaagccccagagagtggtgatcacctgcccccaggacttcccccactgcagcatccccctgagagtgggcctgcccctgctgagccccgagttcctgctgaccggcgtgctgaagcaggaggccaagcccgaggccttcgtgctgagccccctggagatgagcagcacctag

SEQ ID NO: 88293 - DNA, 6270 bp, synthetic construct
  misc_feature 1..6270: note = Description of Artificial Sequence: Synthetic coding sequence
  source 1..6270: mol_type = other DNA
atggaggacacccaggccatcgactgggacgtggaggaggaggaggagaccgagcagagcagcgagagcctgagatgcaacgtggagcccgtgggcagactgcacatcttcagcggcgcccacggccccgagaaggacttccccctgcacctgggcaagaacgtggtgggcagaatgcccgactgcagcgtggccctgcccttccccagcatcagcaagcagcacgccgagatcgagatcctggcctgggacaaggcccccatcctgagagactgcggcagcctgaacggcacccagatcctgagaccccccaaggtgctgagccccggcgtgagccacagactgagagaccaggagctgatcctgttcgccgacctgctgtgccagtaccacagactggacgtgagcctgcccttcgtgagcagaggccccctgaccgtggaggagacccccagagtgcagggcgagacccagccccagagactgctgctggccgaggacagcgaggaggaggtggacttcctgagcgagagaagaatggtgaagaagagcagaaccaccagcagcagcgtgatcgtgcccgagagcgacgaggagggccacagccccgtgctgggcggcctgggcccccccttcgccttcaacctgaacagcgacaccgacgtggaggagggccagcagcccgccaccgaggaggccagcagcgccgccagaagaggcgccaccgtggaggccaagcagagcgaggccgaggtggtgaccgagatccagctggagaaggaccagcccctggtgaaggagagagacaacgacaccaaggtgaagagaggcgccggcaacggcgtggtgcccgccggcgtgatcctggagagaagccagccccccggcgaggacagcgacaccgacgtggacgacgacagcagaccccccggcagacccgccgaggtgcacctggagagagcccagcccttcggcttcatcgacagcgacaccgacgccgaggaggagagaatccccgccacccccgtggtgatccccatgaagaagagaaagatcttccacggcgtgggcaccagaggccccggcgcccccggcctggcccacctgcaggagagccaggccggcagcgacaccgacgtggaggagggcaaggccccccaggccgtgcccctggagaagagccaggccagcatggtgatcaacagcgacaccgacgacgaggaggaggtgagcgccgccctgaccctggcccacctgaaggagagccagcccgccatctggaacagagacgccgaggaggacatgccccagagagtggtgctgctgcagagaagccagaccaccaccgagagagacagcgacaccgacgtggaggaggaggagctgcccgtggagaacagagaggccgtgctgaaggaccacaccaagatcagagccctggtgagagcccacagcgagaaggaccagccccccttcggcgacagcgacgacagcgtggaggccgacaagagcagccccggcatccacctggagagaagccaggccagcaccaccgtggacatcaacacccaggtggagaaggaggtgccccccggcagcgccatcatccacatcaagaagcaccaggtgagcgtggagggcaccaaccagaccgacgtgaaggccgtgggcggccccgccaagctgctggtggtgagcctggaggaggcctggcccctgcacggcgactgcgagaccgacgccgaggagggcaccagcctgaccgccagcgtggtggccgacgtgagaaagagccagctgcccgccgagggcgacgccggcgccgagtgggccgccgccgtgctgaagcaggagagagcccacgaggtgggcgcccagggcggcccccccgtggcccaggtggagcaggacctgcccatcagcagagagaacctgaccgacctggtggtggacaccgacaccctgggcgagagcacccagccccagagagagggcgcccaggtgcccaccggcagagagagagagcagcacgtgggcggcaccaaggacagcgaggacaactacggcgacagcgaggacctggacctgcaggccacccagtgcttcctggagaaccagggcctggaggccgtgcagagcatggaggacgagcccacccaggccttcatgctgacccccccccaggagctgggccccagccactgcagcttccagaccaccggcaccctggacgagccctgggaggtgctggccacccagcccttctgcctgagagagagcgaggacagcgagacccagcccttcgacacccacctggaggcctacggcccctgcctgagcccccccagagccatccccggcgaccagcaccccgagagccccgtgcacaccgagcccatgggcatccagggcagaggcagacagaccgtggacaaggtgatgggcatccccaaggagaccgccgagagagtgggccccgagagaggccccctggagagagagaccgagaagctgctgcccgagagacagaccgacgtgaccggcgaggaggagctgaccaagggcaagcaggacagagagcagaagcagctgctggccagagacacccagagacaggagagcgacaagaacggcgagagcgccagccccgagagagacagagagagcctgaaggtggagatcgagaccagcgaggagatccaggagaagcaggtgcagaagcagaccctgcccagcaaggccttcgagagagaggtggagagacccgtggccaacagagagtgcgaccccgccgagctggaggagaaggtgcccaaggtgatcctggagagagacacccagagaggcgagcccgagggcggcagccaggaccagaagggccaggccagcagccccacccccgagcccggcgtgggcgccggcgacctgcccggccccaccagcgcccccgtgcccagcggcagccagagcggcggcagaggcagccccgtgagccccagaagacaccagaagggcctgctgaactgcaagatgccccccgccgagaaggccagcagaatcagagccgccgagaaggtgagcagaggcgaccaggagagccccgacgcctgcctgccccccaccgtgcccgaggcccccgcccccccccagaagcccctgaacagccagagccagaagcacctggcccccccccccctgctgagccccctgctgcccagcatcaagcccaccgtgagaaagaccagacaggacggcagccaggaggcccccgaggcccccctgagcagcgagctggagcccttccaccccaagcccaagatcagaaccagaaagagcagcagaatgacccccttccccgccaccagcgccgcccccgagccccaccccagcaccagcaccgcccagcccgtgacccccaagcccaccagccaggccaccagaagcagaaccaacagaagcagcgtgaagacccccgagcccgtggtgcccaccgcccccgagctgcagcccagcaccagcaccgaccagcccgtgaccagcgagcccaccagccaggtgaccagaggcagaaagagcagaagcagcgtgaagacccccgagaccgtggtgcccaccgccctggagctgcagcccagcaccagcaccgacagacccgtgaccagcgagcccaccagccaggccaccagaggcagaaagaacagaagcagcgtgaagacccccgagcccgtggtgcccaccgcccccgagctgcagcccagcaccagcaccgaccagcccgtgaccagcgagcccacctaccaggccaccagaggcagaaagaacagaagcagcgtgaagacccccgagcccgtggtgcccaccgcccccgagctgagacccagcaccagcaccgacagacccgtgacccccaagcccaccagcagaaccaccagaagcagaaccaacatgagcagcgtgaagacccccgagaccgtggtgcccaccgcccccgagctgcagatcagcaccagcaccgaccagcccgtgacccccaagcccaccagcagaaccaccagaagcagaaccaacatgagcagcgtgaagaaccccgagagcaccgtgcccatcgcccccgagctgccccccagcaccagcaccgagcagcccgtgacccccgagcccaccagcagagccaccagaggcagaaagaacagaagcagcggcaagacccccgagaccctggtgcccaccgcccccaagctggagcccagcaccagcaccgaccagcccgtgacccccgagcccaccagccaggccaccagaggcagaaccaacagaagcagcgtgaagacccccgagaccgtggtgcccaccgcccccgagctgcagcccagcaccagcaccgaccagcccgtgacccccgagcccaccagccaggccaccagaggcagaaccgacagaagcagcgtgaagacccccgagaccgtggtgcccaccgcccccgagctgcaggccagcgccagcaccgaccagcccgtgaccagcgagcccaccagcagaaccaccagaggcagaaagaacagaagcagcgtgaagacccccgagaccgtggtgcccgccgcccccgagctgcagcccagcaccagcaccgaccagcccgtgacccccgagcccaccagcagagccaccagaggcagaaccaacagaagcagcgtgaagacccccgagagcatcgtgcccatcgcccccgagctgcagcccagcaccagcagaaaccagctggtgacccccgagcccaccagcagagccaccagatgcagaaccaacagaagcagcgtgaagacccccgagcccgtggtgcccaccgcccccgagccccaccccaccaccagcaccgaccagcccgtgacccccaagctgaccagcagagccaccagaagaaagaccaacagaagcagcgtgaagacccccaagcccgtggagcccgccgccagcgacctggagcccttcacccccaccgaccagagcgtgacccccgaggccatcgcccagggcggccagagcaagaccctgagaagcagcaccgtgagagccatgcccgtgcccaccacccccgagttccagagccccgtgaccaccgaccagcccatcagccccgagcccatcacccagcccagctgcatcaagagacagagagccgccggcaaccccggcagcctggccgcccccatcgaccacaagccctgcagcgcccccctggagcccaagagccaggccagcagaaaccagagatggggcgccgtgagagccgccgagagcctgaccgccatccccgagcccgccagcccccagctgctggagacccccatccacgccagccagatccagaaggtggagcccgccggcagaagcagattcacccccgagctgcagcccaaggccagccagagcagaaagagaagcctggccaccatggacagccccccccaccagaagcagccccagagaggcgaggtgagccagaagaccgtgatcatcaaggaggaggaggaggacaccgccgagaagcccggcaaggaggaggacgtggtgacccccaagcccggcaagagaaagagagaccaggccgaggaggagcccaacagaatccccagcagaagcctgagaagaaccaagctgaaccaggagagcaccgcccccaaggtgctgttcaccggcgtggtggacgccagaggcgagagagccgtgctggccctgggcggcagcctggccggcagcgccgccgaggccagccacctggtgaccgacagaatcagaagaaccgtgaagttcctgtgcgccctgggcagaggcatccccatcctgagcctggactggctgcaccagagcagaaaggccggcttcttcctgccccccgacgagtacgtggtgaccgaccccgagcaggagaagaacttcggcttcagcctgcaggacgccctgagcagagccagagagagaagactgctggagggctacgagatctacgtgacccccggcgtgcagcccccccccccccagatgggcgagatcatcagctgctgcggcggcacctacctgcccagcatgcccagaagctacaagccccagagagtggtgatcacctgcccccaggacttcccccactgcagcatccccctgagagtgggcctgcccctgctgagccccgagttcctgctgaccggcgtgctgaagcaggaggccaagcccgaggccttcgtgctgagccccctggagatgagcagcacctag

SEQ ID NO: 88294 - DNA, 489 bp, synthetic construct
  misc_feature 1..489: note = Description of Artificial Sequence: Synthetic coding sequence
  source 1..489: mol_type = other DNA
atggaggacacccaggccatcgactgggacgtggaggaggaggaggagaccgagcagagcagcgagagcctgagatgcaacgtggagcccgtgggcagactgcacatcttcagcggcgcccacggccccgagaaggacttccccctgcacctgggcaagaacgtggtgggcagaatgcccgactgcagcgtggccctgcccttccccagcatcagcaagcagcacgccgagatcgagatcctggcctgggacaaggcccccatcctgagagactgcggcagcctgaacggcacccagatcctgagaccccccaaggtgctgagccccggcgtgagccacagactgagagaccaggagctgatcctgttcgccgacctgctgtgccagtaccacagactggacgtgagcctgcccttcgtgagcagaggccccctgaccgtggaggagacccccagagtgcagggcgagacccagccccagagactgtag

SEQ ID NO: 88295 - DNA, 342 bp, synthetic construct
  misc_feature 1..342: note = Description of Artificial Sequence: Synthetic coding sequence
  source 1..342: mol_type = other DNA
atggaggacacccaggccatcgactgggacgtggaggaggaggaggagaccgagcagagcagcgagagcctgagatgcaacgtggagcccgtgggcagactgcacatcttcagcggcgcccacggccccgagaaggacttccccctgcacctgggcaagaacgtggtgggcagaatgcccgactgcagcgtggccctgcccttccccagcatcagcaagcagcacgccgagatcgagatcctggcctgggacaaggcccccatcctgagagactgcggcagcctgaacggcacccagatcctgagaccccccaaggtgctgagccccggcgtgagccactag

SEQ ID NO: 88296 - DNA, 384 bp, synthetic construct
  misc_feature 1..384: note = Description of Artificial Sequence: Synthetic coding sequence
  source 1..384: mol_type = other DNA
atggaggacacccaggccatcgactgggacgtggaggaggaggaggagaccgagcagagcagcgagagcctgagatgcaacgtggagcccgtgggcagactgcacatcttcagcggcgcccacggccccgagaaggacttccccctgcacctgggcaagaacgtggtgggcagaatgcccgactgcagcgtggccctgcccttccccagcatcagcaagcagcacgccgagatcgagatcctggcctgggacaaggcccccatcctgagagactgcggcagcctgaacggcacccagatcctgagaccccccaaggtgctgagccccggcgtgagccacagactgagagaccaggagctgatcctgttcgccgacctgctgtag

SEQ ID NO: 88297 - DNA, 489 bp, synthetic construct; identical to SEQ ID NO: 88294
  misc_feature 1..489: note = Description of Artificial Sequence: Synthetic coding sequence
  source 1..489: mol_type = other DNA

SEQ ID NO: 88298 - DNA, 921 bp, synthetic construct
  misc_feature 1..921: note = Description of Artificial Sequence: Synthetic coding sequence
  source 1..921: mol_type = other DNA
tgacacgtgggcggcaccaaggacagcgaggacaactacggcgacagcgaggacctggacctgcaggccacccagtgcttcctggagaaccagggcctggaggccgtgcagagcatggaggacgagcccacccaggccttcatgctgacccccccccaggagctgggccccagccactgcagcttccagaccaccggcctgctgaactgcaagatgccccccgccgagaaggccagcagaatcagagccgccgagaaggtgagcagaggcgaccaggagagccccgacgcctgcctgccccccaccgtgcccgaggcccccgcccccccccagaagcccctgaacagccagagccagaagcacctggcccccccccccctgctgagccccctgctgcccagcatcaagcccaccgtgagaaagaccagacaggacggcagccaggaggcccccgaggcccccctgagcagcgagctggagcccttccaccccaagcccaagatcagaaccagaaagagcagcagaatgacccccttccccgccaccagcgccgcccccgagccccaccccagcaccagcaccgcccagcccgtgacccccaagcccaccagccaggccaccagaagcagaaccaacagaagcagcgtgaagacccccgagcccgtggtgcccaccgcccccgagctgcagcccagcaccagcaccgaccagcccgtgaccagcgagcccaccagccaggtgaccagaggcagaaagagcagaagcagcgtgaagacccccgagaccgtggtgcccaccgccctggagctgcagcccagcaccagcaccgacagacccgtgaccagcgagcccaccagccaggccaccagaggcagaaagaacagaagcagcgtgaagacccccgagcccgtggtgccctag

SEQ ID NO: 88299 - DNA, 384 bp, synthetic construct; identical to SEQ ID NO: 88296
  misc_feature 1..384: note = Description of Artificial Sequence: Synthetic coding sequence
  source 1..384: mol_type = other DNA

SEQ ID NO: 88300 - DNA, 921 bp, synthetic construct; identical to SEQ ID NO: 88298
  misc_feature 1..921: note = Description of Artificial Sequence: Synthetic coding sequence
  source 1..921: mol_type = other DNA

SEQ ID NO: 88301 - DNA, 921 bp, synthetic construct; identical to SEQ ID NO: 88298
  misc_feature 1..921: note = Description of Artificial Sequence: Synthetic coding sequence
  source 1..921: mol_type = other DNA

SEQ ID NO: 88302 - DNA, 6270 bp, synthetic construct; identical to SEQ ID NO: 88293
  misc_feature 1..6270: note = Description of Artificial Sequence: Synthetic coding sequence
  source 1..6270: mol_type = other DNA

SEQ ID NO: 88303 - DNA, 6270 bp, synthetic construct; identical to SEQ ID NO: 88293
  misc_feature 1..6270: note = Description of Artificial Sequence: Synthetic coding sequence
  source 1..6270: mol_type = other DNA

SEQ ID NO: 88304 - DNA, 4968 bp, synthetic construct
  misc_feature 1..4968: note = Description of Artificial Sequence: Synthetic coding sequence
  source 1..4968: mol_type = other DNA
atgtaccacagactggacgtgagcctgcccttcgtgagcagaggccccctgaccgtggaggagacccccagagtgcagggcgagacccagccccagagactgctgctggccgaggacagcgaggaggaggtggacttcctgagcgagagaagaatggtgaagaagagcagaaccaccagcagcagcgtgatcgtgcccgagagcgacgaggagggccacagccccgtgctgggcggcctgggcccccccttcgccttcaacctgaacagcgacaccgacgtggaggagggccagcagcccgccaccgaggaggccagcagcgccgccagaagaggcgccaccgtggaggccaagcagagcgaggccgaggtggtgaccgagatccagctggagaaggaccagcccctggtgaaggagagagacaacgacaccaaggtgaagagaggcgccggcaacggcgtggtgcccgccggcgtgatcctggagagaagccagccccccggcgaggacagcgacaccgacgtggacgacgacagcagaccccccggcagacccgccgaggtgcacctggagagagcccagcccttcggcttcatcgacagcgacaccgacgccgaggaggagagaatccccgccacccccgtggtgatccccatgaagaagagaaagatcttccacggcgtgggcaccagaggccccggcgcccccggcctggcccacctgcaggagagccaggccggcagcgacaccgacgtggaggagggcaaggccccccaggccgtgcccctggagaagagccaggccagcatggtgatcaacagcgacaccgacgacgaggaggaggtgagcgccgccctgaccctggcccacctgaaggagagccagcccgccatctggaacagagacgccgaggaggacatgccccagagagtggtgctgctgcagagaagccagaccaccaccgagagagacagcgacaccgacgtggaggaggaggagctgcccgtggagaacagagaggccgtgctgaaggaccacaccaagatcagagccctggtgagagcccacagcgagaaggaccagccccccttcggcgacagcgacgacagcgtggaggccgacaagagcagccccggcatccacctggagagaagccaggccagcaccaccgtggacatcaacacccaggtggagaaggaggtgccccccggcagcgccatcatccacatcaagaagcaccaggtgagcgtggagggcaccaaccagaccgacgtgaaggccgtgggcggccccgccaagctgctggtggtgagcctggaggaggcctggcccctgcacggcgactgcgagaccgacgccgaggagggcaccagcctgaccgccagcgtggtggccgacgtgagaaagagccagctgcccgccgagggcgacgccggcgccgagtgggccgccgccgtgctgaagcaggagagagcccacgaggtgggcgcccagggcggcccccccgtggcccaggtggagcaggacctgcccatcagcagagagaacctgaccgacctggtggtggacaccgacaccctgggcgagagcacccagccccagagagagggcgcccaggtgcccaccggcagagagagagagcagcacgtgggcggcaccaaggacagcgaggacaactacggcgacagcgaggacctggacctgcaggccacccagtgcttcctggagaaccagggcctggaggtgcagagcatggaggacgagcccacccaggccttcatgctgacccccccccaggagctgggccccagccactgcagcttccagaccaccggcctgctgaactgcaagatgccccccgccgagaaggccagcagaatcagagccgccgagaaggtgagcagaggcgaccaggagagccccgacgcctgcctgccccccaccgtgcccgaggcccccgcccccccccagaagcccctgaacagccagagccagaagcacctggcccccccccccctgctgagccccctgctgcccagcatcaagcccaccgtgagaaagaccagacaggacggcagccaggaggcccccgaggcccccctgagcagcgagctggagcccttccaccccaagcccaagatcagaaccagaaagagcagcagaatgacccccttccccgccaccagcgccgcccccgagccccaccccagcaccagcaccgcccagcccgtgacccccaagcccaccagccaggccaccagaagcagaaccaacagaagcagcgtgaagacccccgagcccgtggtgcccaccgcccccgagctgcagcccagcaccagcaccgaccagcccgtgaccagcgagcccaccagccaggtgaccagaggcagaaagagcagaagcagcgtgaagacccccgagaccgtggtgcccaccgccctggagctgcagcccagcaccagcaccgacagacccgtgaccagcgagcccaccagccaggccaccagaggcagaaagaacagaagcagcgtgaagacccccgagcccgtggtgcccaccgcccccgagctgcagcccagcaccagcaccgaccagcccgtgaccagcgagcccacctaccaggccaccagaggcagaaagaacagaagcagcgtgaagacccccgagcccgtggtgcccaccgcccccgagctgagacccagcaccagcaccgacagacccgtgacccccaagcccaccagcagaaccaccagaagcagaaccaacatgagcagcgtgaagaaccccgagagcaccgtgcccatcgcccccgagctgccccccagcaccagcaccgagcagcccgtgacccccgagcccaccagcagagccaccagaggcagaaagaacagaagcagcggcaagacccccgagaccctggtgcccaccgcccccaagctggagcccagcaccagcaccgaccagcccgtgacccccgagcccaccagccaggccaccagaggcagaaccaacagaagcagcgtgaagacccccgagaccgtggtgcccaccgcccccgagctgcagcccagcaccagcaccgaccagcccgtgacccccgagcccaccagccaggccaccagaggcagaaccgacagaagcagcgtgaagacccccgagaccgtggtgcccaccgcccccgagctgcaggccagcgccagcaccgaccagcccgtgaccagcgagcccaccagcagaaccaccagaggcagaaagaacagaagcagcgtgaagacccccgagaccgtggtgcccgccgcccccgagctgcagcccagcaccagcaccgaccagcccgtgacccccgagcccaccagcagagccaccagaggcagaaccaacagaagcagcgtgaagacccccgagagcatcgtgcccatcgcccccgagctgcagcccagcaccagcagaaaccagctggtgacccccgagcccaccagcagagccaccagatgcagaaccaacagaagcagcgtgaagacccccgagcccgtggtgcccaccgcccccgagccccaccccaccaccagcaccgaccagcccgtgacccccaagctgaccagcagagccaccagaagaaagaccaacagaagcagcgtgaagacccccaagcccgtggagcccgccgccagcgacctggagcccttcacccccaccgaccagagcgtgacccccgaggccatcgcccagggcggccagagcaagaccctgagaagcagcaccgtgagagccatgcccgtgcccaccacccccgagttccagagccccgtgaccaccgaccagcccatcagccccgagcccatcacccagcccagctgcatcaagagacagagagccgccggcaaccccggcagcctggccgcccccatcgaccacaagccctgcagcgcccccctggagcccaagagccaggccagcagaaaccagagatggggcgccgtgagagccgccgagagcctgaccgccatccccgagcccgccagcccccagctgctggagacccccatccacgccagccagatccagaaggtggagcccgccggcagaagcagattcacccccgagctgcagcccaaggccagccagagcagaaagagaagcctggccaccatggacagccccccccaccagaagcagccccagagaggcgaggtgagccagaagaccgtgatcatcaaggaggaggaggaggacaccgccgagaagcccggcaaggaggaggacgtggtgacccccaagcccggcaagagaaagagagaccaggccgaggaggagcccaacagaatccccagcagaagcctgagaagaaccaagctgaaccaggagagcaccgcccccaaggtgctgttcaccggcgtggtggacgccagaggcgagagagccgtgctggccctgggcggcagcctggccggcagcgccgccgaggccagccacctggtgaccgacagaatcagaagaaccgtgaagttcctgtgcgccctgggcagaggcatccccatcctgagcctggactggctgcaccagagcagaaaggccggcttcttcctgccccccgacgagtacgtggtgaccgaccccgagcaggagaagaacttcggcttcagcctgcaggacgccctgagcagagccagagagagaagactgctggagggctacgagatctacgtgacccccggcgtgcagcccccccccccccagatgggcgagatcatcagctgctgcggcggcacctacctgcccagcatgcccagaagctacaagccccagagagtggtgatcacctgcccccaggacttcccccactgcagcatccccctgagagtgggcctgcccctgctgagccccgagttcctgctgaccggcgtgctgaagcaggaggccaagcccgaggccttcgtgctgagccccctggagatgagcagcacctag

SEQ ID NO: 88305 - DNA, 489 bp, synthetic construct; identical to SEQ ID NO: 88294
  misc_feature 1..489: note = Description of Artificial Sequence: Synthetic coding sequence
  source 1..489: mol_type = other DNA

SEQ ID NO: 88306 - DNA, 342 bp, synthetic construct; identical to SEQ ID NO: 88295
  misc_feature 1..342: note = Description of Artificial Sequence: Synthetic coding sequence
  source 1..342: mol_type = other DNA

SEQ ID NO: 88307 - DNA, 342 bp, synthetic construct; identical to SEQ ID NO: 88295
  misc_feature 1..342: note = Description of Artificial Sequence: Synthetic coding sequence
  source 1..342: mol_type = other DNA

SEQ ID NO: 88308 - DNA, 384 bp, synthetic construct; identical to SEQ ID NO: 88296
  misc_feature 1..384: note = Description of Artificial Sequence: Synthetic coding sequence
  source 1..384: mol_type = other DNA

SEQ ID NO: 88309 - DNA, 489 bp, synthetic construct; identical to SEQ ID NO: 88294
  misc_feature 1..489: note = Description of Artificial Sequence: Synthetic coding sequence
  source 1..489: mol_type = other DNA

SEQ ID NO: 88310 - DNA, 342 bp, synthetic construct; identical to SEQ ID NO: 88295
  misc_feature 1..342: note = Description of Artificial Sequence: Synthetic coding sequence
  source 1..342: mol_type = other DNA

SEQ ID NO: 88311 - DNA, 489 bp, synthetic construct; identical to SEQ ID NO: 88294
  misc_feature 1..489: note = Description of Artificial Sequence: Synthetic coding sequence
  source 1..489: mol_type = other DNA

SEQ ID NO: 88312 - DNA, 384 bp, synthetic construct; identical to SEQ ID NO: 88296
  misc_feature 1..384: note = Description of Artificial Sequence: Synthetic coding sequence
  source 1..384: mol_type = other DNA

SEQ ID NO: 88313 - DNA, 921 bp, synthetic construct; identical to SEQ ID NO: 88298
  misc_feature 1..921: note = Description of Artificial Sequence: Synthetic coding sequence
  source 1..921: mol_type = other DNA

SEQ ID NO: 88314 - DNA, 6270 bp, synthetic construct; identical to SEQ ID NO: 88293
  misc_feature 1..6270: note = Description of Artificial Sequence: Synthetic coding sequence
  source 1..6270: mol_type = other DNA

SEQ ID NO: 88315 - DNA, 5409 bp, synthetic construct
  misc_feature 1..5409: note = Description of Artificial Sequence: Synthetic coding sequence
  source 1..5409: mol_type = other DNA
atggaggacacccaggccatcgactgggacgtggaggaggaggaggagaccgagcagagcagcgagagcctgagatgcaacgtggagcccgtgggcagactgcacatcttcagcggcgcccacggccccgagaaggacttccccctgcacctgggcaagaacgtggtgggcagaatgcccgactgcagcgtggccctgcccttccccagcatcagcaagcagcacgccgagatcgagatcctggcctgggacaaggcccccatcctgagagactgcggcagcctgaacggcacccagatcctgagaccccccaaggtgctgagccccggcgtgagccacagactgagagaccaggagctgatcctgttcgccgacctgctgtgccagtaccacagactggacgtgagcctgcccttcgtgagcagaggccccctgaccgtggaggagacccccagagtgcagggcgagacccagccccagagactgctgctggccgaggacagcgaggaggaggtggacttcctgagcgagagaagaatggtgaagaagagcagaaccaccagcagcagcgtgatcgtgcccgagagcgacgaggagggccacagccccgtgctgggcggcctgggcccccccttcgccttcaacctgaacagcgacaccgacgtggaggagggccagcagcccgccaccgaggaggccagcagcgccgccagaagaggcgccaccgtggaggccaagcagagcgaggccgaggtggtgaccgagatccagctggagaaggaccagcccctggtgaaggagagagacaacgacaccaaggtgaagagaggcgccggcaacggcgtggtgcccgccggcgtgatcctggagagaagccagccccccggcgaggacagcgacaccgacgtggacgacgacagcagaccccccggcagacccgccgaggtgcacctggagagagcccagcccttcggcttcatcgacagcgacaccgacgccgaggaggagagaatccccgccacccccgtggtgatccccatgaagaagagaaagatcttccacggcgtgggcaccagaggccccggcgcccccggcctggcccacctgcaggagagccaggccggcagcgacaccgacgtggaggagggcaaggccccccaggccgtgcccctggagaagagccaggccagcatggtgatcaacagcgacaccgacgacgaggaggaggtgagcgccgccctgaccctggcccacctgaaggagagccagcccgccatctggaacagagacgccgaggaggacatgccccagagagtggtgctgctgcagagaagccagaccaccaccgagagagacagcgacaccgacgtggaggaggaggagctgcccgtggagaacagagaggccgtgctgaaggaccacaccaagatcagagccctggtgagagcccacagcgagaaggaccagccccccttcggcgacagcgacgacagcgtggaggccgacaagagcagccccggcatccacctggagagaagccaggccagcaccaccgtggacatcaacacccaggtggagaaggaggtgccccccggcagcgccatcatccacatcaagaagcaccaggtgagcgtggagggcaccaaccagaccgacgtgaaggccgtgggcggccccgccaagctgctggtggtgagcctggaggaggcctggcccctgcacggcgactgcgagaccgacgccgaggagggcaccagcctgaccgccagcgtggtggccgacgtgagaaagagccagctgcccgccgagggcgacgccggcgccgagtgggccgccgccgtgctgaagcaggagagagcccacgaggtgggcgcccagggcggcccccccgtggcccaggtggagcaggacctgcccatcagcagagagaacctgaccgacctggtggtggacaccgacaccctgggcgagagcacccagccccagagagagggcgcccaggtgcccaccggcagagagagagagcagcacgtgggcggcaccaaggacagcgaggacaactacggcgacagcgaggacctggacctgcaggccacccagtgcttcctggagaaccagggcctggaggccgtgcagagcatggaggacgagcccacccaggccttcatgctgacccccccccaggagctgggccccagccactgcagcttccagaccaccggcaccctggacgagccctgggaggtgctggccacccagcccttctgcctgagagagagcgaggacagcgagacccagcccttcgacacccacctggaggcctacggcccctgcctgagcccccccagagccatccccggcgaccagcaccccgagagccccgtgcacaccgagcccatgggcatccagggcagaggcagacagaccgtggacaaggtgatgggcatccccaaggagaccgccgagagagtgggccccgagagaggccccctggagagagagaccgagaagctgctgcccgagagacagaccgacgtgaccggcgaggaggagctgaccaagggcaagcaggacagagagcagaagcagctgctggccagagacacccagagacaggagagcgacaagaacggcgagagcgccagccccgagagagacagagagagcctgaaggtggagatcgagaccagcgaggagatccaggagaagcaggtgcagaagcagaccctgcccagcaaggccttcgagagagaggtggagagacccgtggccaacagagagtgcgaccccgccgagctggaggagaaggtgcccaaggtgatcctggagagagacacccagagaggcgagcccgagggcggcagccaggaccagaagggccaggccagcagccccacccccgagcccggcgtgggcgccggcgacctgcccggccccaccagcgcccccgtgcccagcggcagccagagcggcggcagaggcagccccgtgagccccagaagacaccagaagggcctgctgaactgcaagatgccccccgccgagaaggccagcagaatcagagccgccgagaaggtgagcagaggcgaccaggagagccccgacgcctgcctgccccccaccgtgcccgaggcccccgcccccccccagaagcccctgaacagccagagccagaagcacctggcccccccccccctgctgagccccctgctgcccagcatcaagcccaccgtgagaaagaccagacaggacggcagccaggaggcccccgaggcccccctgagcagcgagctggagcccttccaccccaagcccaagatcagaaccagaaagagcagcagaatgacccccttccccgccaccagcgccgcccccaagctggagcccagcaccagcaccgaccagcccgtgacccccgagcccaccagccaggccaccagaggcagaaccaacagaagcagcgtgaagacccccgagaccgtggtgcccaccgcccccgagctgcagcccagcaccagcaccgaccagcccgtgacccccgagcccaccagccaggccaccagaggcagaaccgacagaagcagcgtgaagacccccgagaccgtggtgcccaccgcccccgagctgcaggccagcgccagcaccgaccagcccgtgaccagcgagcccaccagcagaaccaccagaggcagaaagaacagaagcagcgtgaagacccccgagaccgtggtgcccgccgcccccgagctgcagcccagcaccagcaccgaccagcccgtgacccccgagcccaccagcagagccaccagaggcagaaccaacagaagcagcgtgaagacccccgagagcatcgtgcccatcgcccccgagctgcagcccagcaccagcagaaaccagctggtgacccccgagcccaccagcagagccaccagatgcagaaccaacagaagcagcgtgaagacccccgagcccgtggtgcccaccgcccccgagccccaccccaccaccagcaccgaccagcccgtgacccccaagctgaccagcagagccaccagaagaaagaccaacagaagcagcgtgaagacccccaagcccgtggagcccgccgccagcgacctggagcccttcacccccaccgaccagagcgtgacccccgaggccatcgcccagggcggccagagcaagaccctgagaagcagcaccgtgagagccatgcccgtgcccaccacccccgagttccagagccccgtgaccaccgaccagcccatcagccccgagcccatcacccagcccagctgcatcaagagacagagagccgccggcaaccccggcagcctggccgcccccatcgaccacaagccctgcagcgcccccctggagcccaagagccaggccagcagaaaccagagatggggcgccgtgagagccgccgagagcctgaccgccatccccgagcccgccagcccccagctgctggagacccccatccacgccagccagatccagaaggtggagcccgccggcagaagcagattcacccccgagctgcagcccaaggccagccagagcagaaagagaagcctggccaccatggacagccccccccaccagaagcagccccagagaggcgaggtgagccagaagaccgtgatcatcaaggaggaggaggaggacaccgccgagaagcccggcaaggaggaggacgtggtgacccccaagcccggcaagagaaagagagaccaggccgaggaggagcccaacagaatccccagcagaagcctgagaagaaccaagctgaaccaggagagcaccgcccccaaggtgctgttcaccggcgtggtggacgccagaggcgagagagccgtgctggccctgggcggcagcctggccggcagcgccgccgaggccagccacctggtgaccgacagaatcagaagaaccgtgaagttcctgtgcgccctgggcagaggcatccccatcctgagcctggactggctgcaccagagcagaaaggccggcttcttcctgccccccgacgagtacgtggtgaccgaccccgagcaggagaagaacttcggcttcagcctgcaggacgccctgagcagagccagagagagaagactgctggagggctacgagatctacgtgacccccggcgtgcagcccccccccccccagatgggcgagatcatcagctgctgcggcggcacctacctgcccagcatgcccagaagctacaagccccagagagtggtgatcacctgcccccaggacttcccccactgcagcatccccctgagagtgggcctgcccctgctgagccccgagttcctgctgaccggcgtgctgaagcaggaggccaagcccgaggccttcgtgctgagccccctggagatgagcagcacctag

SEQ ID NO: 88316 - DNA, 342 bp, synthetic construct; identical to SEQ ID NO: 88295
  misc_feature 1..342: note = Description of Artificial Sequence: Synthetic coding sequence
  source 1..342: mol_type = other DNA

SEQ ID NO: 88317 - DNA, 6270 bp, synthetic construct
  misc_feature 1..6270: note = Description of Artificial Sequence: Synthetic coding sequence
  source 1..6270: mol_type = other DNA
atggaggacacccaggccatcgactgggacgtggaggaggaggaggagaccgagcagagcagcgagagcctgagatgcaacgtggagcccgtgggcagactgcacatcttcagcggcgcccacggccccgagaaggacttccccctgcacctgggcaagaacgtggtgggcagaatgcccgactgcagcgtggccctgcccttccccagcatcagcaagcagcacgccgagatcgagatcctggcctgggacaaggcccccatcctgagagactgcggcagcctgaacggcacccagatcctgagaccccccaaggtgctgagccccggcgtgagccacagactgagagaccaggagctgatcctgttcgccgacctgctgtgccagtaccacagactggacgtgagcctgcccttcgtgagcagaggccccctgaccgtggaggagacccccagagtgcagggcgagacccagccccagagactgctgctggccgaggacagcgaggaggaggtggacttcctgagcgagagaagaatggtgaagaagagcagaaccaccagcagcagcgtgatcgtgcccgagagcgacgaggagggccacagccccgtgctgggcggcctgggcccccccttcgccttcaacctgaacagcgacaccgacgtggaggagggccagcagcccgccaccgaggaggccagcagcgccgccagaagaggcgccaccgtggaggccaagcagagcgaggccgaggtggtgaccgagatccagctggagaaggaccagcccctggtgaaggagagagacaacgacaccaaggtgaagagaggcgccggcaacggcgtggtgcccgccggcgtgatcctggagagaagccagccccccggcgaggacagcgacaccgacgtggacgacgacagcagaccccccggcagacccgccgaggtgcacctggagagagcccagcccttcggcttcatcgacagcgacaccgacgccgaggaggagagaatccccgccacccccgtggtgatccccatgaagaagagaaagatcttccacggcgtgggcaccagaggccccggcgcccccggcctggcccacctgcaggagagccaggccggcagcgacaccgacgtggaggagggcaaggccccccaggccgtgcccctggagaagagccaggccagcatggtgatcaacagcgacaccgacgacgaggaggaggtgagcgccgccctgaccctggcccacctgaaggagagccagcccgccatctggaacagagacgccgaggaggacatgccccagagagtggtgctgctgcagagaagccagaccaccaccgagagagacagcgacaccgacgtggaggaggaggagctgcccgtggagaacagagaggccgtgctgaaggaccacaccaagatcagagccctggtgagagcccacagcgagaaggaccagccccccttcggcgacagcgacgacagcgtggaggccgacaagagcagccccggcatccacctggagagaagccaggccagcaccaccgtggacatcaacacccaggtggagaaggaggtgccccccggcagcgccatcatccacatcaagaagcaccaggtgagcgtggagggcaccaaccagaccgacgtgaaggccgtgggcggccccgccaagctgctggtggtgagcctggaggaggcctggcccctgcacggcgactgcgagaccgacgccgaggagggcaccagcctgaccgccagcgtggtggccgacgtgagaaagagccagctgcccgccgagggcgacgccggcgccgagtgggccgccgccgtgctgaagcaggagagagcccacgaggtgggcgcccagggcggcccccccgtggcccaggtggagcaggacctgcccatcagcagagagaacctgaccgacctggtggtggacaccgacaccctgggcgagagcacccagccccagagagagggcgcccaggtgcccaccggcagagagagagagcagcacgtgggcggcaccaaggacagcgaggacaactacggcgacagcgaggacctggacctgcaggccacccagtgcttcctggagaaccagggcctggaggccgtgcagagcatggaggacgagcccacccaggccttcatgctgacccccccccaggagctgggccccagccactgcagcttccagaccaccggcaccctggacgagccctgggaggtgctggccacccagcccttctgcctgagagagagcgaggacagcgagacccagcccttcgacacccacctggaggcctacggcccctgcctgagcccccccagagccatccccggcgaccagcaccccgagagccccgtgcacaccgagcccatgggcatccagggcagaggcagacagaccgtggacaaggtgatgggcatccccaaggagaccgccgagagagtgggccccgagagaggccccctggagagagagaccgagaagctgctgcccgagagacagaccgacgtgaccggcgaggaggagctgaccaagggcaagcaggacagagagcagaagcagctgctggccagagacacccagagacaggagagcgacaagaacggcgagagcgccagccccgagagagacagagagagcctgaaggtggagatcgagaccagcgaggagatccaggagaagcaggtgcagaagcagaccctgcccagcaaggccttcgagagagaggtggagagacccgtggccaacagagagtgcgaccccgccgagctggaggagaaggtgcccaaggtgatcctggagagagacacccagagaggcgagcccgagggcggcagccaggaccagaagggccaggccagcagccccacccccgagcccggcgtgggcgccggcgacctgcccggccccaccagcgcccccgtgcccagcggcagccagagcggcggcagaggcagccccgtgagccccagaagacaccagaagggcctgctgaactgcaagatgccccccgccgagaaggccagcagaatcagagccgccgagaaggtgagcagaggcgaccaggagagccccgacgcctgcctgccccccaccgtgcccgaggcccccgcccccccccagaagcccctgaacagccagagccagaagcacctggcccccccccccctgctgagccccctgctgcccagcatcaagcccaccgtgagaaagaccagacaggacggcagccaggaggcccccgaggcccccctgagcagcgagctggagcccttccaccccaagcccaagatcagaaccagaaagagcagcagaatgacccccttccccgccaccagcgccgcccccgagccccaccccagcaccagcaccgcccagcccgtgacccccaagcccaccagccaggccaccagaagcagaaccaacagaagcagcgtgaagacccccgagcccgtggtgcccaccgcccccgagctgcagcccagcaccagcaccgaccagcccgtgaccagcgagcccaccagccaggtgaccagaggcagaaagagcagaagcagcgtgaagacccccgagaccgtggtgcccaccgccctggagctgcagcccagcaccagcaccgacagacccgtgaccagcgagcccaccagccaggccaccagaggcagaaagaacagaagcagcgtgaagacccccgagcccgtggtgcccaccgcccccgagctgcagcccagcaccagcaccgaccagcccgtgaccagcgagcccacctaccaggccaccagaggcagaaagaacagaagcagcgtgaagacccccgagcccgtggtgcccaccgcccccgagctgagacccagcaccagcaccgacagacccgtgacccccaagcccaccagcagaaccaccagaagcagaaccaacatgagcagcgtgaagacccccgagaccgtggtgcccaccgcccccgagctgcagatcagcaccagcaccgaccagcccgtgacccccaagcccaccagcagaaccaccagaagcagaaccaacatgagcagcgtgaagaaccccgagagcaccgtgcccatcgcccccgagctgccccccagcaccagcaccgagcagcccgtgacccccgagcccaccagcagagccaccagaggcagaaagaacagaagcagcggcaagacccccgagaccctggtgcccaccgcccccaagctggagcccagcaccagcaccgaccagcccgtgacccccgagcccaccagccaggccaccagaggcagaaccaacagaagcagcgtgaagacccccgagaccgtggtgcccaccgcccccgagctgcagcccagcaccagcaccgaccagcccgtgacccccgagcccaccagccaggccaccagaggcagaaccgacagaagcagcgtgaagacccccgagaccgtggtgcccaccgcccccgagctgcaggccagcgccagcaccgaccagcccgtgaccagcgagcccaccagcagaaccaccagaggcagaaagaacagaagcagcgtgaagacccccgagaccgtggtgcccgccgcccccgccctgcagcccagcaccagcaccgaccagcccgtgacccccgagcccaccagcagagccaccagaggcagaaccaacagaagcagcgtgaagacccccgagagcatcgtgcccatcgcccccgagctgcagcccagcaccagcagaaaccagctggtgacccccgagcccaccagcagagccaccagatgcagaaccaacagaagcagcgtgaagacccccgagcccgtggtgcccaccgcccccgagccccaccccaccaccagcaccgaccagcccgtgacccccaagctgaccagcagagccaccagaagaaagaccaacagaagcagcgtgaagacccccaagcccgtggagcccgccgccagcgacctggagcccttcacccccaccgaccagagcgtgacccccgaggccatcgcccagggcggccagagcaagaccctgagaagcagcaccgtgagagccatgcccgtgcccaccacccccgagttccagagccccgtgaccaccgaccagcccatcagccccgagcccatcacccagcccagctgcatcaagagacagagagccgccggcaaccccggcagcctggccgcccccatcgaccacaagccctgcagcgcccccctggagcccaagagccaggccagcagaaaccagagatggggcgccgtgagagccgccgagagcctgaccgccatccccgagcccgccagcccccagctgctggagacccccatccacgccagccagatccagaaggtggagcccgccggcagaagcagattcacccccgagctgcagcccaaggccagccagagcagaaagagaagcctggccaccatggacagccccccccaccagaagcagccccagagaggcgaggtgagccagaagaccgtgatcatcaaggaggaggaggaggacaccgccgagaagcccggcaaggaggaggacgtggtgacccccaagcccggcaagagaaagagagaccaggccgaggaggagcccaacagaatccccagcagaagcctgagaagaaccaagctgaaccaggagagcaccgcccccaaggtgctgttcaccggcgtggtggacgccagaggcgagagagccgtgctggccctgggcggcagcctggccggcagcgccgccgaggccagccacctggtgaccgacagaatcagaagaaccgtgaagttcctgtgcgccctgggcagaggcatccccatcctgagcctggactggctgcaccagagcagaaaggccggcttcttcctgccccccgacgagtacgtggtgaccgaccccgagcaggagaagaacttcggcttcagcctgcaggacgccctgagcagagccagagagagaagactgctggagggctacgagatctacgtgacccccggcgtgcagcccccccccccccagatgggcgagatcatcagctgctgcggcggcacctacctgcccagcatgcccagaagctacaagccccagagagtggtgatcacctgcccccaggacttcccccactgcagcatccccctgagagtgggcctgcccctgctgagccccgagttcctgctgaccggcgtgctgaagcaggaggccaagcccgaggccttcgtgctgagccccctggagatgagcagcacctag

SEQ ID NO: 88318 - DNA, 738 bp, synthetic construct
  misc_feature 1..738: note = Description of Artificial Sequence: Synthetic coding sequence
  source 1..738: mol_type = other DNA
atggaggacacccaggccatcgactgggacgtggaggaggaggaggagaccgagcagagcagcgagagcctgagatgcaacgtggagcccgtgggcagactgcacatcttcagcggcgcccacggccccgagaaggacttccccctgcacctgggcaagaacgtggtgggcagaatgcccgactgcagcgtggccctgcccttccccagcatcagcaagcagcacgccgagatcgagatcctggcctgggacaaggcccccatcctgagagactgcggcagcctgaacggcacccagatcctgagaccccccaaggtgctgagccccggcgtgagccacagactgagagaccaggagctgatcctgttcgccgacctgctgtgccagtaccacagactggacgtgagcctgcccttcgtgagcagaggccccctgaccgtggaggagacccccagagtgcagggcgagacccagccccagagactgctgctggccgaggacagcgaggaggaggtggacttcctgagcgagagaagaatggtgaagaagagcagaaccaccagcagcagcgtgatcgtgcccgagagcgacgaggagggccacagccccgtgctgggcggcctgggcccccccttcgccttcaacctgaacagcgacaccgacgtggaggagggccagcagcccgccaccgaggaggccagcagcgccgccagaagaggcgccaccgtggaggcctag

SEQ ID NO: 88319 - DNA, 342 bp, synthetic construct; identical to SEQ ID NO: 88295
  misc_feature 1..342: note = Description of Artificial Sequence: Synthetic coding sequence
  source 1..342: mol_type = other DNA

SEQ ID NO: 88320 - DNA, 384 bp, synthetic construct; identical to SEQ ID NO: 88296
  misc_feature 1..384: note = Description of Artificial Sequence: Synthetic coding sequence
  source 1..384: mol_type = other DNA

SEQ ID NO: 88321 - DNA, 6270 bp, synthetic construct; identical to SEQ ID NO: 88293
  misc_feature 1..6270: note = Description of Artificial Sequence: Synthetic coding sequence
  source 1..6270: mol_type = other DNA

SEQ ID NO: 88322 - DNA, 489 bp, synthetic construct; identical to SEQ ID NO: 88294
  misc_feature 1..489: note = Description of Artificial Sequence: Synthetic coding sequence
  source 1..489: mol_type = other DNA

SEQ ID NO: 88323 - DNA, 921 bp, synthetic construct; identical to SEQ ID NO: 88298
  misc_feature 1..921: note = Description of Artificial Sequence: Synthetic coding sequence
  source 1..921: mol_type = other DNA

SEQ ID NO: 88324 - DNA, 921 bp, synthetic construct; identical to SEQ ID NO: 88298
  misc_feature 1..921: note = Description of Artificial Sequence: Synthetic coding sequence
  source 1..921: mol_type = other DNA

SEQ ID NO: 88325 - DNA, 384 bp, synthetic construct; identical to SEQ ID NO: 88296
  misc_feature 1..384: note = Description of Artificial Sequence: Synthetic coding sequence
  source 1..384: mol_type = other DNA

SEQ ID NO: 88326 - DNA, 921 bp, synthetic construct; identical to SEQ ID NO: 88298
  misc_feature 1..921: note = Description of Artificial Sequence: Synthetic coding sequence
  source 1..921: mol_type = other DNA

SEQ ID NO: 88327 - DNA, 489 bp, synthetic construct; identical to SEQ ID NO: 88294
  misc_feature 1..489: note = Description of Artificial Sequence: Synthetic coding sequence
  source 1..489: mol_type = other DNA

SEQ ID NO: 88328 - DNA, 6270 bp, synthetic construct; identical to SEQ ID NO: 88293
  misc_feature 1..6270: note = Description of Artificial Sequence: Synthetic coding sequence
  source 1..6270: mol_type = other DNA

SEQ ID NO: 88329 - DNA, 735 bp, synthetic construct
  misc_feature 1..735: note = Description of Artificial Sequence: Synthetic coding sequence
  source 1..735: mol_type = other DNA
atggaggacacccaggccatcgactgggacgtggaggaggaggaggagaccgagcagagcagcgagagcctgagatgcaacgtggagcccgtgggcagactgcacatcttcagcggcgcccacggccccgagaaggacttccccctgcacctgggcaagaacgtggtgggcagaatgcccgactgcagcgtggccctgcccttccccagcatcagcaagcagcacgccgagatcgagatcctggcctgggacaaggcccccatcctgagagactgcggcagcctgaacggcacccagatcctgagaccccccaaggtgctgagccccggcgtgagccacagactgagagaccaggagctgatcctgttcgccgacctgctgtgccagtaccacagactggacgtgagcctgcccttcgtgagcagaggccccctgaccgtggaggagacccccagagtgcagggcgagacccagccccagagactgctgctggccgaggacagcgaggaggaggtggacttcctgagcgagagaagaatggtgaagaagagcagaaccaccagcagcagcgtgatcgtgcccgagagcgacgaggagggccacagccccgtgctgggcggcctgggcccccccttcgccttcaacctgaacagcgacaccgacgtggaggagggccagcagccccacagaggcggcctgctgagctgccagaagagatgccactgcagaggctag

SEQ ID NO: 88330 - DNA, 384 bp, synthetic construct; identical to SEQ ID NO: 88296
  misc_feature 1..384: note = Description of Artificial Sequence: Synthetic coding sequence
  source 1..384: mol_type = other DNA

SEQ ID NO: 88331 - DNA, 342 bp, synthetic construct; identical to SEQ ID NO: 88295
  misc_feature 1..342: note = Description of Artificial Sequence: Synthetic coding sequence
  source 1..342: mol_type = other DNA

SEQ ID NO: 88332 - DNA, 5409 bp, synthetic construct; identical to SEQ ID NO: 88315
  misc_feature 1..5409: note = Description of Artificial Sequence: Synthetic coding sequence
  source 1..5409: mol_type = other DNA

SEQ ID NO: 88333 - DNA, 735 bp, synthetic construct; identical to SEQ ID NO: 88329
  misc_feature 1..735: note = Description of Artificial Sequence: Synthetic coding sequence
  source 1..735: mol_type = other DNA

SEQ ID NO: 88334 - DNA, 5409 bp, synthetic construct; identical to SEQ ID NO: 88315
  misc_feature 1..5409: note = Description of Artificial Sequence: Synthetic coding sequence
  source 1..5409: mol_type = other DNA

SEQ ID NO: 88335 - DNA, 735 bp, synthetic construct; identical to SEQ ID NO: 88329
  misc_feature 1..735: note = Description of Artificial Sequence: Synthetic coding sequence
  source 1..735: mol_type = other DNA

SEQ ID NO: 88336 - DNA, 735 bp, synthetic construct; identical to SEQ ID NO: 88329
  misc_feature 1..735: note = Description of Artificial Sequence: Synthetic coding sequence
  source 1..735: mol_type = other DNA

SEQ ID NO: 88337 - DNA, 738 bp, synthetic construct; identical to SEQ ID NO: 88318
  misc_feature 1..738: note = Description of Artificial Sequence: Synthetic coding sequence
  source 1..738: mol_type = other DNA

SEQ ID NO: 88338 - DNA, 5478 bp, synthetic construct; identical to SEQ ID NO: 88292
  misc_feature 1..5478: note = Description of Artificial Sequence: Synthetic coding sequence
  source 1..5478: mol_type = other DNA

SEQ ID NO: 88339 - DNA, 738 bp, synthetic construct; identical to SEQ ID NO: 88318
  misc_feature 1..738: note = Description of Artificial Sequence: Synthetic coding sequence
  source 1..738: mol_type = other DNA

SEQ ID NO: 88340 - DNA, 5409 bp, synthetic construct; identical to SEQ ID NO: 88315
  misc_feature 1..5409: note = Description of Artificial Sequence: Synthetic coding sequence
  source 1..5409: mol_type = other DNA

SEQ ID NO: 88341 - DNA, 738 bp, synthetic construct; identical to SEQ ID NO: 88318
  misc_feature 1..738: note = Description of Artificial Sequence: Synthetic coding sequence
  source 1..738: mol_type = other DNA

SEQ ID NO: 88342 - DNA, 5409 bp, synthetic construct
  misc_feature 1..5409: note = Description of Artificial Sequence: Synthetic coding sequence
  source 1..5409: mol_type = other DNA
atggaggacacccaggccatcgactgggacgtggaggaggaggaggagaccgagcagagcagcgagagcctgagatgcaacgtggagcccgtgggcagactgcacatcttcagcggcgcccacggccccgagaaggacttccccctgcacctgggcaagaacgtggtgggcagaatgcccgactgcagcgtggccctgcccttccccagcatcagcaagcagcacgccgagatcgagatcctggcctgggacaaggcccccatcctgagagactgcggcagcctgaacggcacccagatcctgagaccccccaaggtgctgagccccggcgtgagccacagactgagagaccaggagctgatcctgttcgccgacctgctgtgccagtaccacagactggacgtgagcctgcccttcgtgagcagaggccccctgaccgtggaggagacccccagagtgcagggcgagacccagccccagagactgctgctggccgaggacagcgaggaggaggtggacttcctgagcgagagaagaatggtgaagaagagcagaaccaccagcagcagcgtgatcgtgcccgagagcgacgaggagggccacagccccgtgctgggcggcctgggcccccccttcgccttcaacctgaacagcgacaccgacgtggaggagggccagcagcccgccaccgaggaggccagcagcgccgccagaagaggcgccaccgtggaggccaagcagagcgaggccgaggtggtgaccgagatccagctggagaaggaccagcccctggtgaaggagagagacaacgacaccaaggtgaagagaggcgccggcaacggcgtggtgcccgccggcgtgatcctggagagaagccagccccccggcgaggacagcgacaccgacgtggacgacgacagcagaccccccggcagacccgccgaggtgcacctggagagagcccagcccttcggcttcatcgacagcgacaccgacgccgaggaggagagaatccccgccacccccgtggtgatccccatgaagaagagaaagatcttccacggcgtgggcaccagaggccccggcgcccccggcctggcccacctgcaggagagccaggccggcagcgacaccgacgtggaggagggcaaggccccccaggccgtgcccctggagaagagccaggccagcatggtgatcaacagcgacaccgacgacgaggaggaggtgagcgccgccctgaccctggcccacctgaaggagagccagcccgccatctggaacagagacgccgaggaggacatgccccagagagtggtgctgctgcagagaagccagaccaccaccgagagagacagcgacaccgacgtggaggaggaggagctgcccgtggagaacagagaggccgtgctgaaggaccacaccaagatcagagccctggtgagagcccacagcgagaaggaccagccccccttcggcgacagcgacgacagcgtggaggccgacaagagcagccccggcatccacctggagagaagccaggccagcaccaccgtggacatcaacacccaggtggagaaggaggtgccccccggcagcgccatcatccacatcaagaagcaccaggtgagcgtggagggcaccaaccagaccgacgtgaaggccgtgggcggccccgccaagctgctggtggtgagcctggaggaggcctggcccctgcacggcgactgcgagaccgacgccgaggagggcaccagcctgaccgccagcgtggtggccgacgtgagaaagagccagctgcccgccgagggcgacgccggcgccgagtgggccgccgccgtgctgaagcaggagagagcccacgaggtgggcgcccagggcggcccccccgtggcccaggtggagcaggacctgcccatcagcagagagaacctgaccgacctggtggtggacaccgacaccctgggcgagagcacccagccccagagagagggcgcccaggtgcccaccggcagagagagagagcagcacgtgggcggcaccaaggacagcgaggacaactacggcgacagcgaggacctggacctgcaggccacccagtgcttcctggagaaccagggcctggaggccgtgcagagcatggaggacgagcccacccaggccttcatgctgacccccccccaggagctgggccccagccactgcagcttccagaccaccggcaccctggacgagccctgggaggtgctggccacccagcccttctgcctgagagagagcgaggacagcgagacccagcccttcgacacccacctggaggcctacggcccctgcctgagcccccccagagccatccccggcgaccagcaccccgagagccccgtgcacaccgagcccatgggcatccagggcagaggcagacagaccgtggacaaggtgatgggcatccccaaggagaccgccgagagagtgggccccgagagaggccccctggagagagagaccgagaagctgctgcccgagagacagaccgacgtgaccggcgaggaggagctgaccaagggcaagcaggacagagagcagaagcagctgctggccagagacacccagagacaggagagcgacaagaacggcgagagcgccagccccgagagagacagagagagcctgaaggtggagatcgagaccagcgaggagatccaggagaagcaggtgcagaagcagaccctgcccagcaaggccttcgagagagaggtggagagacccgtggccaacagagagtgcgaccccgccgagctggaggagaaggtgcccaaggtgatcctggagagagacacccagagaggcgagcccgagggcggcagccaggaccagaagggccaggccagcagccccacccccgagcccggcgtgggcgccggcgacctgcccggccccaccagcgcccccgtgcccagcggcagccagagcggcggcagaggcagccccgtgagccccagaagacaccagaagggcctgctgaactgcaagatgccccccgccgagaaggccagcagaatcagagccgccgagaaggtgagcagaggcgaccaggagagccccgacgcctgcctgccccccaccgtgcccgaggcccccgcccccccccagaagcccctgaacagccagagccagaagcacctggcccccccccccctgctgagccccctgctgcccagcatcaagcccaccgtgagaaagaccagacaggacggcagccaggaggcccccgaggcccccctgagcagcgagctggagcccttccaccccaagcccaagatcagaaccagaaagagcagcagaatgacccccttccccgccaccagcgccgcccccaagctggagcccagcaccagcaccgaccagcccgtgacccccgagcccaccagccaggccaccagaggcagaaccaacagaagcagcgtgaagacccccgagaccgtggtgcccaccgcccccgagctgcagcccagcaccagcaccgaccagcccgtgacccccgagcccaccagccaggccaccagaggcagaaccgacagaagcagcgtgaagacccccgagaccgtggtgcccaccgcccccgagctgcaggccagcgccagcaccgaccagcccgtgaccagcgagcccaccagcagaaccaccagaggcagaaagaacagaagcagcgtgaagacccccgagaccgtggtgcccgccgcccccgccctgcagcccagcaccagcaccgaccagcccgtgacccccgagcccaccagcagagccaccagaggcagaaccaacagaagcagcgtgaagacccccgagagcatcgtgcccatcgcccccgagctgcagcccagcaccagcagaaaccagctggtgacccccgagcccaccagcagagccaccagatgcagaaccaacagaagcagcgtgaagacccccgagcccgtggtgcccaccgcccccgagccccaccccaccaccagcaccgaccagcccgtgacccccaagctgaccagcagagccaccagaagaaagaccaacagaagcagcgtgaagacccccaagcccgtggagcccgccgccagcgacctggagcccttcacccccaccgaccagagcgtgacccccgaggccatcgcccagggcggccagagcaagaccctgagaagcagcaccgtgagagccatgcccgtgcccaccacccccgagttccagagccccgtgaccaccgaccagcccatcagccccgagcccatcacccagcccagctgcatcaagagacagagagccgccggcaaccccggcagcctggccgcccccatcgaccacaagccctgcagcgcccccctggagcccaagagccaggccagcagaaaccagagatggggcgccgtgagagccgccgagagcctgaccgccatccccgagcccgccagcccccagctgctggagacccccatccacgccagccagatccagaaggtggagcccgccggcagaagcagattcacccccgagctgcagcccaaggccagccagagcagaaagagaagcctggccaccatggacagccccccccaccagaagcagccccagagaggcgaggtgagccagaagaccgtgatcatcaaggaggaggaggaggacaccgccgagaagcccggcaaggaggaggacgtggtgacccccaagcccggcaagagaaagagagaccaggccgaggaggagcccaacagaatccccagcagaagcctgagaagaaccaagctgaaccaggagagcaccgcccccaaggtgctgttcaccggcgtggtggacgccagaggcgagagagccgtgctggccctgggcggcagcctggccggcagcgccgccgaggccagccacctggtgaccgacagaatcagaagaaccgtgaagttcctgtgcgccctgggcagaggcatccccatcctgagcctggactggctgcaccagagcagaaaggccggcttcttcctgccccccgacgagtacgtggtgaccgaccccgagcaggagaagaacttcggcttcagcctgcaggacgccctgagcagagccagagagagaagactgctggagggctacgagatctacgtgacccccggcgtgcagcccccccccccccagatgggcgagatcatcagctgctgcggcggcacctacctgcccagcatgcccagaagctacaagccccagagagtggtgatcacctgcccccaggacttcccccactgcagcatccccctgagagtgggcctgcccctgctgagccccgagttcctgctgaccggcgtgctgaagcaggaggccaagcccgaggccttcgtgctgagccccctggagatgagcagcacctag

SEQ ID NO: 88343 - DNA, 5478 bp, synthetic construct; identical to SEQ ID NO: 88292
  misc_feature 1..5478: note = Description of Artificial Sequence: Synthetic coding sequence
  source 1..5478: mol_type = other DNA

SEQ ID NO: 88344 - DNA, 4968 bp, synthetic construct; identical to SEQ ID NO: 88304
  misc_feature 1..4968: note = Description of Artificial Sequence: Synthetic coding sequence
  source 1..4968: mol_type = other DNA

SEQ ID NO: 88345 - DNA, 4968 bp, synthetic construct
  misc_feature 1..4968: note = Description of Artificial Sequence: Synthetic coding sequence
  source 1..4968: mol_type = other DNA
atgtaccacagactggacgtgagcctgcccttcgtgagcagaggccccctgaccgtggaggagacccccagagtgcagggcgagacccagccccagagactgctgctggccgaggacagcgaggaggaggtggacttcctgagcgagagaagaatggtgaagaagagcagaaccaccagcagcagcgtgatcgtgcccgagagcgacgaggagggccacagccccgtgctgggcggcctgggcccccccttcgccttcaacctgaacagcgacaccgacgtggaggagggccagcagcccgccaccgaggaggccagcagcgccgccagaagaggcgccaccgtggaggccaagcagagcgaggccgaggtggtgaccgagatccagctggagaaggaccagcccctggtgaaggagagagacaacgacaccaaggtgaagagaggcgccggcaacggcgtggtgcccgccggcgtgatcctggagagaagccagccccccggcgaggacagcgacaccgacgtggacgacgacagcagaccccccggcagacccgccgaggtgcacctggagagagcccagcccttcggcttcatcgacagcgacaccgacgccgaggaggagagaatccccgccacccccgtggtgatccccatgaagaagagaaagatcttccacggcgtgggcaccagaggccccggcgcccccggcctggcccacctgcaggagagccaggccggcagcgacaccgacgtggaggagggcaaggccccccaggccgtgcccctggagaagagccaggccagcatggtgatcaacagcgacaccgacgacgaggaggaggtgagcgccgccctgaccctggcccacctgaaggagagccagcccgccatctggaacagagacgccgaggaggacatgccccagagagtggtgctgctgcagagaagccagaccaccaccgagagagacagcgacaccgacgtggaggaggaggagctgcccgtggagaacagagaggccgtgctgaaggaccacaccaagatcagagccctggtgagagcccacagcgagaaggaccagccccccttcggcgacagcgacgacagcgtggaggccgacaagagcagccccggcatccacctggagagaagccaggccagcaccaccgtggacatcaacacccaggtggagaaggaggtgccccccggcagcgccatcatccacatcaagaagcaccaggtgagcgtggagggcaccaaccagaccgacgtgaaggccgtgggcggccccgccaagctgctggtggtgagcctggaggaggcctggcccctgcacggcgactgcgagaccgacgccgaggagggcaccagcctgaccgccagcgtggtggccgacgtgagaaagagccagctgcccgccgagggcgacgccggcgccgagtgggccgccgccgtgctgaagcaggagagagcccacgaggtgggcgcccagggcggcccccccgtggcccaggtggagcaggacctgcccatcagcagagagaacctgaccgacctggtggtggacaccgacaccctgggcgagagcacccagccccagagagagggcgcccaggtgcccaccggcagagagagagagcagcacgtgggcggcaccaaggacagcgaggacaactacggcgacagcgaggacctggacctgcaggccacccagtgcttcctggagaaccagggcctggaggtgcagagcatggaggacgagcccacccaggccttcatgctgacccccccccaggagctgggccccagccactgcagcttccagaccaccggcctgctgaactgcaagatgccccccgccgagaaggccagcagaatcagagccgccgagaaggtgagcagaggcgaccaggagagccccgacgcctgcctgccccccaccgtgcccgaggcccccgcccccccccagaagcccctgaacagccagagccagaagcacctggcccccccccccctgctgagccccctgctgcccagcatcaagcccaccgtgagaaagaccagacaggacggcagccaggaggcccccgaggcccccctgagcagcgagctggagcccttccaccccaagcccaagatcagaaccagaaagagcagcagaatgacccccttccccgccaccagcgccgcccccgagccccaccccagcaccagcaccgcccagcccgtgacccccaagcccaccagccaggccaccagaagcagaaccaacagaagcagcgtgaagacccccgagcccgtggtgcccaccgcccccgagctgcagcccagcaccagcaccgaccagcccgtgaccagcgagcccaccagccaggtgaccagaggcagaaagagcagaagcagcgtgaagacccccgagaccgtggtgcccaccgccctggagctgcagcccagcaccagcaccgacagacccgtgaccagcgagcccaccagccaggccaccagaggcagaaagaacagaagcagcgtgaagacccccgagcccgtggtgcccaccgcccccgagctgcagcccagcaccagcaccgaccagcccgtgaccagcgagcccacctaccaggccaccagaggcagaaagaacagaagcagcgtgaagacccccgagcccgtggtgcccaccgcccccgagctgagacccagcaccagcaccgacagacccgtgacccccaagcccaccagcagaaccaccagaagcagaaccaacatgagcagcgtgaagaaccccgagagcaccgtgcccatcgcccccgagctgccccccagcaccagcaccgagcagcccgtgacccccgagcccaccagcagagccaccagaggcagaaagaacagaagcagcggcaagacccccgagaccctggtgcccaccgcccccaagctggagcccagcaccagcaccgaccagcccgtgacccccgagcccaccagccaggccaccagaggcagaaccaacagaagcagcgtgaagacccccgagaccgtggtgcccaccgcccccgagctgcagcccagcaccagcaccgaccagcccgtgacccccgagcccaccagccaggccaccagaggcagaaccgacagaagcagcgtgaagacccccgagaccgtggtgcccaccgcccccgagctgcaggccagcgccagcaccgaccagcccgtgaccagcgagcccaccagcagaaccaccagaggcagaaagaacagaagcagcgtgaagacccccgagaccgtggtgcccgccgcccccgccctgcagcccagcaccagcaccgaccagcccgtgacccccgagcccaccagcagagccaccagaggcagaaccaacagaagcagcgtgaagacccccgagagcatcgtgcccatcgcccccgagctgcagcccagcaccagcagaaaccagctggtgacccccgagcccaccagcagagccaccagatgcagaaccaacagaagcagcgtgaagacccccgagcccgtggtgcccaccgcccccgagccccaccccaccaccagcaccgaccagcccgtgacccccaagctgaccagcagagccaccagaagaaagaccaacagaagcagcgtgaagacccccaagcccgtggagcccgccgccagcgacctggagcccttcacccccaccgaccagagcgtgacccccgaggccatcgcccagggcggccagagcaagaccctgagaagcagcaccgtgagagccatgcccgtgcccaccacccccgagttccagagccccgtgaccaccgaccagcccatcagccccgagcccatcacccagcccagctgcatcaagagacagagagccgccggcaaccccggcagcctggccgcccccatcgaccacaagccctgcagcgcccccctggagcccaagagccaggccagcagaaaccagagatggggcgccgtgagagccgccgagagcctgaccgccatccccgagcccgccagcccccagctgctggagacccccatccacgccagccagatccagaaggtggagcccgccggcagaagcagattcacccccgagctgcagcccaaggccagccagagcagaaagagaagcctggccaccatggacagccccccccaccagaagcagccccagagaggcgaggtgagccagaagaccgtgatcatcaaggaggaggaggaggacaccgccgagaagcccggcaaggaggaggacgtggtgacccccaagcccggcaagagaaagagagaccaggccgaggaggagcccaacagaatccccagcagaagcctgagaagaaccaagctgaaccaggagagcaccgcccccaaggtgctgttcaccggcgtggtggacgccagaggcgagagagccgtgctggccctgggcggcagcctggccggcagcgccgccgaggccagccacctggtgaccgacagaatcagaagaaccgtgaagttcctgtgcgccctgggcagaggcatccccatcctgagcctggactggctgcaccagagcagaaaggccggcttcttcctgccccccgacgagtacgtggtgaccgaccccgagcaggagaagaacttcggcttcagcctgcaggacgccctgagcagagccagagagagaagactgctggagggctacgagatctacgtgacccccggcgtgcagcccccccccccccagatgggcgagatcatcagctgctgcggcggcacctacctgcccagcatgcccagaagctacaagccccagagagtggtgatcacctgcccccaggacttcccccactgcagcatccccctgagagtgggcctgcccctgctgagccccgagttcctgctgaccggcgtgctgaagcaggaggccaagcccgaggccttcgtgctgagccccctggagatgagcagcacctag

SEQ ID NO: 88346 - DNA, 666 bp, synthetic construct
  misc_feature 1..666: note = Description of Artificial Sequence: Synthetic coding sequence
  source 1..666: mol_type = other DNA
atggaggacacccaggccatcgactgggacgtggaggaggaggaggagaccgagcagagcagcgagagcctgagatgcaacgtggagcccgtgggcagactgcacatcttcagcggcgcccacggccccgagaaggacttccccctgcacctgggcaagaacgtggtgggcagaatgcccgactgcagcgtggccctgcccttccccagcatcagcaagcagcacgccgagatcgagatcctggcctgggacaaggcccccatcctgagagactgcggcagcctgaacggcacccagatcctgagcagcagcctgccccccccccagaccagcctgctgcccctgagcctgagactgagactgctgggcgaggagcagatcgaccccctgagcagactgctgaagcagctgagcccccagcccctgagctacagactgccccccccccagaccagcctgagccccctgagcccccacctgggccccctgggcgaggagaagatcggccccctgagcagacccctgaagcagctgtgcccccagcccctgagcagcagcctgccccccccccagaccaacctgagccccctgagcccccacctgggccccctgggcgccggccagatcggccccctgagcagacccctgaaccagctgagcctgtag

SEQ ID NO: 88347 - DNA, 666 bp, synthetic construct; identical to SEQ ID NO: 88346
  misc_feature 1..666: note = Description of Artificial Sequence: Synthetic coding sequence
  source 1..666: mol_type = other DNA

SEQ ID NO: 88348 - DNA, 738 bp, synthetic construct; identical to SEQ ID NO: 88318
  misc_feature 1..738: note = Description of Artificial Sequence: Synthetic coding sequence
  source 1..738: mol_type = other DNA

SEQ ID NO: 88349 - DNA, 4968 bp, synthetic construct; identical to SEQ ID NO: 88304
  misc_feature 1..4968: note = Description of Artificial Sequence: Synthetic coding sequence
  source 1..4968: mol_type = other DNA

SEQ ID NO: 88350 - DNA, 5478 bp, synthetic construct; identical to SEQ ID NO: 88292
  misc_feature 1..5478: note = Description of Artificial Sequence: Synthetic coding sequence
  source 1..5478: mol_type = other DNA

SEQ ID NO: 88351 - DNA, 4968 bp, synthetic construct; identical to SEQ ID NO: 88304
  misc_feature 1..4968: note = Description of Artificial Sequence: Synthetic coding sequence
  source 1..4968: mol_type = other DNA

SEQ ID NO: 88352 - DNA, 4968 bp, synthetic construct; identical to SEQ ID NO: 88304
  misc_feature 1..4968: note = Description of Artificial Sequence: Synthetic coding sequence
  source 1..4968: mol_type = other DNA

SEQ ID NO: 88353 - DNA, 735 bp, synthetic construct; identical to SEQ ID NO: 88329
  misc_feature 1..735: note = Description of Artificial Sequence: Synthetic coding sequence
  source 1..735: mol_type = other DNA

SEQ ID NO: 88354 - DNA, 5409 bp, synthetic construct; identical to SEQ ID NO: 88315
  misc_feature 1..5409: note = Description of Artificial Sequence: Synthetic coding sequence
  source 1..5409: mol_type = other DNA

SEQ ID NO: 88355 - DNA, 4968 bp, synthetic construct; identical to SEQ ID NO: 88304
  misc_feature 1..4968: note = Description of Artificial Sequence: Synthetic coding sequence
  source 1..4968: mol_type = other DNA

SEQ ID NO: 88356 - DNA, 5409 bp, synthetic construct; identical to SEQ ID NO: 88315
  misc_feature 1..5409: note = Description of Artificial Sequence: Synthetic coding sequence
  source 1..5409: mol_type = other DNA

SEQ ID NO: 88357 - DNA, 666 bp, synthetic construct
  misc_feature 1..666: note = Description of Artificial Sequence: Synthetic coding sequence
  source 1..666: mol_type = other DNA
atggaggacacccaggccatcgactgggacgtggaggaggaggaggagaccgagcagagcagcgagagcctgagatgcaacgtggagcccgtgggcagactgcacatcttcagcggcgcccacggccccgagaaggacttccccctgcacctgggcaagaacgtggtgggcagaatgcccgactgcagcgtggccctgcccttccccagcatcagcaagcagcacgccgagatcgagatcctggcctgggacaaggcccccatcctgagagactgcggcagcctgaacggcacccagatcctgagcagcagcctgccccccccccagaccagcctgctgcccctgagcctgagactgagactgctgggcgaggagcagatcgaccccctgagcagactgctgaagcagctgagcccccagcccctgagctacagactgccccccccccagaccagcctgagccccctgagcccccacctgggccccctgggcgaggagaagatcggccccctgagcagacccctgaagcagctgtgcccccagcccctgagaagcagcctgccccccccccagaccaacctgagccccctgagcccccacctgggccccctgggcgccggccagatcggccccctgagcagacccctgaaccagctgagcctgtag

SEQ ID NO: 88358 - DNA, 666 bp, synthetic construct; identical to SEQ ID NO: 88346
  misc_feature 1..666: note = Description of Artificial Sequence: Synthetic coding sequence
  source 1..666: mol_type = other DNA

SEQ ID NO: 88359 - DNA, 738 bp, synthetic construct; identical to SEQ ID NO: 88318
  misc_feature 1..738: note = Description of Artificial Sequence: Synthetic coding sequence
  source 1..738: mol_type = other DNA

SEQ ID NO: 88360 - DNA, 5478 bp, synthetic construct; identical to SEQ ID NO: 88292
  misc_feature 1..5478: note = Description of Artificial Sequence: Synthetic coding sequence
  source 1..5478: mol_type = other DNA

SEQ ID NO: 88361 - DNA, 735 bp, synthetic construct; identical to SEQ ID NO: 88329
  misc_feature 1..735: note = Description of Artificial Sequence: Synthetic coding sequence
  source 1..735: mol_type = other DNA

SEQ ID NO: 88362 - DNA, 735 bp, synthetic construct; identical to SEQ ID NO: 88329
  misc_feature 1..735: note = Description of Artificial Sequence: Synthetic coding sequence
  source 1..735: mol_type = other DNA

SEQ ID NO: 88363 - DNA, 666 bp, synthetic construct; identical to SEQ ID NO: 88346
  misc_feature 1..666: note = Description of Artificial Sequence: Synthetic coding sequence
  source 1..666: mol_type = other DNA

SEQ ID NO: 88364 - DNA, 666 bp, synthetic construct; identical to SEQ ID NO: 88346
  misc_feature 1..666: note = Description of Artificial Sequence: Synthetic coding sequence
  source 1..666: mol_type = other DNA

SEQ ID NO: 88365 - DNA, 5478 bp, synthetic construct; identical to SEQ ID NO: 88292
  misc_feature 1..5478: note = Description of Artificial Sequence: Synthetic coding sequence
  source 1..5478: mol_type = other DNA

SEQ ID NO: 88366 - DNA, 738 bp, synthetic construct; identical to SEQ ID NO: 88318
  misc_feature 1..738: note = Description of Artificial Sequence: Synthetic coding sequence
  source 1..738: mol_type = other DNA

SEQ ID NO: 88367 - DNA, 2238 bp, synthetic construct
  misc_feature 1..2238: note = Description of Artificial Sequence: Synthetic coding sequence
  source 1..2238: mol_type = other DNA
atggcctgcagacagagaggcggcagctggagccccagcggctggttcaacgccggctggagcacctacagaagcatcagcctgttcttcgccctggtgaccagcggcaacagcatcgacgtgagccagctggtgaaccccgccttccccggcaccgtgacctgcgacgagagagagatcaccgtggagttccccagcagccccggcaccaagaagtggcacgccagcgtggtggaccccctgggcctggacatgcccaactgcacctacatcctggaccccgagaagctgaccctgagagccacctacgacaactgcaccagaagagtgcacggcggccaccagatgaccatcagagtgatgaacaacagcgccgccctgagacacggcgccgtgatgtaccagttcttctgccccgccatgcaggtggaggagacccagggcctgagcgccagcaccatctgccagaaggacttcatgagcttcagcctgcccagagtgttcagcggcctggccgacgacagcaagggcaccaaggtgcagatgggctggagcatcgaggtgggcgacggcgccagagccaagaccctgaccctgcccgaggccatgaaggagggcttcagcctgctgatcgacaaccacagaatgaccttccacgtgcccttcaacgccaccggcgtgacccactacgtgcagggcaacagccacctgtacatggtgagcctgaagctgaccttcatcagccccggccagaaggtgatcttcagcagccaggccatctgcgcccccgaccccgtgacctgcaacgccacccacatgaccctgaccatccccgagttccccggcaagctgaagagcgtgagcttcgagaaccagaacatcgacgtgagccagctgcacgacaacggcatcgacctggaggccaccaacggcatgaagctgcacttcagcaagaccctgctgaagaccaagctgagcgagaagtgcctgctgcaccagttctacctggccagcctgaagctgaccttcctgctgagacccgagaccgtgagcatggtgatctaccccgagtgcctgtgcgagagccccgtgagcatcgtgaccggcgagctgtgcacccaggacggcttcatggacgtggaggtgtacagctaccagacccagcccgccctggacctgggcaccctgagagtgggcaacagcagctgccagcccgtgttcgaggcccagagccagggcctggtgagattccacatccccctgaacggctgcggcaccagatacaagttcgaggacgacaaggtggtgtacgagaacgagatccacgccctgtggaccgacttcccccccagcaagatcagcagagacagcgagttcagaatgaccgtgaagtgcagctacagcagaaacgacatgctgctgaacatcaacgtggagagcctgaccccccccgtggccagcgtgaagctgggccccttcaccctgatcctgcagagctaccccgacaacagctaccagcagccctacggcgagaacgagtaccccctggtgagattcctgagacagcccatctacatggaggtgagagtgctgaacagagacgaccccaacatcaagctggtgctggacgactgctgggccaccagcaccatggaccccgacagcttcccccagtggaacgtggtggtggacggctgcgcctacgacctggacaactaccagaccaccttccaccccgtgggcagcagcgtgacccaccccgaccactaccagagattcgacatgaaggccttcgccttcgtgagcgaggcccacgtgctgagcagcctggtgtacttccactgcagcgccctgatctgcaacagactgagccccgacagccccctgtgcagcgtgacctgccccgtgagcagcagacacagaagagccaccggcgccaccgaggccgagaagatgaccgtgagcctgcccggccccatcctgctgctgagcgacgacagcagcttcagaggcgtgggcagcagcgacctgaaggccagcggcagcagcggcgagaagagcagaagcgagaccggcgaggaggtgggcagcagaggcgccatggacaccaagggccacaagaccgccggcgacgtgggcagcaaggccgtggccgccgtggccgccttcgccggcgtggtggccaccctgggcttcatctactacctgtacgagaagagaaccgtgagcaaccactag

SEQ ID NO: 88368 - DNA, 1806 bp, synthetic construct
  misc_feature 1..1806: note = Description of Artificial Sequence: Synthetic coding sequence
  source 1..1806: mol_type = other DNA
atggccaagacccccagcgaccacctgctgagcaccctggaggagctggtgccctacgacttcgagaagttcaagttcaagctgcagaacaccagcgtgcagaaggagcacagcagaatccccagaagccagatccagagagccagacccgtgaagatggccaccctgctggtgacctactacggcgaggagtacgccgtgcagctgaccctgcaggtgctgagagccatcaaccagagactgctggccgaggagctgcacagagccgccatccaggacatgggcagctgctacgtggcccaggtgggcctggagctgctgatcagcaacaacccccccatcttcgccagcgagaccgccggcatcaccggcagaccccccgacaccgccgccagccccagatgccacgcccaggagggcgaccccgtggacggcacctgcgtgagagacagctgcagcttccccgaggccgtgagcggccacccccaggccagcggcagcagaagccccggctgccccagatgccaggacagccacgagagaaagagccccggcagcctgagcccccagcccctgccccagtgcaagagacacctgaagcaggtgcagctgctgttctgcgaggaccacgacgagcccatctgcctgatctgcagcctgagccaggagcaccagggccacagagtgagacccatcgaggaggtggccctggagcacaagaagaagatccagaagcagctggagcacctgaagaagctgagaaagagcggcgaggagcagagaagctacggcgaggagaaggccgtgagcttcctgaagcagaccgaggccctgaagcagagagtgcagagaaagctggagcaggtgtactacttcctggagcagcaggagcacttcttcgtggccagcctggaggacgtgggccagatggtgggccagatcagaaaggcctacgacaccagagtgagccaggacatcgccctgctggacgccctgatcggcgagctggaggccaaggagtgccagagcgagtgggagctgctgcaggacatcggcgacatcctgcacagagccaagaccgtgcccgtgcccgagaagtggaccaccccccaggagatcaagcagaagatccagctgctgcaccagaagagcgagttcgtggagaagagcaccaagtacttcagcgagaccctgagaagcgagatggagatgttcaacgtgcccgagctgatcggcgcccaggcccacgccgtgaacgtgatcctggacgccgagaccgcctaccccaacctgatcttcagcgacgacctgaagagcgtgagactgggcaacaagtgggagagactgcccgacggcccccagagattcgacagctgcatcatcgtgctgggcagccccagcttcctgagcggcagaagatactgggaggtggaggtgggcgacaagaccgcctggatcctgggcgcctgcaagaccagcatcagcagaaagggcaacatgaccctgagccccgagaacggctactgggtggtgatcatgatgaaggagaacgagtaccaggccagcagcgtgccccccaccagactgctgatcaaggagccccccaagagagtgggcatcttcgtggactacagagtgggcagcatcagcttctacaacgtgaccgccagaagccacatctacaccttcgccagctgcagcttcagcggccccctgcagcccatcttcagccccggcaccagagacggcggcaagaacaccgcccccctgaccatctgccccgtgggcggccagggccccgactag

SEQ ID NO: 88369 - DNA, 1239 bp, synthetic construct
  misc_feature 1..1239: note = Description of Artificial Sequence: Synthetic coding sequence
  source 1..1239: mol_type = other DNA
atggccaagacccccagcgaccacctgctgagcaccctggaggagctggtgccctacgacttcgagaagttcaagttcaagctgcagaacaccagcgtgcagaaggagcacagcagaatccccagaagccagatccagagagccagacccgtgaagatggccaccctgctggtgacctactacggcgaggagtacgccgtgcagctgaccctgcaggtgctgagagccatcaaccagagactgctggccgaggagctgcacagagccgccatccagggcagaccccccgacaccgccgccagccccagatgccacgcccaggagggcgaccccgtggacggcacctgcgtgagagacagctgcagcttccccgaggccgtgagcggccacccccaggccagcggcagcagaagccccggctgccccagatgccaggacagccacgagagaaagagccccggcagcctgagcccccagcccctgccccagtgcaagagacacctgaagcaggtgcagctgctgttctgcgaggaccacgacgagcccatctgcctgatctgcagcctgagccaggagcaccagggccacagagtgagacccatcgaggaggtggccctggagcacaagaagaagatccagaagcagctggagcacctgaagaagctgagaaagagcggcgaggagcagagaagctacggcgaggagaaggccgtgagcttcctgaagcagaccgaggccctgaagcagagagtgcagagaaagctggagcaggtgtactacttcctggagcagcaggagcacttcttcgtggccagcctggaggacgtgggccagatggtgggccagatcagaaaggcctacgacaccagagtgagccaggacatcgccctgctggacgccctgatcggcgagctggaggccaaggagtgccagagcgagtgggagctgctgcaggacatcggcgacatcctgcacagagccaagaccgtgcccgtgcccgagaagtggaccaccccccaggagatcaagcagaagatccagctgctgcaccagaagagcgagttcgtggagaagagcaccaagtacttcagcgagaccctgagaagcgagatggagatgttcaacgaccacagcccccagcacggcctgggcagctgggaggagagagactacacccagcacagcatgcagggccccaagcagggcgtgccctgcttcctggtggtgagaaccgtgtag

SEQ ID NO: 88370 - DNA, 1713 bp, synthetic construct
  misc_feature 1..1713: note = Description of Artificial Sequence: Synthetic coding sequence
  source 1..1713: mol_type = other DNA
atggccaagacccccagcgaccacctgctgagcaccctggaggagctggtgccctacgacttcgagaagttcaagttcaagctgcagaacaccagcgtgcagaaggagcacagcagaatccccagaagccagatccagagagccagacccgtgaagatggccaccctgctggtgacctactacggcgaggagtacgccgtgcagctgaccctgcaggtgctgagagccatcaaccagagactgctggccgaggagctgcacagagccgccatccagggcagaccccccgacaccgccgccagccccagatgccacgcccaggagggcgaccccgtggacggcacctgcgtgagagacagctgcagcttccccgaggccgtgagcggccacccccaggccagcggcagcagaagccccggctgccccagatgccaggacagccacgagagaaagagccccggcagcctgagcccccagcccctgccccagtgcaagagacacctgaagcaggtgcagctgctgttctgcgaggaccacgacgagcccatctgcctgatctgcagcctgagccaggagcaccagggccacagagtgagacccatcgaggaggtggccctggagcacaagaagaagatccagaagcagctggagcacctgaagaagctgagaaagagcggcgaggagcagagaagctacggcgaggagaaggccgtgagcttcctgaagcagaccgaggccctgaagcagagagtgcagagaaagctggagcaggtgtactacttcctggagcagcaggagcacttcttcgtggccagcctggaggacgtgggccagatggtgggccagatcagaaaggcctacgacaccagagtgagccaggacatcgccctgctggacgccctgatcggcgagctggaggccaaggagtgccagagcgagtgggagctgctgcaggacatcggcgacatcctgcacagagccaagaccgtgcccgtgcccgagaagtggaccaccccccaggagatcaagcagaagatccagctgctgcaccagaagagcgagttcgtggagaagagcaccaagtacttcagcgagaccctgagaagcgagatggagatgttcaacgtgcccgagctgatcggcgcccaggcccacgccgtgaacgtgatcctggacgccgagaccgcctaccccaacctgatcttcagcgacgacctgaagagcgtgagactgggcaacaagtgggagagactgcccgacggcccccagagattcgacagctgcatcatcgtgctgggcagccccagcttcctgagcggcagaagatactgggaggtggaggtgggcgacaagaccgcctggatcctgggcgcctgcaagaccagcatcagcagaaagggcaacatgaccctgagccccgagaacggctactgggtggtgatcatgatgaaggagaacgagtaccaggccagcagcgtgccccccaccagactgctgatcaaggagccccccaagagagtgggcatcttcgtggactacagagtgggcagcatcagcttctacaacgtgaccgccagaagccacatctacaccttcgccagctgcagcttcagcggccccctgcagcccatcttcagccccggcaccagagacggcggcaagaacaccgcccccctgaccatctgccccgtgggcggccagggccccgactag

SEQ ID NO: 88371 - DNA, 1209 bp, synthetic construct
  misc_feature 1..1209: note = Description of Artificial Sequence: Synthetic coding sequence
  source 1..1209: mol_type = other DNA
atggccaagacccccagcgaccacctgctgagcaccctggaggagctggtgccctacgacttcgagaagttcaagttcaagctgcagaacaccagcgtgcagaaggagcacagcagaatccccagaagccagatccagagagccagacccgtgaagatggccaccctgctggtgacctactacggcgaggagtacgccgtgcagctgaccctgcaggtgctgagagccatcaaccagagactgctggccgaggagctgcacagagccgccatccagggcagaccccccgacaccgccgccagccccagatgccacgcccaggagggcgaccccgtggacggcacctgcgtgagagacagctgcagcttccccgaggccgtgagcggccacccccaggccagcggcagcagaagccccggctgccccagatgccaggacagccacgagagaaagagccccggcagcctgagcccccagcccctgccccagtgcaagagacacctgaagcaggtgcagctgctgttctgcgaggaccacgacgagcccatctgcctgatctgcagcctgagccaggagcaccagggccacagagtgagacccatcgaggaggtggccctggagcacaagaagaagatccagaagcagctggagcacctgaagaagctgagaaagagcggcgaggagcagagaagctacggcgaggagaaggccgtgagcttcctgaagcagaccgaggccctgaagcagagagtgcagagaaagctggagcaggtgtactacttcctggagcagcaggagcacttcttcgtggccagcctggaggacgtgggccagatggtgggccagatcagaaaggcctacgacaccagagtgagccaggacatcgccctgctggacgccctgatcggcgagctggaggccaaggagtgccagagcgagtgggagctgctgcaggacatcggcgacatcctgcacagagccaagaccgtgcccgtgcccgagaagtggaccaccccccaggagatcaagcagaagatccagctgctgcaccagaagagcgagttcgtggagaagagcaccaagtacttcagcgagaccctgagaagcgagatggagatgttcaacggcgagagcagcggcaacggcgtgtgctggcccggcgtggtggccgtgttcccctgcgccgtggacctgagaggccccatctag

SEQ ID NO: 88372 - DNA, 1338 bp, synthetic construct
  misc_feature 1..1338: note = Description of Artificial Sequence: Synthetic coding sequence
  source 1..1338: mol_type = other DNA
atggccaagacccccagcgaccacctgctgagcaccctggaggagctggtgccctacgacttcgagaagttcaagttcaagctgcagaacaccagcgtgcagaaggagcacagcagaatccccagaagccagatccagagagccagacccgtgaagatggccaccctgctggtgacctactacggcgaggagtacgccgtgcagctgaccctgcaggtgctgagagccatcaaccagagactgctggccgaggagctgcacagagccgccatccagggcagaccccccgacaccgccgccagccccagatgccacgcccaggagggcgaccccgtggacggcacctgcgtgagagacagctgcagcttccccgaggccgtgagcggccacccccaggccagcggcagcagaagccccggctgccccagatgccaggacagccacgagagaaagagccccggcagcctgagcccccagcccctgccccagtgcaagagacacctgaagcaggtgcagctgctgttctgcgaggaccacgacgagcccatctgcctgatctgcagcctgagccaggagcaccagggccacagagtgagacccatcgaggaggtggccctggagcacaagaagaagatccagaagcagctggagcacctgaagaagctgagaaagagcggcgaggagcagagaagctacggcgaggagaaggccgtgagcttcctgaagcagaccgaggccctgaagcagagagtgcagagaaagctggagcaggtgtactacttcctggagcagcaggagcacttcttcgtggccagcctggaggacgtgggccagatggtgggccagatcagaaaggcctacgacaccagagtgagccaggacatcgccctgctggacgccctgatcggcgagctggaggccaaggagtgccagagcgagtgggagctgctgcaggacatcggcgacatcctgcacagagccaagaccgtgcccgtgcccgagaagtggaccaccccccaggagatcaagcagaagatccagctgctgcaccagaagagcgagttcgtggagaagagcaccaagtacttcagcgagaccctgagaagcgagatggagatgttcaacgaccacagcccccagcacggcctgggcagctgggaggagagagactacacccagcacagcatgcagggccccaagcagggcgtgccctgcctgagcctgctgagcggccagtgcaacctggcccccctgaacgccaacgcccaggacttcttcccctacctgatcttcctgagaagcagcggcgccgactggagaagcggcacctgctgctag

SEQ ID NO: 88373 - DNA, 2067 bp, synthetic construct
  misc_feature 1..2067: note = Description of Artificial Sequence: Synthetic coding sequence
  source 1..2067: mol_type = other DNA
atggccaagacccccagcgaccacctgctgagcaccctggaggagctggtgccctacgacttcgagaagttcaagttcaagctgcagaacaccagcgtgcagaaggagcacagcagaatccccagaagccagatccagagagccagacccgtgaagatggccaccctgctggtgacctactacggcgaggagtacgccgtgcagctgaccctgcaggtgctgagagccatcaaccagagactgctggccgaggagctgcacagagccgccatccaggagtacagcacccaggagaacggcaccgacgacagcgccgccagcagcagcctgggcgagaacaagcccagaagcctgaagacccccgaccaccccgagggcaacgagggcaacggccccagaccctacggcggcggcgccgccagcctgagatgcagccagcccgaggccggcagaggcctgagcagaaagcccctgagcaagagaagagagaaggccagcgagggcctggacgcccagggcaagcccagaaccagaagccccgccctgcccggcggcagaagccccggcccctgcagagccctggagggcggccaggccgaggtgagactgagaagaaacgccagcagcgccggcagactgcagggcctggccggcggcgcccccggccagaaggagtgcagacccttcgaggtgtacctgcccagcggcaagatgagacccagaagcctggaggtgaccatcagcaccggcgagaaggcccccgccaaccccgagatcctgctgaccctggaggagaagaccgccgccaacctggacagcgccaccgagcccagagccagacccacccccgacggcggcgccagcgccgacctgaaggagggccccggcaaccccgagcacagcgtgaccggcagaccccccgacaccgccgccagccccagatgccacgcccaggagggcgaccccgtggacggcacctgcgtgagagacagctgcagcttccccgaggccgtgagcggccacccccaggccagcggcagcagaagccccggctgccccagatgccaggacagccacgagagaaagagccccggcagcctgagcccccagcccctgccccagtgcaagagacacctgaagcaggtgcagctgctgttctgcgaggaccacgacgagcccatctgcctgatctgcagcctgagccaggagcaccagggccacagagtgagacccatcgaggaggtggccctggagcacaagaagaagatccagaagcagctggagcacctgaagaagctgagaaagagcggcgaggagcagagaagctacggcgaggagaaggccgtgagcttcctgaagcagaccgaggccctgaagcagagagtgcagagaaagctggagcaggtgtactacttcctggagcagcaggagcacttcttcgtggccagcctggaggacgtgggccagatggtgggccagatcagaaaggcctacgacaccagagtgagccaggacatcgccctgctggacgccctgatcggcgagctggaggccaaggagtgccagagcgagtgggagctgctgcaggacatcggcgacatcctgcacagagccaagaccgtgcccgtgcccgagaagtggaccaccccccaggagatcaagcagaagatccagctgctgcaccagaagagcgagttcgtggagaagagcaccaagtacttcagcgagaccctgagaagcgagatggagatgttcaacgtgcccgagctgatcggcgcccaggcccacgccgtgaacgtgatcctggacgccgagaccgcctaccccaacctgatcttcagcgacgacctgaagagcgtgagactgggcaacaagtgggagagactgcccgacggcccccagagattcgacagctgcatcatcgtgctgggcagccccagcttcctgagcggcagaagatactgggaggtggaggtgggcgacaagagattcagctgcctgagcctgagaagcagctgggactacagaagaccccccccctgccccgccaacttcctgcacttctag

SEQ ID NO: 88374 - DNA, 2796 bp, synthetic construct
  misc_feature 1..2796: note = Description of Artificial Sequence: Synthetic coding sequence
  source 1..2796: mol_type = other DNA
atgccccccctgaagagccccgccgccttccacgagcagagaagaagcctggagagagccagaaccgaggactacctgaagagaaagatcagaagcagacccgagagaagcgagctggtgagaatgcacatcctggaggagaccagcgccgagcccagcctgcaggccaagcagctgaagctgaagagagccagactggccgacgacctgaacgagaagatcgcccagagacccggccccatggagctggtggagaagaacatcctgcccgtggagagcagcctgaaggaggccatcatcgtgggccaggtgaactaccccaaggtggccgacagcagcagcttcgacgaggacagcagcgacgccctgagccccgagcagcccgccagccacgagagccagggcagcgtgcccagccccctggaggccagagtgagcgagcccctgctgagcgccaccagcgccagccccacccaggtggtgagccagctgcccatgggcagagacagcagagagatgctgttcctggccgagcagccccccctgccccccccccccctgctgccccccagcctgaccaacggcaccaccatccccaccgccaagagcacccccaccctgatcaagcagagccagcccaagagcgccagcgagaagagccagagaagcaagaaggccaaggagctgaagcccaaggtgaagaagctgaagtaccaccagtacatcccccccgaccagaagcaggacagaggcgccccccccatggacagcagctacgccaagatcctgcagcagcagcagctgttcctgcagctgcagatcctgaaccagcagcagcagcagcaccacaactaccaggccatcctgcccgccccccccaagagcgccggcgaggccctgggcagcagcggcaccccccccgtgagaagcctgagcaccaccaacagcagcagcagcagcggcgcccccggcccctgcggcctggccagacagaacagcaccagcctgaccggcaagcccggcgccctgcccgccaacctggacgacatgaaggtggccgagctgaagcaggagctgaagctgagaagcctgcccgtgagcggcaccaagaccgagctgatcgagagactgagagcctaccaggaccagatcagccccgtgcccggcgcccccaaggcccccgccgccaccagcatcctgcacaaggccggcgaggtggtggtggccttccccgccgccagactgagcaccggccccgccctggtggccgccggcctggcccccgccgaggtggtggtggccaccgtggccagcagcggcgtggtgaagttcggcagcaccggcagcaccccccccgtgagccccacccccagcgagagaagcctgctgagcaccggcgacgagaacagcacccccggcgacaccttcggcgagatggtgaccagccccctgacccagctgaccctgcaggccagccccctgcagatcctggtgaaggaggagggccccagagccggcagctgctgcctgagccccggcggcagagccgagctggagggcagagacaaggaccagatgctgcaggagaaggacaagcagatcgaggccctgaccagaatgctgagacagaagcagcagctggtggagagactgaagctgcagctggagcaggagaagagagcccagcagcccgcccccgcccccgcccccctgggcacccccgtgaagcaggagaacagcttcagcagctgccagctgagccagcagcccctgggccccgcccaccccttcaaccccagcctggccgcccccgccaccaaccacatcgacccctgcgccgtggcccccggcccccccagcgtggtggtgaagcaggaggccctgcagcccgagcccgagcccgtgcccgccccccagctgctgctgggcccccagggccccagcctgatcaagggcgtggccccccccaccctgatcaccgacagcaccggcacccacctggtgctgaccgtgaccaacaagaacgccgacagccccggcctgagcagcggcagcccccagcagcccagcagccagcccggcagccccgcccccgcccccagcgcccagatggacctggagcaccccctgcagcccctgttcggcacccccaccagcctgctgaagaaggagccccccggctacgaggaggccatgagccagcagcccaagcagcaggagaacggcagcagcagccagcagatggacgacctgttcgacatcctgatccagagcggcgagatcagcgccgacttcaaggagccccccagcctgcccggcaaggagaagcccagccccaagaccgtgtgcggcagccccctggccgcccagcccagccccagcgccgagctgccccaggccgccccccccccccccggcagccccagcctgcccggcagactggaggacttcctggagagcagcaccggcctgcccctgctgaccagcggccacgacggccccgagcccctgagcctgatcgacgacctgcacagccagatgctgagcagcaccgccatcctggaccacccccccagccccatggacaccagcgagctgcacttcgtgcccgagcccagcagcaccatgggcctggacctggccgacggccacctggacagcatggactggctggagctgagcagcggcggccccgtgctgagcctggcccccctgagcaccaccgcccccagcctgttcagcaccgacttcctggacggccacgacctgcagctgcactgggacagctgcctgtag

SEQ ID NO: 88375 - DNA, 2397 bp, synthetic construct
  misc_feature 1..2397: note = Description of Artificial Sequence: Synthetic coding sequence
  source 1..2397: mol_type = other DNA
atgccccccctgaagagccccgccgccttccacgagcagagaagaagcctggagagagccagaaccgaggactacctgaagagaaagatcagaagcagacccgagagaagcgagctggtgagaatgcacatcctggaggagaccagcgccgagcccagcctgcaggccaagcagctgaagctgaagagagccagactggccgacgacctgaacgagaagatcgcccagagacccggccccatggagctggtggagaagaacatcctgcccgtggagagcagcctgaaggaggccatcatcgtgggccaggtgaactaccccaaggtggccgacagcagcagcttcgacgaggacagcagcgacgccctgagccccgagcagcccgccagccacgagagccagggcagcgtgcccagccccctggaggccagagtgagcgagcccctgctgagcgccaccagcgccagccccacccaggtggtgagccagctgcccatgggcagagacagcagagagatgctgttcctggccgagcagccccccctgccccccccccccctgctgccccccagcctgaccaacggcaccaccatccccaccgccaagagcacccccaccctgatcaagcagagccagcccaagagcgccagcgagaagagccagagaagcaagaaggccaaggagctgaagcccaaggtgaagaagctgaagtaccaccagtacatcccccccgaccagaagcaggacagaggcgccccccccatggacagcagctacgccaagatcctgcagcagcagcagctgttcctgcagctgcagatcctgaaccagcagcagcagcagcaccacaactaccaggccatcctgcccgccccccccaagagcgccggcgaggccctgggcagcagcggcaccccccccgtgagaagcctgagcaccaccaacagcagcagcagcagcggcgcccccggcccctgcggcctggccagacagaacagcaccagcctgaccggcaagcccggcgccctgcccgccaacctggacgacatgaaggtggccgagctgaagcaggagctgaagctgagaagcctgcccgtgagcggcaccaagaccgagctgatcgagagactgagagcctaccaggaccagatcagccccgtgcccggcgcccccaaggcccccgccgccaccagcatcctgcacaaggccggcgaggtggtggtggccttccccgccgccagactgagcaccggccccgccctggtggccgccggcctggcccccgccgaggtggtggtggccaccgtggccagcagcggcgtggtgaagttcggcagcaccggcagcaccccccccgtgagccccacccccagcgagagaagcctgctgagcaccggcgacgagaacagcacccccggcgacaccttcggcgagatggtgaccagccccctgacccagctgaccctgcaggccagccccctgcagatcctggtgaaggaggagggccccagagccggcagctgctgcctgagccccggcggcagagccgagctggagggcagagacaaggaccagatgctgcaggagaaggacaagcagatcgaggccctgaccagaatgctgagacagaagcagcagctggtggagagactgaagctgcagctggagcaggagaagagagcccagcagcccgcccccgcccccgcccccctgggcacccccgtgaagcaggagaacagcttcagcagctgccagctgagccagcagcccctgggccccgcccaccccttcaaccccagcctggccgcccccgccaccaaccacatcgacccctgcgccgtggcccccggcccccccagcgtggtggtgaagcaggaggccctgcagcccgagcccgagcccgtgcccgccccccagctgctgctgggcccccagggccccagcctgatcaagggcgtggccccccccaccctgatcaccgacagcaccggcacccacctggtgctgaccgtgaccaacaagaacgccgacagccccggcctgagcagcggcagcccccagcagcccagcagccagcccggcagccccgcccccgcccccagcgcccagatggacctggagcaccccctgcagcccctgttcggcacccccaccagcctgctgaagaaggagccccccggctacgaggaggccatgagccagcagcccaagcagcaggagaacggcagcagcagccagcagatggacgacctgttcgacatcctgatccagagcggcggcaaccccagaaacttcagcagattccagggcgccgccatccccgccagagagggcgaggccatccccgaggacagcctgtgggtgccccccggcagcaccgccatcaccttctgctag

SEQ ID NO: 88376 - DNA, 2646 bp, synthetic construct
  misc_feature 1..2646: note = Description of Artificial Sequence: Synthetic coding sequence
  source 1..2646: mol_type = other DNA
atgccccccctgaagagccccgccgccttccacgagcagagaagaagcctggagagagccagaaccgaggactacctgaagagaaagatcagaagcagacccgagagaagcgagctggtgagaatgcacatcctggaggagaccagcgccgagcccagcctgcaggccaagcagctgaagctgaagagagccagactggccgacgacctgaacgagaagatcgcccagagacccggccccatggagctggtggagaagaacatcctgcccgtggagagcagcctgaaggaggccatcatcgtgggccaggtgaactaccccaaggtggccgacagcagcagcttcgacgaggacagcagcgacgccctgagccccgagcagcccgccagccacgagagccagggcagcgtgcccagccccctggaggccagagtgagcgagcccctgctgagcgccaccagcgccagccccacccagcagagccagcccaagagcgccagcgagaagagccagagaagcaagaaggccaaggagctgaagcccaaggtgaagaagctgaagtaccaccagtacatcccccccgaccagaagcaggacagaggcgccccccccatggacagcagctacgccaagatcctgcagcagcagcagctgttcctgcagctgcagatcctgaaccagcagcagcagcagcaccacaactaccaggccatcctgcccgccccccccaagagcgccggcgaggccctgggcagcagcggcaccccccccgtgagaagcctgagcaccaccaacagcagcagcagcagcggcgcccccggcccctgcggcctggccagacagaacagcaccagcctgaccggcaagcccggcgccctgcccgccaacctggacgacatgaaggtggccgagctgaagcaggagctgaagctgagaagcctgcccgtgagcggcaccaagaccgagctgatcgagagactgagagcctaccaggaccagatcagccccgtgcccggcgcccccaaggcccccgccgccaccagcatcctgcacaaggccggcgaggtggtggtggccttccccgccgccagactgagcaccggccccgccctggtggccgccggcctggcccccgccgaggtggtggtggccaccgtggccagcagcggcgtggtgaagttcggcagcaccggcagcaccccccccgtgagccccacccccagcgagagaagcctgctgagcaccggcgacgagaacagcacccccggcgacaccttcggcgagatggtgaccagccccctgacccagctgaccctgcaggccagccccctgcagatcctggtgaaggaggagggccccagagccggcagctgctgcctgagccccggcggcagagccgagctggagggcagagacaaggaccagatgctgcaggagaaggacaagcagatcgaggccctgaccagaatgctgagacagaagcagcagctggtggagagactgaagctgcagctggagcaggagaagagagcccagcagcccgcccccgcccccgcccccctgggcacccccgtgaagcaggagaacagcttcagcagctgccagctgagccagcagcccctgggccccgcccaccccttcaaccccagcctggccgcccccgccaccaaccacatcgacccctgcgccgtggcccccggcccccccagcgtggtggtgaagcaggaggccctgcagcccgagcccgagcccgtgcccgccccccagctgctgctgggcccccagggccccagcctgatcaagggcgtggccccccccaccctgatcaccgacagcaccggcacccacctggtgctgaccgtgaccaacaagaacgccgacagccccggcctgagcagcggcagcccccagcagcccagcagccagcccggcagccccgcccccgcccccagcgcccagatggacctggagcaccccctgcagcccctgttcggcacccccaccagcctgctgaagaaggagccccccggctacgaggaggccatgagccagcagcccaagcagcaggagaacggcagcagcagccagcagatggacgacctgttcgacatcctgatccagagcggcgagatcagcgccgacttcaaggagccccccagcctgcccggcaaggagaagcccagccccaagaccgtgtgcggcagccccctggccgcccagcccagccccagcgccgagctgccccaggccgccccccccccccccggcagccccagcctgcccggcagactggaggacttcctggagagcagcaccggcctgcccctgctgaccagcggccacgacggccccgagcccctgagcctgatcgacgacctgcacagccagatgctgagcagcaccgccatcctggaccacccccccagccccatggacaccagcgagctgcacttcgtgcccgagcccagcagcaccatgggcctggacctggccgacggccacctggacagcatggactggctggagctgagcagcggcggccccgtgctgagcctggcccccctgagcaccaccgcccccagcctgttcagcaccgacttcctggacggccacgacctgcagctgcactgggacagctgcctgtag

SEQ ID NO: 88377 - DNA, 2796 bp, synthetic construct; identical to SEQ ID NO: 88374
  misc_feature 1..2796: note = Description of Artificial Sequence: Synthetic coding sequence
  source 1..2796: mol_type = other DNA

SEQ ID NO: 88378 - DNA, 258 bp, synthetic construct
  misc_feature 1..258: note = Description of Artificial Sequence: Synthetic coding sequence
  source 1..258: mol_type = other DNA
atgctgagcagcaccgccatcctggaccacccccccagccccatggacaccagcgagctgcacttcgtgcccgagcccagcagcaccatgggcctggacctggccgacggccacctggacagcatggactggctggagctgagcagcggcggccccgtgctgagcctggcccccctgagcaccaccgcccccagcctgttcagcaccgacttcctggacggccacgacctgcagctgcactgggacagctgcctgtag

SEQ ID NO: 88379 - DNA, 1524 bp, synthetic construct
  misc_feature 1..1524: note = Description of Artificial Sequence: Synthetic coding sequence
  source 1..1524: mol_type = other DNA
atggccggcagaggcagcctggtgagctggagagccttccacggctgcgacagcgccgaggagctgcccagagtgagccccagattcctgagagcctggcaccccccccccgtgagcgccagaatgcccaccagaagatgggcccccggcacccagtgcatcaccaagtgcgagcacaccagacccaagcccggcgagctggccttcagaaagggcgacgtggtgaccatcctggaggcctgcgagaacaagagctggtacagagtgaagcaccacaccagcggccaggagggcctgctggccgccggcgccctgagagagagagaggccctgagcgccgaccccaagctgagcctgatgccctggttccacggcaagatcagcggccaggaggccgtgcagcagctgcagccccccgaggacggcctgttcctggtgagagagagcgccagacaccccggcgactacgtgctgtgcgtgagcttcggcagagacgtgatccactacagagtgctgcacagagacggccacctgaccatcgacgaggccgtgttcttctgcaacctgatggacatggtggagcactacagcaaggacaagggcgccatctgcaccaagctggtgagacccaagagaaagcacggcaccaagagcgccgaggaggagctggccagagccggctggctgctgaacctgcagcacctgaccctgggcgcccagatcggcgagggcgagttcggcgccgtgctgcagggcgagtacctgggccagaaggtggccgtgaagaacatcaagtgcgacgtgaccgcccaggccttcctggacgagaccgccgtgatgaccaagatgcagcacgagaacctggtgagactgctgggcgtgatcctgcaccagggcctgtacatcgtgatggagcacgtgagcaagggcaacctggtgaacttcctgagaaccagaggcagagccctggtgaacaccgcccagctgctgcagttcagcctgcacgtggccgagggcatggagtacctggagagcaagaagctggtgcacagagacctggccgccagaaacatcctggtgagcgaggacctggtggccaaggtgagcgacttcggcctggccaaggccgagagaaagggcctggacagcagcagactgcccgtgaagtggaccgcccccgaggccctgaagcacggcaagttcaccagcaagagcgacgtgtggagcttcggcgtgctgctgtgggaggtgttcagctacggcagagccccctaccccaagatgagcctgaaggaggtgagcgaggccgtggagaagggctacagaatggagccccccgagggctgccccggccccgtgcacgtgctgatgagcagctgctgggaggccgagcccgccagaagaccccccttcagaaagctggccgagaagctggccagagagctgagaagcgccggcgcccccgccagcgtgagcggccaggacgccgacggcagcaccagccccagaagccaggagccctag

SEQ ID NO: 88380 - DNA, 1401 bp, synthetic construct
  misc_feature 1..1401: note = Description of Artificial Sequence: Synthetic coding sequence
  source 1..1401: mol_type = other DNA
atgcccaccagaagatgggcccccggcacccagtgcatcaccaagtgcgagcacaccagacccaagcccggcgagctggccttcagaaagggcgacgtggtgaccatcctggaggcctgcgagaacaagagctggtacagagtgaagcaccacaccagcggccaggagggcctgctggccgccggcgccctgagagagagagaggccctgagcgccgaccccaagctgagcctgatgccctggttccacggcaagatcagcggccaggaggccgtgcagcagctgcagccccccgaggacggcctgttcctggtgagagagagcgccagacaccccggcgactacgtgctgtgcgtgagcttcggcagagacgtgatccactacagagtgctgcacagagacggccacctgaccatcgacgaggccgtgttcttctgcaacctgatggacatggtggagcactacagcaaggacaagggcgccatctgcaccaagctggtgagacccaagagaaagcacggcaccaagagcgccgaggaggagctggccagagccggctggctgctgaacctgcagcacctgaccctgggcgcccagatcggcgagggcgagttcggcgccgtgctgcagggcgagtacctgggccagaaggtggccgtgaagaacatcaagtgcgacgtgaccgcccaggccttcctggacgagaccgccgtgatgaccaagatgcagcacgagaacctggtgagactgctgggcgtgatcctgcaccagggcctgtacatcgtgatggagcacgtgagcaagggcaacctggtgaacttcctgagaaccagaggcagagccctggtgaacaccgcccagctgctgcagttcagcctgcacgtggccgagggcatggagtacctggagagcaagaagctggtgcacagagacctggccgccagaaacatcctggtgagcgaggacctggtggccaaggtgagcgacttcggcctggccaaggccgagagaaagggcctggacagcagcagactgcccgtgaagtggaccgcccccgaggccctgaagcacggcaagttcaccagcaagagcgacgtgtggagcttcggcgtgctgctgtgggaggtgttcagctacggcagagccccctaccccaagatgagcctgaaggaggtgagcgaggccgtggagaagggctacagaatggagccccccgagggctgccccggccccgtgcacgtgctgatgagcagctgctgggaggccgagcccgccagaagaccccccttcagaaagctggccgagaagctggccagagagctgagaagcgccggcgcccccgccagcgtgagcggccaggacgccgacggcagcaccagccccagaagccaggagccctag

SEQ ID NO: 88381 - DNA, 1527 bp, synthetic construct
  misc_feature 1..1527: note = Description of Artificial Sequence: Synthetic coding sequence
  source 1..1527: mol_type = other DNA
atgcagggccacttccccgccgagagaagagagggcagacccagaagaggcaccagaggccagcagcagctgctggtgagccccagattcctgagagcctggcaccccccccccgtgagcgccagaatgcccaccagaagatgggcccccggcacccagtgcatcaccaagtgcgagcacaccagacccaagcccggcgagctggccttcagaaagggcgacgtggtgaccatcctggaggcctgcgagaacaagagctggtacagagtgaagcaccacaccagcggccaggagggcctgctggccgccggcgccctgagagagagagaggccctgagcgccgaccccaagctgagcctgatgccctggttccacggcaagatcagcggccaggaggccgtgcagcagctgcagccccccgaggacggcctgttcctggtgagagagagcgccagacaccccggcgactacgtgctgtgcgtgagcttcggcagagacgtgatccactacagagtgctgcacagagacggccacctgaccatcgacgaggccgtgttcttctgcaacctgatggacatggtggagcactacagcaaggacaagggcgccatctgcaccaagctggtgagacccaagagaaagcacggcaccaagagcgccgaggaggagctggccagagccggctggctgctgaacctgcagcacctgaccctgggcgcccagatcggcgagggcgagttcggcgccgtgctgcagggcgagtacctgggccagaaggtggccgtgaagaacatcaagtgcgacgtgaccgcccaggccttcctggacgagaccgccgtgatgaccaagatgcagcacgagaacctggtgagactgctgggcgtgatcctgcaccagggcctgtacatcgtgatggagcacgtgagcaagggcaacctggtgaacttcctgagaaccagaggcagagccctggtgaacaccgcccagctgctgcagttcagcctgcacgtggccgagggcatggagtacctggagagcaagaagctggtgcacagagacctggccgccagaaacatcctggtgagcgaggacctggtggccaaggtgagcgacttcggcctggccaaggccgagagaaagggcctggacagcagcagactgcccgtgaagtggaccgcccccgaggccctgaagcacggcaagttcaccagcaagagcgacgtgtggagcttcggcgtgctgctgtgggaggtgttcagctacggcagagccccctaccccaagatgagcctgaaggaggtgagcgaggccgtggagaagggctacagaatggagccccccgagggctgccccggccccgtgcacgtgctgatgagcagctgctgggaggccgagcccgccagaagaccccccttcagaaagctggccgagaagctggccagagagctgagaagcgccggcgcccccgccagcgtgagcggccaggacgccgacggcagcaccagccccagaagccaggagccctag

SEQ ID NO: 88382 - DNA, 1134 bp, synthetic construct
  misc_feature 1..1134: note = Description of Artificial Sequence: Synthetic coding sequence
  source 1..1134: mol_type = other DNA
atgacccaggagcccttcagagaggagctggcctacgacagaatgcccaccctggagagaggcagacaggaccccgccagctacgcccccgacgccaagcccagcgacctgcagctgagcaagagactgcccccctgcttcagccacaagacctgggtgttcagcgtgctgatgggcagctgcctgctggtgaccagcggcttcagcctgtacctgggcaacgtgttccccgccgagatggactacctgagatgcgccgccggcagctgcatccccagcgccatcgtgagcttcaccgtgagcagaagaaacgccaacgtgatccccaacttccagatcctgttcgtgagcaccttcgccgtgaccaccacctgcctgatctggttcggctgcaagctggtgctgaaccccagcgccatcaacatcaacttcaacctgatcctgctgctgctgctggagctgctgatggccgccaccgtgatcatcgccgccagaagcagcgaggaggactgcaagaagaagaagggcagcatgagcgacagcgccaacatcctggacgaggtgcccttccccgccagagtgctgaagagctacagcgtggtggaggtgatcgccggcatcagcgccgtgctgggcggcatcatcgccctgaacgtggacgacagcgtgagcggcccccacctgagcgtgaccttcttctggatcctggtggcctgcttccccagcgccatcgccagccacgtggccgccgagtgccccagcaagtgcctggtggaggtgctgatcgccatcagcagcctgaccagccccctgctgttcaccgccagcggctacctgagcttcagcatcatgagaatcgtggagatgttcaaggactacccccccgccatcaagcccagctacgacgtgctgctgctgctgctgctgctggtgctgctgctgcaggccggcctgaacaccggcaccgccatccagtgcgtgagattcaaggtgagcgccagactgcagggcgccagctgggacacccagaacggcccccaggagagactggccggcgaggtggccagaagccccctgaaggagttcgacaaggagaaggcctggagagccgtggtggtgcagatggcccagtag

SEQ ID NO: 88383 - DNA, 1134 bp, synthetic construct; identical to SEQ ID NO: 88382
  misc_feature 1..1134: note = Description of Artificial Sequence: Synthetic coding sequence
  source 1..1134: mol_type = other DNA

SEQ ID NO: 88384 - DNA, 1044 bp, synthetic construct
  misc_feature 1..1044: note = Description of Artificial Sequence: Synthetic coding sequence
  source 1..1044: mol_type = other DNA
atgacccaggagcccttcagagaggagctggcctacgacagaatgcccaccctggagagaggcagacaggaccccgccagctacgcccccgacgccaagcccagcgacctgcagctgagcaagagactgcccccctgcttcagccacaagacctgggtgttcagcgtgctgatgggctgcatccccagcgccatcgtgagcttcaccgtgagcagaagaaacgccaacgtgatccccaacttccagatcctgttcgtgagcaccttcgccgtgaccaccacctgcctgatctggttcggctgcaagctggtgctgaaccccagcgccatcaacatcaacttcaacctgatcctgctgctgctgctggagctgctgatggccgccaccgtgatcatcgccgccagaagcagcgaggaggactgcaagaagaagaagggcagcatgagcgacagcgccaacatcctggacgaggtgcccttccccgccagagtgctgaagagctacagcgtggtggaggtgatcgccggcatcagcgccgtgctgggcggcatcatcgccctgaacgtggacgacagcgtgagcggcccccacctgagcgtgaccttcttctggatcctggtggcctgcttccccagcgccatcgccagccacgtggccgccgagtgccccagcaagtgcctggtggaggtgctgatcgccatcagcagcctgaccagccccctgctgttcaccgccagcggctacctgagcttcagcatcatgagaatcgtggagatgttcaaggactacccccccgccatcaagcccagctacgacgtgctgctgctgctgctgctgctggtgctgctgctgcaggccggcctgaacaccggcaccgccatccagtgcgtgagattcaaggtgagcgccagactgcagggcgccagctgggacacccagaacggcccccaggagagactggccggcgaggtggccagaagccccctgaaggagttcgacaaggagaaggcctggagagccgtggtggtgcagatggcccagtag

SEQ ID NO: 88385 - DNA, 672 bp, synthetic construct
  misc_feature 1..672: note = Description of Artificial Sequence: Synthetic coding sequence
  source 1..672: mol_type = other DNA
atgacccaggagcccttcagagaggagctggcctacgacagaatgcccaccctggagagaggcagacaggaccccgccagctacgcccccgacgccaagcccagcgacctgcagctgagcaagagactgcccccctgcttcagccacaagacctgggtgttcagcgtgctgatgggctgcatccccagcgccatcgtgagcttcaccgtgagcagaagaaacgccaacgtgatccccaacttccagatcctgttcgtgagcaccttcgccgtgaccaccacctgcctgatctggttcggctgcaagctggtgctgaaccccagcgccatcaacatcaacttcaacctgatcctgctgctgctgctggagctgctgatggccgccaccgtgatcatcgccgccagaagcagcgaggaggactgcaagaagaagaagggcagcatgagcgacagcgccaacatcctggacgaggtgcccttccccgccagagtgctgaagagctacagcgtggtggaggtgatcgccggcatcagcgccgtgctgggcggcatcatcgccctgaacgtggacgacagcgtgagcggcccccacctgagcgtgaccttcttctggatcctggtggcctgcttccccagcgccatcgccagccacgtggccgccgagtgcccctag

SEQ ID NO: 88386 - DNA, 978 bp, synthetic construct
  misc_feature 1..978: note = Description of Artificial Sequence: Synthetic coding sequence
  source 1..978: mol_type = other DNA
atgacccaggagcccttcagagaggagctggcctacgacagaatgcccaccctggagagaggcagacaggaccccgccagctacgcccccgacgccaagcccagcgacctgcagctgagcaagagactgcccccctgcttcagccacaagacctgggtgttcagcgtgctgatgggcagctgcctgctggtgaccagcggcttcagcctgtacctgggcaacgtgttccccgccgagatggactacctgagatgcgccgccggcagcatcaacttcaacctgatcctgctgctgctgctggagctgctgatggccgccaccgtgatcatcgccgccagaagcagcgaggaggactgcaagaagaagaagggcagcatgagcgacagcgccaacatcctggacgaggtgcccttccccgccagagtgctgaagagctacagcgtggtggaggtgatcgccggcatcagcgccgtgctgggcggcatcatcgccctgaacgtggacgacagcgtgagcggcccccacctgagcgtgaccttcttctggatcctggtggcctgcttccccagcgccatcgccagccacgtggccgccgagtgccccagcaagtgcctggtggaggtgctgatcgccatcagcagcctgaccagccccctgctgttcaccgccagcggctacctgagcttcagcatcatgagaatcgtggagatgttcaaggactacccccccgccatcaagcccagctacgacgtgctgctgctgctgctgctgctggtgctgctgctgcaggccggcctgaacaccggcaccgccatccagtgcgtgagattcaaggtgagcgccagactgcagggcgccagctgggacacccagaacggcccccaggagagactggccggcgaggtggccagaagccccctgaaggagttcgacaaggagaaggcctggagagccgtggtggtgcagatggcccagtag

SEQ ID NO: 88387 - DNA, 897 bp, synthetic construct
  misc_feature 1..897: note = Description of Artificial Sequence: Synthetic coding sequence
  source 1..897: mol_type = other DNA
atggactacctgagatgcgccgccggcagctgcatccccagcgccatcgtgagcttcaccgtgagcagaagaaacgccaacgtgatccccaacttccagatcctgttcgtgagcaccttcgccgtgaccaccacctgcctgatctggttcggctgcaagctggtgctgaaccccagcgccatcaacatcaacttcaacctgatcctgctgctgctgctggagctgctgatggccgccaccgtgatcatcgccgccagaagcagcgaggaggactgcaagaagaagaagggcagcatgagcgacagcgccaacatcctggacgaggtgcccttccccgccagagtgctgaagagctacagcgtggtggaggtgatcgccggcatcagcgccgtgctgggcggcatcatcgccctgaacgtggacgacagcgtgagcggcccccacctgagcgtgaccttcttctggatcctggtggcctgcttccccagcgccatcgccagccacgtggccgccgagtgccccagcaagtgcctggtggaggtgctgatcgccatcagcagcctgaccagccccctgctgttcaccgccagcggctacctgagcttcagcatcatgagaatcgtggagatgttcaaggactacccccccgccatcaagcccagctacgacgtgctgctgctgctgctgctgctggtgctgctgctgcaggccggcctgaacaccggcaccgccatccagtgcgtgagattcaaggtgagcgccagactgcagggcgccagctgggacacccagaacggcccccaggagagactggccggcgaggtggccagaagccccctgaaggagttcgacaaggagaaggcctggagagccgtggtggtgcagatggcccagtag

SEQ ID NO: 88388 - DNA, 1032 bp, synthetic construct
  misc_feature 1..1032: note = Description of Artificial Sequence: Synthetic coding sequence
  source 1..1032: mol_type = other DNA
atgacccaggagcccttcagagaggagctggcctacgacagaatgcccaccctggagagaggcagacaggaccccgccagctacgcccccgacgccaagcccagcgacctgcagctgagcaagagactgcccccctgcttcagccacaagacctgggtgttcagcgtgctgatgggcagctgcctgctggtgaccagcggcttcagcctgtacctgggcaacgtgttccccgccgagatggactacctgagatgcgccgccggcagctgcatccccagcgccatcgtgagcttcaccgtgagcagaagaaacgccaacgtgatcaacttcaacctgatcctgctgctgctgctggagctgctgatggccgccaccgtgatcatcgccgccagaagcagcgaggaggactgcaagaagaagaagggcagcatgagcgacagcgccaacatcctggacgaggtgcccttccccgccagagtgctgaagagctacagcgtggtggaggtgatcgccggcatcagcgccgtgctgggcggcatcatcgccctgaacgtggacgacagcgtgagcggcccccacctgagcgtgaccttcttctggatcctggtggcctgcttccccagcgccatcgccagccacgtggccgccgagtgccccagcaagtgcctggtggaggtgctgatcgccatcagcagcctgaccagccccctgctgttcaccgccagcggctacctgagcttcagcatcatgagaatcgtggagatgttcaaggactacccccccgccatcaagcccagctacgacgtgctgctgctgctgctgctgctggtgctgctgctgcaggccggcctgaacaccggcaccgccatccagtgcgtgagattcaaggtgagcgccagactgcagggcgccagctgggacacccagaacggcccccaggagagactggccggcgaggtggccagaagccccctgaaggagttcgacaaggagaaggcctggagagccgtggtggtgcagatggcccagtag

SEQ ID NO: 88389 - DNA, 267 bp, synthetic construct
  misc_feature 1..267: note = Description of Artificial Sequence: Synthetic coding sequence
  source 1..267: mol_type = other DNA
atggccagcagcgacgtgaagcccaagagcgtgagccacgccaagaagtggagcgaggagatcgagaacctgtacagattccagcaggccggctacagagacgagaccgagtacagacaggtgaagcaggtgagcatggtggacagatggcccgagaccggctacgtgaagaagctgcagagaagagacaacaccttctactactacaacaagcagagagagtgcgacgacaaggaggtgcacaaggtgaagatctacgcctactag

SEQ ID NO: 88390 - DNA, 267 bp, synthetic construct; identical to SEQ ID NO: 88389
  misc_feature 1..267: note = Description of Artificial Sequence: Synthetic coding sequence
  source 1..267: mol_type = other DNA

SEQ ID NO: 88391 - DNA, 1488 bp, synthetic construct
  misc_feature 1..1488: note = Description of Artificial Sequence: Synthetic coding sequence
  source 1..1488: mol_type = other DNA
atgggcagcaagagaagaaacctgagctgcagcgagagacaccagaagctggtggacgagaactactgcaagaagctgcacgtgcaggccctgaagaacgtgaacagccagatcagaaaccagatggtgcagaacgagaacgacaacagagtgcagagaaagcagttcctgagactgctgcagaacgagcagttcgagctggacatggaggaggccatccagaaggccgaggagaacaagagactgaaggagctgcagctgaagcaggaggagaagctggccatggagctggccaagctgaagcacgagagcctgaaggacgagaagatgagacagcaggtgagagagaacagcatcgagctgagagagctggagaagaagctgaaggccgcctacatgaacaaggagagagccgcccagatcgccgagaaggacgccatcaagtacgagcagatgaagagagacgccgagatcgccaagaccatgatggaggagcacaagagaatcatcaaggaggagaacgccgccgaggacaagagaaacaaggccaaggcccagtactacctggacctggagaagcagctggaggagcaggagaagaagaagcaggaggcctacgagcagctgctgaaggagaagctgatgatcgacgagatcgtgagaaagatctacgaggaggaccagctggagaagcagcagaagctggagaagatgaacgccatgagaagatacatcgaggagttccagaaggagcaggccctgtggagaaagaagaagagagaggagatggaggaggagaacagaaagatcatcgagttcgccaacatgcagcagcagagagaggaggacagaatggccaaggtgcaggagaacgaggagaagagactgcagctgcagaacgccctgacccagaagctggaggagatgctgagacagagagaggacctggagcaggtgagacaggagctgtaccaggaggagcaggccgagatctacaagagcaagctgaaggaggaggccgagaagaagctgagaaagcagaaggagatgaagcaggacttcgaggagcagatggccctgaaggagctggtgctgcaggccgccaaggaggaggaggagaacttcagaaagaccatgctggccaagttcgccgaggacgacagaatcgagctgatgaacgcccagaagcagagaatgaagcagctggagcacagaagagccgtggagaagctgatcgaggagagaagacagcagttcctggccgacaagcagagagagctggaggagtggcagctgcagcagagaagacagggcttcatcaacgccatcatcgaggaggagagactgaagctgctgaaggagcacgccaccaacctgctgggctacctgcccaagggcgtgttcaagaaggaggacgacatcgacctgctgggcgaggagttcagaaaggtgtaccagcagagaagcgagatctgcgaggagaagtag

SEQ ID NO: 88392 - DNA, 1173 bp, synthetic construct
  misc_feature 1..1173: note = Description of Artificial Sequence: Synthetic coding sequence
  source 1..1173: mol_type = other DNA
atggcccagagatacgacgacctgccccactacggcggcatggacggcgtgggcatccccagcaccatgtacggcgacccccacgccgccagaagcatgcagcccgtgcaccacctgaaccacggcccccccctgcacagccaccagtacccccacaccgcccacaccaacgccatggcccccagcatgggcagcagcgtgaacgacgccctgaagagagacaaggacgccatctacggccaccccctgttccccctgctggccctgatcttcgagaagtgcgagctggccacctgcacccccagagagcccggcgtggccggcggcgacgtgtgcagcagcgagagcttcaacgaggacatcgccgtgttcgccaagcagatcagagccgagaagcccctgttcagcagcaaccccgagctggacaacctgatgatccaggccatccaggtgctgagattccacctgctggagctggagaaggtgcacgagctgtgcgacaacttctgccacagatacatcagctgcctgaagggcaagatgcccatcgacctggtgatcgacgacagagagggcggcagcaagagcgacagcgaggacatcaccagaagcgccaacctgaccgaccagcccagctggaacagagaccacgacgacaccgccagcaccagaagcggcggcacccccggccccagcagcggcggccacaccagccacagcggcgacaacagcagcgagcagggcgacggcctggacaacagcgtggccagccccagcaccggcgacgacgacgaccccgacaaggacaagaagagacacaagaagagaggcatcttccccaaggtggccaccaacatcatgagagcctggctgttccagcacctgacccacccctaccccagcgaggagcagaagaagcagctggcccaggacaccggcctgaccatcctgcaggtgaacaactggttcatcaacgccagaagaagaatcgtgcagcccatgatcgaccagagcaacagagccgtgagccagggcaccccctacaaccccgacggccagcccatgggcggcttcgtgatggacggccagcagcacatgggcatcagagcccccggccccatgagcggcatgggcatgaacatgggcatggagggccagtggcactacatgtag

SEQ ID NO: 88393 - DNA, 1392 bp, synthetic construct
  misc_feature 1..1392: note = Description of Artificial Sequence: Synthetic coding sequence
  source 1..1392: mol_type = other DNA
atgcagtacgacgacctgccccactacggcggcatggacggcgtgggcatccccagcaccatgtacggcgacccccacgccgccagaagcatgcagcccgtgcaccacctgaaccacggcccccccctgcacagccaccagtacccccacaccgcccacaccaacgccatggcccccagcatgggcagcagcgtgaacgacgccctgaagagagacaaggacgccatctacggccaccccctgttccccctgctggccctgatcttcgagaagtgcgagctggccacctgcacccccagagagcccggcgtggccggcggcgacgtgtgcagcagcgagagcttcaacgaggacatcgccgtgttcgccaagcagatcagagccgagaagcccctgttcagcagcaaccccgagctggacaacctgatgatccaggccatccaggtgctgagattccacctgctggagctggagaaggtgcacgagctgtgcgacaacttctgccacagatacatcagctgcctgaagggcaagatgcccatcgacctggtgatcgacgacagagagggcggcagcaagagcgacagcgaggacatcaccagaagcgccaacctgaccgaccagcccagctggaacagagaccacgacgacaccgccagcaccagaagcggcggcacccccggccccagcagcggcggccacaccagccacagcggcgacaacagcagcgagcagggcgacggcctggacaacagcgtggccagccccagcaccggcgacgacgacgaccccgacaaggacaagaagagacacaagaagagaggcatcttccccaaggtggccaccaacatcatgagagcctggctgttccagcacctgacccacccctaccccagcgaggagcagaagaagcagctggcccaggacaccggcctgaccatcctgcaggtgaacaactggttcatcaacgccagaagaagaatcgtgcagcccatgatcgaccagagcaacagagccgtgagccagggcaccccctacaaccccgacggccagcccatgggcggcttcgtgatggacggccagcagcacatgggcatcagagcccccggcctgcagagcatgcccggcgagtacgtggccagaggcggccccatgggcgtgagcatgggccagcccagctacacccagccccagatgcccccccaccccgcccagctgagacacggcccccccatgcacacctacatccccggccacccccaccaccccaccgtgatgatgcacggcggccccccccaccccggcatgcccatgagcgccagcagccccaccgtgctgaacaccggcgaccccaccatgagcggccaggtgatggacatccacgcccagtag

SEQ ID NO: 88394 - DNA, 762 bp, synthetic construct
  misc_feature 1..762: note = Description of Artificial Sequence: Synthetic coding sequence
  source 1..762: mol_type = other DNA
atgatccaggccatccaggtgctgagattccacctgctggagctggagaaggtgcacgagctgtgcgacaacttctgccacagatacatcagctgcctgaagggcaagatgcccatcgacctggtgatcgacgacagagagggcggcagcaagagcgacagcgaggacatcaccagaagcgccaacctgaccgaccagcccagctggaacagagaccacgacgacaccgccagcaccagaagcggcggcacccccggccccagcagcggcggccacaccagccacagcggcgacaacagcagcgagcagggcgacggcctggacaacagcgtggccagccccagcaccggcgacgacgacgaccccgacaaggacaagaagagacacaagaagagaggcatcttccccaaggtggccaccaacatcatgagagcctggctgttccagcacctgacccacccctaccccagcgaggagcagaagaagcagctggcccaggacaccggcctgaccatcctgcaggtgaacaactggttcatcaacgccagaagaagaatcgtgcagcccatgatcgaccagagcaacagagccgtgagccagggcaccccctacaaccccgacggccagcccatgggcggcttcgtgatggacggccagcagcacatgggcatcagagcccccggccccatgagcggcatgggcatgaacatgggccccccctgcatcagaaccttcctggacaccctgaccacccagcagtag

SEQ ID NO: 88395 - DNA, 1398 bp, synthetic construct
  misc_feature 1..1398: note = Description of Artificial Sequence: Synthetic coding sequence
  source 1..1398: mol_type = other DNA
atggcccagagatacgacgacctgccccactacggcggcatggacggcgtgggcatccccagcaccatgtacggcgacccccacgccgccagaagcatgcagcccgtgcaccacctgaaccacggcccccccctgcacagccaccagtacccccacaccgcccacaccaacgccatggcccccagcatgggcagcagcgtgaacgacgccctgaagagagacaaggacgccatctacggccaccccctgttccccctgctggccctgatcttcgagaagtgcgagctggccacctgcacccccagagagcccggcgtggccggcggcgacgtgtgcagcagcgagagcttcaacgaggacatcgccgtgttcgccaagcagatcagagccgagaagcccctgttcagcagcaaccccgagctggacaacctgatgatccaggccatccaggtgctgagattccacctgctggagctggagaaggtgcacgagctgtgcgacaacttctgccacagatacatcagctgcctgaagggcaagatgcccatcgacctggtgatcgacgacagagagggcggcagcaagagcgacagcgaggacatcaccagaagcgccaacctgaccgaccagcccagctggaacagagaccacgacgacaccgccagcaccagaagcggcggcacccccggccccagcagcggcggccacaccagccacagcggcgacaacagcagcgagcagggcgacggcctggacaacagcgtggccagccccagcaccggcgacgacgacgaccccgacaaggacaagaagagacacaagaagagaggcatcttccccaaggtggccaccaacatcatgagagcctggctgttccagcacctgacccacccctaccccagcgaggagcagaagaagcagctggcccaggacaccggcctgaccatcctgcaggtgaacaactggttcatcaacgccagaagaagaatcgtgcagcccatgatcgaccagagcaacagagccgtgagccagggcaccccctacaaccccgacggccagcccatgggcggcttcgtgatggacggccagcagcacatgggcatcagagcccccggcctgcagagcatgcccggcgagtacgtggccagaggcggccccatgggcgtgagcatgggccagcccagctacacccagccccagatgcccccccaccccgcccagctgagacacggcccccccatgcacacctacatccccggccacccccaccaccccaccgtgatgatgcacggcggccccccccaccccggcatgcccatgagcgccagcagccccaccgtgctgaacaccggcgaccccaccatgagcggccaggtgatggacatccacgcccagtag

SEQ ID NO: 88396 - DNA, 423 bp, synthetic construct
  misc_feature 1..423: note = Description of Artificial Sequence: Synthetic coding sequence
  source 1..423: mol_type = other DNA
atgaagaagaacggcgacgagaagagccccctgggcaccgagatcatgatgaccagacacctgctggtgcaggaggagccccaggccctgcccgccgtggccaccagacacaccgtgggcaccaccgccgtgagcaagcacccctaccccagcgaggagcagaagaagcagctggcccaggacaccggcctgaccatcctgcaggtgaacaactggttcatcaacgccagaagaagaatcgtgcagcccatgatcgaccagagcaacagagccgtgagccagggcaccccctacaaccccgacggccagcccatgggcggcttcgtgatggacggccagcagcacatgggcatcagagcccccggccccatgagcggcatgggcatgaacatgggcatggagggccagtggcactacatgtag

SEQ ID NO: 88397 - DNA, 663 bp, synthetic construct
  misc_feature 1..663: note = Description of Artificial Sequence: Synthetic coding sequence
  source 1..663: mol_type = other DNA
atgcagcccgtgcaccacctgaaccacggcccccccctgcacagccaccagtacccccacaccgcccacaccaacgccatggcccccagcatgggcagcagcgtgaacgacgccctgaagagagacaaggacgccatctacggccaccccctgttccccctgctggccctgatcttcgagaagtgcgagctggccacctgcacccccagagagcccggcgtggccggcggcgacgtgtgcagcagcgagagcttcaacgaggacatcgccgtgttcgccaagcagatcagagccgagaagcccctgttcagcagcaaccccgagctggacaacctgatgatccaggccatccaggtgctgagattccacctgctggagctggagaaggtgcacgagctgtgcgacaacttctgccacagatacatcagctgcctgaagggcaagatgcccatcgacctggtgatcgacgacagagagggcggcagcaagagcgacagcgaggacatcaccagaagcgccaacctgaccgaccagcccagctggaacagagaccacgacgacaccgccagcaccagaagcggcggcacccccggccccagcagcggcggccacaccagccacagcggcgacaacagcagcgagcaggcccccctgcccttctag

SEQ ID NO: 88398 - DNA, 540 bp, synthetic construct
  misc_feature 1..540: note = Description of Artificial Sequence: Synthetic coding sequence
  source 1..540: mol_type = other DNA
atgaagagcctgctgaccttctacaagtgcggcagcgagctgctgcccgccgccgtgtggagcgccggcggcagccccagcctgttcagcgacctgaagagcaagaagggcaagaagttcagcagagaccacatcgaggtgaccatcagcaactgcggcgtgaacggcaacgccaagggcgacggcctggacaacagcgtggccagccccagcaccggcgacgacgacgaccccgacaaggacaagaagagacacaagaagagaggcatcttccccaaggtggccaccaacatcatgagagcctggctgttccagcacctgacccacccctaccccagcgaggagcagaagaagcagctggcccaggacaccggcctgaccatcctgcaggtgaacaactggttcatcaacgccagaagaagaatcgtgcagcccatgatcgaccagagcaacagagccgtgagccagggcaccccctacaaccccgacggccagcccatgggcggcttcgtgatggacggccagcagcacatgggctag

SEQ ID NO: 88399 - DNA, 978 bp, synthetic construct
  misc_feature 1..978: note = Description of Artificial Sequence: Synthetic coding sequence
  source 1..978: mol_type = other DNA
atggcccagggcctgagactgcagggcagcagaagaaagggcagacaccccctgttccccctgctggccctgatcttcgagaagtgcgagctggccacctgcacccccagagagcccggcgtggccggcggcgacgtgtgcagcagcgagagcttcaacgaggacatcgccgtgttcgccaagcagatcagagccgagaagcccctgttcagcagcaaccccgagctggacaacctgatgatccaggccatccaggtgctgagattccacctgctggagctggagaaggtgcacgagctgtgcgacaacttctgccacagatacatcagctgcctgaagggcaagatgcccatcgacctggtgatcgacgacagagagggcggcagcaagagcgacagcgaggacatcaccagaagcgccaacctgaccgaccagcccagctggaacagagaccacgacgacaccgccagcaccagaagcggcggcacccccggccccagcagcggcggccacaccagccacagcggcgacaacagcagcgagcagggcgacggcctggacaacagcgtggccagccccagcaccggcgacgacgacgaccccgacaaggacaagaagagacacaagaagagaggcatcttccccaaggtggccaccaacatcatgagagcctggctgttccagcacctgacccacccctaccccagcgaggagcagaagaagcagctggcccaggacaccggcctgaccatcctgcaggtgaacaactggttcatcaacgccagaagaagaatcgtgcagcccatgatcgaccagagcaacagagccgtgagccagggcaccccctacaaccccgacggccagcccatgggcggcttcgtgatggacggccagcagcacatgggcatcagagcccccggccccatgagcggcatgggcatgaacatgggcatggagggccagtggcactacatgtag

SEQ ID NO: 88400 - DNA, 1113 bp, synthetic construct
  misc_feature 1..1113: note = Description of Artificial Sequence: Synthetic coding sequence
  source 1..1113: mol_type = other DNA
atggcccagagatacgacgacctgccccactacggcggcatggacggcgtgggcatccccagcaccatgtacggcgacccccacgccgccagaagcatgcagcccgtgcaccacctgaaccacggcccccccctgcacagccaccagtacccccacaccgcccacaccaacgccatggcccccagcatgggcagcagcgtgaacgacgccctgaagagagacaaggacgccatctacggccaccccctgttccccctgctggccctgatcttcgagaagtgcgagctggccacctgcacccccagagagcccggcgtggccggcggcgacgtgtgcagcagcgagagcttcaacgaggacatcgccgtgttcgccaagcagatcagagccgagaagcccctgttcagcagcaaccccgagctggacaacctgatgatccaggccatccaggtgctgagattccacctgctggagctggagaaggtgcacgagctgtgcgacaacttctgccacagatacatcagctgcctgaagggcaagatgcccatcgacctggtgatcgacgacagagagggcggcagcaagagcgacagcgaggacatcaccagaagcgccaacctgaccgaccagcccagctggaacagagaccacgacgacaccgccagcaccagaagcggcggcacccccggccccagcagcggcggccacaccagccacagcggcgacaacagcagcgagcagggcgacggcctggacaacagcgtggccagccccagcaccggcgacgacgacgaccccgacaaggacaagaagagacacaagaagagaggcatcttccccaaggtggccaccaacatcatgagagcctggctgttccagcacctgacccacccctaccccagcgaggagcagaagaagcagctggcccaggacaccggcctgaccatcctgcaggtgaacaactggttcatcaacgccagaagaagaatcgtgcagcccatgatcgaccagagcaacagagccggcaagagccccatcgtgaccgtgttcaagagcagaaagagaaagcccagcagcagccacagccccggcggccccctgcccggcaagtag

SEQ ID NO: 88401 - DNA, 2259 bp, synthetic construct
  misc_feature 1..2259: note = Description of Artificial Sequence: Synthetic coding sequence
  source 1..2259: mol_type = other DNA
accaccgccatggcccacagaaagctggagagcgtgggcagcggcatgctggaccacagagtgagacccggccccgtgccccacagccaggagcccgagagcgaggacatggagctgcccctggagggctacgtgcccgagggcctggagctggccgccctgagacccgagagccccgcccccgaggagcaggagtgccacaaccacagccccgacggcgacagcagcagcgactacgtgaacaacaccagcgaggaggaggactacgacgagggcctgcccgaggaggaggagggcatcacctactacatcagatactgccccgaggacgacagctacctggagggcatggactgcaacggcgaggagtacctggcccacagcgcccaccccgtggacaccgacgagtgccaggaggccgtggaggagtggaccgacagcgccggcccccacccccacggccacgaggccgagggcagccaggactaccccgacggccagctgcccatccccgaggacgagcccagcgtgctggaggcccacgaccaggaggaggacggccactactgcgccagcaaggagggctaccaggactactaccccgaggaggccaacggcaacaccggcgccagcccctacagactgagaagaggcgacggcgacctggaggaccaggaggaggacatcgaccagatcgtggccgagatcaagatgagcctgagcatgaccagcatcaccagcgccagcgaggccagccccgagcacggccccgagcccggccccgaggacagcgtggaggcctgcccccccatcaaggccagctgcagccccagcagacacgaggccagacccaagagcctgaacctgctgcccgaggccaagcaccccggcgacccccagagaggcttcaagcccaagaccagaacccccgaggagagactgaagtggccccacgagcaggtgtgcaacggcctggagcagcccagaaagcagcagagaagcgacctgaacggccccgtggacaacaacaacatccccgagaccaagaaggtggccagcttccccagcttcgtggccgtgcccggcccctgcgagcccgaggacctgatcgacggcatcatcttcgccgccaactacctgggcagcacccagctgctgagcgagagaaaccccagcaagaacatcagaatgatgcaggcccaggaggccgtgagcagagtgaagagaatgcagaaggccgccaagatcaagaagaaggccaacagcgagggcgacgcccagaccctgaccgaggtggacctgttcatcagcacccagagaatcaaggtgctgaacgccgacacccaggagaccatgatggaccacgccctgagaaccatcagctacatcgccgacatcggcaacatcgtggtgctgatggccagaagaagaatgcccagaagcgccagccaggactgcatcgagaccacccccggcgcccaggagggcaagaagcagtacaagatgatctgccacgtgttcgagagcgaggacgcccagctgatcgcccagagcatcggccaggccttcagcgtggcctaccaggagttcctgagagccaacggcatcaaccccgaggacctgagccagaaggagtacagcgacatcatcaacacccaggagatgtacaacgacgacctgatccacttcagcaacagcgagaactgcaaggagctgcagctggagaagcacaagggcgagatcctgggcgtggtggtggtggagagcggctggggcagcatcctgcccaccgtgatcctggccaacatgatgaacggcggccccgccgccagaagcggcaagctgagcatcggcgaccagatcatgagcatcaacggcaccagcctggtgggcctgcccctggccacctgccagggcatcatcaagggcctgaagaaccagacccaggtgaagctgaacatcgtgagctgcccccccgtgaccaccgtgctgatcaagagacccgacctgaagtaccagctgggcttcagcgtgcagaacggcatcatctgcagcctgatgagaggcggcatcgccgagagaggcggcgtgagagtgggccacagaatcatcgagatcaacggccagagcgtggtggccaccgcccacgagaagatcgtgcaggccctgagcaacagcgtgggcgagatccacatgaagaccatgcccgccgccatgttcagactgctgaccggccaggagacccccctgtacatctag

SEQ ID NO: 88402 - DNA, 1413 bp, synthetic construct
  misc_feature 1..1413: note = Description of Artificial Sequence: Synthetic coding sequence
  source 1..1413: mol_type = other DNA
atggcccagagatacgacgagctgccccactacggcggcatggacggcgtgggcgtgcccgccagcatgtacggcgacccccacgcccccagacccatcccccccgtgcaccacctgaaccacggcccccccctgcacgccacccagcactacggcgcccacgccccccaccccaacgtgatgcccgccagcatgggcagcgccgtgaacgacgccctgaagagagacaaggacgccatctacggccaccccctgttccccctgctggccctggtgttcgagaagtgcgagctggccacctgcacccccagagagcccggcgtggccggcggcgacgtgtgcagcagcgacagcttcaacgaggacatcgccgtgttcgccaagcaggtgagagccgagaagcccctgttcagcagcaaccccgagctggacaacctgatgatccaggccatccaggtgctgagattccacctgctggagctggagaaggtgcacgagctgtgcgacaacttctgccacagatacatcagctgcctgaagggcaagatgcccatcgacctggtgatcgacgagagagacggcagcagcaagagcgaccacgaggagctgagcggcagcagcaccaacctggccgaccacaaccccagcagctggagagaccacgacgacgccaccagcacccacagcgccggcacccccggccccagcagcggcggccacgccagccagagcggcgacaacagcagcgagcagggcgacggcctggacaacagcgtggccagccccggcaccggcgacgacgacgaccccgacaaggacaagaagagacagaagaagagaggcatcttccccaaggtggccaccaacatcatgagagcctggctgttccagcacctgacccacccctaccccagcgaggagcagaagaagcagctggcccaggacaccggcctgaccatcctgcaggtgaacaactggttcatcaacgccagaagaagaatcgtgcagcccatgatcgaccagagcaacagagccgtgagccagggcgccgcctacagccccgagggccagcccatgggcagcttcgtgctggacggccagcagcacatgggcatcagacccgccggcctgcagagcatgcccggcgactacgtgagccagggcggccccatgggcatgagcatggcccagcccagctacacccccccccagatgaccccccaccccacccagctgagacacggcccccccatgcacagctacctgcccagccacccccaccaccccgccatgatgatgcacggcggcccccccacccaccccggcatgaccatgagcgcccagagccccaccatgctgaacagcgtggaccccaacgtgggcggccaggtgatggacatccacgcccagtag

SEQ ID NO: 88403 - DNA, 1146 bp, synthetic construct
  misc_feature 1..1146: note = Description of Artificial Sequence: Synthetic coding sequence
  source 1..1146: mol_type = other DNA
atggacggcgtgggcgtgcccgccagcatgtacggcgacccccacgcccccagacccatcccccccgtgcaccacctgaaccacggcccccccctgcacgccacccagcactacggcgcccacgccccccaccccaacgtgatgcccgccagcatgggcagcgccgtgaacgacgccctgaagagagacaaggacgccatctacggccaccccctgttccccctgctggccctggtgttcgagaagtgcgagctggccacctgcacccccagagagcccggcgtggccggcggcgacgtgtgcagcagcgacagcttcaacgaggacatcgccgtgttcgccaagcaggtgagagccgagaagcccctgttcagcagcaaccccgagctggacaacctgatgatccaggccatccaggtgctgagattccacctgctggagctggagaaggtgcacgagctgtgcgacaacttctgccacagatacatcagctgcctgaagggcaagatgcccatcgacctggtgatcgacgagagagacggcagcagcaagagcgaccacgaggagctgagcggcagcagcaccaacctggccgaccacaaccccagcagctggagagaccacgacgacgccaccagcacccacagcgccggcacccccggccccagcagcggcggccacgccagccagagcggcgacaacagcagcgagcagggcgacggcctggacaacagcgtggccagccccggcaccggcgacgacgacgaccccgacaaggacaagaagagacagaagaagagaggcatcttccccaaggtggccaccaacatcatgagagcctggctgttccagcacctgacccacccctaccccagcgaggagcagaagaagcagctggcccaggacaccggcctgaccatcctgcaggtgaacaactggttcatcaacgccagaagaagaatcgtgcagcccatgatcgaccagagcaacagagccgtgagccagggcgccgcctacagccccgagggccagcccatgggcagcttcgtgctggacggccagcagcacatgggcatcagacccgccggccccatgagcggcatgggcatgaacatgggcatggacggccagtggcactacatgtag

SEQ ID NO: 88404 - DNA, 1413 bp, synthetic construct; identical to SEQ ID NO: 88402
  misc_feature 1..1413: note = Description of Artificial Sequence: Synthetic coding sequence
  source 1..1413: mol_type = other DNA

SEQ ID NO: 88405 - DNA, 921 bp, synthetic construct
  misc_feature 1..921: note = Description of Artificial Sequence: Synthetic coding sequence
  source 1..921: mol_type = other DNA
atggccctggtgttcgagaagtgcgagctggccacctgcacccccagagagcccggcgtggccggcggcgacgtgtgcagcagcgacagcttcaacgaggacatcgccgtgttcgccaagcaggtgagagccgagaagcccctgttcagcagcaaccccgagctggacaacctgatgatccaggccatccaggtgctgagattccacctgctggagctggagaaggtgcacgagctgtgcgacaacttctgccacagatacatcagctgcctgaagggcaagatgcccatcgacctggtgatcgacgagagagacggcagcagcaagagcgaccacgaggagctgagcggcagcagcaccaacctggccgaccacaaccccagcagctggagagaccacgacgacgccaccagcacccacagcgccggcacccccggccccagcagcggcggccacgccagccagagcggcgacaacagcagcgagcagggcgacggcctggacaacagcgtggccagccccggcaccggcgacgacgacgaccccgacaaggacaagaagagacagaagaagagaggcatcttccccaaggtggccaccaacatcatgagagcctggctgttccagcacctgacccacccctaccccagcgaggagcagaagaagcagctggcccaggacaccggcctgaccatcctgcaggtgaacaactggttcatcaacgccagaagaagaatcgtgcagcccatgatcgaccagagcaacagagccgtgagccagggcgccgcctacagccccgagggccagcccatgggcagcttcgtgctggacggccagcagcacatgggcatcagacccgccggccccatgagcggcatgggcatgaacatgggcatggacggccagtggcactacatgtag

SEQ ID NO: 88406 - DNA, 921 bp, synthetic construct; identical to SEQ ID NO: 88405
  misc_feature 1..921: note = Description of Artificial Sequence: Synthetic coding sequence
  source 1..921: mol_type = other DNA

SEQ ID NO: 88407 - DNA, 1206 bp, synthetic construct
  misc_feature 1..1206: note = Description of Artificial Sequence: Synthetic coding sequence
  source 1..1206: mol_type = other DNA
atggcccagagatacgacgagctgccccactacggcggcatggacggcgtgggcgtgcccgccagcatgtacggcgacccccacgcccccagacccatcccccccgtgcaccacctgaaccacggcccccccctgcacgccacccagcactacggcgcccacgccccccaccccaacgtgatgcccgccagcatgggcagcgccgtgaacgacgccctgaagagagacaaggacgccatctacggccaccccctgttccccctgctggccctggtgttcgagaagtgcgagctggccacctgcacccccagagagcccggcgtggccggcggcgacgtgtgcagcagcgacagcttcaacgaggacatcgccgtgttcgccaagcaggtgagagccgagaagcccctgttcagcagcaaccccgagctggacaacctgatgatccaggccatccaggtgctgagattccacctgctggagctggagaaggtgcacgagctgtgcgacaacttctgccacagatacatcagctgcctgaagggcaagatgcccatcgacctggtgatcgacgagagagacggcagcagcaagagcgaccacgaggagctgagcggcagcagcaccaacctggccgaccacaaccccagcagctggagagaccacgacgacgccaccagcacccacagcgccggcacccccggccccagcagcggcggccacgccagccagagcggcgacaacagcagcgagcagggcgacggcctggacaacagcgtggccagccccggcaccggcgacgacgacgaccccgacaaggacaagaagagacagaagaagagaggcatcttccccaaggtggccaccaacatcatgagagcctggctgttccagcacctgacccacccctaccccagcgaggagcagaagaagcagctggcccaggacaccggcctgaccatcctgcaggtgaacaactggttcatcaacgccagaagaagaatcgtgcagcccatgatcgaccagagcaacagagccggcttcctgctggaccccagcgtgagccagggcgccgcctacagccccgagggccagcccatgggcagcttcgtgctggacggccagcagcacatgggcatcagacccgccggccccatgagcggcatgggcatgaacatgggcatggacggccagtggcactacatgtag

SEQ ID NO: 88408 - DNA, 1185 bp, synthetic construct
  misc_feature 1..1185: note = Description of Artificial Sequence: Synthetic coding sequence
  source 1..1185: mol_type = other DNA
atggcccagagatacgacgagctgccccactacggcggcatggacggcgtgggcgtgcccgccagcatgtacggcgacccccacgcccccagacccatcccccccgtgcaccacctgaaccacggcccccccctgcacgccacccagcactacggcgcccacgccccccaccccaacgtgatgcccgccagcatgggcagcgccgtgaacgacgccctgaagagagacaaggacgccatctacggccaccccctgttccccctgctggccctggtgttcgagaagtgcgagctggccacctgcacccccagagagcccggcgtggccggcggcgacgtgtgcagcagcgacagcttcaacgaggacatcgccgtgttcgccaagcaggtgagagccgagaagcccctgttcagcagcaaccccgagctggacaacctgatgatccaggccatccaggtgctgagattccacctgctggagctggagaaggtgcacgagctgtgcgacaacttctgccacagatacatcagctgcctgaagggcaagatgcccatcgacctggtgatcgacgagagagacggcagcagcaagagcgaccacgaggagctgagcggcagcagcaccaacctggccgaccacaaccccagcagctggagagaccacgacgacgccaccagcacccacagcgccggcacccccggccccagcagcggcggccacgccagccagagcggcgacaacagcagcgagcagggcgacggcctggacaacagcgtggccagccccggcaccggcgacgacgacgaccccgacaaggacaagaagagacagaagaagagaggcatcttccccaaggtggccaccaacatcatgagagcctggctgttccagcacctgacccacccctaccccagcgaggagcagaagaagcagctggcccaggacaccggcctgaccatcctgcaggtgaacaactggttcatcaacgccagaagaagaatcgtgcagcccatgatcgaccagagcaacagagccgtgagccagggcgccgcctacagccccgagggccagcccatgggcagcttcgtgctggacggccagcagcacatgggcatcagacccgccggccccatgagcggcatgggcatgaacatgggcatggacggccagtggcactacatgtag

SEQ ID NO: 88409 - DNA, 717 bp, synthetic construct
  misc_feature 1..717: note = Description of Artificial Sequence: Synthetic coding sequence
  source 1..717: mol_type = other DNA
atggacggcgtgggcgtgcccgccagcatgtacggcgacccccacgcccccagacccatcccccccgtgcaccacctgaaccacggcccccccctgcacgccacccagcactacggcgcccacgccccccaccccaacgtgatgcccgccagcatgggcagcgccgtgaacgacgccctgaagagagacaaggacgccatctacggccaccccctgttccccctgctggccctggtgttcgagaagtgcgagctggccacctgcacccccagagagcccggcgtggccggcggcgacgtgtgcagcagcgacagcttcaacgaggacatcgccgtgttcgccaagcaggtgagagccgagaagcccctgttcagcagcaaccccgagctggacaacctgatgatccaggccatccaggtgctgagattccacctgctggagctggagaaggtgcacgagctgtgcgacaacttctgccacagatacatcagctgcctgaagggcaagatgcccatcgacctggtgatcgacgagagagacggcagcagcaagagcgaccacgaggagctgagcggcagcagcaccaacctggccgaccacaaccccagcagctggagagaccacgacgacgccaccagcacccacagcgccggcacccccggccccagcagcggcggccacgccagccagagcggcgacaacagcagcgagcagtag

SEQ ID NO: 88410 - DNA, 240 bp, synthetic construct
  misc_feature 1..240: note = Description of Artificial Sequence: Synthetic coding sequence
  source 1..240: mol_type = other DNA
atggccctggtgttcgagaagtgcgagctggccacctgcacccccagagagcccggcgtggccggcggcgacgtgtgcagcagcgacagcttcaacgaggacatcgccgtgttcgccaagcaggtgagagccgagaagcccctgttcagcagcaaccccgagctggacaacctgatgatccaggccatccaggtgctgagattccacctgctggagctggagaaggtgagcagaaagtag

SEQ ID NO: 88411 - DNA, 1167 bp, synthetic construct
  misc_feature 1..1167: note = Description of Artificial Sequence: Synthetic coding sequence
  source 1..1167: mol_type = other DNA
atggacggcgtgggcgtgcccgccagcatgtacggcgacccccacgcccccagacccatcccccccgtgcaccacctgaaccacggcccccccctgcacgccacccagcactacggcgcccacgccccccaccccaacgtgatgcccgccagcatgggcagcgccgtgaacgacgccctgaagagagacaaggacgccatctacggccaccccctgttccccctgctggccctggtgttcgagaagtgcgagctggccacctgcacccccagagagcccggcgtggccggcggcgacgtgtgcagcagcgacagcttcaacgaggacatcgccgtgttcgccaagcaggtgagagccgagaagcccctgttcagcagcaaccccgagctggacaacctgatgatccaggccatccaggtgctgagattccacctgctggagctggagaaggtgcacgagctgtgcgacaacttctgccacagatacatcagctgcctgaagggcaagatgcccatcgacctggtgatcgacgagagagacggcagcagcaagagcgaccacgaggagctgagcggcagcagcaccaacctggccgaccacaaccccagcagctggagagaccacgacgacgccaccagcacccacagcgccggcacccccggccccagcagcggcggccacgccagccagagcggcgacaacagcagcgagcagggcgacggcctggacaacagcgtggccagccccggcaccggcgacgacgacgaccccgacaaggacaagaagagacagaagaagagaggcatcttccccaaggtggccaccaacatcatgagagcctggctgttccagcacctgacccacccctaccccagcgaggagcagaagaagcagctggcccaggacaccggcctgaccatcctgcaggtgaacaactggttcatcaacgccagaagaagaatcgtgcagcccatgatcgaccagagcaacagagccggcttcctgctggaccccagcgtgagccagggcgccgcctacagccccgagggccagcccatgggcagcttcgtgctggacggccagcagcacatgggcatcagacccgccggccccatgagcggcatgggcatgaacatgggcatggacggccagtggcactacatgtag

SEQ ID NO: 88412 - DNA, 1185 bp, synthetic construct; identical to SEQ ID NO: 88408
  misc_feature 1..1185: note = Description of Artificial Sequence: Synthetic coding sequence
  source 1..1185: mol_type = other DNA

SEQ ID NO: 88413 - DNA, 1434 bp, synthetic construct
  misc_feature 1..1434: note = Description of Artificial Sequence: Synthetic coding sequence
  source 1..1434: mol_type = other DNA
atggcccagagatacgacgagctgccccactacggcggcatggacggcgtgggcgtgcccgccagcatgtacggcgacccccacgcccccagacccatcccccccgtgcaccacctgaaccacggcccccccctgcacgccacccagcactacggcgcccacgccccccaccccaacgtgatgcccgccagcatgggcagcgccgtgaacgacgccctgaagagagacaaggacgccatctacggccaccccctgttccccctgctggccctggtgttcgagaagtgcgagctggccacctgcacccccagagagcccggcgtggccggcggcgacgtgtgcagcagcgacagcttcaacgaggacatcgccgtgttcgccaagcaggtgagagccgagaagcccctgttcagcagcaaccccgagctggacaacctgatgatccaggccatccaggtgctgagattccacctgctggagctggagaaggtgcacgagctgtgcgacaacttctgccacagatacatcagctgcctgaagggcaagatgcccatcgacctggtgatcgacgagagagacggcagcagcaagagcgaccacgaggagctgagcggcagcagcaccaacctggccgaccacaaccccagcagctggagagaccacgacgacgccaccagcacccacagcgccggcacccccggccccagcagcggcggccacgccagccagagcggcgacaacagcagcgagcagggcgacggcctggacaacagcgtggccagccccggcaccggcgacgacgacgaccccgacaaggacaagaagagacagaagaagagaggcatcttccccaaggtggccaccaacatcatgagagcctggctgttccagcacctgacccacccctaccccagcgaggagcagaagaagcagctggcccaggacaccggcctgaccatcctgcaggtgaacaactggttcatcaacgccagaagaagaatcgtgcagcccatgatcgaccagagcaacagagccggcttcctgctggaccccagcgtgagccagggcgccgcctacagccccgagggccagcccatgggcagcttcgtgctggacggccagcagcacatgggcatcagacccgccggcctgcagagcatgcccggcgactacgtgagccagggcggccccatgggcatgagcatggcccagcccagctacacccccccccagatgaccccccaccccacccagctgagacacggcccccccatgcacagctacctgcccagccacccccaccaccccgccatgatgatgcacggcggcccccccacccaccccggcatgaccatgagcgcccagagccccaccatgctgaacagcgtggaccccaacgtgggcggccaggtgatggacatccacgcccagtag

SEQ ID NO: 88414 - DNA, 1434 bp, synthetic construct; identical to SEQ ID NO: 88413
  misc_feature 1..1434: note = Description of Artificial Sequence: Synthetic coding sequence
  source 1..1434: mol_type = other DNA

SEQ ID NO: 88415 - DNA, 357 bp, synthetic construct
  misc_feature 1..357: note = Description of Artificial Sequence: Synthetic coding sequence
  source 1..357: mol_type = other DNA
atgcccagagaggacgcccacttcatctacggctaccccaagaagggccacggccacagctacaccaccgccgaggaggccgccggcatcggcatcctgaccgtgatcctgggcgtgctgctgctgatcggctgctggtactgcagaagaagaaacggctacagagccctgatggacaagagcctgcacgtgggcacccagtgcgccctgaccagaagatgcccccaggagggcttcgaccacagagacagcaaggtgagcctgcaggagaagaactgcgagcccgtggtgcccaacgccccccccgcctacgagaagctgagcgccgagcagagcccccccccctacagcccctag

SEQ ID NO: 88416 - DNA, 357 bp, synthetic construct; identical to SEQ ID NO: 88415
  misc_feature 1..357: note = Description of Artificial Sequence: Synthetic coding sequence
  source 1..357: mol_type = other DNA

SEQ ID NO: 88417 - DNA, 357 bp, synthetic construct; identical to SEQ ID NO: 88415
  misc_feature 1..357: note = Description of Artificial Sequence: Synthetic coding sequence
  source 1..357: mol_type = other DNA

SEQ ID NO: 88418 - DNA, 1269 bp, synthetic construct
  misc_feature 1..1269: note = Description of Artificial Sequence: Synthetic coding sequence
  source 1..1269: mol_type = other DNA
atgagcgtgggcgccatgaagaagggcgtgggcagagccgtgggcctgggcggcggcagcggctgccaggccaccgaggaggaccccctgcccaactgcggcgcctgcgcccccggccagggcggcagaagatggagactgccccagcccgcctgggtggagggcagcagcgccagactgtgggagcaggccaccggcaccggctggatggacctggaggccagcctgctgcccaccggccccaacgccagcaacaccagcgacggccccgacaacctgaccagcgccggcagcccccccagaaccggcagcatcagctacatcaacatcatcatgcccagcgtgttcggcaccatctgcctgctgggcatcatcggcaacagcaccgtgatcttcgccgtggtgaagaagagcaagctgcactggtgcaacaacgtgcccgacatcttcatcatcaacctgagcgtggtggacctgctgttcctgctgggcatgcccttcatgatccaccagctgatgggcaacggcgtgtggcacttcggcgagaccatgtgcaccctgatcaccgccatggacgccaacagccagttcaccagcacctacatcctgaccgccatggccatcgacagatacctggccaccgtgcaccccatcagcagcaccaagttcagaaagcccagcgtggccaccctggtgatctgcctgctgtgggccctgagcttcatcagcatcacccccgtgtggctgtacgccagactgatccccttccccggcggcgccgtgggctgcggcatcagactgcccaaccccgacaccgacctgtactggttcaccctgtaccagttcttcctggccttcgccctgcccttcgtggtgatcaccgccgcctacgtgagaatcctgcagagaatgaccagcagcgtggcccccgccagccagagaagcatcagactgagaaccaagagagtgaccagaaccgccatcgccatctgcctggtgttcttcgtgtgctgggccccctactacgtgctgcagctgacccagctgagcatcagcagacccaccctgaccttcgtgtacctgtacaacgccgccatcagcctgggctacgccaacagctgcctgaaccccttcgtgtacatcgtgctgtgcgagaccttcagaaagagactggtgctgagcgtgaagcccgccgcccagggccagctgagagccgtgagcaacgcccagaccgccgacgaggagagaaccgagagcaagggcacctag

SEQ ID NO: 88419 - DNA, 891 bp, synthetic construct
  misc_feature 1..891: note = Description of Artificial Sequence: Synthetic coding sequence
  source 1..891: mol_type = other DNA
atgagcgtgggcgccatgaagaagggcgtgggcagagccgtgggcctgggcggcggcagcggctgccaggccaccgaggaggaccccctgcccaactgcggcgcctgcgcccccggccagggcggcagaagatggagactgccccagcccgcctgggtggagggcagcagcgccagactgtgggagcaggccaccggcaccggctggatggacctggaggccagcctgctgcccaccggccccaacgccagcaacaccagcgacggccccgacaacctgaccagcgccggcagcccccccagaaccggcagcatcagctacatcaacatcatcatgcccagcgtgttcggcaccatctgcctgctgggcatcatcggcaacagcaccgtgatcttcgccgtggtgaagaagagcaagctgcactggtgcaacaacgtgcccgacatcttcatcatcaacctgagcttcttcctggccttcgccctgcccttcgtggtgatcaccgccgcctacgtgagaatcctgcagagaatgaccagcagcgtggcccccgccagccagagaagcatcagactgagaaccaagagagtgaccagaaccgccatcgccatctgcctggtgttcttcgtgtgctgggccccctactacgtgctgcagctgacccagctgagcatcagcagacccaccctgaccttcgtgtacctgtacaacgccgccatcagcctgggctacgccaacagctgcctgaaccccttcgtgtacatcgtgctgtgcgagaccttcagaaagagactggtgctgagcgtgaagcccgccgcccagggccagctgagagccgtgagcaacgcccagaccgccgacgaggagagaaccgagagcaagggcacctag

SEQ ID NO: 88420 - DNA, 1023 bp, synthetic construct
  misc_feature 1..1023: note = Description of Artificial Sequence: Synthetic coding sequence
  source 1..1023: mol_type = other DNA
atgaaccccttccacgccagctgctggaacaccagcgccgagctgctgaacaagagctggaacaaggagttcgcctaccagaccgccagcgtggtggacaccgtgatcctgcccagcatgatcggcatcatctgcagcaccggcctggtgggcaacatcctgatcgtgttcaccatcatcagaagcagaaagaagaccgtgcccgacatctacatctgcaacctggccgtggccgacctggtgcacatcgtgggcatgcccttcctgatccaccagtgggccagaggcggcgagtgggtgttcggcggccccctgtgcaccatcatcaccagcctggacacctgcaaccagttcgcctgcagcgccatcatgaccgtgatgagcgtggacagatacttcgccctggtgcagcccttcagactgaccagatggagaaccagatacaagaccatcagaatcaacctgggcctgtgggccgccagcttcatcctggccctgcccgtgtgggtgtacagcaaggtgatcaagttcaaggacggcgtggagagctgcgccttcgacctgaccagccccgacgacgtgctgtggtacaccctgtacctgaccatcaccaccttcttcttccccctgcccctgatcctggtgtgctacatcctgatcctgtgctacacctgggagatgtaccagcagaacaaggacgccagatgctgcaaccccagcgtgcccaagcagagagtgatgaagctgaccaagatggtgctggtgctggtggtggtgttcatcctgagcgccgccccctaccacgtgatccagctggtgaacctgcagatggagcagcccaccctggccttctacgtgggctactacctgagcatctgcctgagctacgccagcagcagcatcaaccccttcctgtacatcctgctgagcggcaacttccagaagagactgccccagatccagagaagagccaccgagaaggagatcaacaacatgggcaacaccctgaagagccacttctag

SEQ ID NO: 88421 - DNA, 1023 bp, synthetic construct; identical to SEQ ID NO: 88420
  misc_feature 1..1023: note = Description of Artificial Sequence: Synthetic coding sequence
  source 1..1023: mol_type = other DNA

SEQ ID NO: 88422 - DNA, 1023 bp, synthetic construct; identical to SEQ ID NO: 88420
  misc_feature 1..1023: note = Description of Artificial Sequence: Synthetic coding sequence
  source 1..1023: mol_type = other DNA

SEQ ID NO: 88423 - DNA, 519 bp, synthetic construct
  misc_feature 1..519: note = Description of Artificial Sequence: Synthetic coding sequence
  source 1..519: mol_type = other DNA
atggccaacggcaccaacgccagcgccccctactacagctacgagtactacctggactacctggacctgatccccgtggacgagaagaagctgaaggcccacaagcacagcatcgtgatcgccttctgggtgagcctggccgccttcgtggtgctgctgttcctgatcctgctgtacatgagctggagcgccagcccccagatgagaaacagccccaagcaccaccagacctgcccctggagccacggcctgaacctgcacctgtgcatccagaagtgcctgccctgccacagagagcccctggccaccagccaggcccaggccagcagcgtggagcccggcagcagaaccggccccgaccagcccctgagacaggagagcagcagcaccctgcccctgggcggcttccagacccaccccaccctgctgtgggagctgaccctgaacggcggccccctggtgagaagcaagcccagcgagcccccccccggcgacagaaccagccagctgcagagctag

SEQ ID NO: 88424 - DNA, 309 bp, synthetic construct
  misc_feature 1..309: note = Description of Artificial Sequence: Synthetic coding sequence
  source 1..309: mol_type = other DNA
atggccaacggcaccaacgccagcgccccctactacagctacgagtactacctggactacctggacctgatccccgtggacgagaagaagctgaaggcccacaagcacagcatcgtgatcgccttctgggtgagcctggccgccttcgtggtgctgctgttcctgatcctgctgtacatgagctggagcgccagcccccagatgagcttcaacaccgacgagagcctgctgcacagcgaggtgctgccccagaccagagccatcagctgcgacgagctgcaggcccccagagaggagggcgccgcctag

SEQ ID NO: 88425 - DNA, 519 bp, synthetic construct; identical to SEQ ID NO: 88423
  misc_feature 1..519: note = Description of Artificial Sequence: Synthetic coding sequence
  source 1..519: mol_type = other DNA

SEQ ID NO: 88426 - DNA, 309 bp, synthetic construct; identical to SEQ ID NO: 88424
  misc_feature 1..309: note = Description of Artificial Sequence: Synthetic coding sequence
  source 1..309: mol_type = other DNA

SEQ ID NO: 88427 - DNA, 1110 bp, synthetic construct
  misc_feature 1..1110: note = Description of Artificial Sequence: Synthetic coding sequence
  source 1..1110: mol_type = other DNA
atgcccagagcccccaagagacagagatgcatgcccgaggaggacctgcagagccagagcgagacccagggcctggagggcgcccaggcccccctggccgtggaggaggacgccagcagcagcaccagcaccagcagcagcttccccagcagcttccccagcagcagcagcagcagcagcagcagctgctaccccctgatccccagcacccccgaggaggtgagcgccgacgacgagacccccaaccccccccagagcgcccagatcgcctgcagcagccccagcgtggtggccagcctgcccctggaccagagcgacgagggcagcagcagccagaaggaggagagccccagcaccctgcaggtgctgcccgacagcgagagcctgcccagaagcgagatcgacgagaaggtgaccgacctggtgcagttcctgctgttcaagtaccagatgaaggagcccatcaccaaggccgagatcctggagagcgtgatcagaaactacgaggaccacttccccctgctgttcagcgaggccagcgagtgcatgctgctggtgttcggcatcgacgtgaaggaggtggaccccaccggccacagcttcgtgctggtgaccagcctgggcctgacctacgacggcatgctgagcgacgtgcagagcatgcccaagaccggcatcctgatcctgatcctgagcatcgtgttcatcgagggctactgcacccccgaggaggtgatctgggaggccctgaacatgatgggcctgtacgacggcatggagcacctgatctacggcgagcccagaaagctgctgacccaggactgggtgcaggagaactacctggagtacagacaggtgcccggcagcgaccccgccagatacgagttcctgtggggccccagagcccacgccgagatcagaaagatgagcctgctgaagttcctggccaaggtgaacggcagcgaccccagaagcttccccctgtggtacgaggaggccctgaaggacgaggaggagagagcccaggacagaatcgccaccaccgacgacaccaccgccatggccagcgccagcagcagcgccaccggcagcttcagctaccccgagtag

SEQ ID NO: 88428 - DNA, 1110 bp, synthetic construct; identical to SEQ ID NO: 88427
  misc_feature 1..1110: note = Description of Artificial Sequence: Synthetic coding sequence
  source 1..1110: mol_type = other DNA

SEQ ID NO: 88429 - DNA, 486 bp, synthetic construct
  misc_feature 1..486: note = Description of Artificial Sequence: Synthetic coding sequence
  source 1..486: mol_type = other DNA
atgcccagagcccccaagagacagagatgcatgcccgaggaggacctgcagagccagagcgagacccagggcctggagggcgcccaggcccccctggccgtggaggaggacgccagcagcagcaccagcaccagcagcagcttccccagcagcttccccagcagcagcagcagcagcagcagcagctgctaccccctgatccccagcacccccgaggaggtgagcgccgacgacgagacccccaaccccccccagagcgcccagatcgcctgcagcagccccagcgtggtggccagcctgcccctggaccagagcgacgagggcagcagcagccagaaggaggagagccccagcaccctgcaggtgctgcccgacagcgagagcctgcccagaagcgagatcgacgagaaggtgaccgacctggtgcagttcctgctgttcaagtaccagatgaaggagcccatcaccaaggccgagatcctgtag

SEQ ID NO: 88430 - DNA, 573 bp, synthetic construct
  misc_feature 1..573: note = Description of Artificial Sequence: Synthetic coding sequence
  source 1..573: mol_type = other DNA
atgcccagagcccccaagagacagagatgcatgcccgaggaggacctgcagagccagagcgagacccagggcctggagggcgcccaggcccccctggccgtggaggaggacgccagcagcagcaccagcaccagcagcagcttccccagcagcttccccagcagcagcagcagcagcagcagcagctgctaccccctgatccccagcacccccgaggaggtgagcgccgacgacgagacccccaaccccccccagagcgcccagatcgcctgcagcagccccagcgtggtggccagcctgcccctggaccagagcgacgagggcagcagcagccagaaggaggagagccccagcaccctgcaggtgctgcccgacagcgagagcctgcccagaagcgagatcgacgagaaggtgaccgacctggtgcagttcctgctgttcaagtaccagatgaaggagcccatcaccaaggccgagatcctggagagcgtgatcagaaactacgaggaccacttccccctgctgttcagcgaggccagcgagtgcatgctgctggtgttcggcatcgactag

SEQ ID NO: 88431 - DNA, 1203 bp, synthetic construct
  misc_feature 1..1203: note = Description of Artificial Sequence: Synthetic coding sequence
  source 1..1203: mol_type = other DNA
atgagcaaggtgagcaccatgttcagcgaggacgacttccagagcaccgagagagccccctacggcccccagctgcagtggagccaggacctgcccagagtgcaggtgttcagagagcaggccaacctggaggacagaagccccagaagaacccagagaatcaccggcggcgagcaggtgctgtggggccccatcacccagatcttccccaccgtgagacccgccgacctgaccagagtgatcatgcccctggagcagagaagccagcactgcaagcccgaggagggcctgcaggcccaggaggaggacctgggcctggtgggcgcccaggccctgcaggccgaggagcaggaggccgccttcttcagcagcaccctgaacgtgggcaccctggaggagctgcccgccgccgagagccccagccccccccagagcccccaggaggagagcttcagccccaccgccatggacgccatcttcggcagcctgagcgacgagggcagcggcagccaggagaaggagggccccagcaccagccccgacctgatcgaccccgagagcttcagccaggacatcctgcacgacaagatcatcgacctggtgcacctgctgctgagaaagtacagagtgaagggcctgatcaccaaggccgagatgctgggcagcgtgatcaagaactacgaggactacttccccgagatcttcagagaggccagcgtgtgcatgcagctgctgttcggcatcgacgtgaaggaggtggaccccaccagccacagctacgtgctggtgaccagcctgaacctgagctacgacggcatccagtgcaacgagcagagcatgcccaagagcggcctgctgatcatcgtgctgggcgtgatcttcatggagggcaactgcatccccgaggaggtgatgtgggaggtgctgagcatcatgggcgtgtacgccggcagagagcacttcctgttcggcgagcccaagagactgctgacccagaactgggtgcaggagaagtacctggtgtacagacaggtgcccggcaccgaccccgcctgctacgagttcctgtggggccccagagcccacgccgagaccagcaagatgaaggtgctggagtacatcgccaacgccaacggcagagaccccaccagctaccccagcctgtacgaggacgccctgagagaggagggcgagggcgtgtag

SEQ ID NO: 88432 - DNA, 1290 bp, synthetic construct
  misc_feature 1..1290: note = Description of Artificial Sequence: Synthetic coding sequence
  source 1..1290: mol_type = other DNA
atggagacccagttcagaagaggcggcctgggctgcagccccgccagcatcaagagaaagaagaagagagaggacagcggcgacttcggcctgcaggtgagcaccatgttcagcgaggacgacttccagagcaccgagagagccccctacggcccccagctgcagtggagccaggacctgcccagagtgcaggtgttcagagagcaggccaacctggaggacagaagccccagaagaacccagagaatcaccggcggcgagcaggtgctgtggggccccatcacccagatcttccccaccgtgagacccgccgacctgaccagagtgatcatgcccctggagcagagaagccagcactgcaagcccgaggagggcctgcaggcccaggaggaggacctgggcctggtgggcgcccaggccctgcaggccgaggagcaggaggccgccttcttcagcagcaccctgaacgtgggcaccctggaggagctgcccgccgccgagagccccagccccccccagagcccccaggaggagagcttcagccccaccgccatggacgccatcttcggcagcctgagcgacgagggcagcggcagccaggagaaggagggccccagcaccagccccgacctgatcgaccccgagagcttcagccaggacatcctgcacgacaagatcatcgacctggtgcacctgctgctgagaaagtacagagtgaagggcctgatcaccaaggccgagatgctgggcagcgtgatcaagaactacgaggactacttccccgagatcttcagagaggccagcgtgtgcatgcagctgctgttcggcatcgacgtgaaggaggtggaccccaccagccacagctacgtgctggtgaccagcctgaacctgagctacgacggcatccagtgcaacgagcagagcatgcccaagagcggcctgctgatcatcgtgctgggcgtgatcttcatggagggcaactgcatccccgaggaggtgatgtgggaggtgctgagcatcatgggcgtgtacgccggcagagagcacttcctgttcggcgagcccaagagactgctgacccagaactgggtgcaggagaagtacctggtgtacagacaggtgcccggcaccgaccccgcctgctacgagttcctgtggggccccagagcccacgccgagaccagcaagatgaaggtgctggagtacatcgccaacgccaacggcagagaccccaccagctaccccagcctgtacgaggacgccctgagagaggagggcgagggcgtgtag

SEQ ID NO: 88433 - DNA, 945 bp, synthetic construct
  misc_feature 1..945: note = Description of Artificial Sequence: Synthetic coding sequence
  source 1..945: mol_type = other DNA
atgcccctggagcagagaagccagcactgcaagcccgaggagggcctggaggcccagggcgaggccctgggcctggtgggcgcccaggcccccgccaccgaggagcaggagaccgccagcagcagcagcaccctggtggaggtgaccctgagagaggtgcccgccgccgagagccccagccccccccacagcccccagggcgccagcaccctgcccaccaccatcaactacaccctgtggagccagagcgacgagggcagcagcaacgaggagcaggagggccccagcaccttccccgacctggagaccagcttccaggtggccctgagcagaaagatggccgagctggtgcacttcctgctgctgaagtacagagccagagagcccttcaccaaggccgagatgctgggcagcgtgatcagaaacttccaggacttcttccccgtgatcttcagcaaggccagcgagtacctgcagctggtgttcggcatcgaggtggtggaggtggtgagaatcggccacctgtacatcctggtgacctgcctgggcctgagctacgacggcctgctgggcgacaaccagatcgtgcccaagaccggcctgctgatcatcgtgctggccatcatcgccaaggagggcgactgcgcccccgaggagaagatctgggaggagctgagcgtgctggaggccagcgacggcagagaggacagcgtgttcgcccaccccagaaagctgctgacccaggacctggtgcaggagaactacctggagtacagacaggtgcccggcagcgaccccgcctgctacgagttcctgtggggccccagagccctggtggagaccagctacgtgaaggtgctgcaccacctgctgaagatcagcggcggcccccacatcagctacccccccctgcacgagtgggccttcagagagggcgaggagtag

SEQ ID NO: 88434 - DNA, 945 bp, synthetic construct; identical to SEQ ID NO: 88433
  misc_feature 1..945: note = Description of Artificial Sequence: Synthetic coding sequence
  source 1..945: mol_type = other DNA

SEQ ID NO: 88435 - DNA, 945 bp, synthetic construct; identical to SEQ ID NO: 88433
  misc_feature 1..945: note = Description of Artificial Sequence: Synthetic coding sequence
  source 1..945: mol_type = other DNA

SEQ ID NO: 88436 - DNA, 945 bp, synthetic construct
  misc_feature 1..945: note = Description of Artificial Sequence: Synthetic coding sequence
  source 1..945: mol_type = other DNA
atgcccctggagcagagaagccagcactgcaagcccgaggagggcctggaggccagaggcgaggccctgggcctggtgggcgcccaggcccccgccaccgaggagcagcagaccgccagcagcagcagcaccctggtggaggtgaccctgggcgaggtgcccgccgccgacagccccagccccccccacagcccccagggcgccagcagcttcagcaccaccatcaactacaccctgtggagacagagcgacgagggcagcagcaaccaggaggaggagggccccagaatgttccccgacctggagagcgagttccaggccgccatcagcagaaagatggtggagctggtgcacttcctgctgctgaagtacagagccagagagcccgtgaccaaggccgagatgctggagagcgtgctgagaaactgccaggacttcttccccgtgatcttcagcaaggccagcgagtacctgcagctggtgttcggcatcgaggtggtggaggtggtgcccatcagccacctgtacatcctggtgacctgcctgggcctgagctacgacggcctgctgggcgacaaccaggtgatgcccaagaccggcctgctgatcatcgtgctggccatcatcgccatcgagggcgactgcgcccccgaggagaagatctgggaggagctgagcatgctggaggtgttcgagggcagagaggacagcgtgttcgcccaccccagaaagctgctgatgcaggacctggtgcaggagaactacctggagtacagacaggtgcccggcagcgaccccgcctgctacgagttcctgtggggccccagagccctgatcgagaccagctacgtgaaggtgctgcaccacaccctgaagatcggcggcgagccccacatcagctacccccccctgcacgagagagccctgagagagggcgaggagtag

SEQ ID NO: 88437 - DNA, 945 bp, synthetic construct; identical to SEQ ID NO: 88436
  misc_feature 1..945: note = Description of Artificial Sequence: Synthetic coding sequence
  source 1..945: mol_type = other DNA

SEQ ID NO: 88438 - DNA, 945 bp, synthetic construct; identical to SEQ ID NO: 88436
  misc_feature 1..945: note = Description of Artificial Sequence: Synthetic coding sequence
  source 1..945: mol_type = other DNA

SEQ ID NO: 88439 - DNA, 945 bp, synthetic construct; identical to SEQ ID NO: 88436
  misc_feature 1..945: note = Description of Artificial Sequence: Synthetic coding sequence
  source 1..945: mol_type = other DNA

SEQ ID NO: 88440 - DNA, 945 bp, synthetic construct
  misc_feature 1..945: note = Description of Artificial Sequence: Synthetic coding sequence
  source 1..945: mol_type = other DNA
atgcccctggagcagagaagccagcactgcaagcccgaggagggcctggaggccagaggcgaggccctgggcctggtgggcgcccaggcccccgccaccgaggagcaggaggccgccagcagcagcagcaccctggtggaggtgaccctgggcgaggtgcccgccgccgagagccccgaccccccccagagcccccagggcgccagcagcctgcccaccaccatgaactaccccctgtggagccagagctacgaggacagcagcaaccaggaggaggagggccccagcaccttccccgacctggagagcgagttccaggccgccctgagcagaaaggtggccgagctggtgcacttcctgctgctgaagtacagagccagagagcccgtgaccaaggccgagatgctgggcagcgtggtgggcaactggcagtacttcttccccgtgatcttcagcaaggccagcagcagcctgcagctggtgttcggcatcgagctgatggaggtggaccccatcggccacctgtacatcttcgccacctgcctgggcctgagctacgacggcctgctgggcgacaaccagatcatgcccaaggccggcctgctgatcatcgtgctggccatcatcgccagagagggcgactgcgcccccgaggagaagatctgggaggagctgagcgtgctggaggtgttcgagggcagagaggacagcatcctgggcgaccccaagaagctgctgacccagcacttcgtgcaggagaactacctggagtacagacaggtgcccggcagcgaccccgcctgctacgagttcctgtggggccccagagccctggtggagaccagctacgtgaaggtgctgcaccacatggtgaagatcagcggcggcccccacatcagctacccccccctgcacgagtgggtgctgagagagggcgaggagtag

SEQ ID NO: 88441 - DNA, 945 bp, synthetic construct; identical to SEQ ID NO: 88440
  misc_feature 1..945: note = Description of Artificial Sequence: Synthetic coding sequence
  source 1..945: mol_type = other DNA

SEQ ID NO: 88442 - DNA, 597 bp, synthetic construct
  misc_feature 1..597: note = Description of Artificial Sequence: Synthetic coding sequence
  source 1..597: mol_type = other DNA
atgcccctggagcagagaagccagcactgcaagcccgaggagggcctggaggccagaggcgaggccctgggcctggtgggcgcccaggcccccgccaccgaggagcaggaggccgccagcagcagcagcaccctggtggaggtgaccctgggcgaggtgcccgccgccgagagccccgaccccccccagagcccccagggcgccagcagcctgcccaccaccatgaactaccccctgtggagccagagctacgaggacagcagcaaccaggaggaggagggccccagcaccttccccgacctggagagcgagttccaggccgccctgagcagaaaggtggccgagctggtgcacttcctgctgctgaagtacagagccagagagcccgtgaccaaggccgagatgctgggcagcgtggtgggcaactggcagtacttcttccccgtgatcttcagcaaggccagcagcagcctgcagctggtgttcggcatcgagctgatggaggtggaccccatcggccacctgtacatcttcgccacctgcctgggcctgagctacgacggcctgctgggcgacaaccagatcatgcccaagtag

SEQ ID NO: 88443 - DNA, 954 bp, synthetic construct
  misc_feature 1..954: note = Description of Artificial Sequence: Synthetic coding sequence
  source 1..954: mol_type = other DNA
atgagcagcgagcagaagagccagcactgcaagcccgaggagggcgtggaggcccaggaggaggccctgggcctggtgggcgcccaggcccccaccaccgaggagcaggaggccgccgtgagcagcagcagccccctggtgcccggcaccctggaggaggtgcccgccgccgagagcgccggccccccccagagcccccagggcgccagcgccctgcccaccaccatcagcttcacctgctggagacagcccaacgagggcagcagcagccaggaggaggagggccccagcaccagccccgacgccgagagcctgttcagagaggccctgagcaacaaggtggacgagctggcccacttcctgctgagaaagtacagagccaaggagctggtgaccaaggccgagatgctggagagagtgatcaagaactacaagagatgcttccccgtgatcttcggcaaggccagcgagagcctgaagatgatcttcggcatcgacgtgaaggaggtggaccccgccagcaacacctacaccctggtgacctgcctgggcctgagctacgacggcctgctgggcaacaaccagatcttccccaagaccggcctgctgatcatcgtgctgggcaccatcgccatggagggcgacagcgccagcgaggaggagatctgggaggagctgggcgtgatgggcgtgtacgacggcagagagcacaccgtgtacggcgagcccagaaagctgctgacccaggactgggtgcaggagaactacctggagtacagacaggtgcccggcagcaaccccgccagatacgagttcctgtggggccccagagccctggccgagaccagctacgtgaaggtgctggagcacgtggtgagagtgaacgccagagtgagaatcgcctaccccagcctgagagaggccgccctgctggaggaggaggagggcgtgtag

SEQ ID NO: 88444 - DNA, 954 bp, synthetic construct; identical to SEQ ID NO: 88443
  misc_feature 1..954: note = Description of Artificial Sequence: Synthetic coding sequence
  source 1..954: mol_type = other DNA

SEQ ID NO: 88445 - DNA, 954 bp, synthetic construct; identical to SEQ ID NO: 88443
  misc_feature 1..954: note = Description of Artificial Sequence: Synthetic coding sequence
  source 1..954: mol_type = other DNA

SEQ ID NO: 88446 - DNA, 954 bp, synthetic construct; identical to SEQ ID NO: 88443
  misc_feature 1..954: note = Description of Artificial Sequence: Synthetic coding sequence
  source 1..954: mol_type = other DNA

SEQ ID NO: 88447 - DNA, 954 bp, synthetic construct; identical to SEQ ID NO: 88443
  misc_feature 1..954: note = Description of Artificial Sequence: Synthetic coding sequence
  source 1..954: mol_type = other DNA

SEQ ID NO: 88448 - DNA, 954 bp, synthetic construct; identical to SEQ ID NO: 88443
  misc_feature 1..954: note = Description of Artificial Sequence: Synthetic coding sequence
  source 1..954: mol_type = other DNA

SEQ ID NO: 88449 - DNA, 954 bp, synthetic construct; identical to SEQ ID NO: 88443
  misc_feature 1..954: note = Description of Artificial Sequence: Synthetic coding sequence
  source 1..954: mol_type = other DNA

SEQ ID NO: 88450 - DNA, 693 bp, synthetic construct
  misc_feature 1..693: note = Description of Artificial Sequence: Synthetic coding sequence
  source 1..693: mol_type = other DNA
atgagcagcgagcagaagagccagcactgcaagcccgaggagggcgtggaggcccaggaggaggccctgggcctggtgggcgcccaggcccccaccaccgaggagcaggaggccgccgtgagcagcagcagccccctggtgcccggcaccctggaggaggtgcccgccgccgagagcgccggccccccccagagcccccagggcgccagcgccctgcccaccaccatcagcttcacctgctggagacagcccaacgagggcagcagcagccaggaggaggagggccccagcaccagccccgacgccgagagcctgttcagagaggccctgagcaacaaggtggacgagctggcccacttcctgctgagaaagtacagagccaaggagctggtgaccaaggccgagatgctggagagagtgatcaagaactacaagagatgcttccccgtgatcttcggcaaggccagcgagagcctgaagatgatcttcggcatcgacgtgaaggaggtggaccccgccagcaacacctacaccctggtgacctgcctgggcctgagctacgacggcctgctgggcaacaaccagatcttccccaagaccggcctgctgatcatcgtgctgggcaccatcgccatggagggcgacagcgccagcgaggaggagatctgggaggagctgggcgtgatgggctag

SEQ ID NO: 88451 - DNA, 654 bp, synthetic construct
  misc_feature 1..654: note = Description of Artificial Sequence: Synthetic coding sequence
  source 1..654: mol_type = other DNA
atgagcagcgagcagaagagccagcactgcaagcccgaggagggcgtggaggcccaggaggaggccctgggcctggtgggcgcccaggcccccaccaccgaggagcaggaggccgccgtgagcagcagcagccccctggtgcccggcaccctggaggaggtgcccgccgccgagagcgccggccccccccagagcccccagggcgccagcgccctgcccaccaccatcagcttcacctgctggagacagcccaacgagggcagcagcagccaggaggaggagggccccagcaccagccccgacgccgagagcctgttcagagaggccctgagcaacaaggtggacgagctggcccacttcctgctgagaaagtacagagccaaggagctggtgaccaaggccgagatgctggagagagtgatcaagaactacaagagatgcttccccgtgatcttcggcaaggccagcgagagcctgaagatgatcttcggcatcgacgtgaaggaggtggaccccgccagcaacacctacaccctggtgacctgcctgggcctgagctacgacggcctgctgggcaacaaccagatcttccccaagaccggcctgctgatcatcgtgctgggcaccatcgccatggagggcgacagcgcctag

SEQ ID NO: 88452 - DNA, 726 bp, synthetic construct
  misc_feature 1..726: note = Description of Artificial Sequence: Synthetic coding sequence
  source 1..726: mol_type = other DNA
atgagcagcgagcagaagagccagcactgcaagcccgaggagggcgtggaggcccaggaggaggccctgggcctggtgggcgcccaggcccccaccaccgaggagcaggaggccgccgtgagcagcagcagccccctggtgcccggcaccctggaggaggtgcccgccgccgagagcgccggccccccccagagcccccagggcgccagcgccctgcccaccaccatcagcttcacctgctggagacagcccaacgagggcagcagcagccaggaggaggagggccccagcaccagccccgacgccgagagcctgttcagagaggccctgagcaacaaggtggacgagctggcccacttcctgctgagaaagtacagagccaaggagctggtgaccaaggccgagatgctggagagagtgatcaagaactacaagagatgcttccccgtgatcttcggcaaggccagcgagagcctgaagatgatcttcggcatcgacgtgaaggaggtggaccccgccagcaacacctacaccctggtgacctgcctgggcctgagctacgacggcctgctgggcaacaaccagatcttccccaagaccggcctgctgatcatcgtgctgggcaccatcgccatggagggcgacagcgccagcgaggaggagatctgggaggagctgggcgtgatgggcgtgtacgacggcagagagcacaccgtgtacggctag

SEQ ID NO: 88453 - DNA, 519 bp, synthetic construct
  misc_feature 1..519: note = Description of Artificial Sequence: Synthetic coding sequence
  source 1..519: mol_type = other DNA
atgagcagcgagcagaagagccagcactgcaagcccgaggagggcgtggaggcccaggaggaggccctgggcctggtgggcgcccaggcccccaccaccgaggagcaggaggccgccgtgagcagcagcagccccctggtgcccggcaccctggaggaggtgcccgccgccgagagcgccggccccccccagagcccccagggcgccagcgccctgcccaccaccatcagcttcacctgctggagacagcccaacgagggcagcagcagccaggaggaggagggccccagcaccagccccgacgccgagagcctgttcagagaggccctgagcaacaaggtggacgagctggcccacttcctgctgagaaagtacagagccaaggagctggtgaccaaggccgagatgctggagagagtgatcaagaactacaagagatgcttccccgtgatcttcggcaaggccagcgagagcctgaagatgatcttcggcatcgacgtgaaggaggtggacccctag

SEQ ID NO: 88454 - DNA, 726 bp, synthetic construct; identical to SEQ ID NO: 88452
  misc_feature 1..726: note = Description of Artificial Sequence: Synthetic coding sequence
  source 1..726: mol_type = other DNA

SEQ ID NO: 88455 - DNA, 726 bp, synthetic construct; identical to SEQ ID NO: 88452
  misc_feature 1..726: note = Description of Artificial Sequence: Synthetic coding sequence
  source 1..726: mol_type = other DNA

SEQ ID NO: 88456 - DNA, 654 bp, synthetic construct; identical to SEQ ID NO: 88451
  misc_feature 1..654: note = Description of Artificial Sequence: Synthetic coding sequence
  source 1..654: mol_type = other DNA

SEQ ID NO: 88457 - DNA, 726 bp, synthetic construct; identical to SEQ ID NO: 88452
  misc_feature 1..726: note = Description of Artificial Sequence: Synthetic coding sequence
  source 1..726: mol_type = other DNA

SEQ ID NO: 88458 - DNA, 945 bp, synthetic construct
  misc_feature 1..945: note = Description of Artificial Sequence: Synthetic coding sequence
  source 1..945: mol_type = other DNA
atgcccctggagcagagaagccagcactgcaagcccgaggagggcctggaggccagaggcgaggccctgggcctggtgggcgcccaggcccccgccaccgaggagcaggaggccgccagcagcagcagcaccctggtggaggtgaccctgggcgaggtgcccgccgccgagagccccgaccccccccagagcccccagggcgccagcagcctgcccaccaccatgaactaccccctgtggagccagagctacgaggacagcagcaaccaggaggaggagggccccagcaccttccccgacctggagagcgagttccaggccgccctgagcagaaaggtggccaagctggtgcacttcctgctgctgaagtacagagccagagagcccgtgaccaaggccgagatgctgggcagcgtggtgggcaactggcagtacttcttccccgtgatcttcagcaaggccagcgacagcctgcagctggtgttcggcatcgagctgatggaggtggaccccatcggccacgtgtacatcttcgccacctgcctgggcctgagctacgacggcctgctgggcgacaaccagatcatgcccaagaccggcttcctgatcatcatcctggccatcatcgccaaggagggcgactgcgcccccgaggagaagatctgggaggagctgagcgtgctggaggtgttcgagggcagagaggacagcatcttcggcgaccccaagaagctgctgacccagtacttcgtgcaggagaactacctggagtacagacaggtgcccggcagcgaccccgcctgctacgagttcctgtggggccccagagccctgatcgagaccagctacgtgaaggtgctgcaccacatggtgaagatcagcggcggccccagaatcagctaccccctgctgcacgagtgggccctgagagagggcgaggagtag

SEQ ID NO: 88459 - DNA, 606 bp, synthetic construct
  misc_feature 1..606: note = Description of Artificial Sequence: Synthetic coding sequence
  source 1..606: mol_type = other DNA
atgcccctggagcagagaagccagcactgcaagcccgaggagggcctggaggccagaggcgaggccctgggcctggtgggcgcccaggcccccgccaccgaggagcaggaggccgccagcagcagcagcaccctggtggaggtgaccctgggcgaggtgcccgccgccgagagccccgaccccccccagagcccccagggcgccagcagcctgcccaccaccatgaactaccccctgtggagccagagctacgaggacagcagcaaccaggaggaggagggccccagcaccttccccgacctggagagcgagttccaggccgccctgagcagaaaggtggccaagctggtgcacttcctgctgctgaagtacagagccagagagcccgtgaccaaggccgagatgctgggcagcgtggtgggcaactggcagtacttcttccccgtgatcttcagcaaggccagcgacagcctgcagctggtgttcggcatcgagctgatggaggtggaccccatcggccacgtgtacatcttcgccacctgcctgggcctgagctacgacggcctgctgggcgacaaccagatcatgcccaagaccggcttctag

SEQ ID NO: 88460 - DNA, 708 bp, synthetic construct
  misc_feature 1..708: note = Description of Artificial Sequence: Synthetic coding sequence
  source 1..708: mol_type = other DNA
atgcccctggagcagagaagccagcactgcaagcccgaggagggcctggaggccagaggcgaggccctgggcctggtgggcgcccaggcccccgccaccgaggagcaggaggccgccagcagcagcagcaccctggtggaggtgaccctgggcgaggtgcccgccgccgagagccccgaccccccccagagcccccagggcgccagcagcctgcccaccaccatgaactaccccctgtggagccagagctacgaggacagcagcaaccaggaggaggagggccccagcaccttccccgacctggagagcgagttccaggccgccctgagcagaaaggtggccaagctggtgcacttcctgctgctgaagtacagagccagagagcccgtgaccaaggccgagatgctgggcagcgtggtgggcaactggcagtacttcttccccgtgatcttcagcaaggccagcgacagcctgcagctggtgttcggcatcgagctgatggaggtggaccccatcggccacgtgtacatcttcgccacctgcctgggcctgagctacgacggcctgctgggcgacaaccagatcatgcccaagaccggcttcctgatcatcatcctggccatcatcgccaaggagggcgactgcgcccccgaggagaagatctgggaggagctgagcgtgctggaggtgttcgagggcagagagtag

SEQ ID NO: 88461 - DNA, 957 bp, synthetic construct
  misc_feature 1..957: note = Description of Artificial Sequence: Synthetic coding sequence
  source 1..957: mol_type = other DNA
atgctgctgggccagaagagccagagatacaaggccgaggagggcctgcaggcccagggcgaggcccccggcctgatggacgtgcagatccccaccgccgaggagcagaaggccgccagcagcagcagcaccctgatcatgggcaccctggaggaggtgaccgacagcggcagccccagccccccccagagccccgagggcgccagcagcagcctgaccgtgaccgacagcaccctgtggagccagagcgacgagggcagcagcagcaacgaggaggagggccccagcaccagccccgaccccgcccacctggagagcctgttcagagaggccctggacgagaaggtggccgagctggtgagattcctgctgagaaagtaccagatcaaggagcccgtgaccaaggccgagatgctggagagcgtgatcaagaactacaagaaccacttccccgacatcttcagcaaggccagcgagtgcatgcaggtgatcttcggcatcgacgtgaaggaggtggaccccgccggccacagctacatcctggtgacctgcctgggcctgagctacgacggcctgctgggcgacgaccagagcacccccaagaccggcctgctgatcatcgtgctgggcatgatcctgatggagggcagcagagcccccgaggaggccatctgggaggccctgagcgtgatgggcctgtacgacggcagagagcacagcgtgtactggaagctgagaaagctgctgacccaggagtgggtgcaggagaactacctggagtacagacaggcccccggcagcgaccccgtgagatacgagttcctgtggggccccagagccctggccgagaccagctacgtgaaggtgctggagcacgtggtgagagtgaacgccagagtgagaatcagctaccccagcctgcacgaggaggccctgggcgaggagaagggcgtgtag

SEQ ID NO: 88462 - DNA, 957 bp, synthetic construct; identical to SEQ ID NO: 88461
  misc_feature 1..957: note = Description of Artificial Sequence: Synthetic coding sequence
  source 1..957: mol_type = other DNA

SEQ ID NO: 88463 - DNA, 957 bp, synthetic construct; identical to SEQ ID NO: 88461
  misc_feature 1..957: note = Description of Artificial Sequence: Synthetic coding sequence
  source 1..957: mol_type = other DNA

SEQ ID NO: 88464 - DNA, 948 bp, synthetic construct
  misc_feature 1..948: note = Description of Artificial Sequence: Synthetic coding sequence
  source 1..948: mol_type = other DNA
atgagcctggagcagagaagcccccactgcaagcccgacgaggacctggaggcccagggcgaggacctgggcctgatgggcgcccaggagcccaccggcgaggaggaggagaccaccagcagcagcgacagcaaggaggaggaggtgagcgccgccggcagcagcagccccccccagagcccccagggcggcgccagcagcagcatcagcgtgtactacaccctgtggagccagttcgacgagggcagcagcagccaggaggaggaggagcccagcagcagcgtggaccccgcccagctggagttcatgttccaggaggccctgaagctgaaggtggccgagctggtgcacttcctgctgcacaagtacagagtgaaggagcccgtgaccaaggccgagatgctggagagcgtgatcaagaactacaagagatacttccccgtgatcttcggcaaggccagcgagttcatgcaggtgatcttcggcaccgacgtgaaggaggtggaccccgccggccacagctacatcctggtgaccgccctgggcctgagctgcgacagcatgctgggcgacggccacagcatgcccaaggccgccctgctgatcatcgtgctgggcgtgatcctgaccaaggacaactgcgcccccgaggaggtgatctgggaggccctgagcgtgatgggcgtgtacgtgggcaaggagcacatgttctacggcgagcccagaaagctgctgacccaggactgggtgcaggagaactacctggagtacagacaggtgcccggcagcgaccccgcccactacgagttcctgtggggcagcaaggcccacgccgagaccagctacgagaaggtgatcaactacctggtgatgctgaacgccagagagcccatctgctaccccagcctgtacgaggaggtgctgggcgaggagcaggagggcgtgtag

SEQ ID NO: 88465 - DNA, 345 bp, synthetic construct
  misc_feature 1..345: note = Description of Artificial Sequence: Synthetic coding sequence
  source 1..345: mol_type = other DNA
atgagcctggagcagagaagcccccactgcaagcccgacgaggacctggaggcccagggcgaggacctgggcctgatgggcgcccaggagcccaccggcgaggaggaggagaccaccagcagcagcgacagcaaggaggaggaggtgagcgccgccggcagcagcagccccccccagagcccccagggcggcgccagcagcagcatcagcgtgtactacaccctgtggagccagttcgacgagggcagcagcagccaggaggaggaggagcccagcagcagcgtggaccccgcccagctggagttcatgttccaggaggccctgaagctgaaggtggccgagtag

SEQ ID NO: 88466 - DNA, 930 bp, synthetic construct
  misc_feature 1..930: note = Description of Artificial Sequence: Synthetic coding sequence
  source 1..930: mol_type = other DNA
atgagcctggagcagagaagcccccactgcaagcccgacgaggacctggaggcccagggcgaggacctgggcctgatgggcgcccaggagcccaccggcgaggaggaggagaccaccagcagcagcgacagcaaggaggaggaggtgagcgccgccggcagcagcagccccccccagagcccccagggcggcgccagcagcagcatcagcgtgtactacaccctgtggagccagttcgacgagggcagcagcagccaggaggaggaggagcccagcagcagcgtggaccccgcccagctggagttcatgttccaggaggccctgaagctgaaggtggccgagctggtgcacttcctgctgcacaagtacagagtgaaggagcccgtgaccaaggccgagatgctggagagcgtgatcaagaactacaagagatacttccccgtgatcttcggcaaggccagcgagttcatgcaggtgatcttcggcaccgacgtgaaggaggtggaccccgccggccacagctacatcctggtgaccgccctgggcctgagctgcgacagcatgctgggcgacggccacagcatgcccaaggccgccctgctgatcatcgtgctgggcgtgatcctgaccaaggacaactgcgcccccgaggaggtgatctgggaggccctgagcgtgatgggcgtgtacgtgggcaaggagcacatgttctacggcgagcccagaaagctgctgacccaggactgggtgcaggagaactacctggagtacagacaggtgcccggcagcgaccccgcccactacgagttcctgtggggcagcaaggcccacgccgagaccagctacgagaaggtgatcaactacctggtgatgctgaacgccagagagcccatctgctaccccagcctgtacgaggaggtgctgggctag

SEQ ID NO: 88467 - DNA, 591 bp, synthetic construct
  misc_feature 1..591: note = Description of Artificial Sequence: Synthetic coding sequence
  source 1..591: mol_type = other DNA
atgagcctggagcagagaagcccccactgcaagcccgacgaggacctggaggcccagggcgaggacctgggcctgatgggcgcccaggagcccaccggcgaggaggaggagaccaccagcagcagcgacagcaaggaggaggaggtgagcgccgccggcagcagcagccccccccagagcccccagggcggcgccagcagcagcatcagcgtgtactacaccctgtggagccagttcgacgagggcagcagcagccaggaggaggaggagcccagcagcagcgtggaccccgcccagctggagttcatgttccaggaggccctgaagctgaaggtggccgagctggtgcacttcctgctgcacaagtacagagtgaaggagcccgtgaccaaggccgagatgctggagagcgtgatcaagaactacaagagatacttccccgtgatcttcggcaaggccagcgagttcatgcaggtgatcttcggcaccgacgtgaaggaggtggaccccgccggccacagctacatcctggtgaccgccctgggcctgagctgcgacagcatgctgggcgacggccacagcatgccctag

SEQ ID NO: 88468 - DNA, 294 bp, synthetic construct
  misc_feature 1..294: note = Description of Artificial Sequence: Synthetic coding sequence
  source 1..294: mol_type = other DNA
atgagcctggagcagagaagcccccactgcaagcccgacgaggacctggaggcccagggcgaggacctgggcctgatgggcgcccaggagcccaccggcgaggaggaggagaccaccagcagcagcgacagcaaggaggaggaggtgagcgccgccggcagcagcagccccccccagagcccccagggcggcgccagcagcagcatcagcgtgtactacaccctgtggagccagttcgacgagggcagcagcagccaggaggaggaggagcccagcagcagcgtggacccctag

SEQ ID NO: 88469 - DNA, 948 bp, synthetic construct; identical to SEQ ID NO: 88464
  misc_feature 1..948: note = Description of Artificial Sequence: Synthetic coding sequence
  source 1..948: mol_type = other DNA

SEQ ID NO: 88470 - DNA, 1044 bp, synthetic construct
  misc_feature 1..1044: note = Description of Artificial Sequence: Synthetic coding sequence
  source 1..1044: mol_type = other DNA
atgcccagaggccagaagagcaagctgagagccagagagaagagaagaaaggccagagaggagacccagggcctgaaggtggcccacgccaccgccgccgagaaggaggagtgccccagcagcagccccgtgctgggcgacacccccaccagcagccccgccgccggcatcccccagaagccccagggcgccccccccaccaccaccgccgccgccgccgtgagctgcaccgagagcgacgagggcgccaagtgccagggcgaggagaacgccagcttcagccaggccaccaccagcaccgagagcagcgtgaaggaccccgtggcctgggaggccggcatgctgatgcacttcatcctgagaaagtacaagatgagagagcccatcatgaaggccgacatgctgaaggtggtggacgagaagtacaaggaccacttcaccgagatcctgaacggcgccagcagaagactggagctggtgttcggcctggacctgaaggaggacaaccccagcggccacacctacaccctggtgagcaagctgaacctgaccaacgacggcaacctgagcaacgactgggacttccccagaaacggcctgctgatgcccctgctgggcgtgatcttcctgaagggcaacagcgccaccgaggaggagatctggaagttcatgaacgtgctgggcgcctacgacggcgaggagcacctgatctacggcgagcccagaaagttcatcacccaggacctggtgcaggagaagtacctgaagtacgagcaggtgcccaacagcgacccccccagataccagttcctgtggggccccagagcctacgccgagaccaccaagatgaaggtgctggagttcctggccaagatgaacggcgccacccccagagacttccccagccactacgaggaggccctgagagacgaggaggagagagcccaggtgagaagcagcgtgagagccagaagaagaaccaccgccaccaccttcagagccagaagcagagcccccttcagcagaagcagccaccccatgtag

SEQ ID NO: 88471 - DNA, 1044 bp, synthetic construct; identical to SEQ ID NO: 88470
  misc_feature 1..1044: note = Description of Artificial Sequence: Synthetic coding sequence
  source 1..1044: mol_type = other DNA

SEQ ID NO: 88472 - DNA, 1044 bp, synthetic construct; identical to SEQ ID NO: 88470
  misc_feature 1..1044: note = Description of Artificial Sequence: Synthetic coding sequence
  source 1..1044: mol_type = other DNA

SEQ ID NO: 88473 - DNA, 1044 bp, synthetic construct
  misc_feature 1..1044: note = Description of Artificial Sequence: Synthetic coding sequence
  source 1..1044: mol_type = other DNA
atgcccagaggccagaagagcaagctgagagccagagagaagagaagacaggccagaggcggcctggaggacctgatcgacgccctggacatcctggaggaggaggaggagagcccccccagcgccagcgcctgcctgaaggacgtgttccagagcagcctggacggcgccagcaacaacccccacggcctgagagaggcccagagcaccagcaccagcgccaccgccgccagccacaccagacaccccgagggcgtgaacgaccagatggaggagagacccatctgcacccaggacctggaggccaccgacagcttccccagaggccccgtggacgagaaggtgatcatcctggtgcactacctgctgtacaagtaccagatgaaggagcccatcaccaaggccgacatgctgagaaacgtgacccagatgagcaagagccagttccccgtgatcctgagcagagccagcgagcacctggagctgatcttcggcctggacctgaaggaggtggagcccaacaagcacatctacgtgctggtgaacaagctggacctgggctgcgacgccaagctgagcgacgagaccggcgtgcccaagaccggcctgctgatgaccgtgctgggcatcatcttcaccaacggcaactgcgtggccgaggaggaggtgtggaaggtgttcaacaccatgggcctgtacgacggcatcgagcacttcatgttcggcgagcccagaaagctgctgaccaaggacctggtgaaggagaactacctggagtaccagcaggtgcccaacagcgacccccccagataccagttcctgtggggccccagagcccacgccgagaccagcaagatgaaggtgctggagttcctggccaaggtgaacgacaccgcccccagcgagttcagcaactggtacaccgaggccctgcaggacgaggaggagagagccagagccagagtggccgccaaggccagagtgagcgccaccgccggcgccagaagcaaggtgaagagcagcaagagcagccagctgcagtag

SEQ ID NO: 88474 - DNA, 975 bp, synthetic construct
  misc_feature 1..975: note = Description of Artificial Sequence: Synthetic coding sequence
  source 1..975: mol_type = other DNA
atgagccaggaccaggagagccccagatgcacccacgaccagcacctgcagaccttcagcgagacccagagcctggaggtggcccaggtgagcaaggccctggagaagaccctgctgagcagcagccaccccctggtgcccggcaagctgaaggaggcccccgccgccaaggccgagagccccctggaggtgccccagagcttctgcagcagcagcatcgccgtgaccaccaccagcagcagcgagagcgacgaggccagcagcaaccaggaggaggaggacagccccagcagcagcgaggacaccagcgaccccagaaacgtgcccgccgacgccctggaccagaaggtggccttcctggtgaacttcatgctgcacaagtgccagatgaagaagcccatcaccaaggccgacatgctgaagatcatcatcaaggacgacgagagccacttcagcgagatcctgctgagagccagcgagcacctggagatgatcttcggcctggacgtggtggaggtggaccccaccacccactgctacggcctgttcatcaagctgggcctgacctacgacggcatgctgagcggcgagaagggcgtgcccaagaccggcctgctgatcatcgtgctgggcgtgatcttcatgaagggcaacagagccaccgaggaggaggtgtgggaggtgctgaacctgaccggcgtgtacagcggcaagaagcacttcatcttcggcgagcccagaatgctgatcaccaaggacttcgtgaaggagaagtacctggagtaccagcaggtggccaacagcgaccccgccagatacgagttcctgtggggccccagagccaaggccgagaccagcaagatgaaggtgctggagttcgtggccaaggtgcacggcagctacccccacagcttccccagccagtacgccgaggccctgaaggaggaggaggagagagccagagccagaatctag

SEQ ID NO: 88475 - DNA, 975 bp, synthetic construct; identical to SEQ ID NO: 88474
  misc_feature 1..975: note = Description of Artificial Sequence: Synthetic coding sequence
  source 1..975: mol_type = other DNA

SEQ ID NO: 88476 - DNA, 975 bp, synthetic construct; identical to SEQ ID NO: 88474
  misc_feature 1..975: note = Description of Artificial Sequence: Synthetic coding sequence
  source 1..975: mol_type = other DNA

SEQ ID NO: 88477 - DNA, 975 bp, synthetic construct; identical to SEQ ID NO: 88474
  misc_feature 1..975: note = Description of Artificial Sequence: Synthetic coding sequence
  source 1..975: mol_type = other DNA

SEQ ID NO: 88478 - DNA, 1071 bp, synthetic construct
  misc_feature 1..1071: note = Description of Artificial Sequence: Synthetic coding sequence
  source 1..1071: mol_type = other DNA
atgggcaccgaggcccagcccgtggtgaaggccgtgatcctgcactgcctgcccagctgcccccacagctgcctgctgccccccaccagagtgatcatgagccaggaccaggagagccccagatgcacccacgaccagcacctgcagaccttcagcgagacccagagcctggaggtggcccaggtgagcaaggccctggagaagaccctgctgagcagcagccaccccctggtgcccggcaagctgaaggaggcccccgccgccaaggccgagagccccctggaggtgccccagagcttctgcagcagcagcatcgccgtgaccaccaccagcagcagcgagagcgacgaggccagcagcaaccaggaggaggaggacagccccagcagcagcgaggacaccagcgaccccagaaacgtgcccgccgacgccctggaccagaaggtggccttcctggtgaacttcatgctgcacaagtgccagatgaagaagcccatcaccaaggccgacatgctgaagatcatcatcaaggacgacgagagccacttcagcgagatcctgctgagagccagcgagcacctggagatgatcttcggcctggacgtggtggaggtggaccccaccacccactgctacggcctgttcatcaagctgggcctgacctacgacggcatgctgagcggcgagaagggcgtgcccaagaccggcctgctgatcatcgtgctgggcgtgatcttcatgaagggcaacagagccaccgaggaggaggtgtgggaggtgctgaacctgaccggcgtgtacagcggcaagaagcacttcatcttcggcgagcccagaatgctgatcaccaaggacttcgtgaaggagaagtacctggagtaccagcaggtggccaacagcgaccccgccagatacgagttcctgtggggccccagagccaaggccgagaccagcaagatgaaggtgctggagttcgtggccaaggtgcacggcagctacccccacagcttccccagccagtacgccgaggccctgaaggaggaggaggagagagccagagccagaatctag

SEQ ID NO: 88479 - DNA, 996 bp, synthetic construct
  misc_feature 1..996: note = Description of Artificial Sequence: Synthetic coding sequence
  source 1..996: mol_type = other DNA
atgcccagaggccaggccagcaagagaagagccagagagaagagaagacaggccagaggcgaggaccagtgcctgggcggcgcccaggccaccgccgccgagaaggagaagctgcccagcagcagcagccccgcctgccagagccccccccagagcttccccaacgccggcatcccccaggagagccagagagccagctaccccagcagccccgccagcgccgtgagcctgaccagcagcgacgagggcgccaagggccagaagggcgagagccccaacagcttccacggccccagcagcagcgagagcaccggcagagacctgctgaacaccaagaccggcgagctggtgcagttcctgctgaacaagtacatcagaaaggagcccatcaccagagaggccatgctgaaggtgatcaacagaaagtacaagcagcacttccccgagatcctgagaagaagcaccgagaacgtggaggtggtgttcggcctgtacctgaaggagatggaccccagcagacagagctacgtgctggtgggcaagctggacttccccaaccagggcagcctgagcgacggcggcggcttccccctgagcggcctgctgatggtgctgctgagcaccatcttcatgcacggcaacagagccaccgaggaggagatgtgggagtgcctgaacgccctgggcatgtacaagggcagaaagcacttcatctacggcgagccccaggagctggtgaccaaggacctggtgagagagggctacctggagtaccagcaggtgcccagcagcgacccccccagatacgagttcctgtggggccccagagccagagccgagaccagcaagatgaaggtgctggagttcgtggccaagctgaacgacaccgtggccagcacctacaagagcagatacgaggaggccctgagagaggaggaggagcaggccagagccagagccgtggccagagacagcgccagagccagagccagctag

SEQ ID NO: 88480 - DNA, 1011 bp, synthetic construct
  misc_feature 1..1011: note = Description of Artificial Sequence: Synthetic coding sequence
  source 1..1011: mol_type = other DNA
atgcccagaggccaggccagcaagagaagagccagagagaagagaagacaggccagaggcgaggaccagtgcctgggcggcgcccaggccaccgccgccgagaaggagaagctgcccagcagcagcagccccgcctgccagagccccccccagagcttccccaacgccggcatcccccaggagagccagagagccagctaccccagcagccccgccagcgccgtgagcctgaccagcagcgacgagggcgccaagggccagaagggcgagagccccaacagcttccacggccccagcagcagcgagagcaccggcagagacctgctgaacaccaagaccggcgagctggtgcagttcctgctgaacaagtacatcagaaaggagcccatcaccagagaggccatgctgaaggtgatcaacagaaagtacaagcagcacttccccgagatcctgagaagaagcaccgagaacgtggaggtggtgttcggcctgtacctgaaggagatggaccccagcagacagagctacgtgctggtgggcaagctggacttccccaaccagggcagcctgagcgacggcggcggcttccccctgagcggcctgctgatggtgctgctgagcaccatcttcatgcacggcaacagagccaccgaggaggagatgtgggagtgcctgaacgccctgggcatgtacaagggcagaaagcacttcatctacggcgagccccaggagctggtgaccaaggacctggtgagagagggctacctggagtaccagcaggtgcccagcagcgacccccccagatacgagttcctgtggggccccagagccagagccgagaccagcaagatgaaggtgctggagttcgtggccaagctgaacgacaccgtggccagcacctacaagagcagatacgaggaggccctgagagaggaggaggagcaggccagagccagagccgtggccagagacagcgccagagccagagccagcagaagcttccagccctag

SEQ ID NO: 88481 - DNA, 1011 bp, synthetic construct; identical to SEQ ID NO: 88480
  misc_feature 1..1011: note = Description of Artificial Sequence: Synthetic coding sequence
  source 1..1011: mol_type = other DNA

SEQ ID NO: 88482 - DNA, 960 bp, synthetic construct
  misc_feature 1..960: note = Description of Artificial Sequence: Synthetic coding sequence
  source 1..960: mol_type = other DNA
atgcccagaggccagaagagcaagctgagagccagagagaagagaagaaaggccagagacgagaccagaggcctgaacgtgccccaggtgaccgaggccgaggaggaggaggccccctgctgcagcagcagcgtgagcggcggcgccgccagcagcagccccgccgccggcatcccccaggagccccagagagcccccaccaccgccgccgccgccgccgccggcgtgagcagcaccaagagcaagaagggcgccaagagccaccagggcgagaagaacgccagcagcagccaggccagcaccagcaccaagagccccagcgaggaccccctgaccagaaagagcggcagcctggtgcagttcctgctgtacaagtacaagatcaagaagagcgtgaccaagggcgagatgctgaagatcgtgggcaagagattcagagagcacttccccgagatcctgaagaaggccagcgagggcctgagcgtggtgttcggcctggagctgaacaaggtgaaccccaacggccacacctacaccttcatcgacaaggtggacctgaccgacgaggagagcctgctgagcagctgggacttccccagaagaaagctgctgatgcccctgctgggcgtgatcttcctgaacggcaacagcgccaccgaggaggagatctgggagttcctgaacatgctgggcgtgtacgacggcgaggagcacagcgtgttcggcgagccctggaagctgatcaccaaggacctggtgcaggagaagtacctggagtacaagcaggtgcccagcagcgacccccccagattccagttcctgtggggccccagagcctacgccgagaccagcaagatgaaggtgctggagttcctggccaaggtgaacggcaccaccccctgcgccttccccacccactacgaggaggccctgaaggacgaggagaaggccggcgtgtag

SEQ ID NO: 88483 - DNA, 1041 bp, synthetic construct
  misc_feature 1..1041: note = Description of Artificial Sequence: Synthetic coding sequence
  source 1..1041: mol_type = other DNA
atgcccagaggccagaagagcaccctgcacgccagagagaagagacagcagaccagaggccagacccaggaccaccagggcgcccagatcaccgccaccaacaagaagaaggtgagcttcagcagccccctgatcctgggcgccaccatccagaagaagagcgccggcagaagcagaagcgccctgaagaagccccagagagccctgagcaccaccaccagcgtggacgtgagctacaagaagagctacaagggcgccaacagcaagatcgagaagaagcagagcttcagccagggcctgagcagcaccgtgcagagcagaaccgaccccctgatcatgaagaccaacatgctggtgcagttcctgatggagatgtacaagatgaagaagcccatcatgaaggccgacatgctgaagatcgtgcagaagagccacaagaactgcttccccgagatcctgaagaaggccagcttcaacatggaggtggtgttcggcgtggacctgaagaaggtggacagcaccaaggacagctacgtgctggtgagcaagatggacctgcccaacaacggcaccgtgaccagaggcagaggcttccccaagaccggcctgctgctgaacctgctgggcgtgatcttcatgaagggcaactgcgccaccgaggagaagatctgggagttcctgaacaagatgagaatctacgacggcaagaagcacttcatcttcggcgagcccagaaagctgatcacccaggacctggtgaagctgaagtacctggagtacagacaggtgcccaacagcaaccccgccagatacgagttcctgtggggccccagagcccacgccgagaccagcaagatgaaggtgctggagttctgggccaaggtgaacaagaccgtgcccagcgccttccagttctggtacgaggaggccctgagagacgaggaggagagagtgcaggccgccgccatgctgaacgacggcagcagcgccatgggcagaaagtgcagcaaggccaaggccagcagcagcagccacgcctag

SEQ ID NO: 88484 - DNA, 1041 bp, synthetic construct; identical to SEQ ID NO: 88483
  misc_feature 1..1041: note = Description of Artificial Sequence: Synthetic coding sequence
  source 1..1041: mol_type = other DNA

SEQ ID NO: 88485 - DNA, 1041 bp, synthetic construct
  misc_feature 1..1041: note = Description of Artificial Sequence: Synthetic coding sequence
  source 1..1041: mol_type = other DNA
atgcccagaggccagaagagcaagctgagagccagagagaagagacagagaaccagaggccagacccaggacctgaaggtgggccagcccaccgccgccgagaaggaggagagccccagcagcagcagcagcgtgctgagagacaccgccagcagcagcctggccttcggcatcccccaggagccccagagagagccccccaccaccagcgccgccgccgccatgagctgcaccggcagcgacaagggcgacgagagccaggacgaggagaacgccagcagcagccaggccagcaccagcaccgagagaagcctgaaggacagcctgaccagaaagaccaagatgctggtgcagttcctgctgtacaagtacaagatgaaggagcccaccaccaaggccgagatgctgaagatcatcagcaagaagtacaaggagcacttccccgagatcttcagaaaggtgagccagagaaccgagctggtgttcggcctggccctgaaggaggtgaaccccaccacccacagctacatcctggtgagcatgctgggccccaacgacggcaaccagagcagcgcctggaccctgcccagaaacggcctgctgatgcccctgctgagcgtgatcttcctgaacggcaactgcgccagagaggaggagatctgggagttcctgaacatgctgggcatctacgacggcaagagacacctgatcttcggcgagcccagaaagctgatcacccaggacctggtgcaggagaagtacctggagtaccagcaggtgcccaacagcgacccccccagataccagttcctgtggggccccagagcccacgccgagaccagcaagatgaaggtgctggagttcctggccaaggtgaacgacaccacccccaacaacttccccctgctgtacgaggaggccctgagagacgaggaggagagagccggcgccagacccagagtggccgccagaagaggcaccaccgccatgaccagcgcctacagcagagccaccagcagcagcagcagccagcccatgtag

SEQ ID NO: 88486 - DNA, 828 bp, synthetic construct
  misc_feature 1..828: note = Description of Artificial Sequence: Synthetic coding sequence
  source 1..828: mol_type = other DNA
atgaccagcgccggcgtgttcaacgccggcagcgacgagagagccaacagcagagacgaggagtacccctgcagcagcgaggtgagccccagcaccgagagcagctgcagcaacttcatcaacatcaaggtgggcctgctggagcagttcctgctgtacaagttcaagatgaagcagagaatcctgaaggaggacatgctgaagatcgtgaaccccagataccagaaccagttcgccgagatccacagaagagccagcgagcacatcgaggtggtgttcgccgtggacctgaaggaggtgaaccccacctgccacctgtacgacctggtgagcaagctgaagctgcccaacaacggcagaatccacgtgggcaaggtgctgcccaagaccggcctgctgatgaccttcctggtggtgatcttcctgaagggcaactgcgccaacaaggaggacacctggaagttcctggacatgatgcagatctacgacggcaagaagtactacatctacggcgagcccagaaagctgatcacccaggacttcgtgagactgacctacctggagtaccaccaggtgccctgcagctaccccgcccactaccagttcctgtggggccccagagcctacaccgagaccagcaagatgaaggtgctggagtacctggccaaggtgaacgacatcgcccccggcgccttcagcagccagtacgaggaggccctgcaggacgaggaggagagccccagccagagatgcagcagaaactggcactactgcagcggccaggactgcctgagagccaagttcagcagcttcagccagccctactag

SEQ ID NO: 88487 - DNA, 1224 bp, synthetic construct
  misc_feature 1..1224: note = Description of Artificial Sequence: Synthetic coding sequence
  source 1..1224: mol_type = other DNA
atgcccagaggccacaagagcaagctgagaacctgcgagaagagacaggagaccaacggccagccccagggcctgaccggcccccaggccaccgccgagaagcaggaggagagccacagcagcagcagcagcagcagagcctgcctgggcgactgcagaagaagcagcgacgccagcatcccccaggagagccagggcgtgagccccaccggcagccccgacgccgtggtgagctacagcaagagcgacgtggccgccaacggccaggacgagaagagccccagcaccagcagagacgccagcgtgccccaggagagccagggcgccagccccaccggcagccccgacgccggcgtgagcggcagcaagtacgacgtggccgccaacggccaggacgagaagagccccagcaccagccacgacgtgagcgtgccccaggagagccagggcgccagccccaccggcagccccgacgccggcgtgagcggcagcaagtacgacgtggccgccgagggcgaggacgaggagagcgtgagcgccagccagaaggccatcatcttcaagagactgagcaaggacgccgtgaagaagaaggcctgcaccctggcccagttcctgcagaagaagttcgagaagaaggagagcatcctgaaggccgacatgctgaagtgcgtgagaagagagtacaagccctacttcccccagatcctgaacagaaccagccagcacctggtggtggccttcggcgtggagctgaaggagatggacagcagcggcgagagctacaccctggtgagcaagctgggcctgcccagcgagggcatcctgagcggcgacaacgccctgcccaagagcggcctgctgatgagcctgctggtggtgatcttcatgaacggcaactgcgccaccgaggaggaggtgtgggagttcctgggcctgctgggcatctacgacggcatcctgcacagcatctacggcgacgccagaaagatcatcaccgaggacctggtgcaggacaagtacgtggtgtacagacaggtgtgcaacagcgaccccccctgctacgagttcctgtggggccccagagcctacgccgagaccaccaagatgagagtgctgagagtgctggccgacagcagcaacaccagccccggcctgtacccccacctgtacgaggacgccctgatcgacgaggtggagagagccctgagactgagagcctag

SEQ ID NO: 88488 - DNA, 3429 bp, synthetic construct
  misc_feature 1..3429: note = Description of Artificial Sequence: Synthetic coding sequence
  source 1..3429: mol_type = other DNA
atgggcgacaaggacatgcccaccgccggcatgcccagcctgctgcagagcagcagcgagagcccccagagctgccccgagggcgaggacagccagagccccctgcagatcccccagagcagccccgagagcgacgacaccctgtaccccctgcagagcccccagagcagaagcgagggcgaggacagcagcgaccccctgcagagaccccccgagggcaaggacagccagagccccctgcagatcccccagagcagccccgagggcgacgacacccagagccccctgcagaacagccagagcagccccgagggcaaggacagcctgagccccctggagatcagccagagcccccccgagggcgaggacgtgcagagccccctgcagaaccccgccagcagcttcttcagcagcgccctgctgagcatcttccagagcagccccgagagcacccagagccccttcgagggcttcccccagagcgtgctgcagatccccgtgagcgccgccagcagcagcaccctggtgagcatcttccagagcagccccgagagcacccagagccccttcgagggcttcccccagagccccctgcagatccccgtgagcagaagcttcagcagcaccctgctgagcatcttccagagcagccccgagagaacccagagcaccttcgagggcttcgcccagagccccctgcagatccccgtgagccccagcagcagcagcaccctgctgagcctgttccagagcttcagcgagagaacccagagcaccttcgagggcttcgcccagagcagcctgcagatccccgtgagccccagcttcagcagcaccctggtgagcctgttccagagcagccccgagagaacccagagcaccttcgagggcttcccccagagccccctgcagatccccgtgagcagcagcagcagcagcaccctgctgagcctgttccagagcagccccgagagaacccacagcaccttcgagggcttcccccagagcctgctgcagatccccatgaccagcagcttcagcagcaccctgctgagcatcttccagagcagccccgagagcgcccagagcaccttcgagggcttcccccagagccccctgcagatccccggcagccccagcttcagcagcaccctgctgagcctgttccagagcagccccgagagaacccacagcaccttcgagggcttcccccagagccccctgcagatccccatgaccagcagcttcagcagcaccctgctgagcatcctgcagagcagccccgagagcgcccagagcgccttcgagggcttcccccagagccccctgcagatccccgtgagcagcagcttcagctacaccctgctgagcctgttccagagcagccccgagagaacccacagcaccttcgagggcttcccccagagccccctgcagatccccgtgagcagcagcagcagcagcagcaccctgctgagcctgttccagagcagccccgagtgcacccagagcaccttcgagggcttcccccagagccccctgcagatcccccagagcccccccgagggcgagaacacccacagccccctgcagatcgtgcccagcctgcccgagtgggaggacagcctgagcccccactacttcccccagagccccccccagggcgaggacagcctgagcccccactacttcccccagagccccccccagggcgaggacagcctgagcccccactacttcccccagagcccccagggcgaggacagcctgagcccccactacttcccccagagccccccccagggcgaggacagcatgagccccctgtacttcccccagagccccctgcagggcgaggagttccagagcagcctgcagagccccgtgagcatctgcagcagcagcacccccagcagcctgccccagagcttccccgagagcagccagagcccccccgagggccccgtgcagagccccctgcacagcccccagagcccccccgagggcatgcacagccagagccccctgcagagccccgagagcgcccccgagggcgaggacagcctgagccccctgcagatcccccagagccccctggagggcgaggacagcctgagcagcctgcacttcccccagagcccccccgagtgggaggacagcctgagccccctgcacttcccccagttccccccccagggcgaggacttccagagcagcctgcagagccccgtgagcatctgcagcagcagcaccagcctgagcctgccccagagcttccccgagagcccccagagcccccccgagggccccgcccagagccccctgcagagacccgtgagcagcttcttcagctacaccctggccagcctgctgcagagcagccacgagagcccccagagcccccccgagggccccgcccagagccccctgcagagccccgtgagcagcttccccagcagcaccagcagcagcctgagccagagcagccccgtgagcagcttccccagcagcaccagcagcagcctgagcaagagcagccccgagagccccctgcagagccccgtgatcagcttcagcagcagcaccagcctgagccccttcagcgaggagagcagcagccccgtggacgagtacaccagcagcagcgacaccctgctggagagcgacagcctgaccgacagcgagagcctgatcgagagcgagcccctgttcacctacaccctggacgagaaggtggacgagctggccagattcctgctgctgaagtaccaggtgaagcagcccatcaccaaggccgagatgctgaccaacgtgatcagcagatacaccggctacttccccgtgatcttcagaaaggccagagagttcatcgagatcctgttcggcatcagcctgagagaggtggaccccgacgacagctacgtgttcgtgaacaccctggacctgaccagcgagggctgcctgagcgacgagcagggcatgagccagaacagactgctgatcctgatcctgagcatcatcttcatcaagggcacctacgccagcgaggaggtgatctgggacgtgctgagcggcatcggcgtgagagccggcagagagcacttcgccttcggcgagcccagagagctgctgaccaaggtgtgggtgcaggagcactacctggagtacagagaggtgcccaacagcagcccccccagatacgagttcctgtggggccccagagcccacagcgaggtgatcaagagaaaggtggtggagttcctggccatgctgaagaacaccgtgcccatcaccttccccagcagctacaaggacgccctgaaggacgtggaggagagagcccaggccatcatcgacaccaccgacgacagcaccgccaccgagagcgccagcagcagcgtgatgagccccagcttcagcagcgagtag

SEQ ID NO: 88489 - DNA, 354 bp, synthetic construct
  misc_feature 1..354: note = Description of Artificial Sequence: Synthetic coding sequence
  source 1..354: mol_type = other DNA
ggcgacaaggacatgcccaccgccggcatgcccagcctgctgcagagcagcagcgagagcccccagagctgccccgagggcgaggacagccagagccccctgcagatccccgtgagccccagcagcagcagcaccctgctgagcctgttccagagcttcagcgagagaacccagagcaccttcgagggcttcgcccagagcagcctgcagatccccgtgagccccagcttcagcagcaccctggtgagcctgttccagagcagccccgagagaacccagagcaccttcgagggcttcccccagagccccctgcagatccccgtgagcagcagcagcagcagcaccctgctgtag

SEQ ID NO: 88490 - DNA, 357 bp, synthetic construct
  misc_feature 1..357: note = Description of Artificial Sequence: Synthetic coding sequence
  source 1..357: mol_type = other DNA
atgggcgacaaggacatgcccaccgccggcatgcccagcctgctgcagagcagcagcgagagcccccagagctgccccgagggcgaggacagccagagccccctgcagatccccgtgagccccagcagcagcagcaccctgctgagcctgttccagagcttcagcgagagaacccagagcaccttcgagggcttcgcccagagcagcctgcagatccccgtgagccccagcttcagcagcaccctggtgagcctgttccagagcagccccgagagaacccagagcaccttcgagggcttcccccagagccccctgcagatccccgtgagcagcagcagcagcagcaccctgctgtag

SEQ ID NO: 88491 - DNA, 630 bp, synthetic construct
  misc_feature 1..630: note = Description of Artificial Sequence: Synthetic coding sequence
  source 1..630: mol_type = other DNA
atgctgaccaacgtgatcagcagatacaccggctacttccccgtgatcttcagaaaggccagagagttcatcgagatcctgttcggcatcagcctgagagaggtggaccccgacgacagctacgtgttcgtgaacaccctggacctgaccagcgagggctgcctgagcgacgagcagggcatgagccagaacagactgctgatcctgatcctgagcatcatcttcatcaagggcacctacgccagcgaggaggtgatctgggacgtgctgagcggcatcggcgtgagagccggcagagagcacttcgccttcggcgagcccagagagctgctgaccaaggtgtgggtgcaggagcactacctggagtacagagaggtgcccaacagcagcccccccagatacgagttcctgtggggccccagagcccacagcgaggtgatcaagagaaaggtggtggagttcctggccatgctgaagaacaccgtgcccatcaccttccccagcagctacaaggacgccctgaaggacgtggaggagagagcccaggccatcatcgacaccaccgacgacagcaccgccaccgagagcgccagcagcagcgtgatgagccccagcttcagcagcgagtag

SEQ ID NO: 88492 - DNA, 1122 bp, synthetic construct
  misc_feature 1..1122: note = Description of Artificial Sequence: Synthetic coding sequence
  source 1..1122: mol_type = other DNA
atgccccccgtgcccggcgtgcccttcagaaacgtggacaacgacagccccaccagcgtggagctggaggactgggtggacgcccagcaccccaccgacgaggaggaggaggaggccagcagcgccagcagcaccctgtacctggtgttcagccccagcagcttcagcaccagcagcagcctgatcctgggcggccccgaggaggaggaggtgcccagcggcgtgatccccaacctgaccgagagcatccccagcagccccccccagggccccccccagggccccagccagagccccctgagcagctgctgcagcagcttcagctggagcagcttcagcgaggagagcagcagccagaagggcgaggacaccggcacctgccagggcctgcccgacagcgagagcagcttcacctacaccctggacgagaaggtggccgagctggtggagttcctgctgctgaagtacgaggccgaggagcccgtgaccgaggccgagatgctgatgatcgtgatcaagtacaaggactacttccccgtgatcctgaagagagccagagagttcatggagctgctgttcggcctggccctgatcgaggtgggccccgaccacttctgcgtgttcgccaacaccgtgggcctgaccgacgagggcagcgacgacgagggcatgcccgagaacagcctgctgatcatcatcctgagcgtgatcttcatcaagggcaactgcgccagcgaggaggtgatctgggaggtgctgaacgccgtgggcgtgtacgccggcagagagcacttcgtgtacggcgagcccagagagctgctgaccaaggtgtgggtgcagggccactacctggagtacagagaggtgccccacagcagccccccctactacgagttcctgtggggccccagagcccacagcgagagcatcaagaagaaggtgctggagttcctggccaagctgaacaacaccgtgcccagcagcttccccagctggtacaaggacgccctgaaggacgtggaggagagagtgcaggccaccatcgacaccgccgacgacgccaccgtgatggccagcgagagcctgagcgtgatgagcagcaacgtgagcttcagcgagtag

SEQ ID NO: 88493 - DNA, 1932 bp, synthetic construct
  misc_feature 1..1932: note = Description of Artificial Sequence: Synthetic coding sequence
  source 1..1932: mol_type = other DNA
atgctgctgccctgccactgggtgctggacgccaccttcagcgacggcagcctgggccagtgggtgaagaacacctgcgccacctacgccctgagccccgtggtgctgcccccccagccccagcccagaaagaaggccaccgacaaggactacagcgccttccacctgggccacctgagagaggtgagactgttcctgagaggcggcaccagcgaccagagaatggacagcctggtgctgtgccccacctacttcaagctgtggagaaccctgagcggcagccccggcctgcagctgagcgacctgcacttcggcagccagcccgagggcaagttcagcctgagaagagccgtgagcgtgaagcagagagaggagccccaggactggcccctgaacgagaagagaaccctgtggaaggacagcgacctgcccacctggagaagaggcaccggctacaccctgagcctgcccgccgtgagccccggcaagagactgtggggcgagaaggccggcagcctgcccgagagcgagcccctgttcacctacaccctggacgagaaggtggacaagctggtgcagttcctgctgctgaagtaccaggccaaggagcccctgaccagagccgagatgcagatgaacgtgatcaacacctacaccggctacttccccatgatcttcagaaaggccagagagttcatcgagatcctgttcggcatcagcctgaccgaggtggaccccgaccacttctacgtgttcgtgaacaccctggacctgacctgcgagggcagcctgagcgacgagcagggcatgccccagaacagactgctgatcctgatcctgagcgtgatcttcatcaagggcaactgcgccagcgaggaggtgatctgggaggtgctgaacgccatcggcccctggagcgccctggccggcttcgccgacgtgctgagcagactggccctgtgggagagcgagggccccgaggccttctgcgaggagagcggcctgagaagcgccgagggcagcgtgctggacctggccaacccccagggcctggccggccacagacaggaggacggcagaagaggcctgaccgaggccagcccccagcagaagaagggcggcgaggacgaggacatgcccgccgccggcatgccccccctgccccagagcccccccgagatccccccccagggcccccccaagatcagcccccagggccccccccagagccccccccagagccccctggacagctgcagcagccccctgctgtggaccagactggacgaggagagcagcagcgaggaggaggacaccgccacctggcacgccctgcccgagagcgagagcctgcccagatacgccctggacgagaaggtggccgagctggtgcagttcctgctgctgaagtaccagaccaaggagcccgtgaccaaggccgagatgctgaccaccgtgatcaagaagtacaaggactacttccccatgatcttcggcaaggcccacgagttcatcgagctgatcttcggcatcgccctgaccgacatggaccccgacaaccacagctacttcttcgaggacaccctggacctgacctacgagggcagcctgatcgacgaccagggcatgcccaagaactgcctgctgatcctgatcctgagcatgatcttcatcaagggcagctgcgtgcccgaggaggtgatctgggaggtgctgagcgccatcggccccatccagagacccgccagagaggtgctggagttcctgagcaagctgagcagcatcatccccagcgccttccccagctggtacatggacgccctgaaggacatggaggacagagcccaggccatcatcgacaccaccgacgacgccaccgccatggccagcgccagccccagcgtgatgagcaccaacttctgccccgagtag

SEQ ID NO: 88494 - DNA, 801 bp, synthetic construct
  misc_feature 1..801: note = Description of Artificial Sequence: Synthetic coding sequence
  source 1..801: mol_type = other DNA
atgcccgccgccggcatgccccccctgccccagagcccccccgagatccccccccagggcccccccaagatcagcccccagggccccccccagagccccccccagagccccctggacagctgcagcagccccctgctgtggaccagactggacgaggagagcagcagcgaggaggaggacaccgccacctggcacgccctgcccgagagcgagagcctgcccagatacgccctggacgagaaggtggccgagctggtgcagttcctgctgctgaagtaccagaccaaggagcccgtgaccaaggccgagatgctgaccaccgtgatcaagaagtacaaggactacttccccatgatcttcggcaaggcccacgagttcatcgagctgatcttcggcatcgccctgaccgacatggaccccgacaaccacagctacttcttcgaggacaccctggacctgacctacgagggcagcctgatcgacgaccagggcatgcccaagaactgcctgctgatcctgatcctgagcatgatcttcatcaagggcagctgcgtgcccgaggaggtgatctgggaggtgctgagcgccatcggcgtgtgcgccggcagagagcacttcatctacggcgaccccagaaagctgctgaccatccactgggtgcagagaaagtacctggagtacagagaggtgcccaacagcgccccccccagatacgagttcctgtggggccccagagcccacagcgaggccagcaagagaagcctgagagtgttcatccaggccatccagtaccacccctag

SEQ ID NO: 88495 - DNA, 381 bp, synthetic construct
  misc_feature 1..381: note = Description of Artificial Sequence: Synthetic coding sequence
  source 1..381: mol_type = other DNA
atggacaccggccagctgcagctgagcagagagagaagccccggcgccggccagcaggccagaagagagctgtgcggcagaatcgccatcagccagcacggcggcaaggcccaggccagccccagccacagcctgctgagccccctggacaagaccgacggcgagccctggagcgccctggccggcttcgccgacgtgctgagcagactggccctgtgggagagcgagggccccgaggccttctgcgaggagagcggcctgagaagcgccgagggcagcgtgctggacctggccaacccccagggcaagggccccaagggcgagctgagagacttcgcccccagaaccgaggaggcccccgtgtgccccgccctgccctag

SEQ ID NO: 88496 - DNA, 1041 bp, synthetic construct
  misc_feature 1..1041: note = Description of Artificial Sequence: Synthetic coding sequence
  source 1..1041: mol_type = other DNA
atgcccctgttccccaacctgcccagactgagcttcgaggaggacttccagaaccccagcgtgaccgaggacctggtggacgcccaggacagcatcgacgaggaggaggaggacgccagcagcaccagcagcagcagcttccacttcctgttccccagcagcagcagcctgagcagcagcagccccctgagcagccccctgcccagcaccctgatcctgggcgtgcccgaggacgaggacatgcccgccgccggcatgccccccctgccccagagcccccccgagatccccccccagggcccccccaagatcagcccccagggccccccccagagccccccccagagccccctggacagctgcagcagccccctgctgtggaccagactggacgaggagagcagcagcgaggaggaggacaccgccacctggcacgccctgcccgagagcgagagcctgcccagatacgccctggacgagaaggtggccgagctggtgcagttcctgctgctgaagtaccagaccaaggagcccgtgaccaaggccgagatgctgaccaccgtgatcaagaagtacaaggactacttccccatgatcttcggcaaggcccacgagttcatcgagctgatcttcggcatcgccctgaccgacatggaccccgacaaccacagctacttcttcgaggacaccctggacctgacctacgagggcagcctgatcgacgaccagggcatgcccaagaactgcctgctgatcctgatcctgagcatgatcttcatcaagggcagctgcgtgcccgaggaggtgatctgggaggtgctgagcgccatcggcgtgtgcgccggcagagagcacttcatctacggcgaccccagaaagctgctgaccatccactgggtgcagagaaagtacctggagtacagagaggtgcccaacagcgccccccccagatacgagttcctgtggggccccagagcccacagcgaggccagcaagagaagcctgagagtgttcatccaggccatccagtaccacccctag

SEQ ID NO: 88497 - DNA, 1041 bp, synthetic construct; identical to SEQ ID NO: 88496
  misc_feature 1..1041: note = Description of Artificial Sequence: Synthetic coding sequence
  source 1..1041: mol_type = other DNA

SEQ ID NO: 88498 - DNA, 2337 bp, synthetic construct
  misc_feature 1..2337: note = Description of Artificial Sequence: Synthetic coding sequence
  source 1..2337: mol_type = other DNA
atggcccagaagatggactgcggcgccggcctgctgggcttccaggccgaggccagcgtggaggacagcgccctgctgatgcagaccctgatggaggccatccagatcagcgaggccccccccaccaaccaggccaccgccgccgccagcccccagagcagccagccccccaccgccaacgagatggccgacatccaggtgagcgccgccgccgccagacccaagagcgccttcaaggtgcagaacgccaccaccaagggccccaacggcgtgtacgacttcagccaggcccacaacgccaaggacgtgcccaacacccagcccaaggccgccttcaagagccagaacgccacccccaagggccccaacgccgcctacgacttcagccaggccgccaccaccggcgagctggccgccaacaagagcgagatggccttcaaggcccagaacgccaccaccaaggtgggccccaacgccacctacaacttcagccagagcctgaacgccaacgacctggccaacagcagacccaagacccccttcaaggcctggaacgacaccaccaaggcccccaccgccgacacccagacccagaacgtgaaccaggccaagatggccaccagccaggccgacatcgagaccgaccccggcatcagcgagcccgacggcgccaccgcccagaccagcgccgacggcagccaggcccagaacctggagagcagaaccatcatcagaggcaagagaaccagaaagatcaacaacctgaacgtggaggagaacagcagcggcgaccagagaagagcccccctggccgccggcacctggagaagcgcccccgtgcccgtgaccacccagaacccccccggcgccccccccaacgtgctgtggcagacccccctggcctggcagaaccccagcggctggcagaaccagaccgccagacagaccccccccgccagacagagcccccccgccagacagaccccccccgcctggcagaaccccgtggcctggcagaaccccgtgatctggcccaaccccgtgatctggcagaaccccgtgatctggcccaaccccatcgtgtggcccggccccgtggtgtggcccaaccccctggcctggcagaacccccccggctggcagaccccccccggctggcagaccccccccggctggcagggcccccccgactggcagggcccccccgactggcccctgccccccgactggcccctgccccccgactggcccctgcccaccgactggcccctgccccccgactggatccccgccgactggcccatcccccccgactggcagaacctgagacccagccccaacctgagacccagccccaacagcagagccagccagaaccccggcgccgcccagcccagagacgtggccctgctgcaggagagagccaacaagctggtgaagtacctgatgctgaaggactacaccaaggtgcccatcaagagaagcgagatgctgagagacatcatcagagagtacaccgacgtgtaccccgagatcatcgagagagcctgcttcgtgctggagaagaagttcggcatccagctgaaggagatcgacaaggaggagcacctgtacatcctgatcagcacccccgagagcctggccggcatcctgggcaccaccaaggacacccccaagctgggcctgctgctggtgatcctgggcgtgatcttcatgaacggcaacagagccagcgaggccgtgctgtgggaggccctgagaaagatgggcctgagacccggcgtgagacaccccctgctgggcgacctgagaaagctgctgacctacgagttcgtgaagcagaagtacctggactacagaagagtgcccaacagcaacccccccgagtacgagttcctgtggggcctgagaagctaccacgagaccagcaagatgaaggtgctgagattcatcgccgaggtgcagaagagagaccccagagactggaccgcccagttcatggaggccgccgacgaggccctggacgccctggacgccgccgccgccgaggccgaggccagagccgaggccagaaccagaatgggcatcggcgacgaggccgtgagcggcccctggagctgggacgacatcgagttcgagctgctgacctgggacgaggagggcgacttcggcgacccctggagcagaatccccttcaccttctgggccagataccaccagaacgccagaagcagattcccccagaccttcgccggccccatcatcggccccggcggcaccgccagcgccaacttcgccgccaacttcggcgccatcggcttcttctgggtggagtag

SEQ ID NO: 88499 - DNA, 2505 bp, synthetic construct
  misc_feature 1..2505: note = Description of Artificial Sequence: Synthetic coding sequence
  source 1..2505: mol_type = other DNA
atggcccagaagatggactgcggcgccggcctgctgggcttccagaaccccgacgcctgcagagccgtgtgccaccccctgccccagccccccgccagcaccctgcccctgagcgccttccccaccctgtgcgaccccccctacagccagctgagagacccccccgccgtgctgagctgctactgcacccccctgggcgccagccccgcccccgccgaggccagcgtggaggacagcgccctgctgatgcagaccctgatggaggccatccagatcagcgaggccccccccaccaaccaggccaccgccgccgccagcccccagagcagccagccccccaccgccaacgagatggccgacatccaggtgagcgccgccgccgccagacccaagagcgccttcaaggtgcagaacgccaccaccaagggccccaacggcgtgtacgacttcagccaggcccacaacgccaaggacgtgcccaacacccagcccaaggccgccttcaagagccagaacgccacccccaagggccccaacgccgcctacgacttcagccaggccgccaccaccggcgagctggccgccaacaagagcgagatggccttcaaggcccagaacgccaccaccaaggtgggccccaacgccacctacaacttcagccagagcctgaacgccaacgacctggccaacagcagacccaagacccccttcaaggcctggaacgacaccaccaaggcccccaccgccgacacccagacccagaacgtgaaccaggccaagatggccaccagccaggccgacatcgagaccgaccccggcatcagcgagcccgacggcgccaccgcccagaccagcgccgacggcagccaggcccagaacctggagagcagaaccatcatcagaggcaagagaaccagaaagatcaacaacctgaacgtggaggagaacagcagcggcgaccagagaagagcccccctggccgccggcacctggagaagcgcccccgtgcccgtgaccacccagaacccccccggcgccccccccaacgtgctgtggcagacccccctggcctggcagaaccccagcggctggcagaaccagaccgccagacagaccccccccgccagacagagcccccccgccagacagaccccccccgcctggcagaaccccgtggcctggcagaaccccgtgatctggcccaaccccgtgatctggcagaaccccgtgatctggcccaaccccatcgtgtggcccggccccgtggtgtggcccaaccccctggcctggcagaacccccccggctggcagaccccccccggctggcagaccccccccggctggcagggcccccccgactggcagggcccccccgactggcccctgccccccgactggcccctgccccccgactggcccctgcccaccgactggcccctgccccccgactggatccccgccgactggcccatcccccccgactggcagaacctgagacccagccccaacctgagacccagccccaacagcagagccagccagaaccccggcgccgcccagcccagagacgtggccctgctgcaggagagagccaacaagctggtgaagtacctgatgctgaaggactacaccaaggtgcccatcaagagaagcgagatgctgagagacatcatcagagagtacaccgacgtgtaccccgagatcatcgagagagcctgcttcgtgctggagaagaagttcggcatccagctgaaggagatcgacaaggaggagcacctgtacatcctgatcagcacccccgagagcctggccggcatcctgggcaccaccaaggacacccccaagctgggcctgctgctggtgatcctgggcgtgatcttcatgaacggcaacagagccagcgaggccgtgctgtgggaggccctgagaaagatgggcctgagacccggcgtgagacaccccctgctgggcgacctgagaaagctgctgacctacgagttcgtgaagcagaagtacctggactacagaagagtgcccaacagcaacccccccgagtacgagttcctgtggggcctgagaagctaccacgagaccagcaagatgaaggtgctgagattcatcgccgaggtgcagaagagagaccccagagactggaccgcccagttcatggaggccgccgacgaggccctggacgccctggacgccgccgccgccgaggccgaggccagagccgaggccagaaccagaatgggcatcggcgacgaggccgtgagcggcccctggagctgggacgacatcgagttcgagctgctgacctgggacgaggagggcgacttcggcgacccctggagcagaatccccttcaccttctgggccagataccaccagaacgccagaagcagattcccccagaccttcgccggccccatcatcggccccggcggcaccgccagcgccaacttcgccgccaacttcggcgccatcggcttcttctgggtggagtag

SEQ ID NO: 88500 - DNA, 2337 bp, synthetic construct; identical to SEQ ID NO: 88498
  misc_feature 1..2337: note = Description of Artificial Sequence: Synthetic coding sequence
  source 1..2337: mol_type = other DNA

SEQ ID NO: 88501 - DNA, 2337 bp, synthetic construct; identical to SEQ ID NO: 88498
  misc_feature 1..2337: note = Description of Artificial Sequence: Synthetic coding sequence
  source 1..2337: mol_type = other DNA

SEQ ID NO: 88502 - DNA, 414 bp, synthetic construct
  misc_feature 1..414: note = Description of Artificial Sequence: Synthetic coding sequence
  source 1..414: mol_type = other DNA
atggcccagaagatggactgcggcgccggcctgctgggcttccaggccgaggccagcgtggaggacagcgccctgctgatgcagaccctgatggaggccatccagatcagcgaggccccccccaccaaccaggccaccgccgccgccagcccccagagcagccagccccccaccgccaacgagatggccgacatccaggtgagcgccgccgccgccagacccaagagcgccttcaaggtgcagaacgccaccaccaagggccccaacggcgtgtacgacttcagccagagcctgaacgccaacgacctggccaacagcagacccaagacccaggtgagcctgaacctgaccgtgcagctgcacagacaccagcagatggtgcccagactgagaatctggagccccggccagtag

SEQ ID NO: 88503 - DNA, 3942 bp, synthetic construct
  misc_feature 1..3942: note = Description of Artificial Sequence: Synthetic coding sequence
  source 1..3942: mol_type = other DNA
atgagcggctggagatacctgatctgcgtgagcttcctgctgaccatcctgctggagctgacctaccagggcccccccgtgcccgccagcagcagcaccaagctgctgatgaccagctacagcatgagaagcaccgtggtgagcagatacgcccacaccctggtgaccagcgtgctgttcaacccccacgccgaggcccacgaggccatcttcgacctggacctgccccacctggccttcatcagcaacttcaccatgaccatcaacaacaaggtgtacatcgccgaggtgaaggagaagcaccaggccaagaagatctacgaggaggcccaccagcagggcaagaccgccgcccacgtgggcatcagagacagagagagcgagaagttcagaatcagcaccagcctggccgccggcaccgaggtgaccttcagcctggcctacgaggagctgctgcagagacaccagggccagtaccagctggtggtgagcctgagacccggccagctggtgaagagactgagcatcgaggtgaccgtgagcgagagaaccggcatcagctacgtgcacatcccccccctgagaaccggcagactgagaaccaacgcccacgccagcgaggtggacagcccccccagcaccagaatcgagagaggcgagacctgcgtgagaatcacctactgccccaccctgcaggaccagagcagcatcagcggcagcggcatcatggccgacttcctggtgcagtacgacgtggtgatggaggacatcatcggcgacgtgcagatctacgacgactacttcatccactacttcgcccccagaggcctgccccccatggagaagaacgtggtgttcgtgatcgacgtgagcagcagcatgttcggcaccaagatggagcagaccaagaccgccatgaacgtgatcctgagcgacctgcaggccaacgactacttcaacatcatcagcttcagcgacaccgtgaacgtgtggaaggccggcggcagcatccaggccaccatccagaacgtgcacagcgccaaggactacctgcactgcatggaggccgacggctggaccgacgtgaacagcgccctgctggccgccgccagcgtgctgaaccacagcaaccaggagcccggcagaggccccagcgtgggcagaatccccctgatcatcttcctgaccgacggcgagcccaccgccggcgtgaccacccccagcgtgatcctgagcaacgtgagacaggccctgggccacagagtgagcctgttcagcctggccttcggcgacgacgccgacttcaccctgctgagaagactgagcctggagaacagaggcatcgccagaagaatctacgaggacaccgacgccgccctgcagctgaagggcctgtacgaggagatcagcatgcccctgctggccgacgtgagactgaactacctgggcggcctggtgggcgccagcccctgggccgtgttccccaactacttcggcggcagcgagctggtggtggccggccaggtgcagcccggcaagcaggagctgggcatccacctggccgccagaggccccaaggaccagctgctggtggcccaccacagcgagggcgccaccaacaacagccagaaggccttcggctgccccggcgagcccgcccccaacgtggcccacttcatcagaagactgtgggcctacgtgaccatcggcgagctgctggacgcccacttccaggccagagacaccaccaccagacacctgctggccgccaaggtgctgaacctgagcctggagtacaacttcgtgacccccctgaccagcctggtgatggtgcagcccaagcaggccagcgaggagaccagaagacagaccagcaccagcgccggccccgacaccatcatgcccagcagcagcagcagacacggcctgggcgtgagcaccgcccagcccgccctggtgcccaaggtgatcagccccaagagcagacccgtgaagcccaagttctacctgagcagcaccaccaccgccagcaccaagaagatgctgagcagcaaggagctggagcccctgggcgagagcccccacaccctgagcatgcccacctaccccaaggccaagatccccgcccagcaggacagcggcaccctggcccagcccaccctgagaaccaagcccaccatcctggtgcccagcaacagcggcaccctgctgcccctgaagcccggcagcctgagccaccagaaccccgacatcctgcccaccaacagcagaacccaggtgccccccgtgaagcccggcatccccgccagccccaaggccgacaccgtgaagtgcgtgacccccctgcacagcaagcccggcgcccccagccacccccagctgggcgccctgaccagccaggcccccaagggcctgccccagagcagacccggcgtgagcaccctgcaggtgcccaagtaccccctgcacaccagacccagagtgcccgcccccaagaccagaaacaacatgccccacctgggccccggcatcctgctgagcaagacccccaagatcctgctgagcctgaagcccagcgcccccccccaccagatcagcaccagcatcagcctgagcaagcccgagacccccaacccccacatgccccagacccccctgccccccagacccgacagacccagaccccccctgcccgagagcctgagcaccttccccaacaccatcagcagcagcaccggccccagcagcaccaccaccaccagcgtgctgggcgagcccctgcccatgcccttcacccccaccctgccccccggcagattctggcaccagtacgacctgctgcccggcccccagagaaccagacaggtgctgggccccagcagacccggcgtgcccaccatgagcctgctgaacagcagcagacccacccccgagggcagcccccccaacctgcccatcctgctgcccagcagcatcctgcccgaggccatcagcctgctgctgctgcccgaggagctggagctgctgagcgagagcatggtggagagcaagttcgtggagagcctgaacccccccgccttctacaccttcctgacccccgacgaggacggcagccccaactgggacggcaacagcgaggagatcctgggcggcgccggcggcagcatggagagccagggcagcagcgtgggcctggccaagggcaccctgcccagcatcttcaccttcagcagcagcgtggacggcgacccccacttcgtgatccagatcccccacagcgaggagaagatctgcttcaccctgaacggccaccccggcgacctgctgcagctgatcgaggaccccaaggccggcctgcacgtgagcggcaagctgctgggcgccccccccagacccggccacaaggaccagaccagaacctacttccagatcatcaccgtgaccaccgacaagcccagagcctacaccatcaccatcagcagaagcagcatcagcctgagaggcgagggcaccctgagactgagctgggaccagcccgccctgctgaagagaccccagctggagctgtacgtggccgccgccgccagactgaccctgagactgggcccctacctggagttcctggtgctgagacacagatacagacaccccagcaccctgcagctgccccacctgggcttctacgtggccaacggcagcggcctgagccccagcgccagaggcctgatcggccagttccagcacgccgacatcagactggtgaccggccccatgggcccctgcctgagaagacaccacggccccgacgtgcccgtgatcctgggcaagagactgctgaaggacagccccagactgctgcccagatgggccagctgctggctggtgaagagaagccacgtggagctgctgctgggccacccctacctgagctacgtgctgtag

SEQ ID NO: 88504 - DNA, 1767 bp, synthetic construct
  misc_feature 1..1767: note = Description of Artificial Sequence: Synthetic coding sequence
  source 1..1767: mol_type = other DNA
atgagcgacaccagcgagagcggcgccggcctgaccagattccaggccgaggccagcgagaaggacagcagcagcatgatgcagaccctgctgaccgtgacccagaacgtggaggtgcccgagacccccaaggccagcaaggccaccgaggtgagcaagacccccgaggccagagaggcccccgccacccaggccagcagcaccacccagctgaccgacacccaggtgctggccgccgagaacaagagcctggccgccgacaccaagaagcagaacgccgacccccaggccgtgaccatgcccgccaccgagaccaagaaggtgagccacgtggccgacaccaaggtgaacaccaaggcccaggagaccgaggccgcccccagccaggcccccgccgacgagcccgagcccgagagcgccgccgcccagagccaggagaaccaggacaccagacccaaggtgaaggccaagaaggccagaaaggtgaagcacctggacggcgaggaggacggcagcagcgaccagagccaggccagcggcaccaccggcggcagaagagtgagcaaggccctgatggccagcatggccagaagagccagcagaggccccatcgccttctgggccagaagagccagcagaaccagactggccgcctgggccagaagagccctgctgagcctgagaagccccaaggccagaagaggcaaggccagaagaagagccgccaagctgcagagcagccaggagcccgaggcccccccccccagagacgtggccctgctgcagggcagagccaacgacctggtgaagtacctgctggccaaggaccagaccaagatccccatcaagagaagcgacatgctgaaggacatcatcaaggagtacaccgacgtgtaccccgagatcatcgagagagccggctacagcctggagaaggtgttcggcatccagctgaaggagatcgacaagaacgaccacctgtacatcctgctgagcaccctggagcccaccgacgccggcatcctgggcaccaccaaggacagccccaagctgggcctgctgatggtgctgctgagcatcatcttcatgaacggcaacagaagcagcgaggccgtgatctgggaggtgctgagaaagctgggcctgagacccggcatccaccacagcctgttcggcgacgtgaagaagctgatcaccgacgagttcgtgaagcagaagtacctggactacgccagagtgcccaacagcaacccccccgagtacgagttcttctggggcctgagaagctactacgagaccagcaagatgaaggtgctgaagttcgcctgcaaggtgcagaagaaggaccccaaggagtgggccgcccagtacagagaggccatggaggccgacctgaaggccgccgccgaggccgccgccgaggccaaggccagagccgagatcagagccagaatgggcatcggcctgggcagcgagaacgccgccggcccctgcaactgggacgaggccgacatcggcccctgggccaaggccagaatccaggccggcgccgaggccaaggccaaggcccaggagagcggcagcgccagcaccggcgccagcaccagcaccaacaacagcgccagcgccagcgccagcaccagcggcggcttcagcgccggcgccagcctgaccgccaccctgaccttcggcctgttcgccggcctgggcggcgccggcgccagcaccagcggcagcagcggcgcctgcggcttcagctacaagtag

SEQ ID NO: 88505 - DNA, 1653 bp, synthetic construct
  misc_feature 1..1653: note = Description of Artificial Sequence: Synthetic coding sequence
  source 1..1653: mol_type = other DNA
atgtggagaagccagagacacagaagaccccagagagtgagcaagacccccgaggccagagaggcccccgccacccaggccagcagcaccacccagctgaccgacacccaggtgctggccgccgagaacaagagcctggccgccgacaccaagaagcagaacgccgacccccaggccgtgaccatgcccgccaccgagaccaagaaggtgagccacgtggccgacaccaaggtgaacaccaaggcccaggagaccgaggccgcccccagccaggcccccgccgacgagcccgagcccgagagcgccgccgcccagagccaggagaaccaggacaccagacccaaggtgaaggccaagaaggccagaaaggtgaagcacctggacggcgaggaggacggcagcagcgaccagagccaggccagcggcaccaccggcggcagaagagtgagcaaggccctgatggccagcatggccagaagagccagcagaggccccatcgccttctgggccagaagagccagcagaaccagactggccgcctgggccagaagagccctgctgagcctgagaagccccaaggccagaagaggcaaggccagaagaagagccgccaagctgcagagcagccaggagcccgaggcccccccccccagagacgtggccctgctgcagggcagagccaacgacctggtgaagtacctgctggccaaggaccagaccaagatccccatcaagagaagcgacatgctgaaggacatcatcaaggagtacaccgacgtgtaccccgagatcatcgagagagccggctacagcctggagaaggtgttcggcatccagctgaaggagatcgacaagaacgaccacctgtacatcctgctgagcaccctggagcccaccgacgccggcatcctgggcaccaccaaggacagccccaagctgggcctgctgatggtgctgctgagcatcatcttcatgaacggcaacagaagcagcgaggccgtgatctgggaggtgctgagaaagctgggcctgagacccggcatccaccacagcctgttcggcgacgtgaagaagctgatcaccgacgagttcgtgaagcagaagtacctggactacgccagagtgcccaacagcaacccccccgagtacgagttcttctggggcctgagaagctactacgagaccagcaagatgaaggtgctgaagttcgcctgcaaggtgcagaagaaggaccccaaggagtgggccgcccagtacagagaggccatggaggccgacctgaaggccgccgccgaggccgccgccgaggccaaggccagagccgagatcagagccagaatgggcatcggcctgggcagcgagaacgccgccggcccctgcaactgggacgaggccgacatcggcccctgggccaaggccagaatccaggccggcgccgaggccaaggccaaggcccaggagagcggcagcgccagcaccggcgccagcaccagcaccaacaacagcgccagcgccagcgccagcaccagcggcggcttcagcgccggcgccagcctgaccgccaccctgaccttcggcctgttcgccggcctgggcggcgccggcgccagcaccagcggcagcagcggcgcctgcggcttcagctacaagtag

SEQ ID NO: 88506 - DNA, 1821 bp, synthetic construct
  misc_feature 1..1821: note = Description of Artificial Sequence: Synthetic coding sequence
  source 1..1821: mol_type = other DNA
atgagcgacaccagcgagagcggcgccggcctgaccagattccaggccgaggccagcgagaaggacagcagcagcatgatgcagaccctgctgaccgtgacccagaacgtggaggtgcccgagacccccaaggccagcaaggccctggaggtgagcgaggacgtgaaggtgagcaaggccagcggcgtgagcaaggccaccgaggtgagcaagacccccgaggccagagaggcccccgccacccaggccagcagcaccacccagctgaccgacacccaggtgctggccgccgagaacaagagcctggccgccgacaccaagaagcagaacgccgacccccaggccgtgaccatgcccgccaccgagaccaagaaggtgagccacgtggccgacaccaaggtgaacaccaaggcccaggagaccgaggccgcccccagccaggcccccgccgacgagcccgagcccgagagcgccgccgcccagagccaggagaaccaggacaccagacccaaggtgaaggccaagaaggccagaaaggtgaagcacctggacggcgaggaggacggcagcagcgaccagagccaggccagcggcaccaccggcggcagaagagtgagcaaggccctgatggccagcatggccagaagagccagcagaggccccatcgccttctgggccagaagagccagcagaaccagactggccgcctgggccagaagagccctgctgagcctgagaagccccaaggccagaagaggcaaggccagaagaagagccgccaagctgcagagcagccaggagcccgaggcccccccccccagagacgtggccctgctgcagggcagagccaacgacctggtgaagtacctgctggccaaggaccagaccaagatccccatcaagagaagcgacatgctgaaggacatcatcaaggagtacaccgacgtgtaccccgagatcatcgagagagccggctacagcctggagaaggtgttcggcatccagctgaaggagatcgacaagaacgaccacctgtacatcctgctgagcaccctggagcccaccgacgccggcatcctgggcaccaccaaggacagccccaagctgggcctgctgatggtgctgctgagcatcatcttcatgaacggcaacagaagcagcgaggccgtgatctgggaggtgctgagaaagctgggcctgagacccggcatccaccacagcctgttcggcgacgtgaagaagctgatcaccgacgagttcgtgaagcagaagtacctggactacgccagagtgcccaacagcaacccccccgagtacgagttcttctggggcctgagaagctactacgagaccagcaagatgaaggtgctgaagttcgcctgcaaggtgcagaagaaggaccccaaggagtgggccgcccagtacagagaggccatggaggccgacctgaaggccgccgccgaggccgccgccgaggccaaggccagagccgagatcagagccagaatgggcatcggcctgggcagcgagaacgccgccggcccctgcaactgggacgaggccgacatcggcccctgggccaaggccagaatccaggccggcgccgaggccaaggccaaggcccaggagagcggcagcgccagcaccggcgccagcaccagcaccaacaacagcgccagcgccagcgccagcaccagcggcggcttcagcgccggcgccagcctgaccgccaccctgaccttcggcctgttcgccggcctgggcggcgccggcgccagcaccagcggcagcagcggcgcctgcggcttcagctacaagtag

SEQ ID NO: 88507 - DNA, 1821 bp, synthetic construct; identical to SEQ ID NO: 88506
  misc_feature 1..1821: note = Description of Artificial Sequence: Synthetic coding sequence
  source 1..1821: mol_type = other DNA

SEQ ID NO: 88508 - DNA, 1566 bp, synthetic construct
  misc_feature 1..1566: note = Description of Artificial Sequence: Synthetic coding sequence
  source 1..1566: mol_type = other DNA
atgagcgacaccagcgagagcggcgccggcctgaccagattccaggccgaggccagcgagaaggacagcagcagcatgatgcagaccctgctgaccgtgacccagaacgtggaggtgcccgagacccccaaggccagcagcaccacccagctgaccgacacccaggtgctggccgccgagaacaagagcctggccgccgacaccaagaagcagaacgccgacccccaggccgtgaccatgcccgccaccgagaccaagaaggtgagccacgtggccgacaccaaggtgaacaccaaggcccaggagaccgaggccgcccccagccaggcccccgccgacgagcccgagcccgagagcgccgccgcccagagccaggagaaccaggacaccagacccaaggtgaaggccaagaaggccagaaaggtgaagcacctggacggcgaggaggacggcagcagcgaccagagccaggccagcggcaccaccggcggcagaagagtgagcaaggccagaagaagagccgccaagctgcagagcagccaggagcccgaggcccccccccccagagacgtggccctgctgcagggcagagccaacgacctggtgaagtacctgctggccaaggaccagaccaagatccccatcaagagaagcgacatgctgaaggacatcatcaaggagtacaccgacgtgtaccccgagatcatcgagagagccggctacagcctggagaaggtgttcggcatccagctgaaggagatcgacaagaacgaccacctgtacatcctgctgagcaccctggagcccaccgacgccggcatcctgggcaccaccaaggacagccccaagctgggcctgctgatggtgctgctgagcatcatcttcatgaacggcaacagaagcagcgaggccgtgatctgggaggtgctgagaaagctgggcctgagacccggcatccaccacagcctgttcggcgacgtgaagaagctgatcaccgacgagttcgtgaagcagaagtacctggactacgccagagtgcccaacagcaacccccccgagtacgagttcttctggggcctgagaagctactacgagaccagcaagatgaaggtgctgaagttcgcctgcaaggtgcagaagaaggaccccaaggagtgggccgcccagtacagagaggccatggaggccgacctgaaggccgccgccgaggccgccgccgaggccaaggccagagccgagatcagagccagaatgggcatcggcctgggcagcgagaacgccgccggcccctgcaactgggacgaggccgacatcggcccctgggccaaggccagaatccaggccggcgccgaggccaaggccaaggcccaggagagcggcagcgccagcaccggcgccagcaccagcaccaacaacagcgccagcgccagcgccagcaccagcggcggcttcagcgccggcgccagcctgaccgccaccctgaccttcggcctgttcgccggcctgggcggcgccggcgccagcaccagcggcagcagcggcgcctgcggcttcagctacaagtag

SEQ ID NO: 88509 - DNA, 1566 bp, synthetic construct; identical to SEQ ID NO: 88508
  misc_feature 1..1566: note = Description of Artificial Sequence: Synthetic coding sequence
  source 1..1566: mol_type = other DNA

SEQ ID NO: 88510 - DNA, 1821 bp, synthetic construct; identical to SEQ ID NO: 88506
  misc_feature 1..1821: note = Description of Artificial Sequence: Synthetic coding sequence
  source 1..1821: mol_type = other DNA

SEQ ID NO: 88511 - DNA, 1821 bp, synthetic construct; identical to SEQ ID NO: 88506
  misc_feature 1..1821: note = Description of Artificial Sequence: Synthetic coding sequence
  source 1..1821: mol_type = other DNA

SEQ ID NO: 88512 - DNA, 2220 bp, synthetic construct
  misc_feature 1..2220: note = Description of Artificial Sequence: Synthetic coding sequence
  source 1..2220: mol_type = other DNA
atggccgagggcagcttcagcgtgcagagcgagagctacagcgtggaggacatggacgagggcagcgacgaggtgggcgaggaggagatggtggagggcaacgactacgaggagttcggcgccttcggcggctacggcaccctgaccagcttcgacatccacatcctgagagccttcggcagcctgggccccggcctgagaatcctgagcaacgagccctgggagctggagaaccccgtgctggcccagaccctggtggaggccctgcagctggaccccgagaccctggccaacgagaccgccgccagagccgccaacgtggccagagccgccgccagcaacagagccgccagagccgccgccgccgccgccagaaccgccttcagccaggtggtggccagccacagagtggccaccccccaggtgagcggcgaggacacccagcccaccacctacgccgccgaggcccagggccccacccccgagccccccctggccagcccccagaccagccagatgctggtgaccagcaagatggccgcccccgaggcccccgccaccagcgcccagagccagaccggcagccccgcccaggaggccgccaccgagggccccagcagcgcctgcgccttcagccaggccccctgcgccagagaggtggacgccaacagacccagcaccgccttcctgggccagaacgacgtgttcgacttcacccagcccgccggcgtgagcggcatggccttccccagacccaagagacccgcccccgcccaggaggccgccaccgagggccccagcgccgccagcggcgtgccccagaccggccccggcagagaggtggccgccaccagacccaagaccaccaagagcggcaaggccctggccaagaccagatgggtggagccccagaacgtggtggccgccgccgccgccaaggccaagatggccaccagcatccccgagcccgagggcgccgccgccgccaccgcccagcacagcgccgagccctgggccagaatgggcggcaagagaaccaagaagagcaagcacctggacgacgagtacgagagcagcgaggaggagagagagacccccgccgtgccccccacctggagagccagccagcccagcctgaccgtgagagcccagctggcccccagaccccccatggcccccagaagccagatccccagcagacacgtgctgtgcctgccccccagaaacgtgaccctgctgcaggagagagccaacaagctggtgaagtacctgatgatcaaggactacaagaagatccccatcaagagagccgacatgctgaaggacgtgatcagagagtacgacgagcacttccccgagatcatcgagagagccacctacaccctggagaagaagttcggcatccacctgaaggagatcgacaaggaggagcacctgtacatcctggtgtgcaccagagacagcagcgccagactgctgggcaagaccaaggacacccccagactgagcctgctgctggtgatcctgggcgtgatcttcatgaacggcaacagagccagcgaggccgtgctgtgggaggccctgagaaagatgggcctgagacccggcgtgagacaccccttcctgggcgacctgagaaagctgatcaccgacgacttcgtgaagcagaagtacctggagtacaagaagatccccaacagcaacccccccgagtacgagttcctgtggggcctgagagccagacacgagaccagcaagatgagagtgctgagattcatcgcccagaaccagaacagagaccccagagagtggaaggcccacttcctggaggccgtggacgacgccttcaagaccatggacgtggacatggccgaggagcacgccagagcccagatgagagcccagatgaacatcggcgacgaggccctgatcggcagatggagctgggacgacatccaggtggagctgctgacctgggacgaggacggcgacttcggcgacgcctgggccagaatccccttcgccttctgggccagataccaccagtacatcctgaacagcaacagagccaacagaagagccacctggagagccggcgtgagcagcggcaccaacggcggcgccagcaccagcgtgctggacggccccagcaccagcagcaccatcagaaccagaaacgccgccagagccggcgccagcttcttcagctggatccagtag

SEQ ID NO: 88513 - DNA, 2274 bp, synthetic construct
  misc_feature 1..2274: note = Description of Artificial Sequence: Synthetic coding sequence
  source 1..2274: mol_type = other DNA
atggccgagggcagcttcagcgtgcagagcgagagctacagcgtggaggacatggacgagggcagcgacgaggtgggcgaggaggagatggtggagggcaacgactacgaggagttcggcgccttcggcggctacggcaccctgaccagcttcgacatccacatcctgagagccttcggcagcctgggccccggcctgagaatcctgagcaacgagccctgggagctggagaaccccgtgctggcccagaccctggtggaggccctgcagctggaccccgagaccctggccaacgagaccgccgccagagccgccaacgtggccagagccgccgccagcaacagagccgccagagccgccgccgccgccgccagaaccgccttcagccaggtggtggccagccacagagtggccaccccccaggtgagcggcgaggacacccagcccaccacctacgccgccgaggcccagggccccacccccgagccccccctggccagcccccagaccagccagatgctggtgaccagcaagatggccgcccccgaggcccccgccaccagcgcccagagccagaccggcagccccgcccaggaggccgccaccgagggccccagcagcgcctgcgccttcagccaggccccctgcgccagagaggtggacgccaacagacccagcaccgccttcctgggccagaacgacgtgttcgacttcacccagcccgccggcgtgagcggcatggccttccccagacccaagagacccgcccccgcccaggaggccgccaccgagggccccagcgccgccagcggcgtgccccagaccggccccggcagagaggtggccgccaccagacccaagaccaccaagagcggcaaggccctggccaagaccagatgggtggagccccagaacgtggtggccgccgccgccgccaaggccaagatggccaccagcatccccgagcccgagggcgccgccgccgccaccgcccagcacagcgccgagccctgggccagaatgggcggcaagagaaccaagaagagcaagcacctggacgacgagtacgagagcagcgaggaggagagagagacccccgccgtgccccccacctggagagccagccagcccagcctgaccgtgagagcccagctggcccccagaccccccatggcccccagaagccagatccccagcagacacgtgctgtgcctgccccccagaaacgtgaccctgctgcaggagagagccaacaagctggtgaagtacctgatgatcaaggactacaagaagatccccatcaagagagccgacatgctgaaggacgtgatcagagagtacgacgagcacttccccgagatcatcgagagagccacctacaccctggagaagaagttcggcatccacctgaaggagatcgacaaggaggagcacctgtacatcctggtgtgcaccagagacagcagcgccagactgctgggcaagaccaaggacacccccagactgagcctgctgctggtgatcctgggcgtgatcttcatgaacggcaacagagccagcgaggccgtgctgtgggaggccctgagaaagatgggcctgagacccggcgtgagacaccccttcctgggcgacctgagaaagctgatcaccgacgacttcgtgaagcagaagaaccccgagctgagagaggagacccccctgagcatggcccccagctggtacctggagtacaagaagatccccaacagcaacccccccgagtacgagttcctgtggggcctgagagccagacacgagaccagcaagatgagagtgctgagattcatcgcccagaaccagaacagagaccccagagagtggaaggcccacttcctggaggccgtggacgacgccttcaagaccatggacgtggacatggccgaggagcacgccagagcccagatgagagcccagatgaacatcggcgacgaggccctgatcggcagatggagctgggacgacatccaggtggagctgctgacctgggacgaggacggcgacttcggcgacgcctgggccagaatccccttcgccttctgggccagataccaccagtacatcctgaacagcaacagagccaacagaagagccacctggagagccggcgtgagcagcggcaccaacggcggcgccagcaccagcgtgctggacggccccagcaccagcagcaccatcagaaccagaaacgccgccagagccggcgccagcttcttcagctggatccagcacagatag

SEQ ID NO: 88514 - DNA, 2226 bp, synthetic construct
  misc_feature 1..2226: note = Description of Artificial Sequence: Synthetic coding sequence
  source 1..2226: mol_type = other DNA
atggccgagggcagcttcagcgtgcagagcgagagctacagcgtggaggacatggacgagggcagcgacgaggtgggcgaggaggagatggtggagggcaacgactacgaggagttcggcgccttcggcggctacggcaccctgaccagcttcgacatccacatcctgagagccttcggcagcctgggccccggcctgagaatcctgagcaacgagccctgggagctggagaaccccgtgctggcccagaccctggtggaggccctgcagctggaccccgagaccctggccaacgagaccgccgccagagccgccaacgtggccagagccgccgccagcaacagagccgccagagccgccgccgccgccgccagaaccgccttcagccaggtggtggccagccacagagtggccaccccccaggtgagcggcgaggacacccagcccaccacctacgccgccgaggcccagggccccacccccgagccccccctggccagcccccagaccagccagatgctggtgaccagcaagatggccgcccccgaggcccccgccaccagcgcccagagccagaccggcagccccgcccaggaggccgccaccgagggccccagcagcgcctgcgccttcagccaggccccctgcgccagagaggtggacgccaacagacccagcaccgccttcctgggccagaacgacgtgttcgacttcacccagcccgccggcgtgagcggcatggccttccccagacccaagagacccgcccccgcccaggaggccgccaccgagggccccagcgccgccagcggcgtgccccagaccggccccggcagagaggtggccgccaccagacccaagaccaccaagagcggcaaggccctggccaagaccagatgggtggagccccagaacgtggtggccgccgccgccgccaaggccaagatggccaccagcatccccgagcccgagggcgccgccgccgccaccgcccagcacagcgccgagccctgggccagaatgggcggcaagagaaccaagaagagcaagcacctggacgacgagtacgagagcagcgaggaggagagagagacccccgccgtgccccccacctggagagccagccagcccagcctgaccgtgagagcccagctggcccccagaccccccatggcccccagaagccagatccccagcagacacgtgctgtgcctgccccccagaaacgtgaccctgctgcaggagagagccaacaagctggtgaagtacctgatgatcaaggactacaagaagatccccatcaagagagccgacatgctgaaggacgtgatcagagagtacgacgagcacttccccgagatcatcgagagagccacctacaccctggagaagaagttcggcatccacctgaaggagatcgacaaggaggagcacctgtacatcctggtgtgcaccagagacagcagcgccagactgctgggcaagaccaaggacacccccagactgagcctgctgctggtgatcctgggcgtgatcttcatgaacggcaacagagccagcgaggccgtgctgtgggaggccctgagaaagatgggcctgagacccggcgtgagacaccccttcctgggcgacctgagaaagctgatcaccgacgacttcgtgaagcagaagtacctggagtacaagaagatccccaacagcaacccccccgagtacgagttcctgtggggcctgagagccagacacgagaccagcaagatgagagtgctgagattcatcgcccagaaccagaacagagaccccagagagtggaaggcccacttcctggaggccgtggacgacgccttcaagaccatggacgtggacatggccgaggagcacgccagagcccagatgagagcccagatgaacatcggcgacgaggccctgatcggcagatggagctgggacgacatccaggtggagctgctgacctgggacgaggacggcgacttcggcgacgcctgggccagaatccccttcgccttctgggccagataccaccagtacatcctgaacagcaacagagccaacagaagagccacctggagagccggcgtgagcagcggcaccaacggcggcgccagcaccagcgtgctggacggccccagcaccagcagcaccatcagaaccagaaacgccgccagagccggcgccagcttcttcagctggatccagcacagatag

SEQ ID NO: 88515 - DNA, 2220 bp, synthetic construct; identical to SEQ ID NO: 88512
  misc_feature 1..2220: note = Description of Artificial Sequence: Synthetic coding sequence
  source 1..2220: mol_type = other DNA

SEQ ID NO: 88516 - DNA, 2274 bp, synthetic construct; identical to SEQ ID NO: 88513
  misc_feature 1..2274: note = Description of Artificial Sequence: Synthetic coding sequence
  source 1..2274: mol_type = other DNA

SEQ ID NO: 88517 - DNA, 2226 bp, synthetic construct; identical to SEQ ID NO: 88514
  misc_feature 1..2226: note = Description of Artificial Sequence: Synthetic coding sequence
  source 1..2226: mol_type = other DNA

SEQ ID NO: 88518 - DNA, 2874 bp, synthetic construct
  misc_feature 1..2874: note = Description of Artificial Sequence: Synthetic coding sequence
  source 1..2874: mol_type = other DNA
atgagcctggtgagccagaacagcagaagaagaagaagaagagtggccaaggccaccgcccacaacagcagctggggcgagatgcaggcccccaacgcccccggcctgcccgccgacgtgcccggcagcgacgtgccccagggccccagcgacagccagatcctgcagggcctgtgcgccagcgagggccccagcaccagcgtgctgcccaccagcgccgagggccccagcaccttcgtgccccccaccatcagcgaggccagcagcgccagcggccagcccaccatcagcgagggccccggcaccagcgtgctgcccacccccagcgagggcctgagcaccagcggcccccccaccatcagcaagggcctgtgcaccagcgtgaccctggccgccagcgagggcagaaacaccagcagaccccccaccagcagcgaggagcccagcaccagcgtgccccccaccgccagcgaggtgcccagcaccagcctgccccccacccccggcgagggcaccagcaccagcgtgccccccaccgcctacgagggccccagcaccagcgtggtgcccacccccgacgagggccccagcaccagcgtgctgcccacccccggcgagggccccggcaccagcgtgcccctggccgccaccgagggcctgagcaccagcgtgcaggccacccccgacgagggccccagcaccagcgtgccccccaccgccaccgagggcctgagcacccccgtgccccccaccagagacgagggccccagcaccagcgtgcccgccacccccggcgagggccccagcaccagcgtgctgcccgccgccagcgacggccagagcatcagcctggtgcccaccagaggcaagggcagcagcaccagcgtgccccccaccgccaccgagggcctgagcaccagcgtgcagcccaccgccggcgagggcagcagcaccagcgtgccccccacccccggcggcggcctgagcaccagcgtgccccccaccgccaccgaggagctgagcaccagcgtgccccccacccccggcgagggccccagcaccagcgtgctgcccatccccggcgagggcctgagcaccagcgtgccccccaccgccagcgacggcagcgacaccagcgtgccccccacccccggcgagggcgccagcaccctggtgcagcccaccgcccccgacggccccggcagcagcgtgctgcccaaccccggcgagggccccagcaccctgttcagcagcagcgccagcgtggacagaaaccccagcaagtgcagcctggtgctgcccagccccagagtgaccaaggccagcgtggacagcgacagcgagggccccaagggcgccgagggccccatcgagttcgaggtgctgagagactgcgagagccccaacagcatcagcatcatgggcctgaacaccagcagagtggccatcaccctgaagccccaggaccccatggagcagaacgtggccgagctgctgcagttcctgctggtgaaggaccagagcaagtaccccatcagagagagcgagatgagagagtacatcgtgaaggagtacagaaaccagttccccgagatcctgagaagagccgccgcccacctggagtgcatcttcagattcgagctgagagagctggaccccgaggcccacacctacatcctgctgaacaagctgggccccgtgcccttcgagggcctggaggagagccccaacggccccaagatgggcctgctgatgatgatcctgggccagatcttcctgaacggcaaccaggccaaggaggccgagatctgggagatgctgtggagaatgggcgtgcagagagagagaagactgagcatcttcggcaaccccaagagactgctgagcgtggagttcgtgtggcagagatacctggactacagacccgtgaccgactgcaagcccgtggagtacgagttcttctggggccccagaagccacctggagaccaccaagatgaagatcctgaagttcatggccaagatctacaacaaggaccccatggactggcccgagaagtacaacgaggccctggaggaggacgccgccagagccttcgccgagggctggcaggccctgccccacttcagaagacccttcttcgaggaggccgccgccgaggtgcccagccccgacagcgaggtgagcagctacagcagcaagtacgccccccacagctggcccgagagcagactggagagcaaggccagaaagctggtgcagctgttcctgctgatggacagcaccaagctgcccatccccaagaagggcatcctgtactacatcggcagagagtgcagcaaggtgttccccgacctgctgaacagagccgccagaaccctgaaccacgtgtacggcaccgagctggtggtgctggaccccagaaaccacagctacaccctgtacaacagaagagagatggaggagaccgaggagatcgtggacagccccaacagacccggcaacaacttcctgatgcaggtgctgagcttcatcttcatcatgggcaaccacgccagagagagcgccgtgtgggccttcctgagaggcctgggcgtgcaggccggcagaaagcacgtgatcacctgcagatacctgagccagagatacatcgacagcctgagagtgcccgacagcgaccccgtgcagtacgagttcgtgtggggccccagagccagactggagaccagcaagatgaaggccctgagatacgtggccagaatccacagaaaggagccccaggactggccccagcagtacagagaggccatggaggacgaggccaacagagccgacgtgggccacagacagatcttcgtgcacaacttcagatag

SEQ ID NO: 88519 - DNA, 1572 bp, synthetic construct
  misc_feature 1..1572: note = Description of Artificial Sequence: Synthetic coding sequence
  source 1..1572: mol_type = other DNA
atgagcctggtgagccagaacgccagacactgcagcgccgagatcaccgccgactacggcgacggcagaggcgagatccaggccaccaacgccagcggcagccccaccagcatgctggtggtggacgccccccagtgcccccaggcccccatcaacagccagtgcgtgaacaccagccaggccgtgcaggaccccaacgacctggaggtgctgatcgacgagcagagcagaagactgggcgccctgagagtgcacgaccccctggaggacagaagcatcgccctggtgaacttcatgagaatgaagagccagaccgagggcagcatccagcagagcgagatgctggagttcctgagagagtacagcgaccagttccccgagatcctgagaagagccagcgcccacctggaccaggtgttcggcctgaacctgagagtgatcgacccccaggccgacacctacaacctggtgagcaagagaggcttccagatcaccgacagaatcgccgagagcctggacatgcccaaggccagcctgctggccctggtgctgggccacatcctgctgaacggcaacagagccagagaggccagcatctgggacctgctgctgaaggtggacatgtgggacaagccccagagaatcaacaacctgttcggcaacaccagaaacctgctgaccaccgacttcgtgtgcatgagattcctggagtactggcccgtgtacggcaccaaccccctggagttcgagttcctgtggggcagcagagcccacagagagatcaccaagatggaggccctgaagttcgtgagcgacgcccacgacgaggagccctggagctggcccgaggagtacaacaaggccctggagggcgacaagaccaaggagagaagcctgaccgccggcctggagttctggagcgaggacaccatgaacgacaaggccaacgacctggtgcagctggccatcagcgtgaccgaggagatgctgcccatccaccaggacgagctgctggcccacaccggcaaggagttcgaggacgtgttccccaacatcctgaacagagccaccctgatcctggacatgttctacggcctgagcctgatcgaggtggacaccagcgagcacatctacctgctggtgcagcagcccgagagcgaggaggagcaggtgatgctggagagcctgggcagacccacccaggagtacgtgatgcccatcctgggcctgatcttcctgatgggcaacagagtgaaggaggccaacgtgtggaacctgctgagaagattcagcgtggacgtgggcagaaagcacagcatcaccagaaagctgatgagacagagatacctggagtgcagacccctgagctacagcaaccccgtggagtacgagctgctgtggggccccagagcccaccacgagaccatcaagatgaaggtgctggagtacatggccagactgtacagaaagagaccccagaactggcccgagcagtacagagaggccgtggaggacgaggaggccagagccaagagcgaggccaccatcatgttcttcctggaccccacctag

SEQ ID NO: 88520 - DNA, 924 bp, synthetic construct
  misc_feature 1..924: note = Description of Artificial Sequence: Synthetic coding sequence
  source 1..924: mol_type = other DNA
atgctgcagacccccgagagcagaggcctgcccgtgccccaggccgagggcgagaaggacggcggccacgacggcgagaccagagcccccaccgccagccaggagagacccaaggaggagctgggcgccggcagagaggagggcgccgccgagcccgccctgaccagaaagggcgccagagccctggccgccaaggccctggccagaagaagagcctacagaagactgaacagaaccgtggccgagctggtgcagttcctgctggtgaaggacaagaagaagagccccatcaccagaagcgagatggtgaagtacgtgatcggcgacctgaagatcctgttccccgacatcatcgccagagccgccgagcacctgagatacgtgttcggcttcgagctgaagcagttcgacagaaagcaccacacctacatcctgatcaacaagctgaagcccctggaggaggaggaggaggaggacctgggcggcgacggccccagactgggcctgctgatgatgatcctgggcctgatctacatgagaggcaacagcgccagagaggcccaggtgtgggagatgctgagaagactgggcgtgcagcccagcaagtaccacttcctgttcggctaccccaagagactgatcatggaggacttcgtgcagcagagatacctgagctacagaagagtgccccacaccaacccccccgagtacgagttcagctggggccccagaagcaacctggagatcagcaagatggaggtgctgggcttcgtggccaagctgcacaagaaggagccccagcactggcccgtgcagtacagagaggccctggccgacgaggccgacagagccagagccaaggccagagccgaggccagcatgagagccagagccagcgccagagccggcatccacctgtggtag

SEQ ID NO: 88521 - DNA, 396 bp, synthetic construct
  misc_feature 1..396: note = Description of Artificial Sequence: Synthetic coding sequence
  source 1..396: mol_type = other DNA
atggccagaagcctggtgtgcctgggcgtgatcatcctgctgagcgccttcagcggccccggcgtgagaggcggccccatgcccaagctggccgacagaaagctgtgcgccgaccaggagtgcagccaccccatcagcatggccgtggccctgcaggactacatggcccccgactgcagattcctgaccatccacagaggccaggtggtgtacgtgttcagcaagctgaagggcagaggcagactgttctggggcggcagcgtgcagggcgactactacggcgacctggccgccagactgggctacttccccagcagcatcgtgagagaggaccagaccctgaagcccggcaaggtggacgtgaagaccgacaagtgggacttctactgccagtag

SEQ ID NO: 88522 - DNA, 642 bp, synthetic construct
  misc_feature 1..642: note = Description of Artificial Sequence: Synthetic coding sequence
  source 1..642: mol_type = other DNA
atggccgagacctacgacttcctgttcaagttcctggtgatcggcagcgccggcaccggcaagagctgcctgctgcaccagttcatcgagaacaagttcaagcaggacagcaaccacaccatcggcgtggagttcggcagcagagtggtgaacgtgggcggcaagaccgtgaagctgcagatctgggacaccgccggccaggagagattcagaagcgtgaccagaagctactacagaggcgccgccggcgccctgctggtgtacgacatcaccagcagagagacctacaacagcctggccgcctggctgaccgacgccagaaccctggccagccccaacatcgtggtgatcctgtgcggcaacaagaaggacctggaccccgagagagaggtgaccttcctggaggccagcagattcgcccaggagaacgagctgatgttcctggagaccagcgccctgaccggcgagaacgtggaggaggccttcctgaagtgcgccagaaccatcctgaacaagatcgacagcggcgagctggaccccgagagaatgggcagcggcatccagtacggcgacgccagcctgagacagctgagacagcccagaagcgcccaggccgtggccccccagccctgcggctgctag

SEQ ID NO: 88523 - DNA, 366 bp, synthetic construct
  misc_feature 1..366: note = Description of Artificial Sequence: Synthetic coding sequence
  source 1..366: mol_type = other DNA
atggccgagacctacgacttcctgttcaagttcctggtgatcggcagcgccggcaccggcaagagctgcctgctgcaccagttcatcgagaacaagttcaagcaggacagcaaccacaccatcggcgtggagttcggcagcagagtggtgaacgtgggcggcaagaccgtgaagctgcagatctgggacaccgccggccaggagagattcagaagcgtgaccagaagctactacagaggcgccgccggcgccctgctggtgtacgacatcaccagagccgacgtgcccggcgaccagagaagccacagaagagagagaggcggcggcgtgccccaggtgtgcccccactacccccagcaggactag

SEQ ID NO: 88524 - DNA, 396 bp, synthetic construct
  misc_feature 1..396: note = Description of Artificial Sequence: Synthetic coding sequence
  source 1..396: mol_type = other DNA
atggccagaagcctggtgtgcctgggcgtgatcatcctgctgagcgccttcagcggccccggcgtgagaggcggccccatgcccaagctggccgacagaaagctgtgcgccgaccaggagtgcagccaccccatcagcatggccgtggccctgcaggactacatggcccccgactgcagattcctgaccatccacagaggccaggtggtgtacgtgttcagcaagctgaagggcagaggcagactgttctggggcggcagcgtgcagggcgactactacggcgacctggccgccagactgggctacttccccagcagcatcgtgagagaggaccagaccctgaagcccggcaaggtggacgtgaagaccgacaccagcagcagcaacagctggtag

SEQ ID NO: 88525 - DNA, 2358 bp, synthetic construct
  misc_feature 1..2358: note = Description of Artificial Sequence: Synthetic coding sequence
  source 1..2358: mol_type = other DNA
atggacagcgtgcccgccaccgtgcccagcatcgccgccacccccggcgaccccgagctggtgggccccctgagcgtgctgtacgccgccttcatcgccaagctgctggagctggtggccaccctgcccgacgacgtgcagcccggccccgacttctacggcctgccctggaagcccgtgttcatcaccgccttcctgggcatcgccagcttcgccatcttcctgtggagaaccgtgctggtggtgaccgacaccctggtgagcgtgaccgagcagcagatcagcgagaagctgaagaccatcatgaaggagaacaccgagctggtgcagaagctgagcaactacgagcagaagatcaaggagagcaagaagcacgtgcaggagaccagaaagcagaacatgatcctgagcgacgaggccatcaagtacaaggacaagatcaagaccctggagaagaaccaggagatcctggacgacaccgccaagaacctgagagtgatgctggagagcgagagagagcagaacgtgaagaaccaggacctgatcagcgagaacaagaagagcatcgagaagctgaaggacgtgatcagcatgaacgccagcgagttcagcgaggtgcagatcgccctgaacgaggccaagctgagcgaggagaaggtgaagagcgagtgccacagagtgcaggaggagaacgccagactgaagaagaagaaggagcagctgcagcaggagatcgaggactggagcaagctgcacgccgagctgagcgagcagatcaagagcttcgagaagagccagaaggacctggaggtggccctgacccacaaggacgacaacatcaacgccctgaccaactgcatcacccagctgaacctgctggagtgcgagagcgagagcgagggccagaacaagggcggcaacgacagcgacgagctggccaacggcgaggtgggcggcgacagaaacgagaagatgaagaaccagatcaagcagatgatggacgtgagcagaacccagaccgccatcagcgtggtggaggaggacctgaagctgctgcagctgaagctgagagccagcgtgagcaccaagtgcaacctggaggaccaggtgaagaagctggaggacgacagaaacagcctgcaggccgccaaggccggcctggaggacgagtgcaagaccctgagacagaaggtggagatcctgaacgagctgtaccagcagaaggagatggccctgcagaagaagctgagccaggaggagtacgagagacaggagagagagcacagactgagcgccgccgacgagaaggccgtgagcgccgccgaggaggtgaagacctacaagagaagaatcgaggagatggaggacgagctgcagaagaccgagagaagcttcaagaaccagatcgccacccacgagaagaaggcccacgagaactggctgaaggccagagccgccgagagagccatcgccgaggagaagagagaggccgccaacctgagacacaagctgctggagctgacccagaagatggccatgctgcaggaggagcccgtgatcgtgaagcccatgcccggcaagcccaacacccagaacccccccagaagaggccccctgagccagaacggcagcttcggccccagccccgtgagcggcggcgagtgcagcccccccctgaccgtggagccccccgtgagacccctgagcgccaccctgaacagaagagacatgcccagaagcgagttcggcagcgtggacggccccctgccccaccccagatggagcgccgaggccagcggcaagcccagccccagcgaccccggcagcggcaccgccaccatgatgaacagcagcagcagaggcagcagccccaccagagtgctggacgagggcaaggtgaacatggcccccaagggccccccccccttccccggcgtgcccctgatgagcacccccatgggcggccccgtgcccccccccatcagatacggcccccccccccagctgtgcggccccttcggccccagacccctgcccccccccttcggccccggcatgagaccccccctgggcctgagagagttcgcccccggcgtgccccccggcagaagagacctgcccctgcaccccagaggcttcctgcccggccacgcccccttcagacccctgggcagcctgggccccagagagtacttcatccccggcaccagactgcccccccccacccacggcccccaggagtacccccccccccccgccgtgagagacctgctgcccagcggcagcagagacgagcccccccccgccagccagagcaccagccaggactgcagccaggccctgaagcagagcccctag

SEQ ID NO: 88526 - DNA, 5547 bp, synthetic construct
  misc_feature 1..5547: note = Description of Artificial Sequence: Synthetic coding sequence
  source 1..5547: mol_type = other DNA
atggccgccgcccccggcctgctggtgtggctgctggtgctgagactgccctggagagtgcccggccagctggaccccagcaccggcagaagattcagcgagcacaagctgtgcgccgacgacgagtgcagcatgctgatgtacagaggcgaggccctggaggacttcaccggccccgactgcagattcgtgaacttcaagaagggcgaccccgtgtacgtgtactacaagctggccagaggctggcccgaggtgtgggccggcagcgtgggcagaaccttcggctacttccccaaggacctgatccaggtggtgcacgagtacaccaaggaggagctgcaggtgcccaccgacgagaccgacttcgtgtgcttcgacggcggcagagacgacttccacaactacaacgtggaggagctgctgggcttcctggagctgtacaacagcgccgccaccgacagcgagaaggccgtggagaagaccctgcaggacatggagaagaaccccgagctgagcaaggagagagagcccgagcccgagcccgtggaggccaacagcgaggagagcgacagcgtgttcagcgagaacaccgaggacctgcaggagcagttcaccacccagaagcaccacagccacgccaacagccaggccaaccacgcccagggcgagcaggccagcttcgagagcttcgaggagatgctgcaggacaagctgaaggtgcccgagagcgagaacaacaagaccagcaacagcagccaggtgagcaacgagcaggacaagatcgacgcctacaagctgctgaagaaggagatgaccctggacctgaagaccaagttcggcagcaccgccgacgccctggtgagcgacgacgagaccaccagactggtgaccagcctggaggacgacttcgacgaggagctggacaccgagtactacgccgtgggcaaggaggacgaggagaaccaggaggacttcgacgagctgcccctgctgaccttcaccgacggcgaggacatgaagacccccgccaagagcggcgtggagaagtaccccaccgacaaggagcagaacagcaacgaggaggacaaggtgcagctgaccgtgccccccggcatcaagaacgacgacaagaacatcctgaccacctggggcgacaccatcttcagcatcgtgaccggcggcgaggagaccagagacaccatggacctggagagcagcagcagcgaggaggagaaggaggacgacgacgacgccctggtgcccgacagcaagcagggcaagccccagagcgccaccgactacagcgaccccgacaacgtggacgacggcctgttcatcgtggacatccccaagaccaacaacgacaaggaggtgaacgccgagcaccacatcaagggcaagggcagaggcgtgcaggagagcaagagaggcctggtgcaggacaagaccgagctggaggacgagaaccaggagggcatgaccgtgcacagcagcgtgcacagcaacaacctgaacagcatgcccgccgccgagaagggcaaggacaccctgaagagcgcctacgacgacaccgagaacgacctgaagggcgccgccatccacatcagcaagggcatgctgcacgaggagaagcccggcgagcagatcctggagggcggcagcgagagcgagagcgcccagaaggccgccggcaaccagatgaacgacagaaagatccagcaggagagcctgggcagcgcccccctgatgggcgacgaccaccccaacgccagcagagacagcgtggagggcgacgccctggtgaacggcgccaagctgcacaccctgagcgtggagcaccagagagaggagctgaaggaggagctggtgctgaagacccagaaccagcccagattcagcagccccgacgagatcgacctgcccagagagctggaggacgaggtgcccatcctgggcagaaacctgccctggcagcaggagagagacgtggccgccaccgccagcaagcagatgagcgagaagatcagactgagcgagggcgaggccaaggaggacagcctggacgaggagttcttccaccacaaggccatgcagggcaccgaggtgggccagaccgaccagaccgacagcaccggcggccccgccttcctgagcaaggtggaggaggacgactaccccagcgaggagctgctggaggacgagaacgccatcaacgccaagagaagcaaggagaagaaccccggcaaccagggcagacagttcgacgtgaacctgcaggtgcccgacagagccgtgctgggcaccatccaccccgaccccgagatcgaggagagcaagcaggagaccagcatgatcctggacagcgagaagaccagcgagaccgccgccaagggcgtgaacaccggcggcagagagcccaacaccatggtggagaaggagagacccctggccgacaagaaggcccagagacccttcgagagaagcgacttcagcgacagcatcaagatccagacccccgagctgggcgaggtgttccagaacaaggacagcgactacctgaagaacgacaaccccgaggagcacctgaagaccagcggcctggccggcgagcccgagggcgagctgagcaaggaggaccacgagaacaccgagaagtacatgggcaccgagagccagggcagcgccgccgccgagcccgaggacgacagcttccactggaccccccacaccagcgtggagcccggccacagcgacaagagagaggacctgctgatcatcagcagcttcttcaaggagcagcagagcctgcagagattccagaagtacttcaacgtgcacgagctggaggccctgctgcaggagatgagcagcaagctgaagagcgcccagcaggagagcctgccctacaacatggagaaggtgctggacaaggtgttcagagccagcgagagccagatcctgagcatcgccgagaagatgctggacaccagagtggccgagaacagagacctgggcatgaacgagaacaacatcttcgaggaggccgccgtgctggacgacatccaggacctgatctacttcgtgagatacaagcacagcaccgccgaggagaccgccaccctggtgatggccccccccctggaggagggcctgggcggcgccatggaggagatgcagcccctgcacgaggacaacttcagcagagagaagaccgccgagctgaacgtgcaggtgcccgaggagcccacccacctggaccagagagtgatcggcgacacccacgccagcgaggtgagccagaagcccaacaccgagaaggacctggaccccggccccgtgaccaccgaggacacccccatggacgccatcgacgccaacaagcagcccgagaccgccgccgaggagcccgccagcgtgacccccctggagaacgccatcctgctgatctacagcttcatgttctacctgaccaagagcctggtggccaccctgcccgacgacgtgcagcccggccccgacttctacggcctgccctggaagcccgtgttcatcaccgccttcctgggcatcgccagcttcgccatcttcctgtggagaaccgtgctggtggtgagcaacaccgtgtactacgtgaccgagcagcagatcagcgagaagctgaagaccatcatgaaggagaacaccgagctggtgcagaagctgagcaactacgagcagaagatcaaggagagcaagaagcacgtgcaggagaccagaaagcagaacatgatcctgagcgacgaggccatcaagtacaaggacaagatcaagaccctggagaagaaccaggagatcctggacgacaccgccaagaacctgagagtgatgctggagagcgagagagagcagaacgtgaagaaccaggacctgctgcagcaggagatcgaggactggagcaagctgcacgccgagctgagcgagcagatcaagagcttcgagaagagccagaaggacctggaggtggccctgacccacaaggacgacaacatcaacgccctgaccaactgcatcacccagctgaacctgctggagtgcgagagcgagagcgagggccagaacaagggcggcaacgacagcgacgagctggccaacggcgaggtgggcggcgacagaaacgagaagatgaagaaccagatcaagcagatgatggacgtgagcagaacccagaccgccatcagcgtggtggaggaggacctgaagctgctgcagctgaagctgagagccagcgtgagcaccaagtgcaacctggaggaccaggtgaagaagctggaggacgacagaaacagcctgcaggccgccaaggccggcctggaggacgagtgcaagaccctgagacagaaggtggagatcctgaacgagctgtaccagcagaaggagatggccctgcagaagaagctgagccaggaggagtacgagagacaggagagagagcacagactgagcgccgccgacgagaaggccgtgagcgccgccgaggaggtgaagacctacaagagaagaatcgaggagatggaggacgagctgcagaagaccgagagaagcttcaagaaccagatcgccacccacgagaagaaggcccacgagaactggctgaaggccagagccgccgagagagccatcgccgaggagaagagagaggccgccaacctgagacacaagctgctggagctgacccagaagatggccatgctgcaggaggagcccgtgatcgtgaagcccatgcccggcaagcccaacacccagaacccccccagaagaggccccctgagccagaacggcagcttcggccccagccccgtgagcggcggcgagtgcagcccccccctgaccgtggagccccccgtgagacccctgagcgccaccctgaacagaagagacatgcccagaagcgagttcggcagcgtggacggccccctgccccaccccagatggagcgccgaggccagcggcaagcccagccccagcgaccccggcagcggcaccgccaccatgatgaacagcagcagcagaggcagcagccccaccagagtgctggacgagggcaaggtgaacatggcccccaagggccccccccccttccccggcgtgcccctgatgagcacccccatgggcggccccgtgcccccccccatcagatacggcccccccccccagctgtgcggccccttcggccccagacccctgcccccccccttcggccccggcatgagaccccccctgggcctgagagagttcgcccccggcgtgccccccggcagaagagacctgcccctgcaccccagaggcttcctgcccggccacgcccccttcagacccctgggcagcctgggccccagagagtacttcatccccggcaccagactgcccccccccacccacggcccccaggagtacccccccccccccgccgtgagagacctgctgcccagcggcagcagagacgagcccccccccgccagccagagcaccagccaggactgcagccaggccctgaagcagagcccctag

SEQ ID NO: 88527 - DNA, 2358 bp, synthetic construct
  misc_feature 1..2358: note = Description of Artificial Sequence: Synthetic coding sequence
  source 1..2358: mol_type = other DNA
atggacagcgtgcccgccaccgtgcccagcatcgccgccacccccggcgaccccgagctggtgggccccctgagcgtgctgtacgccgccttcatcgccaagctgctggagctggtggccaccctgcccgacgacgtgcagcccggccccgacttctacggcctgccctggaagcccgtgttcatcaccgccttcctgggcatcgccagcttcgccatcttcctgtggagaaccgtgctggtggtgaaggacagagtgtaccaggtgaccgagcagcagatcagcgagaagctgaagaccatcatgaaggagaacaccgagctggtgcagaagctgagcaactacgagcagaagatcaaggagagcaagaagcacgtgcaggagaccagaaagcagaacatgatcctgagcgacgaggccatcaagtacaaggacaagatcaagaccctggagaagaaccaggagatcctggacgacaccgccaagaacctgagagtgatgctggagagcgagagagagcagaacgtgaagaaccaggacctgatcagcgagaacaagaagagcatcgagaagctgaaggacgtgatcagcatgaacgccagcgagttcagcgaggtgcagatcgccctgaacgaggccaagctgagcgaggagaaggtgaagagcgagtgccacagagtgcaggaggagaacgccagactgaagaagaagaaggagcagctgcagcaggagatcgaggactggagcaagctgcacgccgagctgagcgagcagatcaagagcttcgagaagagccagaaggacctggaggtggccctgacccacaaggacgacaacatcaacgccctgaccaactgcatcacccagctgaacctgctggagtgcgagagcgagagcgagggccagaacaagggcggcaacgacagcgacgagctggccaacggcgaggtgggcggcgacagaaacgagaagatgaagaaccagatcaagcagatgatggacgtgagcagaacccagaccgccatcagcgtggtggaggaggacctgaagctgctgcagctgaagctgagagccagcgtgagcaccaagtgcaacctggaggaccaggtgaagaagctggaggacgacagaaacagcctgcaggccgccaaggccggcctggaggacgagtgcaagaccctgagacagaaggtggagatcctgaacgagctgtaccagcagaaggagatggccctgcagaagaagctgagccaggaggagtacgagagacaggagagagagcacagactgagcgccgccgacgagaaggccgtgagcgccgccgaggaggtgaagacctacaagagaagaatcgaggagatggaggacgagctgcagaagaccgagagaagcttcaagaaccagatcgccacccacgagaagaaggcccacgagaactggctgaaggccagagccgccgagagagccatcgccgaggagaagagagaggccgccaacctgagacacaagctgctggagctgacccagaagatggccatgctgcaggaggagcccgtgatcgtgaagcccatgcccggcaagcccaacacccagaacccccccagaagaggccccctgagccagaacggcagcttcggccccagccccgtgagcggcggcgagtgcagcccccccctgaccgtggagccccccgtgagacccctgagcgccaccctgaacagaagagacatgcccagaagcgagttcggcagcgtggacggccccctgccccaccccagatggagcgccgaggccagcggcaagcccagccccagcgaccccggcagcggcaccgccaccatgatgaacagcagcagcagaggcagcagccccaccagagtgctggacgagggcaaggtgaacatggcccccaagggccccccccccttccccggcgtgcccctgatgagcacccccatgggcggccccgtgcccccccccatcagatacggcccccccccccagctgtgcggccccttcggccccagacccctgcccccccccttcggccccggcatgagaccccccctgggcctgagagagttcgcccccggcgtgccccccggcagaagagacctgcccctgcaccccagaggcttcctgcccggccacgcccccttcagacccctgggcagcctgggccccagagagtacttcatccccggcaccagactgcccccccccacccacggcccccaggagtacccccccccccccgccgtgagagacctgctgcccagcggcagcagagacgagcccccccccgccagccagagcaccagccaggactgcagccaggccctgaagcagagcccctag

SEQ ID NO: 88528 - DNA, 5724 bp, synthetic construct
  misc_feature 1..5724: note = Description of Artificial Sequence: Synthetic coding sequence
  source 1..5724: mol_type = other DNA
atggccgccgcccccggcctgctggtgtggctgctggtgctgagactgccctggagagtgcccggccagctggaccccagcaccggcagaagattcagcgagcacaagctgtgcgccgacgacgagtgcagcatgctgatgtacagaggcgaggccctggaggacttcaccggccccgactgcagattcgtgaacttcaagaagggcgaccccgtgtacgtgtactacaagctggccagaggctggcccgaggtgtgggccggcagcgtgggcagaaccttcggctacttccccaaggacctgatccaggtggtgcacgagtacaccaaggaggagctgcaggtgcccaccgacgagaccgacttcgtgtgcttcgacggcggcagagacgacttccacaactacaacgtggaggagctgctgggcttcctggagctgtacaacagcgccgccaccgacagcgagaaggccgtggagaagaccctgcaggacatggagaagaaccccgagctgagcaaggagagagagcccgagcccgagcccgtggaggccaacagcgaggagagcgacagcgtgttcagcgagaacaccgaggacctgcaggagcagttcaccacccagaagcaccacagccacgccaacagccaggccaaccacgcccagggcgagcaggccagcttcgagagcttcgaggagatgctgcaggacaagctgaaggtgcccgagagcgagaacaacaagaccagcaacagcagccaggtgagcaacgagcaggacaagatcgacgcctacaagctgctgaagaaggagatgaccctggacctgaagaccaagttcggcagcaccgccgacgccctggtgagcgacgacgagaccaccagactggtgaccagcctggaggacgacttcgacgaggagctggacaccgagtactacgccgtgggcaaggaggacgaggagaaccaggaggacttcgacgagctgcccctgctgaccttcaccgacggcgaggacatgaagacccccgccaagagcggcgtggagaagtaccccaccgacaaggagcagaacagcaacgaggaggacaaggtgcagctgaccgtgccccccggcatcaagaacgacgacaagaacatcctgaccacctggggcgacaccatcttcagcatcgtgaccggcggcgaggagaccagagacaccatggacctggagagcagcagcagcgaggaggagaaggaggacgacgacgacgccctggtgcccgacagcaagcagggcaagccccagagcgccaccgactacagcgaccccgacaacgtggacgacggcctgttcatcgtggacatccccaagaccaacaacgacaaggaggtgaacgccgagcaccacatcaagggcaagggcagaggcgtgcaggagagcaagagaggcctggtgcaggacaagaccgagctggaggacgagaaccaggagggcatgaccgtgcacagcagcgtgcacagcaacaacctgaacagcatgcccgccgccgagaagggcaaggacaccctgaagagcgcctacgacgacaccgagaacgacctgaagggcgccgccatccacatcagcaagggcatgctgcacgaggagaagcccggcgagcagatcctggagggcggcagcgagagcgagagcgcccagaaggccgccggcaaccagatgaacgacagaaagatccagcaggagagcctgggcagcgcccccctgatgggcgacgaccaccccaacgccagcagagacagcgtggagggcgacgccctggtgaacggcgccaagctgcacaccctgagcgtggagcaccagagagaggagctgaaggaggagctggtgctgaagacccagaaccagcccagattcagcagccccgacgagatcgacctgcccagagagctggaggacgaggtgcccatcctgggcagaaacctgccctggcagcaggagagagacgtggccgccaccgccagcaagcagatgagcgagaagatcagactgagcgagggcgaggccaaggaggacagcctggacgaggagttcttccaccacaaggccatgcagggcaccgaggtgggccagaccgaccagaccgacagcaccggcggccccgccttcctgagcaaggtggaggaggacgactaccccagcgaggagctgctggaggacgagaacgccatcaacgccaagagaagcaaggagaagaaccccggcaaccagggcagacagttcgacgtgaacctgcaggtgcccgacagagccgtgctgggcaccatccaccccgaccccgagatcgaggagagcaagcaggagaccagcatgatcctggacagcgagaagaccagcgagaccgccgccaagggcgtgaacaccggcggcagagagcccaacaccatggtggagaaggagagacccctggccgacaagaaggcccagagacccttcgagagaagcgacttcagcgacagcatcaagatccagacccccgagctgggcgaggtgttccagaacaaggacagcgactacctgaagaacgacaaccccgaggagcacctgaagaccagcggcctggccggcgagcccgagggcgagctgagcaaggaggaccacgagaacaccgagaagtacatgggcaccgagagccagggcagcgccgccgccgagcccgaggacgacagcttccactggaccccccacaccagcgtggagcccggccacagcgacaagagagaggacctgctgatcatcagcagcttcttcaaggagcagcagagcctgcagagattccagaagtacttcaacgtgcacgagctggaggccctgctgcaggagatgagcagcaagctgaagagcgcccagcaggagagcctgccctacaacatggagaaggtgctggacaaggtgttcagagccagcgagagccagatcctgagcatcgccgagaagatgctggacaccagagtggccgagaacagagacctgggcatgaacgagaacaacatcttcgaggaggccgccgtgctggacgacatccaggacctgatctacttcgtgagatacaagcacagcaccgccgaggagaccgccaccctggtgatggccccccccctggaggagggcctgggcggcgccatggaggagatgcagcccctgcacgaggacaacttcagcagagagaagaccgccgagctgaacgtgcaggtgcccgaggagcccacccacctggaccagagagtgatcggcgacacccacgccagcgaggtgagccagaagcccaacaccgagaaggacctggaccccggccccgtgaccaccgaggacacccccatggacgccatcgacgccaacaagcagcccgagaccgccgccgaggagcccgccagcgtgacccccctggagaacgccatcctgctgatctacagcttcatgttctacctgaccaagagcctggtggccaccctgcccgacgacgtgcagcccggccccgacttctacggcctgccctggaagcccgtgttcatcaccgccttcctgggcatcgccagcttcgccatcttcctgtggagaaccgtgctggtggtgagcaacaccgtgtactacgtgaccgagcagcagatcagcgagaagctgaagaccatcatgaaggagaacaccgagctggtgcagaagctgagcaactacgagcagaagatcaaggagagcaagaagcacgtgcaggagaccagaaagcagaacatgatcctgagcgacgaggccatcaagtacaaggacaagatcaagaccctggagaagaaccaggagatcctggacgacaccgccaagaacctgagagtgatgctggagagcgagagagagcagaacgtgaagaaccaggacctgatcagcgagaacaagaagagcatcgagaagctgaaggacgtgatcagcatgaacgccagcgagttcagcgaggtgcagatcgccctgaacgaggccaagctgagcgaggagaaggtgaagagcgagtgccacagagtgcaggaggagaacgccagactgaagaagaagaaggagcagctgcagcaggagatcgaggactggagcaagctgcacgccgagctgagcgagcagatcaagagcttcgagaagagccagaaggacctggaggtggccctgacccacaaggacgacaacatcaacgccctgaccaactgcatcacccagctgaacctgctggagtgcgagagcgagagcgagggccagaacaagggcggcaacgacagcgacgagctggccaacggcgaggtgggcggcgacagaaacgagaagatgaagaaccagatcaagcagatgatggacgtgagcagaacccagaccgccatcagcgtggtggaggaggacctgaagctgctgcagctgaagctgagagccagcgtgagcaccaagtgcaacctggaggaccaggtgaagaagctggaggacgacagaaacagcctgcaggccgccaaggccggcctggaggacgagtgcaagaccctgagacagaaggtggagatcctgaacgagctgtaccagcagaaggagatggccctgcagaagaagctgagccaggaggagtacgagagacaggagagagagcacagactgagcgccgccgacgagaaggccgtgagcgccgccgaggaggtgaagacctacaagagaagaatcgaggagatggaggacgagctgcagaagaccgagagaagcttcaagaaccagatcgccacccacgagaagaaggcccacgagaactggctgaaggccagagccgccgagagagccatcgccgaggagaagagagaggccgccaacctgagacacaagctgctggagctgacccagaagatggccatgctgcaggaggagcccgtgatcgtgaagcccatgcccggcaagcccaacacccagaacccccccagaagaggccccctgagccagaacggcagcttcggccccagccccgtgagcggcggcgagtgcagcccccccctgaccgtggagccccccgtgagacccctgagcgccaccctgaacagaagagacatgcccagaagcgagttcggcagcgtggacggccccctgccccaccccagatggagcgccgaggccagcggcaagcccagccccagcgaccccggcagcggcaccgccaccatgatgaacagcagcagcagaggcagcagccccaccagagtgctggacgagggcaaggtgaacatggcccccaagggccccccccccttccccggcgtgcccctgatgagcacccccatgggcggccccgtgcccccccccatcagatacggcccccccccccagctgtgcggccccttcggccccagacccctgcccccccccttcggccccggcatgagaccccccctgggcctgagagagttcgcccccggcgtgccccccggcagaagagacctgcccctgcaccccagaggcttcctgcccggccacgcccccttcagacccctgggcagcctgggccccagagagtacttcatccccggcaccagactgcccccccccacccacggcccccaggagtacccccccccccccgccgtgagagacctgctgcccagcggcagcagagacgagcccccccccgccagccagagcaccagccaggactgcagccaggccctgaagcagagcccctag

SEQ ID NO: 88529 - DNA, 1503 bp, synthetic construct
  misc_feature 1..1503: note = Description of Artificial Sequence: Synthetic coding sequence
  source 1..1503: mol_type = other DNA
atggccgccgcccccggcctgctggtgtggctgctggtgctgagactgccctggagagtgcccggccagctggaccccagcaccggcagaagattcagcgagcacaagctgtgcgccgacgacgagtgcagcatgctgatgtacagaggcgaggccctggaggacttcaccggccccgactgcagattcgtgaacttcaagaagggcgaccccgtgtacgtgtactacaagctggccagaggctggcccgaggtgtgggccggcagcgtgggcagaaccttcggctacttccccaaggacctgatccaggtggtgcacgagtacaccaaggaggagctgcaggtgcccaccgacgagaccgacttcgtgtgcttcgacggcggcagagacgacttccacaactacaacgtggaggagctgctgggcttcctggagctgtacaacagcgccgccaccgacagcgagaaggccgtggagaagaccctgcaggacatggagaagaaccccgagctgagcaaggagagagagcccgagcccgagcccgtggaggccaacagcgaggagagcgacagcgtgttcagcgagaacaccgaggacctgcaggagcagttcaccacccagaagcaccacagccacgccaacagccaggccaaccacgcccagggcgagcaggccagcttcgagagcttcgaggagatgctgcaggacaagctgaaggtgcccgagagcgagaacaacaagaccagcaacagcagccaggtgagcaacgagcaggacaagatcgacgcctacaagctgctgaagaaggagatgaccctggacctgaagaccaagttcggcagcaccgccgacgccctggtgagcgacgacgagaccaccagactggtgaccagcctggaggacgacttcgacgaggagctggacaccgagtactacgccgtgggcaaggaggacgaggagaaccaggaggacttcgacgagctgcccctgctgaccttcaccgacggcgaggacatgaagacccccgccaagagcggcgtggagaagtaccccaccgacaaggagcagaacagcaacgaggaggacaaggtgcagctgaccgtgccccccggcatcaagaacgacgacaagaacatcctgaccacctggggcgacaccatcttcagcatcgtgaccggcggcgaggagaccagagacaccatggacctggagagcagcagcagcgaggaggagaaggaggacgacgacgacgccctggtgcccgacagcaagcagggcaagccccagagcgccaccgactacagcgaccccgacaacgtggacgacggcctgttcatcgtggacatccccaagaccaacaacgacaaggaggtgaacgccgagcaccacatcaagggcaagggcagaggcgtgcaggagagcaagagaggcctggtgcaggacaagaccgagctggaggacgagaaccaggagggcttcaagaccgagcccatcaagctgtag

SEQ ID NO: 88530 - DNA, 5724 bp, synthetic construct
  misc_feature 1..5724: note = Description of Artificial Sequence: Synthetic coding sequence
  source 1..5724: mol_type = other DNA
atggccgccgcccccggcctgctggtgtggctgctggtgctgagactgccctggagagtgcccggccagctggaccccagcaccggcagaagattcagcgagcacaagctgtgcgccgacgacgagtgcagcatgctgatgtacagaggcgaggccctggaggacttcaccggccccgactgcagattcgtgaacttcaagaagggcgaccccgtgtacgtgtactacaagctggccagaggctggcccgaggtgtgggccggcagcgtgggcagaaccttcggctacttccccaaggacctgatccaggtggtgcacgagtacaccaaggaggagctgcaggtgcccaccgacgagaccgacttcgtgtgcttcgacggcggcagagacgacttccacaactacaacgtggaggagctgctgggcttcctggagctgtacaacagcgccgccaccgacagcgagaaggccgtggagaagaccctgcaggacatggagaagaaccccgagctgagcaaggagagagagcccgagcccgagcccgtggaggccaacagcgaggagagcgacagcgtgttcagcgagaacaccgaggacctgcaggagcagttcaccacccagaagcaccacagccacgccaacagccaggccaaccacgcccagggcgagcaggccagcttcgagagcttcgaggagatgctgcaggacaagctgaaggtgcccgagagcgagaacaacaagaccagcaacagcagccaggtgagcaacgagcaggacaagatcgacgcctacaagctgctgaagaaggagatgaccctggacctgaagaccaagttcggcagcaccgccgacgccctggtgagcgacgacgagaccaccagactggtgaccagcctggaggacgacttcgacgaggagctggacaccgagtactacgccgtgggcaaggaggacgaggagaaccaggaggacttcgacgagctgcccctgctgaccttcaccgacggcgaggacatgaagacccccgccaagagcggcgtggagaagtaccccaccgacaaggagcagaacagcaacgaggaggacaaggtgcagctgaccgtgccccccggcatcaagaacgacgacaagaacatcctgaccacctggggcgacaccatcttcagcatcgtgaccggcggcgaggagaccagagacaccatggacctggagagcagcagcagcgaggaggagaaggaggacgacgacgacgccctggtgcccgacagcaagcagggcaagccccagagcgccaccgactacagcgaccccgacaacgtggacgacggcctgttcatcgtggacatccccaagaccaacaacgacaaggaggtgaacgccgagcaccacatcaagggcaagggcagaggcgtgcaggagagcaagagaggcctggtgcaggacaagaccgagctggaggacgagaaccaggagggcatgaccgtgcacagcagcgtgcacagcaacaacctgaacagcatgcccgccgccgagaagggcaaggacaccctgaagagcgcctacgacgacaccgagaacgacctgaagggcgccgccatccacatcagcaagggcatgctgcacgaggagaagcccggcgagcagatcctggagggcggcagcgagagcgagagcgcccagaaggccgccggcaaccagatgaacgacagaaagatccagcaggagagcctgggcagcgcccccctgatgggcgacgaccaccccaacgccagcagagacagcgtggagggcgacgccctggtgaacggcgccaagctgcacaccctgagcgtggagcaccagagagaggagctgaaggaggagctggtgctgaagacccagaaccagcccagattcagcagccccgacgagatcgacctgcccagagagctggaggacgaggtgcccatcctgggcagaaacctgccctggcagcaggagagagacgtggccgccaccgccagcaagcagatgagcgagaagatcagactgagcgagggcgaggccaaggaggacagcctggacgaggagttcttccaccacaaggccatgcagggcaccgaggtgggccagaccgaccagaccgacagcaccggcggccccgccttcctgagcaaggtggaggaggacgactaccccagcgaggagctgctggaggacgagaacgccatcaacgccaagagaagcaaggagaagaaccccggcaaccagggcagacagttcgacgtgaacctgcaggtgcccgacagagccgtgctgggcaccatccaccccgaccccgagatcgaggagagcaagcaggagaccagcatgatcctggacagcgagaagaccagcgagaccgccgccaagggcgtgaacaccggcggcagagagcccaacaccatggtggagaaggagagacccctggccgacaagaaggcccagagacccttcgagagaagcgacttcagcgacagcatcaagatccagacccccgagctgggcgaggtgttccagaacaaggacagcgactacctgaagaacgacaaccccgaggagcacctgaagaccagcggcctggccggcgagcccgagggcgagctgagcaaggaggaccacgagaacaccgagaagtacatgggcaccgagagccagggcagcgccgccgccgagcccgaggacgacagcttccactggaccccccacaccagcgtggagcccggccacagcgacaagagagaggacctgctgatcatcagcagcttcttcaaggagcagcagagcctgcagagattccagaagtacttcaacgtgcacgagctggaggccctgctgcaggagatgagcagcaagctgaagagcgcccagcaggagagcctgccctacaacatggagaaggtgctggacaaggtgttcagagccagcgagagccagatcctgagcatcgccgagaagatgctggacaccagagtggccgagaacagagacctgggcatgaacgagaacaacatcttcgaggaggccgccgtgctggacgacatccaggacctgatctacttcgtgagatacaagcacagcaccgccgaggagaccgccaccctggtgatggccccccccctggaggagggcctgggcggcgccatggaggagatgcagcccctgcacgaggacaacttcagcagagagaagaccgccgagctgaacgtgcaggtgcccgaggagcccacccacctggaccagagagtgatcggcgacacccacgccagcgaggtgagccagaagcccaacaccgagaaggacctggaccccggccccgtgaccaccgaggacacccccatggacgccatcgacgccaacaagcagcccgagaccgccgccgaggagcccgccagcgtgacccccctggagaacgccatcctgctgatctacagcttcatgttctacctgaccaagagcctggtggccaccctgcccgacgacgtgcagcccggccccgacttctacggcctgccctggaagcccgtgttcatcaccgccttcctgggcatcgccagcttcgccatcttcctgtggagaaccgtgctggtggtgaaggacagagtgtaccaggtgaccgagcagcagatcagcgagaagctgaagaccatcatgaaggagaacaccgagctggtgcagaagctgagcaactacgagcagaagatcaaggagagcaagaagcacgtgcaggagaccagaaagcagaacatgatcctgagcgacgaggccatcaagtacaaggacaagatcaagaccctggagaagaaccaggagatcctggacgacaccgccaagaacctgagagtgatgctggagagcgagagagagcagaacgtgaagaaccaggacctgatcagcgagaacaagaagagcatcgagaagctgaaggacgtgatcagcatgaacgccagcgagttcagcgaggtgcagatcgccctgaacgaggccaagctgagcgaggagaaggtgaagagcgagtgccacagagtgcaggaggagaacgccagactgaagaagaagaaggagcagctgcagcaggagatcgaggactggagcaagctgcacgccgagctgagcgagcagatcaagagcttcgagaagagccagaaggacctggaggtggccctgacccacaaggacgacaacatcaacgccctgaccaactgcatcacccagctgaacctgctggagtgcgagagcgagagcgagggccagaacaagggcggcaacgacagcgacgagctggccaacggcgaggtgggcggcgacagaaacgagaagatgaagaaccagatcaagcagatgatggacgtgagcagaacccagaccgccatcagcgtggtggaggaggacctgaagctgctgcagctgaagctgagagccagcgtgagcaccaagtgcaacctggaggaccaggtgaagaagctggaggacgacagaaacagcctgcaggccgccaaggccggcctggaggacgagtgcaagaccctgagacagaaggtggagatcctgaacgagctgtaccagcagaaggagatggccctgcagaagaagctgagccaggaggagtacgagagacaggagagagagcacagactgagcgccgccgacgagaaggccgtgagcgccgccgaggaggtgaagacctacaagagaagaatcgaggagatggaggacgagctgcagaagaccgagagaagcttcaagaaccagatcgccacccacgagaagaaggcccacgagaactggctgaaggccagagccgccgagagagccatcgccgaggagaagagagaggccgccaacctgagacacaagctgctggagctgacccagaagatggccatgctgcaggaggagcccgtgatcgtgaagcccatgcccggcaagcccaacacccagaacccccccagaagaggccccctgagccagaacggcagcttcggccccagccccgtgagcggcggcgagtgcagcccccccctgaccgtggagccccccgtgagacccctgagcgccaccctgaacagaagagacatgcccagaagcgagttcggcagcgtggacggccccctgccccaccccagatggagcgccgaggccagcggcaagcccagccccagcgaccccggcagcggcaccgccaccatgatgaacagcagcagcagaggcagcagccccaccagagtgctggacgagggcaaggtgaacatggcccccaagggccccccccccttccccggcgtgcccctgatgagcacccccatgggcggccccgtgcccccccccatcagatacggcccccccccccagctgtgcggccccttcggccccagacccctgcccccccccttcggccccggcatgagaccccccctgggcctgagagagttcgcccccggcgtgccccccggcagaagagacctgcccctgcaccccagaggcttcctgcccggccacgcccccttcagacccctgggcagcctgggccccagagagtacttcatccccggcaccagactgcccccccccacccacggcccccaggagtacccccccccccccgccgtgagagacctgctgcccagcggcagcagagacgagcccccccccgccagccagagcaccagccaggactgcagccaggccctgaagcagagcccctag

SEQ ID NO: 88531 - DNA, 3051 bp, synthetic construct
  misc_feature 1..3051: note = Description of Artificial Sequence: Synthetic coding sequence
  source 1..3051: mol_type = other DNA
tgactggtgcccgacagcaagcagggcaagccccagagcgccaccgactacagcgaccccgacaacgtggacgacggcctgttcatcgtggacatccccaagaccaacaacgacaaggaggtgaacgccgagcaccacatcaagggcaagggcagaggcgtgcaggagagcaagagaggcctggtgcaggacaagaccgagctggaggacgagaaccaggagggcatgaccgtgcacagcagcgtgcacagcaacaacctgaacagcatgcccgccgccgagaagggcaaggacaccctgaagagcgcctacgacgacaccgagaacgacctgaagggcgccgccatccacatcagcaagggcatgctgcacgaggagaagcccggcgagcagatcctggagggcggcagcgagagcgagagcgcccagaaggccgccggcaaccagatgaacgacagaaagatccagcaggagagcctgggcagcgcccccctgatgggcgacgaccaccccaacgccagcagagacagcgtggagggcgacgccctggtgaacggcgccaagctgcacaccctgagcgtggagcaccagagagaggagctgaaggaggagctggtgctgaagacccagaaccagcccagattcagcagccccgacgagatcgacctgcccagagagctggaggacgaggtgcccatcctgggcagaaacctgccctggcagcaggagagagacgtggccgccaccgccagcaagcagatgagcgagaagatcagactgagcgagggcgaggccaaggaggacagcctggacgaggagttcttccaccacaaggccatgcagggcaccgaggtgggccagaccgaccagaccgacagcaccggcggccccgccttcctgagcaaggtggaggaggacgactaccccagcgaggagctgctggaggacgagaacgccatcaacgccaagagaagcaaggagaagaaccccggcaaccagggcagacagttcgacgtgaacctgcaggtgcccgacagagccgtgctgggcaccatccaccccgaccccgagatcgaggagagcaagcaggagaccagcatgatcctggacagcgagaagaccagcgagaccgccgccaagggcgtgaacaccggcggcagagagcccaacaccatggtggagaaggagagacccctggccgacaagaaggcccagagacccttcgagagaagcgacttcagcgacagcatcaagatccagacccccgagctgggcgaggtgttccagaacaaggacagcgactacctgaagaacgacaaccccgaggagcacctgaagaccagcggcctggccggcgagcccgagggcgagctgagcaaggaggaccacgagaacaccgagaagtacatgggcaccgagagccagggcagcgccgccgccgagcccgaggacgacagcttccactggaccccccacaccagcgtggagcccggccacagcgacaagagagaggacctgctgatcatcagcagcttcttcaaggagcagcagagcctgcagagattccagaagtacttcaacgtgcacgagctggaggccctgctgcaggagatgagcagcaagctgaagagcgcccagcaggagagcctgccctacaacatggagaaggtgctggacaaggtgttcagagccagcgagagccagatcctgagcatcgccgagaagatgctggacaccagagtggccgagaacagagacctgggcatgaacgagaacaacatcttcgaggaggccgccgtgctggacgacatccaggacctgatctacttcgtgagatacaagcacagcaccgccgaggagaccgccaccctggtgatggccccccccctggaggagggcctgggcggcgccatggaggagatgcagcccctgcacgaggacaacttcagcagagagaagaccgccgagctgaacgtgcaggtgcccgaggagcccacccacctggaccagagagtgatcggcgacacccacgccagcgaggtgagccagaagcccaacaccgagaaggacctggaccccggccccgtgaccaccgaggacacccccatggacgccatcgacgccaacaagcagcccgagaccgccgccgaggagcccgccagcgtgacccccctggagaacgccatcctgctgatctacagcttcatgttctacctgaccaagagcctggtggccaccctgcccgacgacgtgcagcccggccccgacttctacggcctgccctggaagcccgtgttcatcaccgccttcctgggcatcgccagcttcgccatcttcctgtggagaaccgtgctggtggtgaaggacagagtgtaccaggtgaccgagcagcagatcagcgagaagctgaagaccatcatgaaggagaacaccgagctggtgcagaagctgagcaactacgagcagaagatcaaggagagcaagaagcacgtgcaggagaccagaaagcagaacatgatcctgagcgacgaggccatcaagtacaaggacaagatcaagaccctggagaagaaccaggagatcctggacgacaccgccaagaacctgagagtgatgctggagagcgagagagagcagaacgtgaagaaccaggacctgctgcagcaggagatcgaggactggagcaagctgcacgccgagctgagcgagcagatcaagagcttcgagaagagccagaaggacctggaggtggccctgacccacaaggacgacaacatcaacgccctgaccaactgcatcacccagctgaacctgctggagtgcgagagcgagagcgagggccagaacaagggcggcaacgacagcgacgagctggccaacggcgaggtgggcggcgacagaaacgagaagatgaagaaccagatcaagcagatgatggacgtgagcagaacccagaccgccatcagcgtggtggaggaggacctgaagctgctgcagctgaagctgagagccagcgtgagcaccaagtgcaacctggaggaccaggtgtag

SEQ ID NO: 88532 - DNA, 324 bp, synthetic construct
  misc_feature 1..324: note = Description of Artificial Sequence: Synthetic coding sequence
  source 1..324: mol_type = other DNA
tgaagcgccgaggccagcggcaagcccagccccagcgaccccggcagcggcaccgccaccatgatgaacagcagcagcagaggcagcagccccaccagagtgctggacgagggcaaggtgaacatggcccccaagggccccccccccttccccggcgtgcccctgatgagcacccccatgggcggccccgtgcccccccccatcagatacggcccccccccccagctgtgcggccccttcggccccagacccctgcccccccccttcgacaaggacggcagacccggcaccgtggcccacgcctgcaaccccagcaccctgtag

SEQ ID NO: 88533 - DNA, 1803 bp, synthetic construct
  misc_feature 1..1803: note = Description of Artificial Sequence: Synthetic coding sequence
  source 1..1803: mol_type = other DNA
atgggcaagaagctggacctgagcaagctgaccgacgaggaggcccagcacgtgctggaggtggtgcagagagacttcgacctgagaagaaaggaggaggagagactggaggccctgaagggcaagatcaagaaggagagcagcaagagagagctgctgagcgacaccgcccacctgaacgagacccactgcgccagatgcctgcagccctaccagctgctggtgaacagcaagagacagtgcctggagtgcggcctgttcacctgcaagagctgcggcagagtgcaccccgaggagcagggctggatctgcgacccctgccacctggccagagtggtgaagatcggcagcctggagtggtactacgagcacgtgaaggccagattcaagagattcggcagcgccaaggtgatcagaagcctgcacggcagactgcagggcggcgccggccccgagctgatcagcgaggagagaagcggcgacagcgaccagaccgacgaggacggcgagcccggcagcgaggcccaggcccaggcccagcccttcggcagcaagaagaagagactgctgagcgtgcacgacttcgacttcgagggcgacagcgacgacagcacccagccccagggccacagcctgcacctgagcagcgtgcccgaggccagagacagcccccagagcctgaccgacgagagctgcagcgagaaggccgccccccacaaggccgagggcctggaggaggccgacaccggcgccagcggctgccacagccaccccgaggagcagcccaccagcatcagccccagcagacacggcgccctggccgagctgtgcccccccggcggcagccacagaatggccctgggcaccgccgccgccctgggcagcaacgtgatcagaaacgagcagctgcccctgcagtacctggccgacgtggacaccagcgacgaggagagcatcagagcccacgtgatggccagccaccacagcaagagaagaggcagagccagcagcgagagccagatcttcgagctgaacaagcacatcagcgccgtggagtgcctgctgacctacctggagaacaccgtggtgccccccctggccaagggcctgggcgccggcgtgagaaccgaggccgacgtggaggaggaggccctgagaagaaagctggaggagctgaccagcaacgtgagcgaccaggagaccagcagcgaggaggaggaggccaaggacgagaaggccgagcccaacagagacaagagcgtgggccccctgccccaggccgaccccgaggtgggcaccgccgcccaccagaccaacagacaggagaagagcccccaggaccccggcgaccccgtgcagtacaacagaaccaccgacgaggagctgagcgagctggaggacagagtggccgtgaccgccagcgaggtgcagcaggccgagagcgaggtgagcgacatcgagagcagaatcgccgccctgagagccgccggcctgaccgtgaagcccagcggcaagcccagaagaaagagcaacctgcccatcttcctgcccagagtggccggcaagctgggcaagagacccgaggaccccaacgccgaccccagcagcgaggccaaggccatggccgtgccctacctgctgagaagaaagttcagcaacagcctgaagagccagggcaaggacgacgacagcttcgacagaaagagcgtgtacagaggcagcctgacccagagaaaccccaacgccagaaagggcatggccagccacaccttcgccaagcccgtggtggcccaccagagctag

SEQ ID NO: 88534 - DNA, 1719 bp, synthetic construct
  misc_feature 1..1719: note = Description of Artificial Sequence: Synthetic coding sequence
  source 1..1719: mol_type = other DNA
atgggcaagaagctggacctgagcaagctgaccgacgaggaggcccagcacgtgctggaggtggtgcagagagacttcgacctgagaagaaaggaggaggagagactggaggccctgaagggcaagatcaagaaggagagcagcaagagagagctgctgagcgacaccgcccacctgaacgagacccactgcgccagatgcctgcagccctaccagctgctggtgaacagcaagagacagtgcctggagtgcggcctgttcacctgcaagagctgcggcagagtgcaccccgaggagcagggctggatctgcgacccctgccacctggccagagtggtgaagatcggcagcctggagtggtactacgagcacgtgaaggccagattcaagagattcggcagcgccaaggtgatcagaagcctgcacggcagactgcagggcggcgccggccccgagctgatcagcgaggagagaagcggcgacagcgaccagaccgacgaggacggcgagcccggcagcgaggcccaggcccaggcccagcccttcggcagcaagaagaagagactgctgagcgtgcacgacttcgacttcgagggcgacagcgacgacagcacccagccccagggccacagcctgcacctgagcagcgtgcccgaggccagagacagcccccagagcctgaccgacgagagctgcagcgagaaggccgccccccacaaggccgagggcctggaggaggccgacaccggcgccagcggctgccacagccaccccgaggagcagcccaccagcatcagccccagcagacacggcgccctggccgagctgtgcccccccggcggcagccacagaatggccctgggcaccgccgccgccctgggcagcaacgtgatcagaaacgagcagctgcccctgcagtacctggccgacgtggacaccagcgacgaggagagcatcagagcccacgtgatggccagccaccacagcaagagaagaggcagagccagcagcgagagccagggcctgggcgccggcgtgagaaccgaggccgacgtggaggaggaggccctgagaagaaagctggaggagctgaccagcaacgtgagcgaccaggagaccagcagcgaggaggaggaggccaaggacgagaaggccgagcccaacagagacaagagcgtgggccccctgccccaggccgaccccgaggtgggcaccgccgcccaccagaccaacagacaggagaagagcccccaggaccccggcgaccccgtgcagtacaacagaaccaccgacgaggagctgagcgagctggaggacagagtggccgtgaccgccagcgaggtgcagcaggccgagagcgaggtgagcgacatcgagagcagaatcgccgccctgagagccgccggcctgaccgtgaagcccagcggcaagcccagaagaaagagcaacctgcccatcttcctgcccagagtggccggcaagctgggcaagagacccgaggaccccaacgccgaccccagcagcgaggccaaggccatggccgtgccctacctgctgagaagaaagttcagcaacagcctgaagagccagggcaaggacgacgacagcttcgacagaaagagcgtgtacagaggcagcctgacccagagaaaccccaacgccagaaagggcatggccagccacaccttcgccaagcccgtggtggcccaccagagctag

SEQ ID NO: 88535 - DNA, 396 bp, synthetic construct
  misc_feature 1..396: note = Description of Artificial Sequence: Synthetic coding sequence
  source 1..396: mol_type = other DNA
atgggcaagaagctggacctgagcaagctgaccgacgaggaggcccagcacgtgctggaggtggtgcagagagacttcgacctgagaagaaaggaggaggagagactggaggccctgaagggcaagatcaagaaggagagcagcaagagagagctgctgagcgacaccgcccacctgaacgagacccactgcgccagatgcctgcagccctaccagctgctggtgaacagcaagagacagtgcctggagtgcggcctgttcacctgcaagagctgcggcagagtgcaccccgaggagcagggctggatctgcgacccctgccacctggccagagtggtgaagatcggcagcctggagtggtactacgagcacgtgaaggccagattcaagagatag

SEQ ID NO: 88536 - DNA, 213 bp, synthetic construct
  misc_feature 1..213: note = Description of Artificial Sequence: Synthetic coding sequence
  source 1..213: mol_type = other DNA
atgggcaagaagctggacctgagcaagctgaccgacgaggaggcccagcacgtgctggaggtggtgcagagagacttcgacctgagaagaaaggaggaggagagactggaggccctgaagggcaagatcaagaaggagagcagcaagagagagctgctgagcgacaccgcccacctgaacgagacccactgcgccagatgcctgcagccctag

SEQ ID NO: 88537 - DNA, 1656 bp, synthetic construct
  misc_feature 1..1656: note = Description of Artificial Sequence: Synthetic coding sequence
  source 1..1656: mol_type = other DNA
atgggcaagaagctggacctgagcaagctgaccgacgaggaggcccagcacgtgctggaggtggtgcagagagacttcgacctgagaagaaaggaggaggagagactggaggccctgaagggcaagatcaagaaggagagcagcaagagagagctgctgagcgacaccgcccacctgaacgagacccactgcgccagatgcctgcagccctaccagctgctggtgaacagcaagagacagtgcctggagtgcggcctgttcacctgcaagagctgcggcagagtgcaccccgaggagcagggctggatctgcgacccctgccacctggccagagtggtgaagatcggcagcctggagtggtactacgagcacgtgaaggccagattcaagagattcggcagcgccaaggtgatcagaagcctgcacggcagactgcagggcggcgccggccccgagctgatcagcgaggagagaagcggcgacagcgaccagaccgacgaggacggcgagcccggcagcgaggcccaggcccaggcccagcccttcggcagcaagaagaagagactgctgagcgtgcacgacttcgacttcgagggcgacagcgacgacagcacccagccccagggccacagcctgcacctgagcagcgtgcccgaggccagagacagcccccagagcctgaccgacgagagctgcagcgagaaggccgccccccacaaggccgagggcctggaggaggccgacaccggcgccagcggctgccacagccaccccgaggagcagcccaccagcatcagccccagcagacacggcgccctggccgagctgtgcccccccggcggcagccacagaatggccctgggcaccgccgccgccctgggcagcaacgtgatcagaaacgagcagctgcccctgcagtacctggccgacgtggacaccagcgacgaggagagcatcagagcccacgtgatggccagccaccacagcaagagaagaggcagagccagcagcgagagccagatcttcgagctgaacaagcacatcagcgccgtggagtgcctgctgacctacctggagaacaccgtggtgccccccctggccaagggcctgggcgccggcgtgagaaccgaggccgacgtggaggaggaggccctgagaagaaagctggaggagctgaccagcaacgtgagcgaccaggagaccagcagcgaggaggaggaggccaaggacgagaaggccgagcccaacagagacaagagcgtgggccccctgccccaggccgaccccgaggtgggcaccgccgcccaccagaccaacagacaggagaagagcccccaggaccccggcgaccccgtgcagtacaacagaaccaccgacgaggagctgagcgagctggaggacagagtggccgtgaccgccagcgaggtgcagcaggccgagagcgaggtgagcgacatcgagagcagaatcgccgccctgagagccgccggcctgaccgtgaagcccagcggcaagcccagaagaaagagcaacctgcccgccctgtacgagggcaccctgagcctgtgcagcgaggacctgaagcacacccaccccgacagcgtgaagagcaagagaagcagactgaaccacgtggccagctgcggcaacccctag

SEQ ID NO: 88538 - DNA, 675 bp, synthetic construct
  misc_feature 1..675: note = Description of Artificial Sequence: Synthetic coding sequence
  source 1..675: mol_type = other DNA
atgggcctgagagactggctgagaaccgtgtgctgctgctgcggctgcgagtgcctggaggagagagccctgcccgagaaggagcccctggtgagcgacaacaacccctacagcagcttcggcgccaccctggtgagagacgacgagaagaacctgtggagcatgccccacgacgtgagccacaccgaggccgacgacgacagaaccctgtacaacctgatcgtgatcagaaaccagcaggccaaggacagcgaggagtggcagaagctgaactacgacatccacaccctgagacaggtgagaagagaggtgagaaacagatggaagtgcatcctggaggacctgggcttccagaaggaggccgacagcctgctgagcgtgaccaagctgagcaccatcagcgacagcaagaacaccagaaaggccagagagatgctgctgaagctggccgaggagaccaacatcttccccaccagctgggagctgagcgagagatacctgttcgtggtggacagactgatcgccctggacgccgccgaggagttcttcaagctggccagaagaacctaccccaagaagcccggcgtgccctgcctggccgacggccagaaggagctgcacctgtggggcgacctgagctgcagactggcccacatgcagggcgtgctgcactag

SEQ ID NO: 88539 - DNA, 645 bp, synthetic construct
  misc_feature 1..645: note = Description of Artificial Sequence: Synthetic coding sequence
  source 1..645: mol_type = other DNA
atgggcctgagagactggctgagaaccgtgtgctgctgctgcggctgcgagtgcctggaggagagagccctgcccgagaaggagcccctggtgagcgacaacaacccctacagcagcttcggcgccaccctggtgagagacgacgagaagaacctgtggagcatgccccacgacgtgagccacaccgaggccgacgacgacagaaccctgtacaacctgatcgtgatcagaaaccagcaggccaaggacagcgaggagtggcagaagctgaactacgacatccacaccctgagacaggtgagaagagaggtgagaaacagatggaagtgcatcctggaggacctgggcttccagaaggaggccgacagcctgctgagcgtgaccaagctgagcaccatcagcgacagcaagaacaccagaaaggccagagagatgctgctgaagctggccgaggagaccaacatcttccccaccagctgggagctgagcgagagatacctgttcgtggtggacagactgatcgccctggacgccgccgaggagttcttcaagctggccagaagaacctaccccaagaagcccggcgtgccctgcctggccgacggccagaaggagctgcactacctgcccttccccagcccctag

SEQ ID NO: 88540 - DNA, 645 bp, synthetic construct; identical to SEQ ID NO: 88539
  misc_feature 1..645: note = Description of Artificial Sequence: Synthetic coding sequence
  source 1..645: mol_type = other DNA

SEQ ID NO: 88541 - DNA, 1053 bp, synthetic construct
  misc_feature 1..1053: note = Description of Artificial Sequence: Synthetic coding sequence
  source 1..1053: mol_type = other DNA
atgcagggcaacggcagcgccctgcccaacgccagccagcccgtgctgagaggcgacggcgccagacccagctggctggccagcgccctggcctgcgtgctgatcttcaccatcgtggtggacatcctgggcaacctgctggtgatcctgagcgtgtacagaaacaagaagctgagaaacgccggcaacatcttcgtggtgagcctggccgtggccgacctggtggtggccatctacccctaccccctggtgctgatgagcatcttcaacaacggctggaacctgggctacctgcactgccaggtgagcggcttcctgatgggcctgagcgtgatcggcagcatcttcaacatcaccggcatcgccatcaacagatactgctacatctgccacagcctgaagtacgacaagctgtacagcagcaagaacagcctgtgctacgtgctgctgatctggctgctgaccctggccgccgtgctgcccaacctgagagccggcaccctgcagtacgaccccagaatctacagctgcaccttcgcccagagcgtgagcagcgcctacaccatcgccgtggtggtgttccacttcctggtgcccatgatcatcgtgatcttctgctacctgagaatctggatcctggtgctgcaggtgagacagagagtgaagcccgacagaaagcccaagctgaagccccaggacttcagaaacttcgtgaccatgttcgtggtgttcgtgctgttcgccatctgctgggcccccctgaacttcatcggcctggccgtggccagcgaccccgccagcatggtgcccagaatccccgagtggctgttcgtggccagctactacatggcctacttcaacagctgcctgaacgccatcatctacggcctgctgaaccagaacttcagaaaggagtacagaagaatcatcgtgagcctgtgcaccgccagagtgttcttcgtggacagcagcaacgacgtggccgacagagtgaagtggaagcccagccccctgatgaccaacaacaacgtggtgaaggtggacagcgtgtag

SEQ ID NO: 88542 - DNA, 1089 bp, synthetic construct
  misc_feature 1..1089: note = Description of Artificial Sequence: Synthetic coding sequence
  source 1..1089: mol_type = other DNA
atgagcgagaacggcagcttcgccaactgctgcgaggccggcggctgggccgtgagacccggctggagcggcgccggcagcgccagacccagcagaacccccagacccccctgggtggcccccgccctgagcgccgtgctgatcgtgaccaccgccgtggacgtggtgggcaacctgctggtgatcctgagcgtgctgagaaacagaaagctgagaaacgccggcaacctgttcctggtgagcctggccctggccgacctggtggtggccttctacccctaccccctgatcctggtggccatcttctacgacggctgggccctgggcgaggagcactgcaaggccagcgccttcgtgatgggcctgagcgtgatcggcagcgtgttcaacatcaccgccatcgccatcaacagatactgctacatctgccacagcatggcctaccacagaatctacagaagatggcacacccccctgcacatctgcctgatctggctgctgaccgtggtggccctgctgcccaacttcttcgtgggcagcctggagtacgaccccagaatctacagctgcaccttcatccagaccgccagcacccagtacaccgccgccgtggtggtgatccacttcctgctgcccatcgccgtggtgagcttctgctacctgagaatctgggtgctggtgctgcaggccagaagaaaggccaagcccgagagcagactgtgcctgaagcccagcgacctgagaagcttcctgaccatgttcgtggtgttcgtgatcttcgccatctgctgggcccccctgaactgcatcggcctggccgtggccatcaacccccaggagatggccccccagatccccgagggcctgttcgtgaccagctacctgctggcctacttcaacagctgcctgaacgccatcgtgtacggcctgctgaaccagaacttcagaagagagtacaagagaatcctgctggccctgtggaaccccagacactgcatccaggacgccagcaagggcagccacgccgagggcctgcagagccccgccccccccatcatcggcgtgcagcaccaggccgacgccctgtag

SEQ ID NO: 88543 - DNA, 3864 bp, synthetic construct
  misc_feature 1..3864: note = Description of Artificial Sequence: Synthetic coding sequence
  source 1..3864: mol_type = other DNA
atgagcaaggtgatccagaagaagaaccactggaccagcagagtgcacgagtgcaccgtgaagagaggcccccagggcgagctgggcgtgaccgtgctgggcggcgccgagcacggcgagttcccctacgtgggcgccgtggccgccgtggaggccgccggcctgcccggcggcggcgagggccccagactgggcgagggcgagctgctgctggaggtgcagggcgtgagagtgagcggcctgcccagatacgacgtgctgggcgtgatcgacagctgcaaggaggccgtgaccttcaaggccgtgagacagggcggcagactgaacaaggacctgagacacttcctgaaccagagattccagaagggcagccccgaccacgagctgcagcagaccatcagagacaacctgtacagacacgccgtgccctgcaccaccagaagccccagagagggcgaggtgcccggcgtggactacaacttcctgaccgtgaaggagttcctggacctggagcagagcggcaccctgctggaggtgggcacctacgagggcaactactacggcacccccaagccccccagccagcccgtgagcggcaaggtgatcaccaccgacgccctgcacagcctgcagagcggcagcaagcagagcacccccaagagaaccaagagctacaacgacatgcagaacgccggcatcgtgcacgccgagaacgaggaggaggacgacgtgcccgagatgaacagcagcttcaccgccgacagcggcgagcaggaggagcacaccctgcaggagaccgccctgccccccgtgaacagcagcatcatcgccgcccccatcaccgaccccagccagaagttcccccagtacctgcccctgagcgccgaggacaacctgggccccctgcccgagaactgggagatggcctacaccgagaacggcgaggtgtacttcatcgaccacaacaccaagaccaccagctggctggaccccagatgcctgaacaagcagcagaagcccctggaggagtgcgaggacgacgagggcgtgcacaccgaggagctggacagcgagctggagctgcccgccggctgggagaagatcgaggaccccgtgtacggcatctactacgtggaccacatcaacagaaagacccagtacgagaaccccgtgctggaggccaagagaaagaagcagctggagcagcagcagcagcagcagcagcagcagcagcagcagcagcagcagcagcagcagcagcagaccgaggagtggaccgaggaccacagcgccctggtgccccccgtgatccccaaccacccccccagcaaccccgagcccgccagagaggtgcccctgcagggcaagcccttcttcaccagaaaccccagcgagctgaagggcaagttcatccacaccaagctgagaaagagcagcagaggcttcggcttcaccgtggtgggcggcgacgagcccgacgagttcctgcagatcaagagcctggtgctggacggccccgccgccctggacggcaagatggagaccggcgacgtgatcgtgagcgtgaacgacacctgcgtgctgggccacacccacgcccaggtggtgaagatcttccagagcatccccatcggcgccagcgtggacctggagctgtgcagaggctaccccctgcccttcgaccccgacgaccccaacaccagcctggtgaccagcgtggccatcctggacaaggagcccatcatcgtgaacggccaggagacctacgacagccccgccagccacagcagcaagaccggcaaggtgaacggcatgaaggacgccagacccagcagccccgccgacgtggccagcaacagcagccacggctaccccaacgacaccgtgagcctggccagcagcatcgccacccagcccgagctgatcaccgtgcacatcgtgaagggccccatgggcttcggcttcaccatcgccgacagccccggcggcggcggccagagagtgaagcagatcgtggacagccccagatgcagaggcctgaaggagggcgacctgatcgtggaggtgaacaagaagaacgtgcaggccctgacccacaaccaggtggtggacatgctggtggagtgccccaagggcagcgaggtgaccctgctggtgcagagaggcggcctgcccgtgcccaagaagagccccaagagccagcccctggagagaaaggacagccagaacagcagccagcacagcgtgagcagccacagaagcctgcacaccgccagccccagccacagcacccaggtgctgcccgagttcccccccgccgaggcccaggcccccgaccagaccgacagcagcggccagaagaagcccgaccccttcaagatctgggcccagagcagaagcatgtacgagaacagacccatgagccccagccccgccagcggcctgagcaagggcgagagagagagagagatcaacagcaccaacttcggcgagtgccccatccccgactaccaggagcaggacatcttcctgtggagaaaggagaccggcttcggcttcagaatcctgggcggcaacgagcccggcgagcccatctacatcggccacatcgtgcccctgggcgccgccgacaccgacggcagactgagaagcggcgacgagctgatctgcgtggacggcacccccgtgatcggcaagagccaccagctggtggtgcagctgatgcagcaggccgccaagcagggccacgtgaacctgaccgtgagaagaaaggtggtgttcgccgtgcccaagaccgagaacgaggtgcccagccccgccagcagccaccacagcagcaaccagcccgccagcctgaccgaggagaagagaaccccccagggcagccagaacagcctgaacaccgtgagcagcggcagcggcagcaccagcggcatcggcagcggcggcggcggcggcagcggcgtggtgagcaccgtggtgcagccctacgacgtggagatcagaagaggcgagaacgagggcttcggcttcgtgatcgtgagcagcgtgagcagacccgaggccggcaccaccttcggcaacgcctgcgtggccatgccccacaagatcggcagaatcatcgagggcagccccgccgacagatgcggcaagctgaaggtgggcgacagaatcctggccgtgaacggctgcagcatcaccaacaagagccacagcgacatcgtgaacctgatcaaggaggccggcaacaccgtgaccctgagaatcatccccggcgacgagagcagcaacgccaccctgctgaccaacgccgagaagatcgccaccatcaccaccacccacacccccagccagcagggcacccaggagaccagaaacaccaccaagcccaagcaggagagccagttcgagttcaaggccccccaggccacccaggagcaggacttctacaccgtggagctggagagaggcgccaagggcttcggcttcagcctgagaggcggcagagagtacaacatggacctgtacgtgctgagactggccgaggacggccccgccgagagatgcggcaagatgagaatcggcgacgagatcctggagatcaacggcgagaccaccaagaacatgaagcacagcagagccatcgagctgatcaagaacggcggcagaagagtgagactgttcctgaagagaggcgacggcagcgtgcccgagtacgccatgatcccccccaacatcgccgcctgcatgagaaacgagaagctgggcgaggcctgcttctacctgatgggccacaaccagaccaccacccccgccgccaccgccaccgcccccccccccgtgcacaaggtgttcagaaagtag

SEQ ID NO: 88544 - DNA, 4389 bp, synthetic construct
  misc_feature 1..4389: note = Description of Artificial Sequence: Synthetic coding sequence
  source 1..4389: mol_type = other DNA
atgagcaaggtgatccagaagaagaaccactggaccagcagagtgcacgagtgcaccgtgaagagaggcccccagggcgagctgggcgtgaccgtgctgggcggcgccgagcacggcgagttcccctacgtgggcgccgtggccgccgtggaggccgccggcctgcccggcggcggcgagggccccagactgggcgagggcgagctgctgctggaggtgcagggcgtgagagtgagcggcctgcccagatacgacgtgctgggcgtgatcgacagctgcaaggaggccgtgaccttcaaggccgtgagacagggcggcagactgaacaaggacctgagacacttcctgaaccagagattccagaagggcagccccgaccacgagctgcagcagaccatcagagacaacctgtacagacacgccgtgccctgcaccaccagaagccccagagagggcgaggtgcccggcgtggactacaacttcctgaccgtgaaggagttcctggacctggagcagagcggcaccctgctggaggtgggcacctacgagggcaactactacggcacccccaagccccccagccagcccgtgagcggcaaggtgatcaccaccgacgccctgcacagcctgcagagcggcagcaagcagagcacccccaagagaaccaagagctacaacgacatgcagaacgccggcatcgtgcacgccgagaacgaggaggaggacgacgtgcccgagatgaacagcagcttcaccgccgacagcggcgagcaggaggagcacaccctgcaggagaccgccctgccccccgtgaacagcagcatcatcgccgcccccatcaccgaccccagccagaagttcccccagtacctgcccctgagcgccgaggacaacctgggccccctgcccgagaactgggagatggcctacaccgagaacggcgaggtgtacttcatcgaccacaacaccaagaccaccagctggctggaccccagatgcctgaacaagcagcagaagcccctggaggagtgcgaggacgacgagggcgtgcacaccgaggagctggacagcgagctggagctgcccgccggctgggagaagatcgaggaccccgtgtacggcatctactacgtggaccacatcaacagaaagacccagtacgagaaccccgtgctggaggccaagagaaagaagcagctggagcagcagcagcagcagcagcagcagcagcagcagcagcagcagcagcagcagcagcagcagaccgaggagtggaccgaggaccacagcgccctggtgccccccgtgatccccaaccacccccccagcaaccccgagcccgccagagaggtgcccctgcagggcaagcccttcttcaccagaaaccccagcgagctgaagggcaagttcatccacaccaagctgagaaagagcagcagaggcttcggcttcaccgtggtgggcggcgacgagcccgacgagttcctgcagatcaagagcctggtgctggacggccccgccgccctggacggcaagatggagaccggcgacgtgatcgtgagcgtgaacgacacctgcgtgctgggccacacccacgcccaggtggtgaagatcttccagagcatccccatcggcgccagcgtggacctggagctgtgcagaggctaccccctgcccttcgaccccgacgaccccaacaccagcctggtgaccagcgtggccatcctggacaaggagcccatcatcgtgaacggccaggagacctacgacagccccgccagccacagcagcaagaccggcaaggtgaacggcatgaaggacgccagacccagcagccccgccgacgtggccagcaacagcagccacggctaccccaacgacaccgtgagcctggccagcagcatcgccacccagcccgagctgatcaccgtgcacatcgtgaagggccccatgggcttcggcttcaccatcgccgacagccccggcggcggcggccagagagtgaagcagatcgtggacagccccagatgcagaggcctgaaggagggcgacctgatcgtggaggtgaacaagaagaacgtgcaggccctgacccacaaccaggtggtggacatgctggtggagtgccccaagggcagcgaggtgaccctgctggtgcagagaggcggcctgcccgtgcccaagaagagccccaagagccagcccctggagagaaaggacagccagaacagcagccagcacagcgtgagcagccacagaagcctgcacaccgccagccccagccacagcacccaggtgctgcccgagttcccccccgccgaggcccaggcccccgaccagaccgacagcagcggccagaagaagcccgaccccttcaagatctgggcccagagcagaagcatgtacgagaacagactgcccgactaccaggagcaggacatcttcctgtggagaaaggagaccggcttcggcttcagaatcctgggcggcaacgagcccggcgagcccatctacatcggccacatcgtgcccctgggcgccgccgacaccgacggcagactgagaagcggcgacgagctgatctgcgtggacggcacccccgtgatcggcaagagccaccagctggtggtgcagctgatgcagcaggccgccaagcagggccacgtgaacctgaccgtgagaagaaaggtggtgttcgccgtgcccaagaccgagaacgaggtgcccagccccgccagcagccaccacagcagcaaccagcccgccagcctgaccgaggagaagagaaccccccagggcagccagaacagcctgaacaccgtgagcagcggcagcggcagcaccagcggcatcggcagcggcggcggcggcggcagcggcgtggtgagcaccgtggtgcagccctacgacgtggagatcagaagaggcgagaacgagggcttcggcttcgtgatcgtgagcagcgtgagcagacccgaggccggcaccaccttcggcaacgcctgcgtggccatgccccacaagatcggcagaatcatcgagggcagccccgccgacagatgcggcaagctgaaggtgggcgacagaatcctggccgtgaacggctgcagcatcaccaacaagagccacagcgacatcgtgaacctgatcaaggaggccggcaacaccgtgaccctgagaatcatccccggcgacgagagcagcaacgccaccctgctgaccaacgccgagaagatcgccaccatcaccaccacccacacccccagccagcagggcacccaggagaccagaaacaccaccaagcccaagcaggagagccagttcgagttcaaggccccccaggccacccaggagcaggacttctacaccgtggagctggagagaggcgccaagggcttcggcttcagcctgagaggcggcagagagtacaacatggacctgtacgtgctgagactggccgaggacggccccgccgagagatgcggcaagatgagaatcggcgacgagatcctggagatcaacggcgagaccaccaagaacatgaagcacagcagagccatcgagctgatcaagaacggcggcagaagagtgagactgttcctgaagagaggcgacggcagcgtgcccgagtacgaccccagcagcgacagacacggccccgccaccggcccccagggcgtgcccgaggtgagagccggccccgacagaagacagcaccccagcctggagagcagctacccccccgacctgcacaagagcagcccccacggcgagaagagagcccacgccagagaccccaagggcagcagagagtacagcagacagcccaacgagcaccacacctggaacggcaccagcagaaagcccgacagcggcgcctgcagacccaaggacagagcccccgagggcagaagagacgcccaggccgagagagccgccgccgccaacggccccaagagaagaagccccgagaagagaagagagggcaccagaagcgccgacaacaccctggagagaagagagaagcacgagaagagaagagacgtgagccccgagagaagaagagagagaagccccaccagaagaagagacggcagccccagcagaagaagaagaagcctggagagactgctggagcagagaagaagccccgagagaagaagaggcggcagccccgagagaagagccaagagcaccgacagaagaagagccagaagccccgagagaagaagagagagaagcctggacaagagaaacagagaggacagagccagccacagagagagagaggaggccaacctgaagcaggacgccggcagaagcagcagacacccccccgagcagagaagaagaccctacaaggagtgcagcaccgacctgagcatctag

SEQ ID NO: 88545 - DNA, 3552 bp, synthetic construct
  misc_feature 1..3552: note = Description of Artificial Sequence: Synthetic coding sequence
  source 1..3552: mol_type = other DNA
ggcggcagactgaacaaggacctgagacacttcctgaaccagagattccagaagggcagccccgaccacgagctgcagcagaccatcagagacaacctgtacagacacgccgtgccctgcaccaccagaagccccagagagggcgaggtgcccggcgtggactacaacttcctgaccgtgaaggagttcctggacctggagcagagcggcaccctgctggaggtgggcacctacgagggcaactactacggcacccccaagccccccagccagcccgtgagcggcaaggtgatcaccaccgacgccctgcacagcctgcagagcggcagcaagcagagcacccccaagagaaccaagagctacaacgacatgcagaacgccggcatcgtgcacgccgagaacgaggaggaggacgacgtgcccgagatgaacagcagcttcaccgccgacagcggcgagcaggaggagcacaccctgcaggagaccgccctgccccccgtgaacagcagcatcatcgccgcccccatcaccgaccccagccagaagttcccccagtacctgcccctgagcgccgaggacaacctgggccccctgcccgagaactgggagatggcctacaccgagaacggcgaggtgtacttcatcgaccacaacaccaagaccaccagctggctggaccccagatgcctgaacaagcagcagaagcccctggaggagtgcgaggacgacgagggcgtgcacaccgaggagctggacagcgagctggagctgcccgccggctgggagaagatcgaggaccccgtgtacggcatctactacgtggaccacatcaacagaaagacccagtacgagaaccccgtgctggaggccaagagaaagaagcagctggagcagcagcagcagcagcagcagcagcagcagcagcagcagcagcagcagcagcagcagcagaccgaggagtggaccgaggaccacagcgccctggtgccccccgtgatccccaaccacccccccagcaaccccgagcccgccagagaggtgcccctgcagggcaagcccttcttcaccagaaaccccagcgagctgaagggcaagttcatccacaccaagctgagaaagagcagcagaggcttcggcttcaccgtggtgggcggcgacgagcccgacgagttcctgcagatcaagagcctggtgctggacggccccgccgccctggacggcaagatggagaccggcgacgtgatcgtgagcgtgaacgacacctgcgtgctgggccacacccacgcccaggtggtgaagatcttccagagcatccccatcggcgccagcgtggacctggagctgtgcagaggctaccccctgcccttcgaccccgacgaccccaacaccagcctggtgaccagcgtggccatcctggacaaggagcccatcatcgtgaacggccaggagacctacgacagccccgccagccacagcagcaagaccggcaaggtgaacggcatgaaggacgccagacccagcagccccgccgacgtggccagcaacagcagccacggctaccccaacgacaccgtgagcctggccagcagcatcgccacccagcccgagctgatcaccgtgcacatcgtgaagggccccatgggcttcggcttcaccatcgccgacagccccggcggcggcggccagagagtgaagcagatcgtggacagccccagatgcagaggcctgaaggagggcgacctgatcgtggaggtgaacaagaagaacgtgcaggccctgacccacaaccaggtggtggacatgctggtggagtgccccaagggcagcgaggtgaccctgctggtgcagagaggcggcctgcccgtgcccaagaagagccccaagagccagcccctggagagaaaggacagccagaacagcagccagcacagcgtgagcagccacagaagcctgcacaccgccagccccagccacagcacccaggtgctgcccgagttcccccccgccgaggcccaggcccccgaccagaccgacagcagcggccagaagaagcccgaccccttcaagatctgggcccagagcagaagcatgtacgagaacagacccatgagccccagccccgccagcggcctgagcaagggcgagagagagagagagatcaacagcaccaacttcggcgagtgccccatccccgactaccaggagcaggacatcttcctgtggagaaaggagaccggcttcggcttcagaatcctgggcggcaacgagcccggcgagcccatctacatcggccacatcgtgcccctgggcgccgccgacaccgacggcagactgagaagcggcgacgagctgatctgcgtggacggcacccccgtgatcggcaagagccaccagctggtggtgcagctgatgcagcaggccgccaagcagggccacgtgaacctgaccgtgagaagaaaggtggtgttcgccgtgcccaagaccgagaacgaggtgcccagccccgccagcagccaccacagcagcaaccagcccgccagcctgaccgaggagaagagaaccccccagggcagccagaacagcctgaacaccgtgagcagcggcagcggcagcaccagcggcatcggcagcggcggcggcggcggcagcggcgtggtgagcaccgtggtgcagccctacgacgtggagatcagaagaggcgagaacgagggcttcggcttcgtgatcgtgagcagcgtgagcagacccgaggccggcaccaccttcggcaacgcctgcgtggccatgccccacaagatcggcagaatcatcgagggcagccccgccgacagatgcggcaagctgaaggtgggcgacagaatcctggccgtgaacggctgcagcatcaccaacaagagccacagcgacatcgtgaacctgatcaaggaggccggcaacaccgtgaccctgagaatcatccccggcgacgagagcagcaacgccaccctgctgaccaacgccgagaagatcgccaccatcaccaccacccacacccccagccagcagggcacccaggagaccagaaacaccaccaagcccaagcaggagagccagttcgagttcaaggccccccaggccacccaggagcaggacttctacaccgtggagctggagagaggcgccaagggcttcggcttcagcctgagaggcggcagagagtacaacatggacctgtacgtgctgagactggccgaggacggccccgccgagagatgcggcaagatgagaatcggcgacgagatcctggagatcaacggcgagaccaccaagaacatgaagcacagcagagccatcgagctgatcaagaacggcggcagaagagtgagactgttcctgaagagaggcgacggcagcgtgcccgagtacgccatgatcccccccaacatcgccgcctgcatgagaaacgagaagctgggcgaggcctgcttctacctgatgggccacaaccagaccaccacccccgccgccaccgccaccgcccccccccccgtgcacaaggtgttcagaaagtag

SEQ ID NO: 88546 - DNA, 3771 bp, synthetic construct
  misc_feature 1..3771: note = Description of Artificial Sequence: Synthetic coding sequence
  source 1..3771: mol_type = other DNA
atgagcaaggtgatccagaagaagaaccactggaccagcagagtgcacgagtgcaccgtgaagagaggcccccagggcgagctgggcgtgaccgtgctgggcggcgccgagcacggcgagttcccctacgtgggcgccgtggccgccgtggaggccgccggcctgcccggcggcggcgagggccccagactgggcgagggcgagctgctgctggaggtgcagggcgtgagagtgagcggcctgcccagatacgacgtgctgggcgtgatcgacagctgcaaggaggccgtgaccttcaaggccgtgagacagggcggcagactgaacaaggacctgagacacttcctgaaccagagattccagaagggcagccccgaccacgagctgcagcagaccatcagagacaacctgtacagacacgccgtgccctgcaccaccagaagccccagagagggcgaggtgcccggcgtggactacaacttcctgaccgtgaaggagttcctggacctggagcagagcggcaccctgctggaggtgggcacctacgagggcaactactacggcacccccaagccccccagccagcccgtgagcggcaaggtgatcaccaccgacgccctgcacagcctgcagagcggcagcaagcagagcacccccaagagaaccaagagctacaacgacatgcagaacgccggcatcgtgcacgccgagaacgaggaggaggacgacgtgcccgagatgaacagcagcttcaccgccgacagcggcgagcaggaggagcacaccctgcaggagaccgccctgccccccgtgaacagcagcatcatcgccgcccccatcaccgaccccagccagaagttcccccagtacctgcccctgagcgccgaggacaacctgggccccctgcccgagaactgggagatggcctacaccgagaacggcgaggtgtacttcatcgaccacaacaccaagaccaccagctggctggaccccagatgcctgaacaagcagcagaagcccctggaggagtgcgaggacgacgagggcgtgcacaccgaggagctggacagcgagctggagctgcccgccggctgggagaagatcgaggaccccgtgtacggcatctactacgtggaccacatcaacagaaagacccagtacgagaaccccgtgctggaggccaagagaaagaagcagctggagcagcagcagcagcagcagcagcagcagcagcagcagcagcagcagcagcagcagcagcagaccgaggagtggaccgaggaccacagcgccctggtgccccccgtgatccccaaccacccccccagcaaccccgagcccgccagagaggtgcccctgcagggcaagcccttcttcaccagaaaccccagcgagctgaagggcaagttcatccacaccaagctgagaaagagcagcagaggcttcggcttcaccgtggtgggcggcgacgagcccgacgagttcctgcagatcaagagcctggtgctggacggccccgccgccctggacggcaagatggagaccggcgacgtgatcgtgagcgtgaacgacacctgcgtgctgggccacacccacgcccaggtggtgaagatcttccagagcatccccatcggcgccagcgtggacctggagctgtgcagaggctaccccctgcccttcgaccccgacgaccccaacaccagcctggtgaccagcgtggccatcctggacaaggagcccatcatcgtgaacggccaggagacctacgacagccccgccagccacagcagcaagaccggcaaggtgaacggcatgaaggacgccagacccagcagccccgccgacgtggccagcaacagcagccacggctaccccaacgacaccgtgagcctggccagcagcatcgccacccagcccgagctgatcaccgtgcacatcgtgaagggccccatgggcttcggcttcaccatcgccgacagccccggcggcggcggccagagagtgaagcagatcgtggacagccccagatgcagaggcctgaaggagggcgacctgatcgtggaggtgaacaagaagaacgtgcaggccctgacccacaaccaggtggtggacatgctggtggagtgccccaagggcagcgaggtgaccctgctggtgcagagaggcggcctgcccgtgcccaagaagagccccaagagccagcccctggagagaaaggacagccagaacagcagccagcacagcgtgagcagccacagaagcctgcacaccgccagccccagccacagcacccaggtgctgcccgagttcccccccgccgaggcccaggcccccgaccagaccgacagcagcggccagaagaagcccgaccccttcaagatctgggcccagagcagaagcatgtacgagaacagacccatgagccccagccccgccagcggcctgagcaagggcgagagagagagagagatcaacagcaccaacttcggcgagtgccccatccccgactaccaggagcaggacatcttcctgtggagaaaggagaccggcttcggcttcagaatcctgggcggcaacgagcccggcgagcccatctacatcggccacatcgtgcccctgggcgccgccgacaccgacggcagactgagaagcggcgacgagctgatctgcgtggacggcacccccgtgatcggcaagagccaccagctggtggtgcagctgatgcagcaggccgccaagcagggccacgtgaacctgaccgtgagaagaaaggtggtgttcgccgtgcccaagaccgagaacgaggtgcccagccccgccagcagccaccacagcagcaaccagcccgccagcctgaccgaggagaagagaaccccccagggcagccagaacagcctgaacaccgtgagcagcggcagcggcagcaccagcggcatcggcagcggcggcggcggcggcagcggcgtggtgagcaccgtggtgcagccctacgacgtggagatcagaagaggcgagaacgagggcttcggcttcgtgatcgtgagcagcgtgagcagacccgaggccggcaccaccttcgccggcaacgcctgcgtggccatgccccacaagatcggcagaatcatcgagggcagccccgccgacagatgcggcaagctgaaggtgggcgacagaatcctggccgtgaacggctgcagcatcaccaacaagagccacagcgacatcgtgaacctgatcaaggaggccggcaacaccgtgaccctgagaatcatccccggcgacgagagcagcaacgccaccctgctgaccaacgccgagaagatcgccaccatcaccaccacccacacccccagccagcagggcacccaggagaccagaaacaccaccaagcccaagcaggagagccagttcgagttcaaggccccccaggccacccaggagcaggacttctacaccgtggagctggagagaggcgccaagggcttcggcttcagcctgagaggcggcagagagtacaacatggacctgtacgtgctgagactggccgaggacggccccgccgagagatgcggcaagatgagaatcggcgacgagatcctggagatcaacggcgagaccaccaagaacatgaagcacagcagagccatcgagctgatcaagaacggcggcagaagagtgagactgttcctgaagagaggcgacggcagcgtgcccgagtacggcggcagcaactacgagaacatccccagcttccccggcatgaccccctag

SEQ ID NO: 88547 - DNA, 1488 bp, synthetic construct
  misc_feature 1..1488: note = Description of Artificial Sequence: Synthetic coding sequence
  source 1..1488: mol_type = other DNA
atggccgccgagccccagcccagcagcctgagctacagaaccaccggcagcacctacctgcaccccctgagcgagctgctgggcatccccctggaccaggtgaacttcgtggtgtgccagctggtggccctgttcgccgccttctggttcagaatctacctgagacccggcaccaccagcagcgacgtgagacacgccgtggccaccatcttcggcatctacttcgtgatcttctgcttcggctggtacagcgtgcacctgttcgtgctggtgctgatgtgctacgccatcatggtgaccgccagcgtgagcaacatccacagatacagcttcttcgtggccatgggctacctgaccatctgccacatcagcagaatctacatcttccactacggcatcctgaccaccgacttcagcggccccctgatgatcgtgacccagaagatcaccaccctggccttccaggtgcacgacggcctgggcagaagagccgaggacctgagcgccgagcagcacagactggccatcaaggtgaagcccagcttcctggagtacctgagctacctgctgaacttcatgagcgtgatcgccggcccctgcaacaacttcaaggactacatcgccttcatcgagggcaagcacatccacatgaagctgctggaggtgaactggaagagaaagggcttccacagcctgcccgagcccagccccaccggcgccgtgatccacaagctgggcatcaccctggtgagcctgctgctgttcctgaccctgaccaagaccttccccgtgacctgcctggtggacgactggttcgtgcacaaggccagcttccccgccagactgtgctacctgtacgtggtgatgcaggccagcaagcccaagtactacttcgcctggaccctggccgacgccgtgaacaacgccgccggcttcggcttcagcggcgtggacaagaacggcaacttctgctgggacctgctgagcaacctgaacatctggaagatcgagaccgccaccagcttcaagatgtacctggagaactggaacatccagaccgccacctggctgaagtgcgtgtgctaccagagagtgccctggtaccccaccgtgctgaccttcatcctgagcgccctgtggcacggcgtgtaccccggctactacttcaccttcctgaccggcatcctggtgaccctggccgccagagccgtgagaaacaactacagacactacttcctgagcagcagagccctgaaggccgtgtacgacgccggcacctgggccgtgacccagctggccgtgagctacaccgtggcccccttcgtgatgctggccgtggagcccaccatcagcctgtacaagagcatgtacttctacctgcacatcatcagcctgctgatcatcctgttcctgcccatgaagccccaggcccacacccagagaagaccccagaccctgaacagcatcaacaagagaaagaccgactag

SEQ ID NO: 88548 - DNA, 726 bp, synthetic construct
  misc_feature 1..726: note = Description of Artificial Sequence: Synthetic coding sequence
  source 1..726: mol_type = other DNA
atggccgccgagccccagcccagcagcctgagctacagaaccaccggcagcacctacctgcaccccctgagcgagctgctgggcatccccctggaccaggtgaacttcgtggtgtgccagctggtggccctgttcgccgccttctggttcagaatctacctgagacccggcaccaccagcagcgacgtgagacacgccgtggccaccatcttcggcatctacttcgtgatcttctgcttcggctggtacagcgtgcacctgttcgtgctggtgctgatgtgctacgccatcatggtgaccgccagcgtgagcaacatccacagatacagcttcttcgtggccatgggctacctgaccatctgccacatcagcagaatctacatcttccactacggcatcctgaccaccgacttcagcggccccctgatgatcgtgacccagaagatcaccaccctggccttccaggtgcacgacggcctgggcagaagagccgaggacctgagcgccgagcagcacagactggccatcaaggtgaagcccagcttcctggagtacctgagctacctgctgaacttcatgagcgtgatcgccggcccctgcaacaacttcaaggactacatcgccttcatcgagggcaagcacatccacatgaagctgctggaggtgaactggaagagaaagggcttccacagcctgcccgagcccagccccaccggccacctgtag

SEQ ID NO: 88549 - DNA, 1041 bp, synthetic construct
  misc_feature 1..1041: note = Description of Artificial Sequence: Synthetic coding sequence
  source 1..1041: mol_type = other DNA
atggagttcagcctgagaatcttcctgggcctgggcagaagagccgaggacctgagcgccgagcagcacagactggccatcaaggtgaagcccagcttcctggagtacctgagctacctgctgaacttcatgagcgtgatcgccggcccctgcaacaacttcaaggactacatcgccttcatcgagggcaagcacatccacatgaagctgctggaggtgaactggaagagaaagggcttccacagcctgcccgagcccagccccaccggcgccgtgatccacaagctgggcatcaccctggtgagcctgctgctgttcctgaccctgaccaagaccttccccgtgacctgcctggtggacgactggttcgtgcacaaggccagcttccccgccagactgtgctacctgtacgtggtgatgcaggccagcaagcccaagtactacttcgcctggaccctggccgacgccgtgaacaacgccgccggcttcggcttcagcggcgtggacaagaacggcaacttctgctgggacctgctgagcaacctgaacatctggaagatcgagaccgccaccagcttcaagatgtacctggagaactggaacatccagaccgccacctggctgaagtgcgtgtgctaccagagagtgccctggtaccccaccgtgctgaccttcatcctgagcgccctgtggcacggcgtgtaccccggctactacttcaccttcctgaccggcatcctggtgaccctggccgccagagccgtgagaaacaactacagacactacttcctgagcagcagagccctgaaggccgtgtacgacgccggcacctgggccgtgacccagctggccgtgagctacaccgtggcccccttcgtgatgctggccgtggagcccaccatcagcctgtacaagagcatgtacttctacctgcacatcatcagcctgctgatcatcctgttcctgcccatgaagccccaggcccacacccagagaagaccccagaccctgaacagcatcaacaagagaaagaccgactag

SEQ ID NO: 88550 - DNA, 1563 bp, synthetic construct
  misc_feature 1..1563: note = Description of Artificial Sequence: Synthetic coding sequence
  source 1..1563: mol_type = other DNA
atggccaccaccagcaccaccggcagcaccctgctgcagcccctgagcaacgccgtgcagctgcccatcgaccaggtgaacttcgtggtgtgccagctgttcgccctgctggccgccatctggttcagaacctacctgcacagcagcaagaccagcagcttcatcagacacgtggtggccaccctgctgggcctgtacctggccctgttctgcttcggctggtacgccctgcacttcctggtgcagagcggcatcagctactgcatcatgatcatcatcggcgtggagaacatgcacaactactgcttcgtgttcgccctgggctacctgaccgtgtgccaggtgaccagagtgtacatcttcgactacggccagtacagcgccgacttcagcggccccatgatgatcatcacccagaagatcaccagcctggcctgcgagatccacgacggcatgttcagaaaggacgaggagctgaccagcagccagagagacctggccgtgagaagaatgcccagcctgctggagtacctgagctacaactgcaacttcatgggcatcctggccggccccctgtgcagctacaaggactacatcaccttcatcgagggcagaagctaccacatcacccagagcggcgagaacggcaaggaggagacccagtacgagagaaccgagcccagccccaacaccgccgtggtgcagaagctgctggtgtgcggcctgagcctgctgttccacctgaccatctgcaccaccctgcccgtggagtacaacatcgacgagcacttccaggccaccgccagctggcccaccaagatcatctacctgtacatcagcctgctggccgccagacccaagtactacttcgcctggaccctggccgacgccatcaacaacgccgccggcttcggcttcagaggctacgacgagaacggcgccgccagatgggacctgatcagcaacctgagaatccagcagatcgagatgagcaccagcttcaagatgttcctggacaactggaacatccagaccgccctgtggctgaagagagtgtgctacgagagaaccagcttcagccccaccatccagaccttcatcctgagcgccatctggcacggcgtgtaccccggctactacctgaccttcctgaccggcgtgctgatgaccctggccgccagagccatgagaaacaacttcagacactacttcatcgagcccagccagctgaagctgttctacgacgtgatcacctggatcgtgacccaggtggccatcagctacaccgtggtgcccttcgtgctgctgagcatcaagcccagcctgaccttctacagcagctggtactactgcctgcacatcctgggcatcctggtgctgctgctgctgcccgtgaagaagacccagagaagaaagaacacccacgagaacatccagctgagccagagcaagaagttcgacgagggcgagaacagcctgggccagaacagcttcagcaccaccaacaacgtgtgcaaccagaaccaggagatcgccagcagacacagcagcctgaagcagtag

SEQ ID NO: 88551 - DNA, 1308 bp, synthetic construct
  misc_feature 1..1308: note = Description of Artificial Sequence: Synthetic coding sequence
  source 1..1308: mol_type = other DNA
atggagtggctgtggctgttcttcctgcaccccatcagcttctaccagggcgccgccttccccttcgccctgctgttcaactacctgtgcatcatggacagcttcagcaccagagccagatacctgttcctgctgaccggcggcggcgccctggccgtggccgccatgggcagctacgccgtgctggtgttcacccccgccgtgtgcgccgtggccctgctgtgcagcctggccccccagcaggtgcacagatggaccttctgcttccagatgagctggcagaccctgtgccacctgggcctgcactacaccgagtactacctgcacgagccccccagcgtgagattctgcatcaccctgagcagcctgatgctgctgacccagagagtgaccagcctgagcctggacatctgcgagggcaaggtgaaggccgccagcggcggcttcagaagcagaagcagcctgagcgagcacgtgtgcaaggccctgccctacttcagctacctgctgttcttccccgccctgctgggcggcagcctgtgcagcttccagagattccaggccagagtgcagggcagcagcgccctgcaccccagacacagcttctgggccctgagctggagaggcctgcagatcctgggcctggagtgcctgaacgtggccgtgagcagagtggtggacgccggcgccggcctgaccgactgccagcagttcgagtgcatctacgtggtgtggaccaccgccggcctgttcaagctgacctactacagccactggatcctggacgacagcctgctgcacgccgccggcttcggccccgagctgggccagagccccggcgaggagggctacgtgcccgacgccgacatctggaccctggagagaacccacagaatcagcgtgttcagcagaaagtggaaccagagcaccgccagatggctgagaagactggtgttccagcacagcagagcctggcccctgctgcagaccttcgccttcagcgcctggtggcacggcctgcaccccggccaggtgttcggcttcgtgtgctgggccgtgatggtggaggccgactacctgatccacagcttcgccaacgagttcatcagaagctggcccatgagactgttctacagaaccctgacctgggcccacacccagctgatcatcgcctacatcatgctggccgtggaggtgagaagcctgagcagcctgtggctgctgtgcaacagctacaacagcgtgttccccatggtgtactgcatcctgctgctgctgctggccaagagaaagcacaagtgcaactag

SEQ ID NO: 88552 - DNA, 1341 bp, synthetic construct
  misc_feature 1..1341: note = Description of Artificial Sequence: Synthetic coding sequence
  source 1..1341: mol_type = other DNA
atgaccctgaaggccagcgagggcgagagcggcggcagcatgcacaccgccctgagcgacctgtacctggagcacctgctgcagaagagaagcagacccgaggccgtgagccaccccctgaacaccgtgaccgaggacatgtacaccaacggcagccccgcccccggcagccccgcccaggtgaagggccaggaggtgagaaaggtgagactgatccagttcgagaaggtgaccgaggagcccatgggcatcaccctgaagctgaacgagaagcagagctgcaccgtggccagaatcctgcacggcggcatgatccacagacagggcagcctgcacgtgggcgacgagatcctggagatcaacggcaccaacgtgaccaaccacagcgtggaccagctgcagaaggccatgaaggagaccaagggcatgatcagcctgaaggtgatccccaaccagcagagcagactgcccgccctgcaggaggccggcctgaagttcgccaccggcgacatcatccagatcatcaacaaggacgacagcaactggtggcagggcagagtggagggcagcagcaaggagagcgccggcctgatccccagccccgagctgcaggagtggagagtggccagcatggcccagagcgcccccagcgaggcccccagctgcagccccttcggcaagaagaagaagtacaaggacaagtacctggccaagcacagcagcatcttcgaccagctggacgtggtgagctacgaggaggtggtgagactgcccgccttcaagagaaagaccctggtgctgatcggcgccagcggcgtgggcagaagccacatcaagaacgccctgctgagccagaaccccgagaagttcgtgtaccccgtgccctacaccaccagaccccccagaaagagcgaggaggacggcaaggagtaccacttcatcagcaccgaggagatgaccagaaacatcagcgccaacgagttcctggagttcggcagctaccagggcaacatgttcggcaccaagttcgagaccgtgcaccagatccacaagcagaacaagatcgccatcctggacatcgagccccagaccctgaagatcgtgagaaccgccgagctgagccccttcatcgtgttcatcgcccccaccgaccagggcacccagaccgaggccctgcagcagctgcagaaggacagcgaggccatcagaagccagtacgcccactacttcgacctgagcctggtgaacaacggcgtggacgagaccctgaagaagctgcaggaggccttcgaccaggcctgcagcagcccccagtgggtgcccgtgagctgggtgtactag

SEQ ID NO: 88553 - DNA, 1401 bp, synthetic construct
  misc_feature 1..1401: note = Description of Artificial Sequence: Synthetic coding sequence
  source 1..1401: mol_type = other DNA
atgaccctgaaggccagcgagggcgagagcggcggcagcatgcacaccgccctgagcgacctgtacctggagcacctgctgcagaagagaagcagacccgaggccgtgagccaccccctgaacaccgtgaccgaggacatgtacaccaacggcagccccgcccccggcagccccgcccaggtgaagggccaggaggtgagaaaggtgagactgatccagttcgagaaggtgaccgaggagcccatgggcatcaccctgaagctgaacgagaagcagagctgcaccgtggccagaatcctgcacggcggcatgatccacagacagggcagcctgcacgtgggcgacgagatcctggagatcaacggcaccaacgtgaccaaccacagcgtggaccagctgcagaaggccatgaaggagaccaagggcatgatcagcctgaaggtgatccccaaccagcagagcagactgcccgccctgcagatgttcatgagagcccagttcgactacgaccccaagaaggacaacctgatcccctgcaaggaggccggcctgaagttcgccaccggcgacatcatccagatcatcaacaaggacgacagcaactggtggcagggcagagtggagggcagcagcaaggagagcgccggcctgatccccagccccgagctgcaggagtggagagtggccagcatggcccagagcgcccccagcgaggcccccagctgcagccccttcggcaagaagaagaagtacaaggacaagtacctggccaagcacagcagcatcttcgaccagctggacgtggtgagctacgaggaggtggtgagactgcccgccttcaagagaaagaccctggtgctgatcggcgccagcggcgtgggcagaagccacatcaagaacgccctgctgagccagaaccccgagaagttcgtgtaccccgtgccctacaccaccagaccccccagaaagagcgaggaggacggcaaggagtaccacttcatcagcaccgaggagatgaccagaaacatcagcgccaacgagttcctggagttcggcagctaccagggcaacatgttcggcaccaagttcgagaccgtgcaccagatccacaagcagaacaagatcgccatcctggacatcgagccccagaccctgaagatcgtgagaaccgccgagctgagccccttcatcgtgttcatcgcccccaccgaccagggcacccagaccgaggccctgcagcagctgcagaaggacagcgaggccatcagaagccagtacgcccactacttcgacctgagcctggtgaacaacggcgtggacgagaccctgaagaagctgcaggaggccttcgaccaggcctgcagcagcccccagtgggtgcccgtgagctgggtgtactag

SEQ ID NO: 88554 - DNA, 1311 bp, synthetic construct
  misc_feature 1..1311: note = Description of Artificial Sequence: Synthetic coding sequence
  source 1..1311: mol_type = other DNA
atggagagctgggccgtgagccaccccctgaacaccgtgaccgaggacatgtacaccaacggcagccccgcccccggcagccccgcccaggtgaagggccaggaggtgagaaaggtgagactgatccagttcgagaaggtgaccgaggagcccatgggcatcaccctgaagctgaacgagaagcagagctgcaccgtggccagaatcctgcacggcggcatgatccacagacagggcagcctgcacgtgggcgacgagatcctggagatcaacggcaccaacgtgaccaaccacagcgtggaccagctgcagaaggccatgaaggagaccaagggcatgatcagcctgaaggtgatccccaaccagcagagcagactgcccgccctgcagatgttcatgagagcccagttcgactacgaccccaagaaggacaacctgatcccctgcaaggaggccggcctgaagttcgccaccggcgacatcatccagatcatcaacaaggacgacagcaactggtggcagggcagagtggagggcagcagcaaggagagcgccggcctgatccccagccccgagctgcaggagtggagagtggccagcatggcccagagcgcccccagcgaggcccccagctgcagccccttcggcaagaagaagaagtacaaggacaagtacctggccaagcacagcagcatcttcgaccagctggacgtggtgagctacgaggaggtggtgagactgcccgccttcaagagaaagaccctggtgctgatcggcgccagcggcgtgggcagaagccacatcaagaacgccctgctgagccagaaccccgagaagttcgtgtaccccgtgccctacaccaccagaccccccagaaagagcgaggaggacggcaaggagtaccacttcatcagcaccgaggagatgaccagaaacatcagcgccaacgagttcctggagttcggcagctaccagggcaacatgttcggcaccaagttcgagaccgtgcaccagatccacaagcagaacaagatcgccatcctggacatcgagccccagaccctgaagatcgtgagaaccgccgagctgagccccttcatcgtgttcatcgcccccaccgaccagggcacccagaccgaggccctgcagcagctgcagaaggacagcgaggccatcagaagccagtacgcccactacttcgacctgagcctggtgaacaacggcgtggacgagaccctgaagaagctgcaggaggccttcgaccaggcctgcagcagcccccagtgggtgcccgtgagctgggtgtactag

SEQ ID NO: 88555 - DNA, 1659 bp, synthetic construct
  misc_feature 1..1659: note = Description of Artificial Sequence: Synthetic coding sequence
  source 1..1659: mol_type = other DNA
atgcccgtggccgccaccaacagcgagaccgccatgcagcaggtgctggacaacctgggcagcctgcccagcgccaccggcgccgccgagctggacctgatcttcctgagaggcatcatggagagccccatcgtgagaagcctggccaaggcccacgagagactggaggagaccaagctggaggccgtgagagacaacaacctggagctggtgcaggagatcctgagagacctggcccacgtggccgagcagagcagcaccgccgccgagctggcccacatcctgcaggagccccacttccagagcctgctggagacccacgacagcgtggccagcaagacctacgagacccccccccccagccccggcctggaccccaccttcagcaaccagcccgtgccccccgacgccgtgagaatggtgggcatcagaaagaccgccggcgagcacctgggcgtgaccttcagagtggagggcggcgagctggtgatcgccagaatcctgcacggcggcatggtggcccagcagggcctgctgcacgtgggcgacatcatcaaggaggtgaacggccagcccgtgggcagcgaccccagagccctgcaggagctgctgagaaacgccagcggcagcgtgatcctgaagatcctgcccagctaccaggagccccacctgcccagacaggtgttcgtgaagtgccacttcgactacgaccccgccagagacagcctgatcccctgcaaggaggccggcctgagattcaacgccggcgacctgctgcagatcgtgaaccaggacgacgccaactggtggcaggcctgccacgtggagggcggcagcgccggcctgatccccagccagctgctggaggagaagagaaaggccttcgtgaagagagacctggagctgacccccaacagcggcaccctgtgcggcagcctgagcggcaagaagaagaagagaatgatgtacctgaccaccaagaacgccgagttcgacagacacgagctgctgatctacgaggaggtggccagaatgccccccttcagaagaaagaccctggtgctgatcggcgcccagggcgtgggcagaagaagcctgaagaacaagctgatcatgtgggaccccgacagatacggcaccaccgtgccctacaccagcagaagacccaaggacagcgagagagagggccagggctacagcttcgtgagcagaggcgagatggaggccgacgtgagagccggcagatacctggagcacggcgagtacgagggcaacctgtacggcaccagaatcgacagcatcagaggcgtggtggccgccggcaaggtgtgcgtgctggacgtgaacccccaggccgtgaaggtgctgagaaccgccgagttcgtgccctacgtggtgttcatcgaggcccccgacttcgagaccctgagagccatgaacagagccgccctggagagcggcatcagcaccaagcagctgaccgaggccgacctgagaagaaccgtggaggagagcagcagaatccagagaggctacggccactacttcgacctgtgcctggtgaacagcaacctggagagaaccttcagagagctgcagaccgccatggagaagctgagaaccgagccccagtgggtgcccgtgagctgggtgtactag

SEQ ID NO: 88556 - DNA, 1731 bp, synthetic construct
  misc_feature 1..1731: note = Description of Artificial Sequence: Synthetic coding sequence
  source 1..1731: mol_type = other DNA
atgcccgtggccgccaccaacagcgagaccgccatgcagcaggtgctggacaacctgggcagcctgcccagcgccaccggcgccgccgagctggacctgatcttcctgagaggcatcatggagagccccatcgtgagaagcctggccaaggtgatcatggtgctgtggttcatgcagcagaacgtgttcgtgcccatgaagtacatgctgaagtacttcggcgcccacgagagactggaggagaccaagctggaggccgtgagagacaacaacctggagctggtgcaggagatcctgagagacctggcccacgtggccgagcagagcagcaccgccgccgagctggcccacatcctgcaggagccccacttccagagcctgctggagacccacgacagcgtggccagcaagacctacgagacccccccccccagccccggcctggaccccaccttcagcaaccagcccgtgccccccgacgccgtgagaatggtgggcatcagaaagaccgccggcgagcacctgggcgtgaccttcagagtggagggcggcgagctggtgatcgccagaatcctgcacggcggcatggtggcccagcagggcctgctgcacgtgggcgacatcatcaaggaggtgaacggccagcccgtgggcagcgaccccagagccctgcaggagctgctgagaaacgccagcggcagcgtgatcctgaagatcctgcccagctaccaggagccccacctgcccagacaggtgttcgtgaagtgccacttcgactacgaccccgccagagacagcctgatcccctgcaaggaggccggcctgagattcaacgccggcgacctgctgcagatcgtgaaccaggacgacgccaactggtggcaggcctgccacgtggagggcggcagcgccggcctgatccccagccagctgctggaggagaagagaaaggccttcgtgaagagagacctggagctgacccccaacagcggcaccctgtgcggcagcctgagcggcaagaagaagaagagaatgatgtacctgaccaccaagaacgccgagttcgacagacacgagctgctgatctacgaggaggtggccagaatgccccccttcagaagaaagaccctggtgctgatcggcgcccagggcgtgggcagaagaagcctgaagaacaagctgatcatgtgggaccccgacagatacggcaccaccgtgccctacaccagcagaagacccaaggacagcgagagagagggccagggctacagcttcgtgagcagaggcgagatggaggccgacgtgagagccggcagatacctggagcacggcgagtacgagggcaacctgtacggcaccagaatcgacagcatcagaggcgtggtggccgccggcaaggtgtgcgtgctggacgtgaacccccaggccgtgaaggtgctgagaaccgccgagttcgtgccctacgtggtgttcatcgaggcccccgacttcgagaccctgagagccatgaacagagccgccctggagagcggcatcagcaccaagcagctgaccgaggccgacctgagaagaaccgtggaggagagcagcagaatccagagaggctacggccactacttcgacctgtgcctggtgaacagcaacctggagagaaccttcagagagctgcagaccgccatggagaagctgagaaccgagccccagtgggtgcccgtgagctgggtgtactag

SEQ ID NO: 88557 - DNA, 96 bp, synthetic construct
  misc_feature 1..96: note = Description of Artificial Sequence: Synthetic coding sequence
  source 1..96: mol_type = other DNA
atgcccgtggccgccaccaacagcgagaccgccatgcagcaggtgctggacaacctgggcagcctgcccagcgccaccggcgccgccgagctgtag

SEQ ID NO: 88558 - DNA, 456 bp, synthetic construct
  misc_feature 1..456: note = Description of Artificial Sequence: Synthetic coding sequence
  source 1..456: mol_type = other DNA
atgcccgtggccgccaccaacagcgagaccgccatgcagcaggtgctggacaacctgggcagcctgcccagcgccaccggcgccgccgagctggacctgatcttcctgagaggcatcatggagagccccatcgtgagaagcctggccaaggcccacgagagactggaggagaccaagctggaggccgtgagagacaacaacctggagctggtgcaggagatcctgagagacctggcccacgtggccgagcagagcagcaccgccgccgagctggcccacatcctgcaggagccccacttccagagcctgctggagacccacgacagcgtggccagcaagacctacgagacccccccccccagccccggcctggaccccaccttcagcaaccagcccgtgccccccgacgccgtgagaatggtgggcatcagaaagaccgccggcgagcacctgtag

SEQ ID NO: 88559 - DNA, 381 bp, synthetic construct
  misc_feature 1..381: note = Description of Artificial Sequence: Synthetic coding sequence
  source 1..381: mol_type = other DNA
atgcccgtggccgccaccaacagcgagaccgccatgcagcaggtgctggacaacctgggcagcctgcccagcgccaccggcgccgccgagctggacctgatcttcctgagaggcatcatggagagccccatcgtgagaagcctggccaaggcccacgagagactggaggagaccaagctggaggccgtgagagacaacaacctggagctggtgcaggagatcctgagagacctggcccacgtggccgagcagagcagcaccgccgccgagctggcccacatcctgcaggagccccacttccagagcctgctggagacccacgacagcgtggccagcaagacctacgagacccccccccccagccccggcctggacccctag

SEQ ID NO: 88560 - DNA, 222 bp, synthetic construct
  misc_feature 1..222: note = Description of Artificial Sequence: Synthetic coding sequence
  source 1..222: mol_type = other DNA
atgcccgtggccgccaccaacagcgagaccgccatgcagcaggtgctggacaacctgggcagcctgcccagcgccaccggcgccgccgagctggacctgatcttcctgagaggcatcatggagagccccatcgtgagaagcctggccaaggcccacgagagactggaggagaccaagctggaggccgtgagagacaacaacctggagctggtgcaggagtag

SEQ ID NO: 88561 - DNA, 447 bp, synthetic construct
  misc_feature 1..447: note = Description of Artificial Sequence: Synthetic coding sequence
  source 1..447: mol_type = other DNA
atgcccgtggccgccaccaacagcgagaccgccatgcagcaggtgctggacaacctgggcagcctgcccagcgccaccggcgccgccgagctggacctgatcttcctgagaggcatcatggagagccccatcgtgagaagcctggccaaggcccacgagagactggaggagaccaagctggaggccgtgagagacaacaacctggagctggtgcaggagatcctgagagacctggcccacgtggccgagcagagcagcaccgccgccgagctggcccacatcctgcaggagccccacttccagagcctgctggagacccacgacagcgtggccagcaagacctacgagacccccccccccagccccggcctggaccccaccttcagcaaccagcccgtgccccccgacgccgtgagaatggtgggcatcagaaagaccgccggctag

SEQ ID NO: 88562 - DNA, 1626 bp, synthetic construct
  misc_feature 1..1626: note = Description of Artificial Sequence: Synthetic coding sequence
  source 1..1626: mol_type = other DNA
atgcagcaggtgctggacaacctgggcagcctgcccagcgccaccggcgccgccgagctggacctgatcttcctgagaggcatcatggagagccccatcgtgagaagcctggccaaggcccacgagagactggaggagaccaagctggaggccgtgagagacaacaacctggagctggtgcaggagatcctgagagacctggcccacgtggccgagcagagcagcaccgccgccgagctggcccacatcctgcaggagccccacttccagagcctgctggagacccacgacagcgtggccagcaagacctacgagacccccccccccagccccggcctggaccccaccttcagcaaccagcccgtgccccccgacgccgtgagaatggtgggcatcagaaagaccgccggcgagcacctgggcgtgaccttcagagtggagggcggcgagctggtgatcgccagaatcctgcacggcggcatggtggcccagcagggcctgctgcacgtgggcgacatcatcaaggaggtgaacggccagcccgtgggcagcgaccccagagccctgcaggagctgctgagaaacgccagcggcagcgtgatcctgaagatcctgcccagctaccaggagccccacctgcccagacaggtgttcgtgaagtgccacttcgactacgaccccgccagagacagcctgatcccctgcaaggaggccggcctgagattcaacgccggcgacctgctgcagatcgtgaaccaggacgacgccaactggtggcaggcctgccacgtggagggcggcagcgccggcctgatccccagccagctgctggaggagaagagaaaggccttcgtgaagagagacctggagctgacccccaacagcggcaccctgtgcggcagcctgagcggcaagaagaagaagagaatgatgtacctgaccaccaagaacgccgagttcgacagacacgagctgctgatctacgaggaggtggccagaatgccccccttcagaagaaagaccctggtgctgatcggcgcccagggcgtgggcagaagaagcctgaagaacaagctgatcatgtgggaccccgacagatacggcaccaccgtgccctacaccagcagaagacccaaggacagcgagagagagggccagggctacagcttcgtgagcagaggcgagatggaggccgacgtgagagccggcagatacctggagcacggcgagtacgagggcaacctgtacggcaccagaatcgacagcatcagaggcgtggtggccgccggcaaggtgtgcgtgctggacgtgaacccccaggccgtgaaggtgctgagaaccgccgagttcgtgccctacgtggtgttcatcgaggcccccgacttcgagaccctgagagccatgaacagagccgccctggagagcggcatcagcaccaagcagctgaccgaggccgacctgagaagaaccgtggaggagagcagcagaatccagagaggctacggccactacttcgacctgtgcctggtgaacagcaacctggagagaaccttcagagagctgcagaccgccatggagaagctgagaaccgagccccagtgggtgcccgtgagctgggtgtactag

SEQ ID NO: 88563 - DNA, 1167 bp, synthetic construct
  misc_feature 1..1167: note = Description of Artificial Sequence: Synthetic coding sequence
  source 1..1167: mol_type = other DNA
atggagctgcagtaccccccccccccccccagccccagaatctgcagagagagaagcggcggcgacaacgccagcatgcccgtgctgagcgaggacagcggcctgcacgagaccctggccctgctgaccagccagctgagacccgacagcaaccacaaggaggagatgggcttcctgagagacgtgttcagcgagaagagcctgagctacctgatgaagatccacgagaagctgagatactacgagagacagagccccacccccgtgctgcacagcgccgtggccctggccgaggacgtgatggaggagctgcaggccgccagcgtgcacagcgacgagagagagctgctgcagctgctgagcaccccccacctgagagccgtgctgatggtgcacgacaccgtggcccagaagaacttcgaccccgtgctgccccccctgcccgacaacatcgacgaggacttcgacgaggagagcgtgaagatcgtgagactggtgaagaacaaggagcccctgggcgccaccatcagaagagacgagcacagcggcgccgtggtggtggccagaatcatgagaggcggcgccgccgacagaagcggcctggtgcacgtgggcgacgagctgagagaggtgaacggcatcgccgtgctgcacaagagacccgacgagatcagccagatcctggcccagagccagggcagcatcaccctgaagatcatccccgccacccaggaggaggacagactgaaggagagcaaggtgttcatgagagccctgttccactacaaccccagagaggacagagccatcccctgccaggaggccggcctgcccttccagagaagacaggtgctggaggtggtgagccaggacgaccccacctggtggcaggccaagagagtgggcgacaccaacctgagagccggcctgatccccagcaagggcttccaggagagaagactgagctacagaagagcctacggcacccccatcagcccccagttcagccagcccaagcaggagctgagcctgcccagacactgggcccccacccagctgctgcccagctgcggcgcccactgccccggcggcaagggcacccacacccccaccctgatccccatcctgctgagccccagcctgcagctggagttcatccagtactag

SEQ ID NO: 88564 - DNA, 1758 bp, synthetic construct
  misc_feature 1..1758: note = Description of Artificial Sequence: Synthetic coding sequence
  source 1..1758: mol_type = other DNA
atgcccgtgctgagcgaggacagcggcctgcacgagaccctggccctgctgaccagccagctgagacccgacagcaaccacaaggaggagatgggcttcctgagagacgtgttcagcgagaagagcctgagctacctgatgaagatccacgagaagctgagatactacgagagacagagccccacccccgtgctgcacagcgccgtggccctggccgaggacgtgatggaggagctgcaggccgccagcgtgcacagcgacgagagagagctgctgcagctgctgagcaccccccacctgagagccgtgctgatggtgcacgacaccgtggcccagaagaacttcgaccccgtgctgccccccctgcccgacaacatcgacgaggacttcgacgaggagagcgtgaagatcgtgagactggtgaagaacaaggagcccctgggcgccaccatcagaagagacgagcacagcggcgccgtggtggtggccagaatcatgagaggcggcgccgccgacagaagcggcctggtgcacgtgggcgacgagctgagagaggtgaacggcatcgccgtgctgcacaagagacccgacgagatcagccagatcctggcccagagccagggcagcatcaccctgaagatcatccccgccacccaggaggaggacagactgaaggagagcaaggtgttcatgagagccctgttccactacaaccccagagaggacagagccatcccctgccaggaggccggcctgcccttccagagaagacaggtgctggaggtggtgagccaggacgaccccacctggtggcaggccaagagagtgggcgacaccaacctgagagccggcctgatccccagcaagggcttccaggagagaagactgagctacagaagagccgccggcaccctgcccagcccccagagcctgagaaagcccccctacgaccagccctgcgacaaggagacctgcgactgcgagggctacctgaagggccactacgtggccggcctgagaagaagcttcagactgggctgcagagagagactgggcggcagccaggagggcaagatgagcagcggcgccgagagccccgagctgctgacctacgaggaggtggccagataccagcaccagcccggcgagagacccagactggtggtgctgatcggcagcctgggcgccagactgcacgagctgaagcagaaggtggtggccgagaacccccagcacttcggcgtggccgtgccccacaccaccagacccagaaagagccacgagaaggagggcgtggagtaccacttcgtgagcaagcaggccttcgaggccgacctgcaccacaacaagttcctggagcacggcgagtacaaggagaacctgtacggcaccagcctggaggccatccaggccgtgatggccaagaacaaggtgtgcctggtggacgtggagcccgaggccctgaagcagctgagaaccagcgagttcaagccctacatcatcttcgtgaagcccgccatccaggagaagagaaagaccccccccatgagccccgcctgcgaggacaccgccgcccccttcgacgagcagcagcaggagatggccgccagcgccgccttcatcgacagacactacggccacctggtggacgccgtgctggtgaaggaggacctgcagggcgcctacagccagctgaaggtggtgctggagaagctgagcaaggacacccactgggtgcccgtgagctgggtgagatag

SEQ ID NO: 88565 - DNA, 1833 bp, synthetic construct
  misc_feature 1..1833: note = Description of Artificial Sequence: Synthetic coding sequence
  source 1..1833: mol_type = other DNA
atggagctgcagtaccccccccccccccccagccccagaatctgcagagagagaagcggcggcgacaacgccagcatgcccgtgctgagcgaggacagcggcctgcacgagaccctggccctgctgaccagccagctgagacccgacagcaaccacaaggaggagatgggcttcctgagagacgtgttcagcgagaagagcctgagctacctgatgaagatccacgagaagctgagatactacgagagacagagccccacccccgtgctgcacagcgccgtggccctggccgaggacgtgatggaggagctgcaggccgccagcgtgcacagcgacgagagagagctgctgcagctgctgagcaccccccacctgagagccgtgctgatggtgcacgacaccgtggcccagaagaacttcgaccccgtgctgccccccctgcccgacaacatcgacgaggacttcgacgaggagagcgtgaagatcgtgagactggtgaagaacaaggagcccctgggcgccaccatcagaagagacgagcacagcggcgccgtggtggtggccagaatcatgagaggcggcgccgccgacagaagcggcctggtgcacgtgggcgacgagctgagagaggtgaacggcatcgccgtgctgcacaagagacccgacgagatcagccagatcctggcccagagccagggcagcatcaccctgaagatcatccccgccacccaggaggaggacagactgaaggagagcaaggtgttcatgagagccctgttccactacaaccccagagaggacagagccatcccctgccaggaggccggcctgcccttccagagaagacaggtgctggaggtggtgagccaggacgaccccacctggtggcaggccaagagagtgggcgacaccaacctgagagccggcctgatccccagcaagggcttccaggagagaagactgagctacagaagagccgccggcaccctgcccagcccccagagcctgagaaagcccccctacgaccagccctgcgacaaggagacctgcgactgcgagggctacctgaagggccactacgtggccggcctgagaagaagcttcagactgggctgcagagagagactgggcggcagccaggagggcaagatgagcagcggcgccgagagccccgagctgctgacctacgaggaggtggccagataccagcaccagcccggcgagagacccagactggtggtgctgatcggcagcctgggcgccagactgcacgagctgaagcagaaggtggtggccgagaacccccagcacttcggcgtggccgtgccccacaccaccagacccagaaagagccacgagaaggagggcgtggagtaccacttcgtgagcaagcaggccttcgaggccgacctgcaccacaacaagttcctggagcacggcgagtacaaggagaacctgtacggcaccagcctggaggccatccaggccgtgatggccaagaacaaggtgtgcctggtggacgtggagcccgaggccctgaagcagctgagaaccagcgagttcaagccctacatcatcttcgtgaagcccgccatccaggagaagagaaagaccccccccatgagccccgcctgcgaggacaccgccgcccccttcgacgagcagcagcaggagatggccgccagcgccgccttcatcgacagacactacggccacctggtggacgccgtgctggtgaaggaggacctgcagggcgcctacagccagctgaaggtggtgctggagaagctgagcaaggacacccactgggtgcccgtgagctgggtgagatag

SEQ ID NO: 88566 - DNA, 1782 bp, synthetic construct
  misc_feature 1..1782: note = Description of Artificial Sequence: Synthetic coding sequence
  source 1..1782: mol_type = other DNA
atgatccagagcgacaagggcgccgacccccccgacaagaaggacatgaagctgagcaccgccaccaacccccagaacggcctgagccagatcctgagactggtgctgcaggagctgagcctgttctacggcagagacgtgaacggcgtgtgcctgctgtacgacctgctgcacagcccctggctgcaggccctgctgaagatctacgactgcctgcaggagttcaaggagaagaagctggtgcccgccaccccccacgcccaggtgctgagctacgaggtggtggagctgctgagagagacccccaccagccccgagatccaggagctgagacagatgctgcaggccccccacttcaaggccctgctgagcgcccacgacaccatcgcccagaaggacttcgagcccctgctgccccccctgcccgacaacatccccgagagcgaggaggccatgagaatcgtgtgcctggtgaagaaccagcagcccctgggcgccaccatcaagagacacgagatgaccggcgacatcctggtggccagaatcatccacggcggcctggccgagagaagcggcctgctgtacgccggcgacaagctggtggaggtgaacggcgtgagcgtggagggcctggaccccgagcaggtgatccacatcctggccatgagcagaggcaccatcatgttcaaggtggtgcccgtgagcgacccccccgtgaacagccagcagatggaccccgacatcccctgcatggacgccggcctgcccttccagaagggcgacatcctgcagatcgtggaccagaacgacgccctgtggtggcaggccagaaagatcagcgaccccgccacctgcgccggcctggtgcccagcaaccacctgctgaagagaaagcagagagagttctggtggagccagccctaccagccccacacctgcctgaagagcaccctgtacaaggaggagttcgtgggctacggccagaagttcttcatcgccggcttcagaagaagcatgagactgtgcagaagaaagagccacctgagccccctgcacgccagcgtgtgctgcaccggcagctgctacagcgccgtgggcgccccctacgaggaggtggtgagataccagagaagacccagcgacaagtacagactgatcgtgctgatgggccccagcggcgtgggcgtgaacgagctgagaagacagctgatcgagttcaaccccagccacttccagagcgccgtgccccacaccaccagaaccaagaagagctacgagatgaacggcagagagtaccactacgtgagcaaggagaccttcgagaacctgatctacagccacagaatgctggagtacggcgagtacaagggccacctgtacggcaccagcgtggacgccgtgcagaccgtgctggtggagggcaagatctgcgtgatggacctggagccccaggacatccagggcgtgagaacccacgagctgaagccctacgtgatcttcatcaagcccagcaacatgagatgcatgaagcagagcagaaagaacgccaaggtgatcaccgactactacgtggacatgaagttcaaggacgaggacctgcaggagatggagaacctggcccagagaatggagacccagttcggccagttcttcgaccacgtgatcgtgaacgacagcctgcacgacgcctgcgcccagctgctgagcgccatccagaaggcccaggaggagccccagtgggtgcccgccacctggatcagcagcgacaccgagagccagtag

SEQ ID NO: 88567 - DNA, 1809 bp, synthetic construct
  misc_feature 1..1809: note = Description of Artificial Sequence: Synthetic coding sequence
  source 1..1809: mol_type = other DNA
atgatccagagcgacaagggcgccgacccccccgacaagaaggacatgaagctgagcaccgccaccaacccccagaacggcctgagccagatcctgagactggtgctgcaggagctgagcctgttctacggcagagacgtgaacggcgtgtgcctgctgtacgacctgctgcacagcccctggctgcaggccctgctgaagatctacgactgcctgcaggagttcaaggagaagaagctggtgcccgccaccccccacgcccaggtgctgagctacgaggtggtggagctgctgagagagacccccaccagccccgagatccaggagctgagacagatgctgcaggccccccacttcaagggcgccaccatcaagagacacgagatgaccggcgacatcctggtggccagaatcatccacggcggcctggccgagagaagcggcctgctgtacgccggcgacaagctggtggaggtgaacggcgtgagcgtggagggcctggaccccgagcaggtgatccacatcctggccatgagcagaggcaccatcatgttcaaggtggtgcccgtgagcgacccccccgtgaacagccagcagatggtgtacgtgagagccatgaccgagtactggccccaggaggaccccgacatcccctgcatggacgccggcctgcccttccagaagggcgacatcctgcagatcgtggaccagaacgacgccctgtggtggcaggccagaaagatcagcgaccccgccacctgcgccggcctggtgcccagcaaccacctgctgaagagatggagcttcgccctggtggcccaggccggcgtgcagtggcactacctggacagcctgcagcccctgccccccggcttcaagagattcagctgcctgagcctgcccagaagctgggactacatcgaggacgacatgaagatcgacgagaagtgcgtggaggccgagaaggagagcatcgagaccgacaaggaggagttcgtgggctacggccagaagttcttcatcgccggcttcagaagaagcatgagactgtgcagaagaaagagccacctgagccccctgcacgccagcgtgtgctgcaccggcagctgctacagcgccgtgggcgccccctacgaggaggtggtgagataccagagaagacccagcgacaagtacagactgatcgtgctgatgggccccagcggcgtgggcgtgaacgagctgagaagacagctgatcgagttcaaccccagccacttccagagcgccgtgccccacaccaccagaaccaagaagagctacgagatgaacggcagagagtaccactacgtgagcaaggagaccttcgagaacctgatctacagccacagaatgctggagtacggcgagtacaagggccacctgtacggcaccagcgtggacgccgtgcagaccgtgctggtggagggcaagatctgcgtgatggacctggagccccaggacatccagggcgtgagaacccacgagctgaagccctacgtgatcttcatcaagcccagcaacatgagatgcatgaagcagagcagaaagaacgccaaggtgatcaccgactactacgtggacatgaagttcaaggacgaggacctgcaggagatggagaacctggcccagagaatggagacccagttcggccagttcttcgaccacgtgatcgtgaacgacagcctgcacgacgcctgcgcccagctgctgagcgccatccagaaggcccaggaggagccccagtgggtgcccgccacctggatcagcagcgacaccgagagccagtag

SEQ ID NO: 88568 - DNA, 1914 bp, synthetic construct
  misc_feature 1..1914: note = Description of Artificial Sequence: Synthetic coding sequence
  source 1..1914: mol_type = other DNA
atgatccagagcgacaagggcgccgacccccccgacaagaaggacatgaagctgagcaccgccaccaacccccagaacggcctgagccagatcctgagactggtgctgcaggagctgagcctgttctacggcagagacgtgaacggcgtgtgcctgctgtacgacctgctgcacagcccctggctgcaggccctgctgaagatctacgactgcctgcaggagttcaaggagaagaagctggtgcccgccaccccccacgcccaggtgctgagctacgaggtggtggagctgctgagagagacccccaccagccccgagatccaggagctgagacagatgctgcaggccccccacttcaaggccctgctgagcgcccacgacaccatcgcccagaaggacttcgagcccctgctgccccccctgcccgacaacatccccgagagcgaggaggccatgagaatcgtgtgcctggtgaagaaccagcagcccctgggcgccaccatcaagagacacgagatgaccggcgacatcctggtggccagaatcatccacggcggcctggccgagagaagcggcctgctgtacgccggcgacaagctggtggaggtgaacggcgtgagcgtggagggcctggaccccgagcaggtgatccacatcctggccatgagcagaggcaccatcatgttcaaggtggtgcccgtgagcgacccccccgtgaacagccagcagatggtgtacgtgagagccatgaccgagtactggccccaggaggaccccgacatcccctgcatggacgccggcctgcccttccagaagggcgacatcctgcagatcgtggaccagaacgacgccctgtggtggcaggccagaaagatcagcgaccccgccacctgcgccggcctggtgcccagcaaccacctgctgaagagaaagcagagagagttctggtggagccagccctaccagccccacacctgcctgaagagcaccctgagcatcagcctgaagggcgaggacgacatgaagatcgacgagaagtgcgtggaggccgagaacagcaccgccgagagcgaggagctgaacagcgacaaggaggagttcgtgggctacggccagaagttcttcatcgccggcttcagaagaagcatgagactgtgcagaagaaagagccacctgagccccctgcacgccagcgtgtgctgcaccggcagctgctacagcgccgtgggcgccccctacgaggaggtggtgagataccagagaagacccagcgacaagtacagactgatcgtgctgatgggccccagcggcgtgggcgtgaacgagctgagaagacagctgatcgagttcaaccccagccacttccagagcgccgtgccccacaccaccagaaccaagaagagctacgagatgaacggcagagagtaccactacgtgagcaaggagaccttcgagaacctgatctacagccacagaatgctggagtacggcgagtacaagggccacctgtacggcaccagcgtggacgccgtgcagaccgtgctggtggagggcaagatctgcgtgatggacctggagccccaggacatccagggcgtgagaacccacgagctgaagccctacgtgatcttcatcaagcccagcaacatgagatgcatgaagcagagcagaaagaacgccaaggtgatcaccgactactacgtggacatgaagttcaaggacgaggacctgcaggagatggagaacctggcccagagaatggagacccagttcggccagttcttcgaccacgtgatcgtgaacgacagcctgcacgacgcctgcgcccagctgctgagcgccatccagaaggcccaggaggagccccagtgggtgcccgccacctggatcagcagcgacaccgagagccagtag

SEQ ID NO: 88569 - DNA, 1701 bp, synthetic construct
  misc_feature 1..1701: note = Description of Artificial Sequence: Synthetic coding sequence
  source 1..1701: mol_type = other DNA
atgatccagagcgacaagggcgccgacccccccgacaagaaggacatgaagctgagcaccgccaccaacccccagaacggcctgagccagatcctgagactggtgctgcaggagctgagcctgttctacggcagagacgtgaacggcgtgtgcctgctgtacgacctgctgcacagcccctggctgcaggccctgctgaagatctacgactgcctgcaggagttcaaggagaagaagctggtgcccgccaccccccacgcccaggtgctgagctacgagggcgccaccatcaagagacacgagatgaccggcgacatcctggtggccagaatcatccacggcggcctggccgagagaagcggcctgctgtacgccggcgacaagctggtggaggtgaacggcgtgagcgtggagggcctggaccccgagcaggtgatccacatcctggccatgagcagaggcaccatcatgttcaaggtggtgcccgtgagcgacccccccgtgaacagccagcagatggtgtacgtgagagccatgaccgagtactggccccaggaggaccccgacatcccctgcatggacgccggcctgcccttccagaagggcgacatcctgcagatcgtggaccagaacgacgccctgtggtggcaggccagaaagatcagcgaccccgccacctgcgccggcctggtgcccagcaaccacctgctgaagagaaagcagagagagttctggtggagccagccctaccagccccacacctgcctgaagagcaccctgagcatcagcctgaagggcgaggacgacatgaagatcgacgagaagtgcgtggaggccgagaacagcaccgccgagagcgaggagctgaacagcgacaaggaggagttcgtgggctacggccagaagttcttcatcgccggcttcagaagaagcatgagactgtgcagaagaaagagccacctgagccccctgcacgccagcgtgtgctgcaccggcagctgctacagcgccgtgggcgccccctacgaggaggtggtgagataccagagaagacccagcgacaagtacagactgatcgtgctgatgggccccagcggcgtgggcgtgaacgagctgagaagacagctgatcgagttcaaccccagccacttccagagcgccgtgccccacaccaccagaaccaagaagagctacgagatgaacggcagagagtaccactacgtgagcaaggagaccttcgagaacctgatctacagccacagaatgctggagtacggcgagtacaagggccacctgtacggcaccagcgtggacgccgtgcagaccgtgctggtggagggcaagatctgcgtgatggacctggagccccaggacatccagggcgtgagaacccacgagctgaagccctacgtgatcttcatcaagcccagcaacatgagatgcatgaagcagagcagaaagaacgccaaggtgatcaccgactactacgtggacatgaagttcaaggacgaggacctgcaggagatggagaacctggcccagagaatggagacccagttcggccagttcttcgaccacgtgatcgtgaacgacagcctgcacgacgcctgcgcccagctgctgagcgccatccagaaggcccaggaggagccccagtgggtgcccgccacctggatcagcagcgacaccgagagccagtag

SEQ ID NO: 88570 - DNA, 1914 bp, synthetic construct
  misc_feature 1..1914: note = Description of Artificial Sequence: Synthetic coding sequence
  source 1..1914: mol_type = other DNA
atgatccagagcgacaagggcgccgacccccccgacaagaaggacatgaagctgagcaccgccaccaacccccagaacggcctgagccagatcctgagactggtgctgcaggagctgagcctgttctacggcagagacgtgaacggcgtgtgcctgctgtacgacctgctgcacagcccctggctgcaggccctgctgaagatctacgactgcctgcaggagttcaaggagaagaagctggtgcccgccaccccccacgcccaggtgctgagctacgaggtggtggagctgctgagagagacccccaccagccccgagatccaggagctgagacagatgctgcaggccccccacttcaaggccctgctgagcgcccacgacaccatcgcccagaaggacttcgagcccctgctgccccccctgcccgacaacatccccgagagcgaggaggccatgagaatcgtgtgcctggtgaagaaccagcagcccctgggcgccaccatcaagagacacgagatgaccggcgacatcctggtggccagaatcatccacggcggcctggccgagagaagcggcctgctgtacgccggcgacaagctggtggaggtgaacggcgtgagcgtggagggcctggaccccgagcaggtgatccacatcctggccatgagcagaggcaccatcatgttcaaggtggtgcccgtgagcgacccccccgtgaacagccagcagatggtgtacgtgagagccatgaccgagtactggccccaggaggaccccgacatcccctgcatggacgccggcctgcccttccagaagggcgacatcctgcagatcgtggaccagaacgacgccctgtggtggcaggccagaaagatcagcgaccccgccacctgcgccggcctggtgcccagcaaccacctgctgaagagaaagcagagagagttctggtggagccagccctaccagccccacacctgcctgaagagcaccctgagcatcagcatggaggaggaggacgacatgaagatcgacgagaagtgcgtggaggccgacgaggagaccttcgagagcgaggagctgagcgaggacaaggaggagttcgtgggctacggccagaagttcttcatcgccggcttcagaagaagcatgagactgtgcagaagaaagagccacctgagccccctgcacgccagcgtgtgctgcaccggcagctgctacagcgccgtgggcgccccctacgaggaggtggtgagataccagagaagacccagcgacaagtacagactgatcgtgctgatgggccccagcggcgtgggcgtgaacgagctgagaagacagctgatcgagttcaaccccagccacttccagagcgccgtgccccacaccaccagaaccaagaagagctacgagatgaacggcagagagtaccactacgtgagcaaggagaccttcgagaacctgatctacagccacagaatgctggagtacggcgagtacaagggccacctgtacggcaccagcgtggacgccgtgcagaccgtgctggtggagggcaagatctgcgtgatggacctggagccccaggacatccagggcgtgagaacccacgagctgaagccctacgtgatcttcatcaagcccagcaacatgagatgcatgaagcagagcagaaagaacgccaaggtgatcaccgactactacgtggacatgaagttcaaggacgaggacctgcaggagatggagaacctggcccagagaatggagacccagttcggccagttcttcgaccacgtgatcgtgaacgacagcctgcacgacgcctgcgcccagctgctgagcgccatccagaaggcccaggaggagccccagtgggtgcccgccacctggatcagcagcgacaccgagagccagtag

SEQ ID NO: 88571 - DNA, 2028 bp, synthetic construct
  misc_feature 1..2028: note = Description of Artificial Sequence: Synthetic coding sequence
  source 1..2028: mol_type = other DNA
atgaccaccagccacatgaacggccacgtgaccgaggagagcgacagcgaggtgaagaacgtggacctggccagccccgaggagcaccagaagcacagagagatggccgtggactgccccggcgacctgggcaccagaatgatgcccatcagaagaagcgcccagctggagagaatcagacagcagcaggaggacatgagaagaagaagagaggaggagggcaagaagcaggagctggacctgaacagcagcatgagactgaagaagctggcccagatcccccccaagaccggcatcgacaaccccatgttcgacaccgaggagggcatcgtgctggagagcccccactacgccgtgaagatcctggagatcgaggacctgttcagcagcctgaagcacatccagcacaccctggtggacagccagagccaggaggacatcagcctgctgctgcagctggtgcagaacaaggacttccagaacgccttcaagatccacaacgccatcaccgtgcacatgaacaaggccagcccccccttccccctgatcagcaacgcccaggacctggcccaggaggtgcagaccgtgctgaagcccgtgcaccacaaggagggccaggagctgaccgccctgctgaacaccccccacatccaggccctgctgctggcccacgacaaggtggccgagcaggagatgcagctggagcccatcaccgacgagagagtgtacgagagcatcggccagtacggcggcgagaccgtgaagatcgtgagaatcgagaaggccagagacatccccctgggcgccaccgtgagaaacgagatggacagcgtgatcatcagcagaatcgtgaagggcggcgccgccgagaagagcggcctgctgcacgagggcgacgaggtgctggagatcaacggcatcgagatcagaggcaaggacgtgaacgaggtgttcgacctgctgagcgacatgcacggcaccctgaccttcgtgctgatccccagccagcagatcaagcccccccccgccaaggagaccgtgatccacgtgaaggcccacttcgactacgaccccagcgacgacccctacgtgccctgcagagagctgggcctgagcttccagaagggcgacatcctgcacgtgatcagccaggaggaccccaactggtggcaggcctacagagagggcgacgaggacaaccagcccctggccggcctggtgcccggcaagagcttccagcagcagagagaggccatgaagcagaccatcgaggaggacaaggagcccgagaagagcggcaagctgtggtgcgccaagaagaacaagaagaagagaaagaaggtgctgtacaacgccaacaagaacgacgactacgacaacgaggagatcctgacctacgaggagatgagcctgtaccaccagcccgccaacagaaagagacccatcatcctgatcggcccccagaactgcggccagaacgagctgagacagagactgatgaacaaggagaaggacagattcgccagcgccgtgccccacaccaccagaagcagaagagaccaggaggtggccggcagagactaccacttcgtgagcagacaggccttcgaggccgacatcgccgccggcaagttcatcgagcacggcgagttcgagaagaacctgtacggcaccagcatcgacagcgtgagacaggtgatcaacagcggcaagatctgcctgctgagcctgagaacccagagcctgaagaccctgagaaacagcgacctgaagccctacatcatcttcatcgccccccccagccaggagagactgagagccctgctggccaaggagggcaagaaccccaagcccgaggagctgagagagatcatcgagaagaccagagagatggagcagaacaacggccactacttcgacaccgccatcgtgaacagcgacctggacaaggcctaccaggagctgctgagactgatcaacaagctggacaccgagccccagtgggtgcccagcacctggctgagatag

SEQ ID NO: 88572 - DNA, 1926 bp, synthetic construct
  misc_feature 1..1926: note = Description of Artificial Sequence: Synthetic coding sequence
  source 1..1926: mol_type = other DNA
atggccgtggactgccccggcgacctgggcaccagaatgatgcccatcagaagaagcgcccagctggagagaatcagacagcagcaggaggacatgagaagaagaagagaggaggagggcaagaagcaggagctggacctgaacagcagcatgagactgaagaagctggcccagatcccccccaagaccggcatcgacaaccccatgttcgacaccgaggagggcatcgtgctggagagcccccactacgccgtgaagatcctggagatcgaggacctgttcagcagcctgaagcacatccagcacaccctggtggacagccagagccaggaggacatcagcctgctgctgcagctggtgcagaacaaggacttccagaacgccttcaagatccacaacgccatcaccgtgcacatgaacaaggccagcccccccttccccctgatcagcaacgcccaggacctggcccaggaggtgcagaccgtgctgaagcccgtgcaccacaaggagggccaggagctgaccgccctgctgaacaccccccacatccaggccctgctgctggcccacgacaaggtggccgagcaggagatgcagctggagcccatcaccgacgagagagtgtacgagagcatcggccagtacggcggcgagaccgtgaagatcgtgagaatcgagaaggccagagacatccccctgggcgccaccgtgagaaacgagatggacagcgtgatcatcagcagaatcgtgaagggcggcgccgccgagaagagcggcctgctgcacgagggcgacgaggtgctggagatcaacggcatcgagatcagaggcaaggacgtgaacgaggtgttcgacctgctgagcgacatgcacggcaccctgaccttcgtgctgatccccagccagcagatcaagcccccccccgccaaggagaccgtgatccacgtgaaggcccacttcgactacgaccccagcgacgacccctacgtgccctgcagagagctgggcctgagcttccagaagggcgacatcctgcacgtgatcagccaggaggaccccaactggtggcaggcctacagagagggcgacgaggacaaccagcccctggccggcctggtgcccggcaagagcttccagcagcagagagaggccatgaagcagaccatcgaggaggacaaggagcccgagaagagcggcaagctgtggtgcgccaagaagaacaagaagaagagaaagaaggtgctgtacaacgccaacaagaacgacgactacgacaacgaggagatcctgacctacgaggagatgagcctgtaccaccagcccgccaacagaaagagacccatcatcctgatcggcccccagaactgcggccagaacgagctgagacagagactgatgaacaaggagaaggacagattcgccagcgccgtgccccacaccaccagaagcagaagagaccaggaggtggccggcagagactaccacttcgtgagcagacaggccttcgaggccgacatcgccgccggcaagttcatcgagcacggcgagttcgagaagaacctgtacggcaccagcatcgacagcgtgagacaggtgatcaacagcggcaagatctgcctgctgagcctgagaacccagagcctgaagaccctgagaaacagcgacctgaagccctacatcatcttcatcgccccccccagccaggagagactgagagccctgctggccaaggagggcaagaaccccaagcccgaggagctgagagagatcatcgagaagaccagagagatggagcagaacaacggccactacttcgacaccgccatcgtgaacagcgacctggacaaggcctaccaggagctgctgagactgatcaacaagctggacaccgagccccagtgggtgcccagcacctggctgagatag

SEQ ID NO: 88573 - DNA, 15 bp, synthetic construct
  misc_feature 1..15: note = Description of Artificial Sequence: Synthetic coding sequence
  source 1..15: mol_type = other DNA
atggccgtggactag

SEQ ID NO: 88574 - DNA, 450 bp, synthetic construct
  misc_feature 1..450: note = Description of Artificial Sequence: Synthetic coding sequence
  source 1..450: mol_type = other DNA
atggccgtggactgccccggcgacctgggcaccagaatgatgcccatcagaagaagcgcccagctggagagaatcagacagcagcaggaggacatgagaagaagaagagaggaggagggcaagaagcaggagctggacctgaacagcagcatgagactgaagaagctggcccagatcccccccaagaccggcatcgacaaccccatgttcgacaccgaggagggcatcgtgctggagagcccccactacgccgtgaagatcctggagatcgaggacctgttcagcagcctgaagcacatccagcacaccctggtggacagccagagccaggaggacatcagcctgctgctgcagctggtgcagaacaaggacttccagaacgccttcaagatccacaacgccatcaccgtgcacatgaacaaggccagcccccccttccccctgatctag

SEQ ID NO: 88575 - DNA, 870 bp, synthetic construct
  misc_feature 1..870: note = Description of Artificial Sequence: Synthetic coding sequence
  source 1..870: mol_type = other DNA
atgaccggcgtgttcgacagaagagtgcccagcatcagaagcggcgacttccaggcccccttccagaccagcgccgccatgcaccaccccagccaggagagccccaccctgcccgagagcagcgccaccgacagcgactactacagccccaccggcggcgccccccacggctactgcagccccaccagcgccagctacggcaaggccctgaacccctaccagtaccagtaccacggcgtgaacggcagcgccggcagctaccccgccaaggcctacgccgactacagctacgccagcagctaccaccagtacggcggcgcctacaacagagtgcccagcgccaccaaccagcccgagaaggaggtgaccgagcccgaggtgagaatggtgaacggcaagcccaagaaggtgagaaagcccagaaccatctacagcagcttccagctggccgccctgcagagaagattccagaagacccagtacctggccctgcccgagagagccgagctggccgccagcctgggcctgacccagacccaggtgaagatctggttccagaacaagagaagcaagatcaagaagatcatgaagaacggcgagatgccccccgagcacagccccagcagcagcgaccccatggcctgcaacagcccccagagccccgccgtgtgggagccccagggcagcagcagaagcctgagccaccacccccacgcccacccccccaccagcaaccagagccccgccagcagctacctggagaacagcgccagctggtacaccagcgccgccagcagcatcaacagccacctgcccccccccggcagcctgcagcaccccctggccctggccagcggcaccctgtactag

SEQ ID NO: 88576 - DNA, 1623 bp, synthetic construct
  misc_feature 1..1623: note = Description of Artificial Sequence: Synthetic coding sequence
  source 1..1623: mol_type = other DNA
atgcagcaggtgctggagaacctgaccgagctgcccagcagcaccggcgccgaggagatcgacctgatcttcctgaagggcatcatggagaaccccatcgtgaagagcctggccaaggcccacgagagactggaggacagcaagctggaggccgtgagcgacaacaacctggagctggtgaacgagatcctggaggacatcacccccctgatcaacgtggacgagaacgtggccgagctggtgggcatcctgaaggagccccacttccagagcctgctggaggcccacgacatcgtggccagcaagtgctacgacagcccccccagcagccccgagatgaacaacagcagcatcaacaaccagctgctgcccgtggacgccatcagaatcctgggcatccacaagagagccggcgagcccctgggcgtgaccttcagagtggagaacaacgacctggtgatcgccagaatcctgcacggcggcatgatcgacagacagggcctgctgcacgtgggcgacatcatcaaggaggtgaacggccacgaggtgggcaacaaccccaaggagctgcaggagctgctgaagaacatcagcggcagcgtgaccctgaagatcctgcccagctacagagacaccatcaccccccagcaggtgttcgtgaagtgccacttcgactacaacccctacaacgacaacctgatcccctgcaaggaggccggcctgaagttcagcaagggcgagatcctgcagatcgtgaacagagaggaccccaactggtggcaggccagccacgtgaaggagggcggcagcgccggcctgatccccagccagttcctggaggagaagagaaaggccttcgtgagaagagactgggacaacagcggccccttctgcggcaccatcagcagcaagaagaagaagaagatgatgtacctgaccaccagaaacgccgagttcgacagacacgagatccagatctacgaggaggtggccaagatgccccccttccagagaaagaccctggtgctgatcggcgcccagggcgtgggcagaagaagcctgaagaacagattcatcgtgctgaaccccaccagattcggcaccaccgtgcccttcaccagcagaaagcccagagaggacgagaaggacggccaggcctacaagttcgtgagcagaagcgagatggaggccgacatcaaggccggcaagtacctggagcacggcgagtacgagggcaacctgtacggcaccaagatcgacagcatcctggaggtggtgcagaccggcagaacctgcatcctggacgtgaacccccaggccctgaaggtgctgagaaccagcgagttcatgccctacgtggtgttcatcgccgcccccgagctggagaccctgagagccatgcacaaggccgtggtggacgccggcatcaccaccaagctgctgaccgacagcgacctgaagaagaccgtggacgagagcgccagaatccagagagcctacaaccactacttcgacctgatcatcatcaacgacaacctggacaaggccttcgagaagctgcagaccgccatcgagaagctgagaatggagccccagtgggtgcccatcagctgggtgtactag

SEQ ID NO: 88577 - DNA, 1287 bp, synthetic construct
  misc_feature 1..1287: note = Description of Artificial Sequence: Synthetic coding sequence
  source 1..1287: mol_type = other DNA
atgaacaacagcagcatcaacaaccagctgctgcccgtggacgccatcagaatcctgggcatccacaagagagccggcgagcccctgggcgtgaccttcagagtggagaacaacgacctggtgatcgccagaatcctgcacggcggcatgatcgacagacagggcctgctgcacgtgggcgacatcatcaaggaggtgaacggccacgaggtgggcaacaaccccaaggagctgcaggagctgctgaagaacatcagcggcagcgtgaccctgaagatcctgcccagctacagagacaccatcaccccccagcaggtgttcgtgaagtgccacttcgactacaacccctacaacgacaacctgatcccctgcaaggaggccggcctgaagttcagcaagggcgagatcctgcagatcgtgaacagagaggaccccaactggtggcaggccagccacgtgaaggagggcggcagcgccggcctgatccccagccagttcctggaggagaagagaaaggccttcgtgagaagagactgggacaacagcggccccttctgcggcaccatcagcagcaagaagaagaagaagatgatgtacctgaccaccagaaacgccgagttcgacagacacgagatccagatctacgaggaggtggccaagatgccccccttccagagaaagaccctggtgctgatcggcgcccagggcgtgggcagaagaagcctgaagaacagattcatcgtgctgaaccccaccagattcggcaccaccgtgcccttcaccagcagaaagcccagagaggacgagaaggacggccaggcctacaagttcgtgagcagaagcgagatggaggccgacatcaaggccggcaagtacctggagcacggcgagtacgagggcaacctgtacggcaccaagatcgacagcatcctggaggtggtgcagaccggcagaacctgcatcctggacgtgaacccccaggccctgaaggtgctgagaaccagcgagttcatgccctacgtggtgttcatcgccgcccccgagctggagaccctgagagccatgcacaaggccgtggtggacgccggcatcaccaccaagctgctgaccgacagcgacctgaagaagaccgtggacgagagcgccagaatccagagagcctacaaccactacttcgacctgatcatcatcaacgacaacctggacaaggccttcgagaagctgcagaccgccatcgagaagctgagaatggagccccagtgggtgcccatcagctgggtgtactag

SEQ ID NO: 88578 - DNA, 924 bp, synthetic construct
  misc_feature 1..924: note = Description of Artificial Sequence: Synthetic coding sequence
  source 1..924: mol_type = other DNA
atgcagcaggtgctggagaacctgaccgagctgcccagcagcaccggcgccgaggagatcgacctgatcttcctgaagggcatcatggagaaccccatcgtgaagagcctggccaaggcccacgagagactggaggacagcaagctggaggccgtgagcgacaacaacctggagctggtgaacgagatcctggaggacatcacccccctgatcaacgtggacgagaacgtggccgagctggtgggcatcctgaaggagccccacttccagagcctgctggaggcccacgacatcgtggccagcaagtgctacgacagcccccccagcagccccgagatgaacaacagcagcatcaacaaccagctgctgcccgtggacgccatcagaatcctgggcatccacaagagagccggcgagcccctgggcgtgaccttcagagtggagaacaacgacctggtgatcgccagaatcctgcacggcggcatgatcgacagacagggcctgctgcacgtgggcgacatcatcaaggaggtgaacggccacgaggtgggcaacaaccccaaggagctgcaggagctgctgaagaacatcagcggcagcgtgaccctgaagatcctgcccagctacagagacaccatcaccccccagcaggtgttcgtgaagtgccacttcgactacaacccctacaacgacaacctgatcccctgcaaggaggccggcctgaagttcagcaagggcgagatcctgcagatcgtgaacagagaggaccccaactggtggcaggccagccacgtgaaggagggcggcagcgccggcctgatccccagccagttcctggaggagaagagaaaggccttcgtgagaagagactgggacaacagcggccccttctgcggcaccatcagcagcaagaagaagaagtag

SEQ ID NO: 88579 - DNA, 654 bp, synthetic construct
  misc_feature 1..654: note = Description of Artificial Sequence: Synthetic coding sequence
  source 1..654: mol_type = other DNA
atgcagcaggtgctggagaacctgaccgagctgcccagcagcaccggcgccgaggagatcgacctgatcttcctgaagggcatcatggagaaccccatcgtgaagagcctggccaaggcccacgagagactggaggacagcaagctggaggccgtgagcgacaacaacctggagctggtgaacgagatcctggaggacatcacccccctgatcaacgtggacgagaacgtggccgagctggtgggcatcctgaaggagccccacttccagagcctgctggaggcccacgacatcgtggccagcaagtgctacgacagcccccccagcagccccgagatgaacaacagcagcatcaacaaccagctgctgcccgtggacgccatcagaatcctgggcatccacaagagagccggcgagcccctgggcgtgaccttcagagtggagaacaacgacctggtgatcgccagaatcctgcacggcggcatgatcgacagacagggcctgctgcacgtgggcgacatcatcaaggaggtgaacggccacgaggtgggcaacaaccccaaggagctgcaggagctgctgaagaacatcagcggcagcgtgaccctgaagatcctgcccagctacagagacaccatcaccccccagcagtag

SEQ ID NO: 88580 - DNA, 1731 bp, synthetic construct
  misc_feature 1..1731: note = Description of Artificial Sequence: Synthetic coding sequence
  source 1..1731: mol_type = other DNA
atgcccgccctgagcaccggcagcggcagcgacaccggcctgtacgagctgctggccgccctgcccgcccagctgcagccccacgtggacagccaggaggacctgaccttcctgtgggacatgttcggcgagaagagcctgcacagcctggtgaagatccacgagaagctgcactactacgagaagcagagccccgtgcccatcctgcacggcgccgccgccctggccgacgacctggccgaggagctgcagaacaagcccctgaacagcgagatcagagagctgctgaagctgctgagcaagcccaacgtgaaggccctgctgagcgtgcacgacaccgtggcccagaagaactacgaccccgtgctgccccccatgcccgaggacatcgacgacgaggaggacagcgtgaagatcatcagactggtgaagaacagagagcccctgggcgccaccatcaagaaggacgagcagaccggcgccatcatcgtggccagaatcatgagaggcggcgccgccgacagaagcggcctgatccacgtgggcgacgagctgagagaggtgaacggcatccccgtggaggacaagagacccgaggagatcatccagatcctggcccagagccagggcgccatcaccttcaagatcatccccggcagcaaggaggagacccccagcaaggagggcaagatgttcatcaaggccctgttcgactacaaccccaacgaggacaaggccatcccctgcaaggaggccggcctgagcttcaagaagggcgacatcctgcagatcatgagccaggacgacgccacctggtggcaggccaagcacgaggccgacgccaaccccagagccggcctgatccccagcaagcacttccaggagagaagactggccctgagaagacccgagatcctggtgcagcccctgaaggtgagcaacagaaagagcagcggcttcagaaagagcttcagactgagcagaaaggacaagaagaccaacaagagcatgtacgagtgcaagaagagcgaccagtacgacaccgccgacgtgcccacctacgaggaggtgaccccctacagaagacagaccaacgagaagtacagactggtggtgctggtgggccccgtgggcgtgggcctgaacgagctgaagagaaagctgctgatcagcgacacccagcactacggcgtgaccgtgccccacaccaccagagccagaagaagccaggagagcgacggcgtggagtacatcttcatcagcaagcacctgttcgagaccgacgtgcagaacaacaagttcatcgagtacggcgagtacaagaacaactactacggcaccagcatcgacagcgtgagaagcgtgctggccaagaacaaggtgtgcctgctggacgtgcagccccacaccgtgaagcacctgagaaccctggagttcaagccctacgtgatcttcatcaagccccccagcatcgagagactgagagagaccagaaagaacgccaagatcatcagcagcagagacgaccagggcgccgccaagcccttcaccgaggaggacttccaggagatgatcaagagcgcccagatcatggagagccagtacggccacctgttcgacaagatcatcatcaacgacgacctgaccgtggccttcaacgagctgaagaccaccttcgacaagctggagaccgagacccactgggtgcccgtgagctggctgcacagctag

SEQ ID NO: 88581 - DNA, 1731 bp, synthetic construct; identical to SEQ ID NO: 88580
  misc_feature 1..1731: note = Description of Artificial Sequence: Synthetic coding sequence
  source 1..1731: mol_type = other DNA

SEQ ID NO: 88582 - DNA, 1731 bp, synthetic construct; identical to SEQ ID NO: 88580
  misc_feature 1..1731: note = Description of Artificial Sequence: Synthetic coding sequence
  source 1..1731: mol_type = other DNA

SEQ ID NO: 88583 - DNA, 939 bp, synthetic construct
  misc_feature 1..939: note = Description of Artificial Sequence: Synthetic coding sequence
  source 1..939: mol_type = other DNA
atgcccgccctgagcaccggcagcggcagcgacaccggcctgtacgagctgctggccgccctgcccgcccagctgcagccccacgtggacagccaggaggacctgaccttcctgtgggacatgttcggcgagaagagcctgcacagcctggtgaagcacttccaggagagaagactggccctgagaagacccgagatcctggtgcagcccctgaaggtgagcaacagaaagagcagcggcttcagaaagagcttcagactgagcagaaaggacaagaagaccaacaagagcatgtacgagtgcaagaagagcgaccagtacgacaccgccgacgtgcccacctacgaggaggtgaccccctacagaagacagaccaacgagaagtacagactggtggtgctggtgggccccgtgggcgtgggcctgaacgagctgaagagaaagctgctgatcagcgacacccagcactacggcgtgaccgtgccccacaccaccagagccagaagaagccaggagagcgacggcgtggagtacatcttcatcagcaagcacctgttcgagaccgacgtgcagaacaacaagttcatcgagtacggcgagtacaagaacaactactacggcaccagcatcgacagcgtgagaagcgtgctggccaagaacaaggtgtgcctgctggacgtgcagccccacaccgtgaagcacctgagaaccctggagttcaagccctacgtgatcttcatcaagccccccagcatcgagagactgagagagaccagaaagaacgccaagatcatcagcagcagagacgaccagggcgccgccaagcccttcaccgaggaggacttccaggagatgatcaagagcgcccagatcatggagagccagtacggccacctgttcgacaagatcatcatcaacgacgacctgaccgtggcctag

SEQ ID NO: 88584 - DNA, 1125 bp, synthetic construct
  misc_feature 1..1125: note = Description of Artificial Sequence: Synthetic coding sequence
  source 1..1125: mol_type = other DNA
atgcccgaggacatcgacgacgaggaggacagcgtgaagatcatcagactggtgaagaacagagagcccctgggcgccaccatcaagaaggacgagcagaccggcgccatcatcgtggccagaatcatgagaggcggcgccgccgacagaagcggcctgatccacgtgggcgacgagctgagagaggtgaacggcatccccgtggaggacaagagacccgaggagatcatccagatcctggcccagagccagggcgccatcaccttcaagatcatccccggcagcaaggaggagacccccagcaaggagggcaagatgttcatcaaggccctgttcgactacaaccccaacgaggacaaggccatcccctgcaaggaggccggcctgagcttcaagaagggcgacatcctgcagatcatgagccaggacgacgccacctggtggcaggccaagcacgaggccgacgccaaccccagagccggcctgatccccagcaagcacttccaggagagaagactggccctgagaagacccgagatcctggtgcagcccctgaaggtgagcaacagaaagagcagcggcttcagaaagagcttcagactgagcagaaaggacaagaagaccaacaagagcatgtacgagtgcaagaagagcgaccagtacgacaccgccgacgtgcccacctacgaggaggtgaccccctacagaagacagaccaacgagaagtacagactggtggtgctggtgggccccgtgggcgtgggcctgaacgagctgaagagaaagctgctgatcagcgacacccagcactacggcgtgaccgtgccccacaccaccagagccagaagaagccaggagagcgacggcgtggagtacatcttcatcagcaagcacctgttcgagaccgacgtgcagaacaacaagttcatcgagtacggcgagtacaagaacaactactacggcaccagcatcgacagcgtgagaagcgtgctggccaagaacaaggtgtgcctgctggacgtgcagccccacggcccctggttcctgctgcccctgatggccgtgccctggggcgccaagccccccaacgccagaatgacctgcggcagccccctggacctgtag

SEQ ID NO: 88585 - DNA, 1731 bp, synthetic construct; identical to SEQ ID NO: 88580
  misc_feature 1..1731: note = Description of Artificial Sequence: Synthetic coding sequence
  source 1..1731: mol_type = other DNA

SEQ ID NO: 88586 - DNA, 870 bp, synthetic construct
  misc_feature 1..870: note = Description of Artificial Sequence: Synthetic coding sequence
  source 1..870: mol_type = other DNA
atgctgggctggtgcgaggccatcgccagaaacccccacagaatccccaacaacaccagaacccccgagatcagcggcgacctggccgacgccagccagaccagcaccctgaacgagaagagccccggcagaagcgccagcagaagcagcaacatcagcaaggccagcagccccaccaccggcaccgcccccagaagccagagcagactgagcgtgtgccccagcacccaggacatctgcagaatctgccactgcgagggcgacgaggagagccccctgatcaccccctgcagatgcaccggcaccctgagattcgtgcaccagagctgcctgcaccagtggatcaagagcagcgacaccagatgctgcgagctgtgcaagtacgacttcatcatggagaccaagctgaagcccctgagaaagtgggagaagctgcagatgaccaccagcgagagaagaaagatcttctgcagcgtgaccttccacgtgatcgccatcacctgcgtggtgtggagcctgtacgtgctgatcgacagaaccgccgaggagatcaagcagggcaacgacaacggcgtgctggagtggcccttctggaccaagctggtggtggtggccatcggcttcaccggcggcctggtgttcatgtacgtgcagtgcaaggtgtacgtgcagctgtggagaagactgaaggcctacaacagagtgatcttcgtgcagaactgccccgacaccgccaagaagctggagaagaacttcagctgcaacgtgaacaccgacatcaaggacgccgtggtggtgcccgtgccccagaccggcgccaacagcctgcccagcgccgagggcggcccccccgaggtggtgagcgtgtag

SEQ ID NO: 88587 - DNA, 819 bp, synthetic construct
  misc_feature 1..819: note = Description of Artificial Sequence: Synthetic coding sequence
  source 1..819: mol_type = other DNA
atgaccagcagccacgtgtgctgcaacttcctgaacatgtggaagaagagcaagatcagcaccatgtactacctgaaccaggacgccaagctgagcaacctgttcctgcaggccagcagccccaccaccggcaccgcccccagaagccagagcagactgagcgtgtgccccagcacccaggacatctgcagaatctgccactgcgagggcgacgaggagagccccctgatcaccccctgcagatgcaccggcaccctgagattcgtgcaccagagctgcctgcaccagtggatcaagagcagcgacaccagatgctgcgagctgtgcaagtacgacttcatcatggagaccaagctgaagcccctgagaaagtgggagaagctgcagatgaccaccagcgagagaagaaagatcttctgcagcgtgaccttccacgtgatcgccatcacctgcgtggtgtggagcctgtacgtgctgatcgacagaaccgccgaggagatcaagcagggcaacgacaacggcgtgctggagtggcccttctggaccaagctggtggtggtggccatcggcttcaccggcggcctggtgttcatgtacgtgcagtgcaaggtgtacgtgcagctgtggagaagactgaaggcctacaacagagtgatcttcgtgcagaactgccccgacaccgccaagaagctggagaagaacttcagctgcaacgtgaacaccgacatcaaggacgccgtggtggtgcccgtgccccagaccggcgccaacagcctgcccagcgccgagggcggcccccccgaggtggtgagcgtgtag

SEQ ID NO: 88588 - DNA, 870 bp, synthetic construct; identical to SEQ ID NO: 88586
  misc_feature 1..870: note = Description of Artificial Sequence: Synthetic coding sequence
  source 1..870: mol_type = other DNA

SEQ ID NO: 88589 - DNA, 426 bp, synthetic construct
  misc_feature 1..426: note = Description of Artificial Sequence: Synthetic coding sequence
  source 1..426: mol_type = other DNA
atgctgggctggtgcgaggccatcgccagaaacccccacagaatccccaacaacaccagaacccccgagatcagcggcgacctggccgacgccagccagaccagcaccctgaacgagaagagccccggcagaagcgccagcagaagcagcaacatcagcaaggccagcagccccaccaccggcaccgcccccagaagccagagcagactgagcgtgtgccccagcacccaggacatctgcagaatctgccactgcgagggcgacgaggagagccccctgatcaccccctgcagatgcaccggcaccctgagattcgtgcaccagagctgcctgcaccagtggatcaagagcagcgacaccagatgctgcgagctgtgcaagtacgacttcatcatggagaccaagctgaagcccctgagaaagtag

SEQ ID NO: 88590 - DNA, 2427 bp, synthetic construct
  misc_feature 1..2427: note = Description of Artificial Sequence: Synthetic coding sequence
  source 1..2427: mol_type = other DNA
atgctgcacgacgccagagacagacagaagttcttcagcgacgtgcagtacctgagagacatgcagcacaaggtggacagcgagtaccaggcctgcctgagaagacaggagtacagaagagaccccaacgagaagaagagagaccagttctggggccaggagaccagcttcgagagaagcagattcagcagcagaagcagcagcaagcagagcagcagcgaggaggacgccctgaccgagcccagaagcagcatcaagatcagcgccttcaagtgcgacagcaagctgcccgccatcgaccagaccagcgtgaagcagaagcacaagagcaccatgaccgtgagaaaggccgagaaggtggaccccagcgagcccagccccgccgaccaggcccccatggtgctgctgagaaagagaaagcccaacctgagaagattcaccgtgagccccgagagccacagccccagagccagcggcgacagaagcagacagaagcagcagtggcccgccaaggtgcccgtgcccagaggcgccgaccaggtggtgcagcaggagggcctgatgtgcaacaccaagctgaagagacccaaccaggagagaagaaacctggtgcccagcagccagcccatgaccgagaacgcccccgacagagccaagaagggcgaccccagcgcccccagccagagcgagctgcaccccgccctgagccaggccttccagggcaagaacagcccccaggtgctgagcgagttcagcggcccccccctgacccccaccaccgtgggcggccccagaaaggccagcttcagattcagagacgaggacttctacagcatcctgagcctgaacagcagaagagagagcgacgacaccgaggaggagacccagagcgaggagtgcctgtgggtgggcgtgagaagcccctgcagccccagccaccacaagagaagcagattcggcggcaccagcaccccccaggccaagaacaagaacttcgaggagaacgccgagaactgcagaggccacagcagcagaagaagcgagcccagccacggcagcctgagaatcagcaacgccatggagcccgccaccgagagacccagcgccggccagagactgagccaggaccccggcctgcccgacagagagagcgccaccgagaaggacagaggcggcagcgagaacgccaagaagagccccctgagctgggacaccaagagcgagcccagacaggaggtgggcgtgaacgccgagaacgtgtggagcgactgcatcagcgtggagcacagacccggcacccacgacagcgagggctactggaaggactacctgaacagcagccagaacagcctggactacttcatcagcggcagacccatcagccccagaagcagcgtgaacagcagctacaacccccccgccagcttcatgcacagcgccctgagagacgacatccccgtggacctgagcatgagcagcaccagcgtgcacagcagcgacagcgagggcaacagcggcttccacgtgtgccagcccctgagccccatcagaaacagaacccccttcgccagcgccgagaaccacaactacttccccgtgaacagcgcccacgagttcgccgtgagagaggccgaggacaccaccctgaccagccagccccagggcgcccccctgtacaccgacctgctgctgaacccccagggcaacctgagcctggtggacagcagcagcagcagccccagcagaatgaacagcgagggccacctgcacgtgagcggcagcctgcaggagaacacccccttcaccttcttcgccgtgagccacttccccaaccagaacgacaacggcagcagaatggccgccagcggcttcaccgacgagaaggagaccagcaagatcaaggccgaccccgagaagctgaagaagctgcaggagagcctgctggaggaggacagcgaggaggagggcgacctgtgcagaatctgccagatcgccggcggcagccccagcaaccccctgctggagccctgcggctgcgtgggcagcctgcagttcgtgcaccaggagtgcctgaagaagtggctgaaggtgaagatcaccagcggcgccgacctgggcgccgtgaagacctgcgagatgtgcaagcagggcctgctggtggacctgggcgacttcaacatgatcgagttctaccagaagcaccagcagagccaggcccagaacgagctgatgaacagcggcctgtacctggtgctgctgctgcacctgtacgagcagagattcgccgagctgatgagactgaaccacaaccaggtggagagagagagactgagcagaaactacccccagcccagaaccgaggagaacgagaacagcgagctgggcgacggcaacgagggcagcatcagccagagccaggtggtgtag

SEQ ID NO: 88591 - DNA, 2427 bp, synthetic construct; identical to SEQ ID NO: 88590
  misc_feature 1..2427: note = Description of Artificial Sequence: Synthetic coding sequence
  source 1..2427: mol_type = other DNA

SEQ ID NO: 88592 - DNA, 2400 bp, synthetic construct
  misc_feature 1..2400: note = Description of Artificial Sequence: Synthetic coding sequence
  source 1..2400: mol_type = other DNA
atgctgcacgacgccagagacagacagaagttcttcagcgacgtgcagtacctgagagacatgcagcacaaggtggacagcgagtaccaggcctgcctgagaagacaggagtacagaagagaccccaacgagaagaagagagaccagttctggggccaggagaccagcttcgagagaagcagattcagcagcagaagcagcagcaagcagagcagcagcgaggaggacgccctgaccgagcccagaagcagcatcaagatcagcgccttcaagtgcgacagcaagctgcccgccatcgaccagaccagcgtgaagcagaagcacaagagcaccatgaccgtgagaaaggccgagaaggtggaccccagcgagcccagccccgaccaggcccccatggtgctgctgagaaagagaaagcccaacctgagaagattcaccgtgagccccgagagccacagccccagagccagcggcgacagaagcagacagaagcagcagtggcccgccaaggtgcccgtgcccagaggcgccgaccaggtggtgcagcaggagggcctgatgtgcaacaccaagctgaagagacccaaccaggagagaagaaacctggtgcccagcagccagcccatgaccgagaacgcccccgacagagccaagaagggcgaccccagcgcccccagccagagcgagctgcaccccgccctgagccaggccttccagggcaagaacagcccccaggtgctgagcgagttcagcggcccccccctgacccccaccaccgtgggcggccccagaaaggccagcttcagattcagagacgaggacttctacagcatcctgagcctgaacagcagaagagagagcgacgacaccgaggaggagacccagagcgaggagtgcctgtgggtgggcgtgagaagcccctgcagccccagccaccacaagagaagcagattcggcggcaccagcaccccccaggccaagaacaagaacttcgaggagaacgccgagaactgcagaggccacagcagcagaagaagcgagcccagccacggcagcctgagaatcagcaacgccatggagcccgccaccgagagacccagcgccggccagagactgagccaggaccccggcctgcccgacagagagagcgccaccgagaaggacagaggcggcagcgagaacgccaagaagagccccctgagctgggacaccaagagcgagcccagacaggaggtgggcgtgaacgccgagaacgtgtggagcgactgcatcagcgtggagcacagacccggcacccacgacagcgagggctactggaaggactacctgaacagcagccagaacagcctggactacttcatcagcggcagacccatcagccccagaagcagcgtgaacagcagctacaacccccccgccagcttcatgcacagcgccctgagagacgacatccccgtggacctgagcatgagcagcaccagcgtgcacagcagcgacagcgagggcaacagcggcttccacgtgtgccagcccctgagccccatcagaaacagaacccccttcgccagcgccgagaaccacaactacttccccgtgaacagcgcccacgagttcgccgtgagagaggccgaggacaccaccctgaccagccagccccagggcgcccccctgtacaccgacctgctgctgaacccccagggcaacctgagcctggtggacagcagcagcagcagccccagcagaatgaacagcgagggccacctgcacgtgagcggcagcctgcaggagaacacccccttcaccttcttcgccgtgagccacttccccaaccagaacgacaacggcagcagaatggccgccagcggcttcaccgacgagaaggagaccagcaagatcaaggccgaccccgagaagctgaagaagctgcaggagagcctgctggaggaggacagcgaggaggagggcgacctgtgcagaatctgccagatcgccggcggcagccccagcaaccccctgctggagccctgcggctgcgtgggcagcctgcagttcgtgcaccaggagtgcctgaagaagtggctgaaggtgaagatcaccagcggcgccgacctgggcgccgtgaagacctgcgagatgtgcaagcagggcctgctggtggacctgggcgacttcaacatgatcgagttctaccagaagcaccagcagagccaggcccagaacgagctgatgaacagcggcctgtacctggtgctgctgctgcacctgtacgagcagagattcgccgagctgatgagactgaaccacaaccaggtggagagagagagactgagcagaaactacccccagcccagaaccgaggagaacgagagcagattctggggccccgtgctgcccttctag

SEQ ID NO: 88593 - DNA, 1209 bp, synthetic construct
  misc_feature 1..1209: note = Description of Artificial Sequence: Synthetic coding sequence
  source 1..1209: mol_type = other DNA
atgagcttcgagggcggccacggcggcagcagatgcagaggcgccgagagcggcgacgccgagccccccccccagcccccccccccccccccccccacccccccccccggcgagcccgcccccgtgcccgccgcccccagatacctgccccccctgcccgccagccccgagacccccgagagagccgccggccccagcgagcccctgggcgaggtggcccccagatgcagaggcgccgacgagctgccccccccccccctgcccctgcagcccgccggccaggaggtggccgccgccggcgacagcggcgagggccccagaagactgcccgaggccgccgccgccaagggcggccccggcgagagcgaggccggcgccggcggcgagagagagagaagaggcgccggcgaccagcccgagaccagaagcgtgtgcagcagcagaagcagcagcagcggcggcggcgaccagagagccggccaccagcaccagcaccaccagcccatctgcaagatctgcttccagggcgccgagcagggcgagctgctgaacccctgcagatgcgacggcagcgtgagatacacccaccagctgtgcctgctgaagtggatcagcgagagaggcagctggacctgcgagctgtgctgctacagataccacgtgatcgccatcaagatgaagcagccctgccagtggcagagcatcagcatcaccctggtggagaaggtgcagatgatcgccgtgatcctgggcagcctgttcctgatcgccagcgtgacctggctgctgtggagcgccttcagcccctacgccgtgtggcagagaaaggacatcctgttccagatctgctacggcatgtacggcttcatggacctggtgtgcatcggcctgatcgtgcacgagggcgccgccgtgtacagagtgttcaagagatggagagccgtgaacctgcactgggacgtgctgaactacgacaaggccaccgacatcgaggagagcagcagaggcgagagcagcaccagcagaaccctgtggctgcccctgaccgccctgagaaacagaaacctggtgcaccccacccagctgaccagccccagattccagtgcggctacgtgctgctgcacctgttcaacagaatgagaccccacgaggacctgagcgaggacaacagcagcggcgaggtggtgatgagagtgaccagcgtgtag

SEQ ID NO: 88594 - DNA, 1818 bp, synthetic construct
  misc_feature 1..1818: note = Description of Artificial Sequence: Synthetic coding sequence
  source 1..1818: mol_type = other DNA
atggccctgagaaagggcggcctggccctggccctgctgctgctgagctgggtggccctgggccccagaagcctggagggcgccgaccccggcacccccggcgaggccgagggccccgcctgccccgccgcctgcgtgtgcagctacgacgacgacgccgacgagctgagcgtgttctgcagcagcagaaacctgaccagactgcccgacggcgtgcccggcggcacccaggccctgtggctggacggcaacaacctgagcagcgtgccccccgccgccttccagaacctgagcagcctgggcttcctgaacctgcagggcggccagctgggcagcctggagccccaggccctgctgggcctggagaacctgtgccacctgcacctggagagaaaccagctgagaagcctggccctgggcaccttcgcccacacccccgccctggccagcctgggcctgagcaacaacagactgagcagactggaggacggcctgttcgagggcctgggcagcctgtgggacctgaacctgggctggaacagcctggccgtgctgcccgacgccgccttcagaggcctgggcagcctgagagagctggtgctggccggcaacagactggcctacctgcagcccgccctgttcagcggcctggccgagctgagagagctggacctgagcagaaacgccctgagagccatcaaggccaacgtgttcgtgcagctgcccagactgcagaagctgtacctggacagaaacctgatcgccgccgtggcccccggcgccttcctgggcctgaaggccctgagatggctggacctgagccacaacagagtggccggcctgctggaggacaccttccccggcctgctgggcctgagagtgctgagactgagccacaacgccatcgccagcctgagacccagaaccttcaaggacctgcacttcctggaggagctgcagctgggccacaacagaatcagacagctggccgagagaagcttcgagggcctgggccagctggaggtgctgaccctggaccacaaccagctgcaggaggtgaaggccggcgccttcctgggcctgaccaacgtggccgtgatgaacctgagcggcaactgcctgagaaacctgcccgagcaggtgttcagaggcctgggcaagctgcacagcctgcacctggagggcagctgcctgggcagaatcagaccccacaccttcaccggcctgagcggcctgagaagactgttcctgaaggacaacggcctggtgggcatcgaggagcagagcctgtggggcctggccgagctgctggagctggacctgaccagcaaccagctgacccacctgccccacagactgttccagggcctgggcaagctggagtacctgctgctgagcagaaacagactggccgagctgcccgccgacgccctgggccccctgcagagagccttctggctggacgtgagccacaacagactggaggccctgcccaacagcctgctggcccccctgggcagactgagatacctgagcctgagaaacaacagcctgagaaccttcaccccccagccccccggcctggagagactgtggctggagggcaacccctgggactgcggctgccccctgaaggccctgagagacttcgccctgcagaaccccagcgccgtgcccagattcgtgcaggccatctgcgagggcgacgactgccagccccccgcctacacctacaacaacatcacctgcgccagcccccccgaggtggtgggcctggacctgagagacctgagcgaggcccacttcgccccctgctag

SEQ ID NO: 88595 - DNA, 531 bp, synthetic construct
  misc_feature 1..531: note = Description of Artificial Sequence: Synthetic coding sequence
  source 1..531: mol_type = other DNA
atgaccaccggcgactgctgccacctgcccggcagcctgtgcgactgcagcggcagccccgccttcagcaaggtggtggaggccaccggcctgggccccccccagtacgtggcccaggtgaccagcagagacggcagactgctgagcaccgtgatcagagccctggacacccccagcgacggccccttctgcagaatctgccacgagggcgccaacggcgagtgcctgctgagcccctgcggctgcaccggcaccctgggcgccgtgcacaagagctgcctggagaagtggctgagcagcagcaacaccagctactgcgagctgtgccacaccgagttcgccgtggagaagagacccagacccctgaccgaggtgagcttcagataccactgccagctgtacagcgagtggagaaagaccaaccagaaggtgagactgaagatcagagaggccgacagccccgagggcccccagcacagccccctggccgccggcctgctgaagaaggtggccgaggagacccccgtgtag

SEQ ID NO: 88596 - DNA, 741 bp, synthetic construct
  misc_feature 1..741: note = Description of Artificial Sequence: Synthetic coding sequence
  source 1..741: mol_type = other DNA
atgaccaccggcgactgctgccacctgcccggcagcctgtgcgactgcagcggcagccccgccttcagcaaggtggtggaggccaccggcctgggccccccccagtacgtggcccaggtgaccagcagagacggcagactgctgagcaccgtgatcagagccctggacacccccagcgacggccccttctgcagaatctgccacgagggcgccaacggcgagtgcctgctgagcccctgcggctgcaccggcaccctgggcgccgtgcacaagagctgcctggagaagtggctgagcagcagcaacaccagctactgcgagctgtgccacaccgagttcgccgtggagaagagacccagacccctgaccgagtggctgaaggaccccggccccagaaccgagaagagaaccctgtgctgcgacatggtgtgcttcctgttcatcacccccctggccgccatcagcggctggctgtgcctgagaggcgcccaggaccacctgagactgcacagccagctggaggccgtgggcctgatcgccctgaccatcgccctgttcaccatctacgtgctgtggaccctggtgagcttcagataccactgccagctgtacagcgagtggagaaagaccaaccagaaggtgagactgaagatcagagaggccgacagccccgagggcccccagcacagccccctggccgccggcctgctgaagaaggtggccgaggagacccccgtgtag

SEQ ID NO: 88597 - DNA, 762 bp, synthetic construct
  misc_feature 1..762: note = Description of Artificial Sequence: Synthetic coding sequence
  source 1..762: mol_type = other DNA
atgaccaccagcagatgcagccacctgcccgaggtgctgcccgactgcaccagcagcgccgcccccgtggtgaagaccgtggaggactgcggcagcctggtgaacggccagccccagtacgtgatgcaggtgagcgccaaggacggccagctgctgagcaccgtggtgagaaccctggccacccagagccccttcaacgacagacccatgtgcagaatctgccacgagggcagcagccaggaggacctgctgagcccctgcgagtgcaccggcaccctgggcaccatccacagaagctgcctggagcactggctgagcagcagcaacaccagctactgcgagctgtgccacttcagattcgccgtggagagaaagcccagacccctggtggagtggctgagaaaccccggcccccagcacgagaagagaaccctgttcggcgacatggtgtgcttcctgttcatcacccccctggccaccatcagcggctggctgtgcctgagaggcgccgtggaccacctgcacttcagcagcagactggaggccgtgggcctgatcgccctgaccgtggccctgttcaccatctacctgttctggaccctggtgagcttcagataccactgcagactgtacaacgagtggagaagaaccaaccagagagtgatcctgctgatccccaagagcgtgaacgtgcccagcaaccagcccagcctgctgggcctgcacagcgtgaagagaaacagcaaggagaccgtggtgtag

SEQ ID NO: 88598 - DNA, 1233 bp, synthetic construct
  misc_feature 1..1233: note = Description of Artificial Sequence: Synthetic coding sequence
  source 1..1233: mol_type = other DNA
atgctgatgcccctgtgcggcctgctgtggtggtggtggtgctgctgcagcggctggtactgctacggcctgtgcgcccccgccccccagatgctgagacaccagggcctgctgaagtgcagatgcagaatgctgttcaacgacctgaaggtgttcctgctgagaagacccccccaggcccccctgcccatgcacggcgacccccagccccccggcctggccgccaacaacaccctgcccgccctgggcgccggcggctgggccggctggagaggccccagagaggtggtgggcagagagcccccccccgtgcccccccccccccccctgccccccagcagcgtggaggacgactggggcggccccgccaccgagccccccgccagcctgctgagcagcgccagcagcgacgacttctgcaaggagaagaccgaggacagatacagcctgggcagcagcctggacagcggcatgagaacccccctgtgcagaatctgcttccagggccccgagcagggcgagctgctgagcccctgcagatgcgacggcagcgtgaagtgcacccaccagccctgcctgatcaagtggatcagcgagagaggctgctggagctgcgagctgtgctactacaagtaccacgtgatcgccatcagcaccaagaaccccctgcagtggcaggccatcagcctgaccgtgatcgagaaggtgcaggtggccgccgccatcctgggcagcctgttcctgatcgccagcatcagctggctgatctggagcaccttcagccccagcgccagatggcagagacaggacctgctgttccagatctgctacggcatgtacggcttcatggacgtggtgtgcatcggcctgatcatccacgagggccccagcgtgtacagaatcttcaagagatggcaggccgtgaaccagcagtggaaggtgctgaactacgacaagaccaaggacctggaggaccagaaggccggcggcagaaccaaccccagaaccagcagcagcacccaggccaacatccccagcagcgaggaggagaccgccggcacccccgcccccgagcagggccccgcccaggccgccggccaccccagcggccccctgagccaccaccactgcgcctacaccatcctgcacatcctgagccacctgagaccccacgagcagagaagcccccccggcagcagcagagagctggtgatgagagtgaccaccgtgtag

SEQ ID NO: 88599 - DNA, 837 bp, synthetic construct
  misc_feature 1..837: note = Description of Artificial Sequence: Synthetic coding sequence
  source 1..837: mol_type = other DNA
atgcccgaccaggccctgcagcagatgctggacagaagctgctgggtgtgcttcgccaccgacgaggacgacagaaccgccgagtgggtgagaccctgcagatgcagaggcagcaccaagtgggtgcaccaggcctgcctgcagagatgggtggacgagaagcagagaggcaacagcaccgccagagtggcctgcccccagtgcaacgccgagtacctgatcgtgttccccaagctgggccccgtggtgtacgtgctggacctggccgacagactgatcagcaaggcctgccccttcgccgccgccggcatcatggtgggcagcatctactggaccgccgtgacctacggcgccgtgaccgtgatgcaggtggtgggccacaaggagggcctggacgtgatggagagagccgaccccctgttcctgctgatcggcctgcccaccatccccgtgatgctgatcctgggcaagatgatcagatgggaggactacgtgctgagactgtggagaaagtacagcaacaagctgcagatcctgaacagcatcttccccggcatcggctgccccgtgcccagaatccccgccgaggccaaccccctggccgaccacgtgagcgccaccagaatcctgtgcggcgccctggtgttccccaccatcgccaccatcgtgggcaagctgatgttcagcagcgtgaacagcaacctgcagagaaccatcctgggcggcatcgccttcgtggccatcaagggcgccttcaaggtgtacttcaagcagcagcagtacctgagacaggcccacagaaagatcctgaactaccccgagcaggaggaggcctag

SEQ ID NO: 88600 - DNA, 2733 bp, synthetic construct
  misc_feature 1..2733: note = Description of Artificial Sequence: Synthetic coding sequence
  source 1..2733: mol_type = other DNA
atggacaccgccgaggaggacatctgcagagtgtgcagaagcgagggcacccccgagaagcccctgtaccacccctgcgtgtgcaccggcagcatcaagttcatccaccaggagtgcctggtgcagtggctgaagcacagcagaaaggagtactgcgagctgtgcaagcacagattcgccttcacccccatctacagccccgacatgcccagcagactgcccatccaggacatcttcgccggcctggtgaccagcatcggcaccgccatcagatactggttccactacaccctggtggccttcgcctggctgggcgtggtgcccctgaccgcctgcagaatctacaagtgcctgttcaccggcagcgtgagcagcctgctgaccctgcccctggacatgctgagcaccgagaacctgctggccgactgcctgcagggctgcttcgtggtgacctgcaccctgtgcgccttcatcagcctggtgtggctgagagagcagatcgtgcacggcggcgcccccatctggctggagcacgccgccccccccttcaacgccgccggccaccaccagaacgaggcccccgccggcggcaacggcgccgagaacgtggccgccgaccagcccgccaacccccccgccgagaacgccgtggtgggcgagaaccccgacgcccaggacgaccaggccgaggaggaggaggaggacaacgaggaggaggacgacgccggcgtggaggacgccgccgacgccaacaacggcgcccaggacgacatgaactggaacgccctggagtgggacagagccgccgaggagctgacctgggagagaatgctgggcctggacggcagcctggtgttcctggagcacgtgttctgggtggtgagcctgaacaccctgttcatcctggtgttcgccttctgcccctaccacatcggccacttcagcctggtgggcctgggcttcgaggagcacgtgcaggccagccacttcgagggcctgatcaccaccatcgtgggctacatcctgctggccatcaccctgatcatctgccacggcctggccaccctggtgaagttccacagaagcagaagactgctgggcgtgtgctacatcgtggtgaaggtgagcctgctggtggtggtggagatcggcgtgttccccctgatctgcggctggtggctggacatctgcagcctggagatgttcgacgccaccctgaaggacagagagctgagcttccagagcgcccccggcaccaccatgttcctgcactggctggtgggcatggtgtacgtgttctacttcgccagcttcatcctgctgctgagagaggtgctgagacccggcgtgctgtggttcctgagaaacctgaacgaccccgacttcaaccccgtgcaggagatgatccacctgcccatctacagacacctgagaagattcatcctgagcgtgatcgtgttcggcagcatcgtgctgctgatgctgtggctgcccatcagaatcatcaagagcgtgctgcccaacttcctgccctacaacgtgatgctgtacagcgacgcccccgtgagcgagctgagcctggagctgctgctgctgcaggtggtgctgcccgccctgctggagcagggccacaccagacagtggctgaagggcctggtgagagcctggaccgtgaccgccggctacctgctggacctgcacagctacctgctgggcgaccaggaggagaacgagaacagcgccaaccagcaggtgaacaacaaccagcacgccagaaacaacaacgccatccccgtggtgggcgagggcctgcacgccgcccaccaggccatcctgcagcagggcggccccgtgggcttccagccctacagaagacccctgaacttccccctgagaatcttcctgctgatcgtgttcatgtgcatcaccctgctgatcgccagcctgatctgcctgaccctgcccgtgttcgccggcagatggctgatgagcttctggaccggcaccgccaagatccacgagctgtacaccgccgcctgcggcctgtacgtgtgctggctgaccatcagagccgtgaccgtgatggtggcctggatgccccagggcagaagagtgatcttccagaaggtgaaggagtggagcctgatgatcatgaagaccctgatcgtggccgtgctgctggccggcgtggtgcccctgctgctgggcctgctgttcgagctggtgatcgtggcccccctgagagtgcccctggaccagacccccctgttctacccctggcaggactgggccctgggcgtgctgcacgccaagatcatcgccgccatcaccctgatgggcccccagtggtggctgaagaccgtgatcgagcaggtgtacgccaacggcatcagaaacatcgacctgcactacatcgtgagaaagctggccgcccccgtgatcagcgtgctgctgctgagcctgtgcgtgccctacgtgatcgccagcggcgtggtgcccctgctgggcgtgaccgccgagatgcagaacctggtgcacagaagaatctaccccttcctgctgatggtggtggtgctgatggccatcctgagcttccaggtgagacagttcaagagactgtacgagcacatcaagaacgacaagtacctggtgggccagagactggtgaactacgagagaaagagcggcaagcagggcagcagccccccccccccccagagcagccaggagtag

SEQ ID NO: 88601 - DNA, 2115 bp, synthetic construct
  misc_feature 1..2115: note = Description of Artificial Sequence: Synthetic coding sequence
  source 1..2115: mol_type = other DNA
atggagagcaagcccagcagaatccccagaagaatcagcgtgcagcccagcagcagcctgagcgccagaatgatgagcggcagcagaggcagcagcctgaacgacacctaccacagcagagacagcagcttcagactggacagcgagtaccagagcaccagcgccagcgccagcgccagccccttccagagcgcctggtacagcgagagcgagatcacccagggcgccagaagcagaagccagaaccagcagagagaccacgacagcaagagacccaagctgagctgcaccaactgcaccaccagcgccggcagaaacgtgggcaacggcctgaacaccctgagcgacagcagctggagacacagccaggtgcccagaagcagcagcatggtgctgggcagcttcggcaccgacctgatgagagagagaagagacctggagagaagaaccgacagcagcatcagcaacctgatggactacagccacagaagcggcgacttcaccaccagcagctacgtgcaggacagagtgcccagctacagccagggcgccagacccaaggagaacagcatgagcaccctgcagctgaacaccagcagcaccaaccaccagctgcccagcgagcaccagaccatcctgagcagcagagacagcagaaacagcctgagaagcaacttcagcagcagagagagcgagagcagcagaagcaacacccagcccggcttcagctacagcagcagcagagacgaggcccccatcatcagcaacagcgagagagtggtgagcagccagagacccttccaggagagcagcgacaacgagggcagaagaaccaccagaagactgctgagcagaatcgccagcagcatgagcagcaccttcttcagcagaagaagcagccaggacagcctgaacaccagaagcctgaacagcgagaacagctacgtgagccccagaatcctgaccgccagccagagcagaagcaacgtgcccagcgccagcgaggtgcccgacaacagagccagcgaggccagccagggcttcagattcctgagaagaagatggggcctgagcagcctgagccacaaccacagcagcgagagcgacagcgagaacttcaaccaggagagcgagggcagaaacaccggcccctggctgagcagcagcctgagaaacagatgcacccccctgttcagcagaagaagaagagagggcagagacgagagcagcagaatccccaccagcgacaccagcagcagaagccacatcttcagaagagagagcaacgaggtggtgcacctggaggcccagaacgaccccctgggcgccgccgccaacagaccccaggccagcgccgccagcagcagcgccaccaccggcggcagcaccagcgacagcgcccagggcggcagaaacaccggcatcagcggcatcctgcccggcagcctgttcagattcgccgtgccccccgccctgggcagcaacctgaccgacaacgtgatgatcaccgtggacatcatccccagcggctggaacagcgccgacggcaagagcgacaagaccaagagcgcccccagcagagaccccgagagactgcagaagatcaaggagagcctgctgctggaggacagcgaggaggaggagggcgacctgtgcagaatctgccagatggccgccgccagcagcagcaacctgctgatcgagccctgcaagtgcaccggcagcctgcagtacgtgcaccaggactgcatgaagaagtggctgcaggccaagatcaacagcggcagcagcctggaggccgtgaccacctgcgagctgtgcaaggagaagctggagctgaacctggaggacttcgacatccacgagctgcacagagcccacgccaacgagcaggccgagtacgagttcatcagcagcggcctgtacctggtggtgctgctgcacctgtgcgagcagagcttcagcgacatgatgggcaacaccaacgagcccagcaccagagtgagattcatcaacctggccagaaccctgcaggcccacatggaggacctggagaccagcgaggacgacagcgaggaggacggcgaccacaacagaaccttcgacatcgcctag

SEQ ID NO: 88602 - DNA, 2115 bp, synthetic construct; identical to SEQ ID NO: 88601
  misc_feature 1..2115: note = Description of Artificial Sequence: Synthetic coding sequence
  source 1..2115: mol_type = other DNA

SEQ ID NO: 88603 - DNA, 306 bp, synthetic construct
  misc_feature 1..306: note = Description of Artificial Sequence: Synthetic coding sequence
  source 1..306: mol_type = other DNA
atggagagcaagcccagcagaatccccagaagaatcagcgtgcagcccagcagcagcctgagcgccagaatgatgagcggcagcagaggcagcagcctgaacgacacctaccacagcagagacagcagcttcagactggacagcgagtaccagagcaccagcgccagcgccagcgccagccccttccagagcgcctggtacagcgagagcgagatcacccagggcgccagaagcagaagccagaaccagcagagagaccacgacagcaagagacccaagctgagctgcaccaactgcaccacctag

SEQ ID NO: 88604 - DNA, 1908 bp, synthetic construct
  misc_feature 1..1908: note = Description of Artificial Sequence: Synthetic coding sequence
  source 1..1908: mol_type = other DNA
atggagagcaagcccagcagaatccccagaagaatcagcgtgcagcccagcagcagcctgagcgccagaatgatgagcggcagcagaggcagcagcctgaacgacacctaccacagcagagacagcagcttcagactggacagcgagtaccagagcaccagcgccagcgccagcgccagccccttccagagcgcctggtacagcgagagcgagatcacccagggcgccagaagcagaagccagaaccagcagagagaccacgacagcaagagacccaagctgagctgcaccaactgcaccaccagcgccggcagaaacgtgggcaacggcctgaacaccctgagcgacgtgcaggacagagtgcccagctacagccagggcgccagacccaaggagaacagcatgagcaccctgcagctgaacaccagcagcaccaaccaccagctgcccagcgagcaccagaccatcctgagcagcagagacagcagaaacagcctgagaagcaacttcagcagcagagagagcgagagcagcagaagcaacacccagcccggcttcagctacagcagcagcagagacgaggcccccatcatcagcaacagcgagagagtggtgagcagccagagacccttccaggagagcagcgacaacgagggcagaagaaccaccagaagactgctgagcagaatcgccagcagcatgagcagcaccttcttcagcagaagaagcagccaggacagcctgaacaccagaagcctgaacagcgagaacagctacgtgagccccagaatcctgaccgccagccagagcagaagcaacgtgcccagcgccagcgaggtgcccgacaacagagccagcgaggccagccagggcttcagattcctgagaagaagatggggcctgagcagcctgagccacaaccacagcagcgagagcgacagcgagaacttcaaccaggagagcgagggcagaaacaccggcccctggctgagcagcagcctgagaaacagatgcacccccctgttcagcagaagaagaagagagggcagagacgagagcagcagaatccccaccagcgacaccagcagcagaagccacatcttcagaagagagagcaacgaggtggtgcacctggaggcccagaacgaccccctgggcgccgccgccaacagaccccaggccagcgccgccagcagcagcgccaccaccggcggcagcaccagcgacagcgcccagggcggcagaaacaccggcatcagcggcatcctgcccggcagcctgttcagattcgccgtgccccccgccctgggcagcaacctgaccgacaacgtgatgatcaccgtggacatcatccccagcggctggaacagcgccgacggcaagagcgacaagaccaagagcgcccccagcagagaccccgagagactgcagaagatcaaggagagcctgctgctggaggacagcgaggaggaggagggcgacctgtgcagaatctgccagatggccgccgccagcagcagcaacctgctgatcgagccctgcaagtgcaccggcagcctgcagtacgtgcaccaggactgcatgaagaagtggctgcaggccaagatcaacagcggcagcagcctggaggccgtgaccacctgcgagctgtgcaaggagaagctggagctgaacctggaggacttcgacatccacgagctgcacagagcccacgccaacgagcaggccgagtacgagttcatcagcagcggcctgtacctggtggtgctgctgcacctgtgcgagcagagcttcagcgacatgatgggcaacaccaacgagcccagcaccagagtgagactgcagagaatgatccccaagaagaccgagaccatcaccggccacctgatcctgcccaacttcatctag

SEQ ID NO: 88605 - DNA, 876 bp, synthetic construct
  misc_feature 1..876: note = Description of Artificial Sequence: Synthetic coding sequence
  source 1..876: mol_type = other DNA
atgagcatgcccctgcaccagatcagcgccatccccagccaggacgccatcagcgccagagtgtacagaagcaagaccaaggagaaggagagagaggagcagaacgagaagaccctgggccacttcatgagccacagcagcaacatcagcaaggccggcagcccccccagcgccagcgcccccgcccccgtgagcagcttcagcagaaccagcatcacccccagcagccaggacatctgcagaatctgccactgcgagggcgacgacgagagccccctgatcaccccctgccactgcaccggcagcctgcacttcgtgcaccaggcctgcctgcagcagtggatcaagagcagcgacaccagatgctgcgagctgtgcaagtacgagttcatcatggagaccaagctgaagcccctgagaaagtgggagaagctgcagatgaccagcagcgagagaagaaagatcatgtgcagcgtgaccttccacgtgatcgccatcacctgcgtggtgtggagcctgtacgtgctgatcgacagaaccgccgaggagatcaagcagggccaggccaccggcatcctggagtggcccttctggaccaagctggtggtggtggccatcggcttcaccggcggcctgctgttcatgtacgtgcagtgcaaggtgtacgtgcagctgtggaagagactgaaggcctacaacagagtgatctacgtgcagaactgccccgagaccagcaagaagaacatcttcgagaagagccccctgaccgagcccaacttcgagaacaagcacggctacggcatctgccacagcgacaccaacagcagctgctgcaccgagcccgaggacaccggcgccgagatcatccacgtgtag

SEQ ID NO: 88606 - DNA, 876 bp, synthetic construct; identical to SEQ ID NO: 88605
  misc_feature 1..876: note = Description of Artificial Sequence: Synthetic coding sequence
  source 1..876: mol_type = other DNA

SEQ ID NO: 88607 - DNA, 876 bp, synthetic construct; identical to SEQ ID NO: 88605
  misc_feature 1..876: note = Description of Artificial Sequence: Synthetic coding sequence
  source 1..876: mol_type = other DNA

SEQ ID NO: 88608 - DNA, 1371 bp, synthetic construct
  misc_feature 1..1371: note = Description of Artificial Sequence: Synthetic coding sequence
  source 1..1371: mol_type = other DNA
tgaatctgcaaggacaccctgcaggccagcaagagaaacagcttcggcagcgagtgggcccaggccctgaagcccgccaagaacaccaaggccagaagaaccctgaagttcagcagaagcctgaacgacgtgggcgagaaggcccaggacaccagcgagagcttcgcctacgtggagagaacctgcagcgagggcaagctgatcctgccccaggacacctgcctgagaaccaacagattccaccacaaggagaagagaaccctgaaccacaagcccctgggcaacagcaagcacagctgcgtgagctgcctgagcgccggcagaagcaccgccagcgaggtggaggccggcaagggcggcagacccggcctgctgctggaggagaaggccgacggcgaggccaccagcagaagcagacagctgctgcagtacctgttcagcctgagccacggcctgagcgccagcagcctgcacagattccacgagctggagagctgcgccgccagactgcacaccgccaagagcagcagcggcctggccggcagcatgggcttctgcagcgacgagatgggcgacgacgacgtgttcgaggacagcaccagcgccaagctgaagagcagagtgctgagagcccccctgtgcagcaccgagaaggacagcgacctggactgccccagccccttcagcgagaagctgccccccatcagccccgtgagcaccagcggcgacgtgtgcagaatctgccactgcgagggcgacgacgagagccccctgatcaccccctgccactgcaccggcagcctgcacttcgtgcaccaggcctgcctgcagcagtggatcaagagcagcgacaccagatgctgcgagctgtgcaagtacgagttcatcatggagaccaagctgaagcccctgagaaagtgggagaagctgcagatgaccagcagcgagagaagaaagatcatgtgcagcgtgaccttccacgtgatcgccatcacctgcgtggtgtggagcctgtacgtgctgatcgacagaaccgccgaggagatcaagcagggccaggccaccggcatcctggagtggcccttctggaccaagctggtggtggtggccatcggcttcaccggcggcctgctgttcatgtacgtgcagtgcaaggtgtacgtgcagctgtggaagagactgaaggcctacaacagagtgatctacgtgcagaactgccccgagaccagcaagaagaacatcttcgagaagagccccctgaccgagcccaacttcgagaacaagcacggctacggcatctgccacagcgacaccaacagcagctgctgcaccgagcccgaggacaccggcgccgagatcatccacgtgtag

SEQ ID NO: 88609 - DNA, 270 bp, synthetic construct
  misc_feature 1..270: note = Description of Artificial Sequence: Synthetic coding sequence
  source 1..270: mol_type = other DNA
atgagcatgcccctgcaccagatcagcgccatccccagccaggacgccatcagcgccagagtgtacagaagcaagaccaaggagaaggagagagaggagcagaacgagaagaccctgggccacttcatgagccacagcagcaacatcagcaaggccggcagcccccccagcgccagcgcccccgcccccgtgagcagcttcagcagaaccagcatcacccccagcagccaggacatctgcagaatctgccactgcgagggcgacgactag

SEQ ID NO: 88610 - DNA, 1041 bp, synthetic construct
  misc_feature 1..1041: note = Description of Artificial Sequence: Synthetic coding sequence
  source 1..1041: mol_type = other DNA
atgctgaagagcagactgagaatgttcctgaacgagctgaagctgctggtgctgaccggcggcggcagacccagagccgagccccagcccagaggcggcagaggcggcggctgcggctgggcccccttcgccggctgcagcaccagagacggcgacggcgacgaggaggagtactacggcagcgagcccagagccagaggcctggccggcgacaaggagcccagagccggccccctgcccccccccgccccccccctgcccccccccggcgccctggacgccctgagcctgagcagcagcctggacagcggcctgagaaccccccagtgcagaatctgcttccagggccccgagcagggcgagctgctgagcccctgcagatgcgacggcagcgtgagatgcacccaccagccctgcctgatcagatggatcagcgagagaggcagctggagctgcgagctgtgctacttcaagtaccaggtgctggccatcagcaccaagaaccccctgcagtggcaggccatcagcctgaccgtgatcgagaaggtgcagatcgccgccatcgtgctgggcagcctgttcctggtggccagcatcagctggctgatctggagcagcctgagccccagcgccaagtggcagagacaggacctgctgttccagatctgctacggcatgtacggcttcatggacgtggtgtgcatcggcctgatcatccacgagggcagcagcgtgtacagaatcttcaagagatggcaggccgtgaaccagcagtggaaggtgctgaactacgacaagaccaaggacatcggcggcgacgccggcggcggcaccgccggcaagagcggccccagaaacagcagaaccggccccaccagcggcgccaccagcagaccccccgccgcccagagaatgagaaccctgctgccccagagatgcggctacaccatcctgcacctgctgggccagctgagaccccccgacgccagaagcagcagccacagcggcagagaggtggtgatgagagtgaccaccgtgtag

SEQ ID NO: 88611 - DNA, 702 bp, synthetic construct
  misc_feature 1..702: note = Description of Artificial Sequence: Synthetic coding sequence
  source 1..702: mol_type = other DNA
atggtgagcgacaagtgccacatcctggacctgatcaaggcccagagaagacagatgctgatcctgcccgagggcttcagagagggcagctggagcaccctgctgttcagagccacccaccacctggccctgcaccccttcctgggcctgttcggcgccctgagccccacccagtggcaggccatcagcctgaccgtgatcgagaaggtgcagatcgccgccatcgtgctgggcagcctgttcctggtggccagcatcagctggctgatctggagcagcctgagccccagcgccaagtggcagagacaggacctgctgttccagatctgctacggcatgtacggcttcatggacgtggtgtgcatcggcctgatcatccacgagggcagcagcgtgtacagaatcttcaagagatggcaggccgtgaaccagcagtggaaggtgctgaactacgacaagaccaaggacatcggcggcgacgccggcggcggcaccgccggcaagagcggccccagaaacagcagaaccggccccaccagcggcgccaccagcagaccccccgccgcccagagaatgagaaccctgctgccccagagatgcggctacaccatcctgcacctgctgggccagctgagaccccccgacgccagaagcagcagccacagcggcagagaggtggtgatgagagtgaccaccgtgtag

SEQ ID NO: 88612 - DNA, 3159 bp, synthetic construct
  misc_feature 1..3159: note = Description of Artificial Sequence: Synthetic coding sequence
  source 1..3159: mol_type = other DNA
atgaagctggtgaacatctggctgctgctgctggtggtgctgctgtgcggcaagaagcacctgggcgacagactggagaagaagagcttcgagaaggccccctgccccggctgcagccacctgaccctgaaggtggagttcagcagcaccgtggtggagtacgagtacatcgtggccttcaacggctacttcaccgccaaggccagaaacagcttcatcagcagcgccctgaagagcagcgaggtggacaactggagaatcatccccagaaacaaccccagcagcgactaccccagcgacttcgaggtgatccagatcaaggagaagcagaaggccggcctgctgaccctggaggaccaccccaacatcaagagagtgaccccccagagaaaggtgttcagaagcctgaagtacgccgagagcgaccccaccgtgccctgcaacgagaccagatggagccagaagtggcagagcagcagacccctgagaagagccagcctgagcctgggcagcggcttctggcacgccaccggcagacacagcagcagaagactgctgagagccatccccagacaggtggcccagaccctgcaggccgacgtgctgtggcagatgggctacaccggcgccaacgtgagagtggccgtgttcgacaccggcctgagcgagaagcacccccacttcaagaacgtgaaggagagaaccaactggaccaacgagagaaccctggacgacggcctgggccacggcaccttcgtggccggcgtgatcgccagcatgagagagtgccagggcttcgcccccgacgccgagctgcacatcttcagagtgttcaccaacaaccaggtgagctacaccagctggttcctggacgccttcaactacgccatcctgaagaagatcgacgtgctgaacctgagcatcggcggccccgacttcatggaccaccccttcgtggacaaggtgtgggagctgaccgccaacaacgtgatcatggtgagcgccatcggcaacgacggccccctgtacggcaccctgaacaaccccgccgaccagatggacgtgatcggcgtgggcggcatcgacttcgaggacaacatcgccagattcagcagcagaggcatgaccacctgggagctgcccggcggctacggcagaatgaagcccgacatcgtgacctacggcgccggcgtgagaggcagcggcgtgaagggcggctgcagagccctgagcggcaccagcgtggccagccccgtggtggccggcgccgtgaccctgctggtgagcaccgtgcagaagagagagctggtgaaccccgccagcatgaagcaggccctgatcgccagcgccagaagactgcccggcgtgaacatgttcgagcagggccacggcaagctggacctgctgagagcctaccagatcctgaacagctacaagccccaggccagcctgagccccagctacatcgacctgaccgagtgcccctacatgtggccctactgcagccagcccatctactacggcggcatgcccaccgtggtgaacgtgaccatcctgaacggcatgggcgtgaccggcagaatcgtggacaagcccgactggcagccctacctgccccagaacggcgacaacatcgaggtggccttcagctacagcagcgtgctgtggccctggagcggctacctggccatcagcatcagcgtgaccaagaaggccgccagctgggagggcatcgcccagggccacgtgatgatcaccgtggccagccccgccgagaccgagagcaagaacggcgccgagcagaccagcaccgtgaagctgcccatcaaggtgaagatcatccccaccccccccagaagcaagagagtgctgtgggaccagtaccacaacctgagatacccccccggctacttccccagagacaacctgagaatgaagaacgaccccctggactggaacggcgaccacatccacaccaacttcagagacatgtaccagcacctgagaagcatgggctacttcgtggaggtgctgggcgcccccttcacctgcttcgacgccagccagtacggcaccctgctgatggtggacagcgaggaggagtacttccccgaggagatcgccaagctgagaagagacgtggacaacggcctgagcctggtgatcttcagcgactggtacaacaccagcgtgatgagaaaggtgaagttctacgacgagaacaccagacagtggtggatgcccgacaccggcggcgccaacatccccgccctgaacgagctgctgagcgtgtggaacatgggcttcagcgacggcctgtacgagggcgagttcaccctggccaaccacgacatgtactacgccagcggctgcagcatcgccaagttccccgaggacggcgtggtgatcacccagaccttcaaggaccagggcctggaggtgctgaagcaggagaccgccgtggtggagaacgtgcccatcctgggcctgtaccagatccccgccgagggcggcggcagaatcgtgctgtacggcgacagcaactgcctggacgacagccacagacagaaggactgcttctggctgctggacgccctgctgcagtacaccagctacggcgtgaccccccccagcctgagccacagcggcaacagacagagaccccccagcggcgccggcagcgtgacccccgagagaatggagggcaaccacctgcacagatacagcaaggtgctggaggcccacctgggcgaccccaagcccagacccctgcccgcctgccccagactgagctgggccaagccccagcccctgaacgagaccgcccccagcaacctgtggaagcaccagaagctgctgagcatcgacctggacaaggtggtgctgcccaacttcagaagcaacagaccccaggtgagacccctgagccccggcgagagcggcgcctgggacatccccggcggcatcatgcccggcagatacaaccaggaggtgggccagaccatccccgtgttcgccttcctgggcgccatggtggtgctggccttcttcgtggtgcagatcaacaaggccaagagcagacccaagagaagaaagcccagagtgaagagaccccagctgatgcagcaggtgcacccccccaagacccccagcgtgtag

SEQ ID NO: 88613 - DNA, 1494 bp, synthetic construct
  misc_feature 1..1494: note = Description of Artificial Sequence: Synthetic coding sequence
  source 1..1494: mol_type = other DNA
atggccctggtgggcctgcccggccacctgcacttctgcgaccaggagagcggcttcctgggcagacactgcagcggcccctgccacgaccactgcggcttccccagcagagacagagtgaagaagtggtgcagaaccgacttcaacagcaagctgcccatcaaggtgaagatcatccccaccccccccagaagcaagagagtgctgtgggaccagtaccacaacctgagatacccccccggctacttccccagagacaacctgagaatgaagaacgaccccctggactggaacggcgaccacatccacaccaacttcagagacatgtaccagcacctgagaagcatgggctacttcgtggaggtgctgggcgcccccttcacctgcttcgacgccagccagtacggcaccctgctgatggtggacagcgaggaggagtacttccccgaggagatcgccaagctgagaagagacgtggacaacggcctgagcctggtgatcttcagcgactggtacaacaccagcgtgatgagaaaggtgaagttctacgacgagaacaccagacagtggtggatgcccgacaccggcggcgccaacatccccgccctgaacgagctgctgagcgtgtggaacatgggcttcagcgacggcctgtacgagggcgagttcaccctggccaaccacgacatgtactacgccagcggctgcagcatcgccaagttccccgaggacggcgtggtgatcacccagaccttcaaggaccagggcctggaggtgctgaagcaggagaccgccgtggtggagaacgtgcccatcctgggcctgtaccagatccccgccgagggcggcggcagaatcgtgctgtacggcgacagcaactgcctggacgacagccacagacagaaggactgcttctggctgctggacgccctgctgcagtacaccagctacggcgtgaccccccccagcctgagccacagcggcaacagacagagaccccccagcggcgccggcagcgtgacccccgagagaatggagggcaaccacctgcacagatacagcaaggtgctggaggcccacctgggcgaccccaagcccagacccctgcccgcctgccccagactgagctgggccaagccccagcccctgaacgagaccgcccccagcaacctgtggaagcaccagaagctgctgagcatcgacctggacaaggtggtgctgcccaacttcagaagcaacagaccccaggtgagacccctgagccccggcgagagcggcgcctgggacatccccggcggcatcatgcccggcagatacaaccaggaggtgggccagaccatccccgtgttcgccttcctgggcgccatggtggtgctggccttcttcgtggtgcagatcaacaaggccaagagcagacccaagagaagaaagcccagagtgaagagaccccagctgatgcagcaggtgcacccccccaagacccccagcgtgtag

SEQ ID NO: 88614 - DNA, 993 bp, synthetic construct
  misc_feature 1..993: note = Description of Artificial Sequence: Synthetic coding sequence
  source 1..993: mol_type = other DNA
atgatccccgtgagcctggtggtggtggtggtgggcggctggaccgtggtgtacctgaccgacctggtgctgaagagcagcgtgtacttcaagcacagctacgaggactggctggagaacaacggcctgagcatcagccccttccacatcagatggcagaccgccgtgttcaacagagccttctacagctggggcagaagaaaggccagaatgctgtaccagtggttcaacttcggcatggtgttcggcgtgatcgccatgttcagcagcttcttcctgctgggcaagaccctgatgcagaccctggcccagatgatggccgacagccccagcagctacagcagcagcagcagcagcagcagcagcagcagcagcagcagcagcagcagcagcagcagcagcagcagcctgcacaacgagcaggtgctgcaggtggtggtgcccggcatcaacctgcccgtgaaccagctgacctacttcttcaccgccgtgctgatcagcggcgtggtgcacgagatcggccacggcatcgccgccatcagagagcaggtgagattcaacggcttcggcatcttcctgttcatcatctaccccggcgccttcgtggacctgttcaccacccacctgcagctgatcagccccgtgcagcagctgagaatcttctgcgccggcatctggcacaacttcgtgctggccctgctgggcatcctggccctggtgctgctgcccgtgatcctgctgcccttctactacaccggcgtgggcgtgctgatcaccgaggtggccgaggacagccccgccatcggccccagaggcctgttcgtgggcgacctggtgacccacctgcaggactgccccgtgaccaacgtgcaggactggaacgagtgcctggacaccatcgcctacgagccccagatcggctactgcatcagcgccagcaccctgcagcagctgagcttccccgtgagaggcgtgtacatcagcagcatctag

SEQ ID NO: 88615 - DNA, 1560 bp, synthetic construct
  misc_feature 1..1560: note = Description of Artificial Sequence: Synthetic coding sequence
  source 1..1560: mol_type = other DNA
atgatccccgtgagcctggtggtggtggtggtgggcggctggaccgtggtgtacctgaccgacctggtgctgaagagcagcgtgtacttcaagcacagctacgaggactggctggagaacaacggcctgagcatcagccccttccacatcagatggcagaccgccgtgttcaacagagccttctacagctggggcagaagaaaggccagaatgctgtaccagtggttcaacttcggcatggtgttcggcgtgatcgccatgttcagcagcttcttcctgctgggcaagaccctgatgcagaccctggcccagatgatggccgacagccccagcagctacagcagcagcagcagcagcagcagcagcagcagcagcagcagcagcagcagcagcagcagcagcagcagcctgcacaacgagcaggtgctgcaggtggtggtgcccggcatcaacctgcccgtgaaccagctgacctacttcttcaccgccgtgctgatcagcggcgtggtgcacgagatcggccacggcatcgccgccatcagagagcaggtgagattcaacggcttcggcatcttcctgttcatcatctaccccggcgccttcgtggacctgttcaccacccacctgcagctgatcagccccgtgcagcagctgagaatcttctgcgccggcatctggcacaacttcgtgctggccctgctgggcatcctggccctggtgctgctgcccgtgatcctgctgcccttctactacaccggcgtgggcgtgctgatcaccgaggtggccgaggacagccccgccatcggccccagaggcctgttcgtgggcgacctggtgacccacctgcaggactgccccgtgaccaacgtgcaggactggaacgagtgcctggacaccatcgcctacgagccccagatcggctactgcatcagcgccagcaccctgcagcagctgagcttccccgtgagagcctacaagagactggacggcagcaccgagtgctgcaacaaccacagcctgaccgacgtgtgcttcagctacagaaacaacttcaacaagagactgcacacctgcctgcccgccagaaaggccgtggaggccacccaggtgtgcagaaccaacaaggactgcaagaagagcagcagcagcagcttctgcatcatccccagcctggagacccacaccagactgatcaaggtgaagcaccccccccagatcgacatgctgtacgtgggccaccccctgcacctgcactacaccgtgagcatcaccagcttcatccccagattcaacttcctgagcatcgacctgcccgtggtggtggagaccttcgtgaagtacctgatcagcctgagcggcgccctggccatcgtgaacgccgtgccctgcttcgccctggacggccagtggatcctgaacagcttcctggacgccaccctgaccagcgtgatcggcgacaacgacgtgaaggacctgatcggcttcttcatcctgctgggcggcagcgtgctgctggccgccaacgtgaccctgggcctgtggatggtgaccgccagatag

SEQ ID NO: 88616 - DNA, 207 bp, synthetic construct
  misc_feature 1..207: note = Description of Artificial Sequence: Synthetic coding sequence
  source 1..207: mol_type = other DNA
atgcaccagacctacagcagacactgcagacccgaggagagatggagccaggagggctggaacatccccgccaacggcttcaacatctgcagatgcctgaacatcggcatgaagctgagactgtggaacaacctgaacaagagcaacatcctgggcgccctgaagatcaagagaagagagatcagagcccccttcctgctgccctag

SEQ ID NO: 88617 - DNA, 762 bp, synthetic construct
  misc_feature 1..762: note = Description of Artificial Sequence: Synthetic coding sequence
  source 1..762: mol_type = other DNA
atggtgctgctgaagctgctggaggtgtacagaaagggcagcgccggcaccttccacaagagcaccatcttcggcaacaccatcatgaccagccagcccgtgcccaacgagaccatcatcgtgctgcccagcaacgtgatcaacttcagccaggccgagaagcccgagcccaccaaccagggccaggacagcctgaagaagcacctgcacgccgagatcaaggtgatcggcaccatccagatcctgtgcggcatgatggtgctgagcctgggcatcatcctggccagcgccagcttcagccccaacttcacccaggtgaccagcaccctgctgaacagcgcctaccccttcatcggccccttcttcttcatcatcagcggcagcctgagcatcgccaccgagaagagactgaccaagctgctggtgcacagcagcctggtgggcagcatcctgagcgccctgagcgccctggtgggcttcatcatcctgagcgtgaagcaggccaccctgaaccccgccagcctgcagtgcgagctggacaagaacaacatccccaccagaagctacgtgagctacttctaccacgacagcctgtacaccaccgactgctacaccgccaaggccagcctggccggcaccctgagcctgatgctgatctgcaccctgctggagttctgcctggccgtgctgaccgccgtgctgagatggaagcaggcctacagcgacttccccggcgtgagcgtgctggccggcttcacctag

SEQ ID NO: 88618 - DNA, 804 bp, synthetic construct
  misc_feature 1..804: note = Description of Artificial Sequence: Synthetic coding sequence
  source 1..804: mol_type = other DNA
atgaaggccgaggccaccgtgatccccagcagatgcgccagaggcctgcccagctggcaggtgctgagccccgtgcagccctggcagaccagcgccccccagaacaccacccagcccaagctgctggccccccaccagcacgagaagagccagaagaagagcagcctgctgaaggagctgggcgccttccacatcaccatcgccctgctgcacctggtgttcggcggctacctggccagcatcgtgaagaacctgcacctggtggtgctgaagagctggtaccccttctggggcgccgccagcttcctgatcagcggcatcctggccatcaccatgaagaccttcagcaagacctacctgaagatgctgtgcctgatgaccaacctgatcagcctgttctgcgtgctgagcggcctgttcgtgatcagcaaggacctgttcctggagagccccttcgagagccccatctggagaatgtaccccaacagcaccgtgcacatccagagactggagctggccctgctgtgcttcaccgtgctggagctgttcctgcccgtgcccaccgccgtgaccgcctggagaggcgactgccccagcgccaagaacgacgacgcctgcctggtgcccaacacccccctgcacctgaagggcctgcccgtggagcccccccccagctaccagagcgtgatccagggcgacgcccagcacaagcagcaccagagactgagagaggtgaagcaggtggcccccgacacctggatcgtgaccgacggcgccgccatctggacccagaccgccaactag

SEQ ID NO: 88619 - DNA, 804 bp, synthetic construct
  misc_feature 1..804: note = Description of Artificial Sequence: Synthetic coding sequence
  source 1..804: mol_type = other DNA
atgatgagcagcaagcccaccagccacgccgaggtgaacgagaccatccccaacccctacccccccagcagcttcatggcccccggcttccagcagcccctgggcagcatcaacctggagaaccaggcccagggcgcccagagagcccagccctacggcatcaccagccccggcatcttcgccagcagccagcccggccagggcaacatccagatgatcaaccccagcgtgggcaccgccgtgatgaacttcaaggaggaggccaaggccctgggcgtgatccagatcatggtgggcctgatgcacatcggcttcggcatcgtgctgtgcctgatcagcttcagcttcagagaggtgctgggcttcgccagcaccgccgtgatcggcggctaccccttctggggcggcctgagcttcatcatcagcggcagcctgagcgtgagcgccagcaaggagctgagcagatgcctggtgaagggcagcctgggcatgaacatcgtgagcagcatcctggccttcatcggcgtgatcctgctgctggtggacatgtgcatcaacggcgtggccggccaggactactgggccgtgctgagcggcaagggcatcagcgccaccctgatgatcttcagcctgctggagttcttcgtggcctgcgccaccgcccacttcgccaaccaggccaacaccaccaccaacatgagcgtgctggtgatccccaacatgtacgagagcaaccccgtgacccccgccagcagcagcgccccccccagatgcaacaactacagcgccaacgcccccaagtag

SEQ ID NO: 88620 - DNA, 345 bp, synthetic construct
  misc_feature 1..345: note = Description of Artificial Sequence: Synthetic coding sequence
  source 1..345: mol_type = other DNA
atgatgagcagcaagcccaccagccacgccgaggtgaacgagaccatccccaacccctacccccccagcagcttcatggcccccggcttccagcagcccctgggcagcatcaacctggagaaccaggcccagggcgcccagagagcccagccctacggcatcaccagccccggcatcttcgccagcagccagcccggccagggcaacatccagatgatcaaccccagcgtgggcaccgccgtgatgaacttcaaggaggaggccaaggccctgggcgtgatccagatcatggtgggcctgatgcacatcggcttcggcatcgtgctgtgcctgatcagcttctag

SEQ ID NO: 88621 - DNA, 666 bp, synthetic construct
  misc_feature 1..666: note = Description of Artificial Sequence: Synthetic coding sequence
  source 1..666: mol_type = other DNA
atgatgagcagcaagcccaccagccacgccgaggtgaacgagaccatccccaacccctacccccccagcagcttcatggcccccggcttccagcagcccctgggcagcatcaacctggagaaccaggcccagggcgcccagagagcccagccctacggcatcaccagccccggcatcttcgccagcagccagcccggccagggcaacatccagatgatcaaccccagcgtgggcaccgccgtgatgaacttcaaggaggaggccaaggccctgggcttcatcatcagcggcagcctgagcgtgagcgccagcaaggagctgagcagatgcctggtgaagggcagcctgggcatgaacatcgtgagcagcatcctggccttcatcggcgtgatcctgctgctggtggacatgtgcatcaacggcgtggccggccaggactactgggccgtgctgagcggcaagggcatcagcgccaccctgatgatcttcagcctgctggagttcttcgtggcctgcgccaccgcccacttcgccaaccaggccaacaccaccaccaacatgagcgtgctggtgatccccaacatgtacgagagcaaccccgtgacccccgccagcagcagcgccccccccagatgcaacaactacagcgccaacgcccccaagtag

SEQ ID NO: 88622 - DNA, 972 bp, synthetic construct
  misc_feature 1..972: note = Description of Artificial Sequence: Synthetic coding sequence
  source 1..972: mol_type = other DNA
atgaccgagcaggtgatcggcgccaacagcgtgcccggcatcatcgcccccgacaacgtgcacgtgatccagcccagcaaccccgtggccagcggcaaccacctgcagcccagcgaggtgaccacctaccccatcagccccaaggtgatccactgcgacaccggcagagccaacctgcagaacctgctggtggtgaaccagaacagcgccgccggcgtgcagagccagcccatcggctaccagagacagtaccccgtgggcaccgccagcctgcagaccgtgcccggcgtgatccagtacacccagggcaccaccaacctgcagacctggcccggcgacctgcagaaccccctgaacgccaaccccggcctgacccacaccagcaacagcagccagtggaacaccagcttcgccagcttcaccagcttcaaccccaagaagttcatcaacgaggaggtgagaaccctgggcgccatccagatcctgatcggcctgacccacatcttcagcgccatcaaccccgtgctgtactactaccccttcgtgacctggctgagcggctaccccctgtggggcggcctgagctacatcgtgagcggcagcctgagcgtgtgggccgccaaggaccccagcccctgcgtggtgaacagcagcatcagcttcaacatcatcagcgccctgttcgccttcgccggcatcttcatcatcatcaccgacctgagcctgtactacgtgaccacctacagcaaggccgtgagcggcggcctgctgcccttcgccctgctggagttcatcctgacctgcgtggtgagccacttcggctgccaggccacctgctgcagacagttcgagaacgtggccgtgatccccaccgtgttcagcttcaaccccgccaacaccaccaccagccccgtgaacgccaccaccggccccgtgaacgccgccaccggccccgtgagcgccaccaactag

SEQ ID NO: 88623 - DNA, 735 bp, synthetic construct
  misc_feature 1..735: note = Description of Artificial Sequence: Synthetic coding sequence
  source 1..735: mol_type = other DNA
atggacaccgagagcaacagaagagccaacctggccctgccccaggagcccagcagcgtgcccgccttcgaggtgctggagatcagcccccaggaggtgagcagcggcagactgctgaagagcgccagcagcccccccctgcacacctggctgaccgtgctgaagaaggagcaggagttcctgggcgtgacccagatcctgaccgccatgatctgcctgtgcttcggcaccgtggtgtgcagcgtgctggacatcagccacatcgagggcgacatcttcagcagcttcaaggccggctaccccttctggggcgccatcttcttcagcatcagcggcatgctgagcatcatcagcgagagaagaaacgccacctacctggtgagaggcagcctgggcgccaacaccgccagcagcatcgccggcggcaccggcatcaccatcctgatcatcaacctgaagaagagcctggcctacatccacatccacagctgccagaagttcttcgagaccaagtgcttcatggccagcttcagcaccgagatcgtggtgatgatgctgttcctgaccatcctgggcctgggcagcgccgtgagcctgaccatctgcggcgccggcgaggagctgaagggcaacaaggtgcccgaggacagagtgtacgaggagctgaacatctacagcgccacctacagcgagctggaggaccccggcgagatgagcccccccatcgacctgtag

SEQ ID NO: 88624 - DNA, 126 bp, synthetic construct
  misc_feature 1..126: note = Description of Artificial Sequence: Synthetic coding sequence
  source 1..126: mol_type = other DNA
atggacaccgagagcaacagaagagccaacctggccctgccccaggagcccagcagcgtgcccgccttcgaggtgctggagatcagcccccaggaggtgagcagcggcagactgctgaagagctag

SEQ ID NO: 88625 - DNA, 645 bp, synthetic construct
  misc_feature 1..645: note = Description of Artificial Sequence: Synthetic coding sequence
  source 1..645: mol_type = other DNA
atggccagccacgaggtggacaacgccgagctgggcagcgccagcgcccacggcacccccggcagcgaggccggccccgaggagctgaacaccagcgtgtaccagcccatcgacggcagccccgactaccagaaggccaagctgcaggtgctgggcgccatccagatcctgaacgccgccatgatcctggccctgggcgtgttcctgggcagcctgcagtacccctaccacttccagaagcacttcttcttcttcaccttctacaccggctaccccatctggggcgccgtgttcttctgcagcagcggcaccctgagcgtggtggccggcatcaagcccaccagaacctggatccagaacagcttcggcatgaacatcgccagcgccaccatcgccctggtgggcaccgccttcctgagcctgaacatcgccgtgaacatccagagcctgagaagctgccacagcagcagcgagagccccgacctgtgcaactacatgggcagcatcagcaacggcatggtgagcctgctgctgatcctgaccctgctggagctgtgcgtgaccatcagcaccatcgccatgtggtgcaacgccaactgctgcaacagcagagaggagatcagcagcccccccaacagcgtgtag

SEQ ID NO: 88626 - DNA, 507 bp, synthetic construct
  misc_feature 1..507: note = Description of Artificial Sequence: Synthetic coding sequence
  source 1..507: mol_type = other DNA
atggccagccacgaggtggacaacgccgagctgggcagcgccagcgcccacggcacccccggcagcgaggccggccccgaggagctgaacaccagcgtgtaccagcccatcgacggcagccccgactaccagaaggccaagctgcaggtgctgggcttctgcagcagcggcaccctgagcgtggtggccggcatcaagcccaccagaacctggatccagaacagcttcggcatgaacatcgccagcgccaccatcgccctggtgggcaccgccttcctgagcctgaacatcgccgtgaacatccagagcctgagaagctgccacagcagcagcgagagccccgacctgtgcaactacatgggcagcatcagcaacggcatggtgagcctgctgctgatcctgaccctgctggagctgtgcgtgaccatcagcaccatcgccatgtggtgcaacgccaactgctgcaacagcagagaggagatcagcagcccccccaacagcgtgtag

SEQ ID NO: 88627 - DNA, 276 bp, synthetic construct
  misc_feature 1..276: note = Description of Artificial Sequence: Synthetic coding sequence
  source 1..276: mol_type = other DNA
atgaacatcgccagcgccaccatcgccctggtgggcaccgccttcctgagcctgaacatcgccgtgaacatccagagcctgagaagctgccacagcagcagcgagagccccgacctgtgcaactacatgggcagcatcagcaacggcatggtgagcctgctgctgatcctgaccctgctggagctgtgcgtgaccatcagcaccatcgccatgtggtgcaacgccaactgctgcaacagcagagaggagatcagcagcccccccaacagcgtgtag

SEQ ID NO: 88628 - DNA, 507 bp, synthetic construct; identical to SEQ ID NO: 88626
  misc_feature 1..507: note = Description of Artificial Sequence: Synthetic coding sequence
  source 1..507: mol_type = other DNA

SEQ ID NO: 88629 - DNA, 720 bp, synthetic construct
  misc_feature 1..720: note = Description of Artificial Sequence: Synthetic coding sequence
  source 1..720: mol_type = other DNA
atgcaccagacctacagcagacactgcagacccgaggagagcaccttcagcgccgccatgaccaccatgcagggcatggagcaggccatgcccggcgccggccccggcgtgccccagctgggcaacatggccgtgatccacagccacctgtggaagggcctgcaggagaagttcctgaagggcgagcccaaggtgctgggcgtggtgcagatcctgaccgccctgatgagcctgagcatgggcatcaccatgatgtgcatggccagcaacacctacggcagcaaccccatcagcgtgtacatcggctacaccatctggggcagcgtgatgttcatcatcagcggcagcctgagcatcgccgccggcatcagaaccaccaagggcctggtgagaggcagcctgggcatgaacatcaccagcagcgtgctggccgccagcggcatcctgatcaacaccttcagcctggccttctacagcttccaccacccctactgcaactactacggcaacagcaacaactgccacggcaccatgagcatcctgatgggcctggacggcatggtgctgctgctgagcgtgctggagttctgcatcgccgtgagcctgagcgccttcggctgcaaggtgctgtgctgcacccccggcggcgtggtgctgatcctgcccagccacagccacatggccgagaccgccagccccacccccctgaacgaggtgtag

SEQ ID NO: 88630 - DNA, 663 bp, synthetic construct
  misc_feature 1..663: note = Description of Artificial Sequence: Synthetic coding sequence
  source 1..663: mol_type = other DNA
atgaccaccatgcagggcatggagcaggccatgcccggcgccggccccggcgtgccccagctgggcaacatggccgtgatccacagccacctgtggaagggcctgcaggagaagttcctgaagggcgagcccaaggtgctgggcgtggtgcagatcctgaccgccctgatgagcctgagcatgggcatcaccatgatgtgcatggccagcaacacctacggcagcaaccccatcagcgtgtacatcggctacaccatctggggcagcgtgatgttcatcatcagcggcagcctgagcatcgccgccggcatcagaaccaccaagggcctggtgagaggcagcctgggcatgaacatcaccagcagcgtgctggccgccagcggcatcctgatcaacaccttcagcctggccttctacagcttccaccacccctactgcaactactacggcaacagcaacaactgccacggcaccatgagcatcctgatgggcctggacggcatggtgctgctgctgagcgtgctggagttctgcatcgccgtgagcctgagcgccttcggctgcaaggtgctgtgctgcacccccggcggcgtggtgctgatcctgcccagccacagccacatggccgagaccgccagccccacccccctgaacgaggtgtag

SEQ ID NO: 88631 - DNA, 663 bp, synthetic construct; identical to SEQ ID NO: 88630
  misc_feature 1..663: note = Description of Artificial Sequence: Synthetic coding sequence
  source 1..663: mol_type = other DNA

SEQ ID NO: 88632 - DNA, 561 bp, synthetic construct
  misc_feature 1..561: note = Description of Artificial Sequence: Synthetic coding sequence
  source 1..561: mol_type = other DNA
atgcaccagacctacagcagacactgcagacccgaggagagcaccttcagcgccgccatgaccaccatgcagggcatggagcaggccatgcccggcgccggccccggcgtgccccagctgggcaacatggccgtgatccacagccacctgtggaagggcctgcaggagaagttcctgaagggcgagcccaaggtgctgggcgtggtgcagatcctgaccgccctgatgagcctgagcatgggcatcaccatgatgtgcatggccagcaacacctacggcagcaaccccatcagcgtgtacatcggctacaccatctggggcagcgtgatgttcatcatcagcggcagcctgagcatcgccgccggcatcagaaccaccaagggcctgggcctggacggcatggtgctgctgctgagcgtgctggagttctgcatcgccgtgagcctgagcgccttcggctgcaaggtgctgtgctgcacccccggcggcgtggtgctgatcctgcccagccacagccacatggccgagaccgccagccccacccccctgaacgaggtgtag

SEQ ID NO: 88633 - DNA, 399 bp, synthetic construct
  misc_feature 1..399: note = Description of Artificial Sequence: Synthetic coding sequence
  source 1..399: mol_type = other DNA
atgaccaccatgcagggcatggagcagaccacccccggcgccggccccgacgtgccccagctgggcaacatcgacgtgatccacagctacctgtgcaagggcctgcaggagaagttcttcaagagaaagcccaaggtgctgggcgtggtgagaatcctgatcgccctgatgagcctgagcatgggcatcatcatgatgtgcgtggccttcagcagctacgaggagcaccccatcttcgtgtacgtggcctacaccatctggggcagcgtgatgtacccctaccagctgcagcaggagctggagcagcagaaggtgtggaactacctgaagaacctgagctggagaatcatgggcagctacctgtgcttcggcgagagaagcgagctgaagcccctgtag

SEQ ID NO: 88634 - DNA, 333 bp, synthetic construct
  misc_feature 1..333: note = Description of Artificial Sequence: Synthetic coding sequence
  source 1..333: mol_type = other DNA
atgaccaccatgcagggcatggagcagaccacccccggcgccggccccgacgtgccccagctgggcaacatcgacgtgatccacagctacctgtgcaagggcctgcaggagaagttcttcaagagaaagcccaaggtgctgggcgtgctgtgcggccacaagttcagcacccacagcgtgagcctgagcgtggccgccggcatcagaaccaccaagggcctggagctgagcgaggagttcaagctggagaacaacggcatcatcttcgtgttctggagagagatcagagtggagaccaccatcagaagacaggtgagaagactgctgaagtag

SEQ ID NO: 88635 - DNA, 615 bp, synthetic construct
  misc_feature 1..615: note = Description of Artificial Sequence: Synthetic coding sequence
  source 1..615: mol_type = other DNA
atgagctacatccacatctgcgtgaaggactgcaagagaagcagcagcagaggcaaccccaagagcctgggcttctgcgtggacatcagcttccagctgatcagagtggtgagaatcctgatcgccctgatgagcctgagcatgggcatcatcatgatgtgcgtggccttcagcagctacgaggagcaccccatcttcgtgtacgtggcctacaccatctggggcagcgtgatgtacccctaccagctgcagcaggagctggagcagcagaaggtgtgcatctacagagtgctgaacggcgcccaggccggcgtgcagtggagagacctgggcagcctgcagccccccccccccagcagactgccctggccccccaaggtgcccagagtgcagcccctgcccggcagacaccccgtgtgggaggtgagaagcgtgagcgcctggccccccatcgtgtgggacgtgagaagccccagcgcctggctgcccagcctggagagcgaggagagactgtgccccgccgccatccccagcagaaagtggggcgcccccctgcccggccaccaccccatctgggaggtgagaagcgtgagcgccagaccccccatcttctag

SEQ ID NO: 88636 - DNA, 399 bp, synthetic construct; identical to SEQ ID NO: 88633
  misc_feature 1..399: note = Description of Artificial Sequence: Synthetic coding sequence
  source 1..399: mol_type = other DNA

SEQ ID NO: 88637 - DNA, 603 bp, synthetic construct
  misc_feature 1..603: note = Description of Artificial Sequence: Synthetic coding sequence
  source 1..603: mol_type = other DNA
atggacagcagcaccgcccacagccccgtgttcctggtgttcccccccgagatcaccgccagcgagtacgagagcaccgagctgagcgccaccaccttcagcacccagagccccctgcagaagctgttcgccagaaagatgaagatcctgggcaccatccagatcctgttcggcatcatgaccttcagcttcggcgtgatcttcctgttcaccctgctgaagccctaccccagattccccttcatcttcctgagcggctaccccttctggggcagcgtgctgttcatcaacagcggcgccttcctgatcgccgtgaagagaaagaccaccgagaccctgatcatcctgagcagaatcatgaacttcctgagcgccctgggcgccatcgccggcatcatcctgctgaccttcggcttcatcctggaccagaactacatctgcggctacagccaccagaacagccagtgcaaggccgtgaccgtgctgttcctgggcatcctgatcaccctgatgaccttcagcatcatcgagctgttcatcagcctgcccttcagcatcctgggctgccacagcgaggactgcgactgcgagcagtgctgctag

SEQ ID NO: 88638 - DNA, 747 bp, synthetic construct
  misc_feature 1..747: note = Description of Artificial Sequence: Synthetic coding sequence
  source 1..747: mol_type = other DNA
atgaccagccagcccgtgcccaacgagaccatcatcgtgctgcccagcaacgtgatcaacttcagccaggccgagaagcccgagcccaccaaccagggccaggacagcctgaagaagcacctgcacgccgagatcaaggtgatcggcaccatccagatcctgtgcggcatgatggtgctgagcctgggcatcatcctggccagcgccagcttcagccccaacttcacccaggtgaccagcaccctgctgaacagcgcctaccccttcatcggccccttcttcttcatcatcagcggcagcctgagcatcgccaccgagaagagactgaccaagctgctggtgcacagcagcctggtgggcagcatcctgagcgccctgagcgccctggtgggcttcatcatcctgagcgtgaagcaggccaccctgaaccccgccagcctgcagtgcgagctggacaagaacaacatccccaccagaagctacgtgagctacttctaccacgacagcctgtacaccaccgactgctacaccgccaaggccagcctggccggcaccctgagcctgatgctgatctgcaccctgctggagttctgcctggccgtgctgaccgccgtgctgagatggaagcaggcctacagcgacttccccggcagcgtgctgttcctgccccacagctacatcggcaacagcggcatgagcagcaagatgacccacgactgcggctacgaggagctgctgaccagctag

SEQ ID NO: 88639 - DNA, 537 bp, synthetic construct
  misc_feature 1..537: note = Description of Artificial Sequence: Synthetic coding sequence
  source 1..537: mol_type = other DNA
atgaccagccagcccgtgcccaacgagaccatcatcgtgctgcccagcaacgtgatcaacttcagccaggccgagaagcccgagcccaccaaccagggccaggacagcctgaagaagcacctgcacgccgagatcaaggtgatcggcaccatccagatcctgtgcggcatgatggtgctgagcctgggcatcatcctggccagcgccagcttcagccccaacttcacccaggtgaccagcaccctgctgaacagcgcctaccccttcatcggccccttcttcttcatcatcagcggcagcctgagcatcgccaccgagaagagactgaccaagctgctggtgcacagcagcctggtgggcagcatcctgagcgccctgagcgccctggtgggcttcatcatcctgagcgtgaagcaggccaccctgaaccccgccagcctgcagtggaacagcctgagcgacgccgacctgcacagcgccggcatcctgcccagctgcgcccactgctgcgccgccgtggagaccggcctgctgtag

SEQ ID NO: 88640 - DNA, 543 bp, synthetic construct
  misc_feature 1..543: note = Description of Artificial Sequence: Synthetic coding sequence
  source 1..543: mol_type = other DNA
atgaccagccagcccgtgcccaacgagaccatcatcgtgctgcccagcaacgtgatcaacttcagccaggccgagaagcccgagcccaccaaccagggccaggacagcctgaagaagcacctgcacgccgagatcaaggtgatcggcttcatcatcagcggcagcctgagcatcgccaccgagaagagactgaccaagctgctggtgcacagcagcctggtgggcagcatcctgagcgccctgagcgccctggtgggcttcatcatcctgagcgtgaagcaggccaccctgaaccccgccagcctgcagtgcgagctggacaagaacaacatccccaccagaagctacgtgagctacttctaccacgacagcctgtacaccaccgactgctacaccgccaaggccagcctggccggcaccctgagcctgatgctgatctgcaccctgctggagttctgcctggccgtgctgaccgccgtgctgagatggaagcaggcctacagcgacttccccggcgtgagcgtgctggccggcttcacctag

SEQ ID NO: 88641 - DNA, 678 bp, synthetic construct
  misc_feature 1..678: note = Description of Artificial Sequence: Synthetic coding sequence
  source 1..678: mol_type = other DNA
atgaccagccagcccgtgcccaacgagaccatcatcgtgctgcccagcaacgtgatcaacttcagccaggccgagaagcccgagcccaccaaccagggccaggacagcctgaagaagcacctgcacgccgagatcaaggtgatcggcaccatccagatcctgtgcggcatgatggtgctgagcctgggcatcatcctggccagcgccagcttcagccccaacttcacccaggtgaccagcaccctgctgaacagcgcctaccccttcatcggccccttcttcttcatcatcagcggcagcctgagcatcgccaccgagaagagactgaccaagctgctggtgcacagcagcctggtgggcagcatcctgagcgccctgagcgccctggtgggcttcatcatcctgagcgtgaagcaggccaccctgaaccccgccagcctgcagtgcgagctggacaagaacaacatccccaccagaagctacgtgagctacttctaccacgacagcctgtacaccaccgactgctacaccgccaaggccagcctggccggcaccctgagcctgatgctgatctgcaccctgctggagttctgcctggccgtgctgaccgccgtgctgagatggaagcaggcctacagcgacttccccggcgtgagcgtgctggccggcttcacctag

SEQ ID NO: 88642 - DNA, 831 bp, synthetic construct
  misc_feature 1..831: note = Description of Artificial Sequence: Synthetic coding sequence
  source 1..831: mol_type = other DNA
atggtgctgctgaagctgctggaggtgtacagaaagggcagcgccggcaccttccacaagagcaccatcttcggcaacaccatcatgaccagccagcccgtgcccaacgagaccatcatcgtgctgcccagcaacgtgatcaacttcagccaggccgagaagcccgagcccaccaaccagggccaggacagcctgaagaagcacctgcacgccgagatcaaggtgatcggcaccatccagatcctgtgcggcatgatggtgctgagcctgggcatcatcctggccagcgccagcttcagccccaacttcacccaggtgaccagcaccctgctgaacagcgcctaccccttcatcggccccttcttcttcatcatcagcggcagcctgagcatcgccaccgagaagagactgaccaagctgctggtgcacagcagcctggtgggcagcatcctgagcgccctgagcgccctggtgggcttcatcatcctgagcgtgaagcaggccaccctgaaccccgccagcctgcagtgcgagctggacaagaacaacatccccaccagaagctacgtgagctacttctaccacgacagcctgtacaccaccgactgctacaccgccaaggccagcctggccggcaccctgagcctgatgctgatctgcaccctgctggagttctgcctggccgtgctgaccgccgtgctgagatggaagcaggcctacagcgacttccccggcagcgtgctgttcctgccccacagctacatcggcaacagcggcatgagcagcaagatgacccacgactgcggctacgaggagctgctgaccagctag

SEQ ID NO: 88643 - DNA, 747 bp, synthetic construct; identical to SEQ ID NO: 88638
  misc_feature 1..747: note = Description of Artificial Sequence: Synthetic coding sequence
  source 1..747: mol_type = other DNA

SEQ ID NO: 88644 - DNA, 72 bp, synthetic construct
  misc_feature 1..72: note = Description of Artificial Sequence: Synthetic coding sequence
  source 1..72: mol_type = other DNA
atgaccagccagcccgtgcccaacgagaccatcatcgtgctgcccagcaacgtgatcaacttcagccagtag

SEQ ID NO: 88645 - DNA, 444 bp, synthetic construct
  misc_feature 1..444: note = Description of Artificial Sequence: Synthetic coding sequence
  source 1..444: mol_type = other DNA
atgaccagccagcccatcagcaacgagaccatcatcatgctgcccagcaacgtgatcaacttcagccaggccgagaagcccgagcccaccaaccagggccaggacagcctgaagaagagactgcaggccaaggtgaaggtgatcggcgtgcacagcagcctggccggcagcatcctgagcgccctgagcgccctggtgggcttcatcctgctgagcgtgaaccccgccgccctgaaccccgccagcctgcagtgcaagctggacgagaaggacatccccaccagactgctgctgagctacgactaccacagcccctacaccatggactgccacagagccaaggccagcctggccggcaccctgagcctgatgctggtgagcaccgtgctggagttctgcctggccgtgctgaccgccgtgctgcagtggaagcagaccgtgtag

SEQ ID NO: 88646 - DNA, 723 bp, synthetic construct
  misc_feature 1..723: note = Description of Artificial Sequence: Synthetic coding sequence
  source 1..723: mol_type = other DNA
atgctgctgcagagccagaccatgggcgtgagccacagcttcacccccaagggcatcaccatcccccagagagagaagcccggccacatgtaccagaacgaggactacctgcagaacggcctgcccaccgagaccaccgtgctgggcaccgtgcagatcctgtgctgcctgctgatcagcagcctgggcgccatcctggtgttcgccccctaccccagccacttcaaccccgccatcagcaccaccctgatgagcggctaccccttcctgggcgccctgtgcttcggcatcaccggcagcctgagcatcatcagcggcaagcagagcaccaagcccttcgacctgagcagcctgaccagcaacgccgtgagcagcgtgaccgccggcgccggcctgttcctgctggccgacagcatggtggccctgagaaccgccagccagcactgcggcagcgagatggactacctgagcagcctgccctacagcgagtactactaccccatctacgagatcaaggactgcctgctgaccagcgtgagcctgaccggcgtgctggtggtgatgctgatcttcaccgtgctggagctgctgctggccgcctacagcagcgtgttctggtggaagcagctgtacagcaacaaccccggcagcagcttcagcagcacccagagccaggaccacatccagcaggtgaagaagagcagcagcagaagctggatctag

SEQ ID NO: 88647 - DNA, 588 bp, synthetic construct
  misc_feature 1..588: note = Description of Artificial Sequence: Synthetic coding sequence
  source 1..588: mol_type = other DNA
atgctgctgcagagccagaccatgggcgtgagccacagcttcacccccaagggcatcaccatcccccagagagagaagcccggccacatgtaccagaacgaggactacctgcagaacggcctgcccaccgagaccaccgtgctgggcttcggcatcaccggcagcctgagcatcatcagcggcaagcagagcaccaagcccttcgacctgagcagcctgaccagcaacgccgtgagcagcgtgaccgccggcgccggcctgttcctgctggccgacagcatggtggccctgagaaccgccagccagcactgcggcagcgagatggactacctgagcagcctgccctacagcgagtactactaccccatctacgagatcaaggactgcctgctgaccagcgtgagcctgaccggcgtgctggtggtgatgctgatcttcaccgtgctggagctgctgctggccgcctacagcagcgtgttctggtggaagcagctgtacagcaacaaccccggcagcagcttcagcagcacccagagccaggaccacatccagcaggtgaagaagagcagcagcagaagctggatctag

SEQ ID NO: 88648 - DNA, 510 bp, synthetic construct
  misc_feature 1..510: note = Description of Artificial Sequence: Synthetic coding sequence
  source 1..510: mol_type = other DNA
atgctgctgcagagccagaccatgggcgtgagccacagcttcacccccaagggcatcaccatcccccagagagagaagcccggccacatgtaccagaacgaggactacctgcagaacggcctgcccaccgagaccaccgtgctgggcttcggcatcaccggcagcctgagcatcatcagcggcaagcagagcaccaagcccttcgacctgagcagcctgaccagcaacgccgtgagcagcgtgaccgccggcgccggcctgttcctgctggccgacagcatggtggccctgagaaccgccagccagcactgcggcagcgagatggactacctgagcagcctgccctacagcgagtactactaccccatctacgagatcaaggactgcctgctgaccagcgtgagcctgaccggcgtgctggtggtgatgctgatcttcaccgtgctggagctgctgctggccgcctacagcagcgtgttctggtggaagcagctgtacagcaacaactag

SEQ ID NO: 88649 - DNA, 588 bp, synthetic construct; identical to SEQ ID NO: 88647
  misc_feature 1..588: note = Description of Artificial Sequence: Synthetic coding sequence
  source 1..588: mol_type = other DNA

SEQ ID NO: 88650 - DNA, 753 bp, synthetic construct
  misc_feature 1..753: note = Description of Artificial Sequence: Synthetic coding sequence
  source 1..753: mol_type = other DNA
atgaacagcatgaccagcgccgtgcccgtggccaacagcgtgctggtggtggccccccacaacggctaccccgtgacccccggcatcatgagccacgtgcccctgtaccccaacagccagccccaggtgcacctggtgcccggcaacccccccagcctggtgagcaacgtgaacggccagcccgtgcagaaggccctgaaggagggcaagaccctgggcgccatccagatcatcatcggcctggcccacatcggcctgggcagcatcatggccaccgtgctggtgggcgagtacctgagcatcagcttctacggcggcttccccttctggggcggcctgtggttcatcatcagcggcagcctgagcgtggccgccgagaaccagccctacagctactgcctgctgagcggcagcctgggcctgaacatcgtgagcgccatctgcagcgccgtgggcgtgatcctgttcatcaccgacctgagcatcccccacccctacgcctaccccgactactacccctacgcctggggcgtgaaccccggcatggccatcagcggcgtgctgctggtgttctgcctgctggagttcggcatcgcctgcgccagcagccacttcggctgccagctggtgtgctgccagagcagcaacgtgagcgtgatctaccccaacatctacgccgccaaccccgtgatcacccccgagcccgtgaccagcccccccagctacagcagcgagatccaggccaacaagtag

SEQ ID NO: 88651 - DNA, 2550 bp, synthetic construct
  misc_feature 1..2550: note = Description of Artificial Sequence: Synthetic coding sequence
  source 1..2550: mol_type = other DNA
atggtgcagaaggagagccaggccaccctggaggagagagagagcgagctgagcagcaaccccgccgccagcgccggcgccagcctggagccccccgccgcccccgcccccggcgaggacaaccccgccggcgccggcggcgccgccgtggccggcgccgccggcggcgccagaagattcctgtgcggcgtggtggagggcttctacggcagaccctgggtgatggagcagagaaaggagctgttcagaagactgcagaagtgggagctgaacacctacctgtacgcccccaaggacgactacaagcacagaatgttctggagagagatgtacagcgtggaggaggccgagcagctgatgaccctgatcagcgccgccagagagtacgagatcgagttcatctacgccatcagccccggcctggacatcaccttcagcaaccccaaggaggtgagcaccctgaagagaaagctggaccaggtgagccagttcggctgcagaagcttcgccctgctgttcgacgacatcgaccacaacatgtgcgccgccgacaaggaggtgttcagcagcttcgcccacgcccaggtgagcatcaccaacgagatctaccagtacctgggcgagcccgagaccttcctgttctgccccaccgagtactgcggcaccttctgctaccccaacgtgagccagagcccctacctgagaaccgtgggcgagaagctgctgcccggcatcgaggtgctgtggaccggccccaaggtggtgagcaaggagatccccgtggagagcatcgaggaggtgagcaagatcatcaagagagcccccgtgatctgggacaacatccacgccaacgactacgaccagaagagactgttcctgggcccctacaagggcagaagcaccgagctgatccccagactgaagggcgtgctgaccaaccccaactgcgagttcgaggccaactacgtggccatccacaccctggccacctggtacaagagcaacatgaacggcgtgagaaaggacgtggtgatgagcagacaggtggcccacagcggcgccaaggccagcgtggtggacggcacccccctggtggccgcccccagcctgaacgccaccaccgtggtgaccaccgtgtaccaggagcccatcatgagccagggcgccgccctgagcggcgagcccaccaccctgaccaaggaggaggagaagaagcagcccgacgaggagcccatggacatggtggtggagaagcaggaggagaccgaccacaagaacgacaaccagatcctgagcgagatcgtggaggccaagatggccgaggagctgaagcccatggacaccgacaaggagagcatcgccgagagcaagagccccgagatgagcatgcaggaggactgcatcagcgacatcgcccccatgcagaccgacgagcagaccaacaaggagcagttcgtgcccggccccaacgagaagcccctgtacaccgccgagcccgtgaccctggaggacctgcagctgctggccgacctgttctacctgccctacgagcacggccccaagggcgcccagatgctgagagagttccagtggctgagagccaacagcagcgtggtgagcgtgaactgcaagggcaaggacagcgagaagatcgaggagtggagaagcagagccgccaagttcgaggagatgtgcggcctggtgatgggcatgttcaccagactgagcaactgcgccaacagaaccatcctgtacgacatgtacagctacgtgtgggacatcaagagcatcatgagcatggtgaagagcttcgtgcagtggctgggctgcagaagccacagcagcgcccagttcctgatcggcgaccaggagccctgggccttcagaggcggcctggccggcgagttccagcccccccccctgacccccaccagcaaggtgtacaccatcagaccctacttccccaaggacgaggccagcgtgtacaagatctgcagagagatgtacgacgacggcgtgggcctgcccttccagagccagcccgacctgatcggcgacaagctggtgggcggcctgctgagcctgagcctggactactgcttcgtgctggaggacgaggacggcatctgcggctacgccctgggcaccgtggacgtgacccccttcatcaagaagtgcaagatcagctggatccccttcatgcaggagaagtacaccaagcccaacggcgacaaggagctgagcgaggccgagaagatcatgctgagcttccacgaggagcaggaggtgctgcccgagaccttcctggccaacttccccagcctgatcaagatggacatccacaagaaggtgaccgaccccagcgtggccaagagcatgatggcctgcctgctgagcagcctgaaggccaacggcagcagaggcgccttctgcgaggtgagacccgacgacaagagaatcctggagttctacagcaagctgggctgcttcgagatcgccaagatggagggcttccccaaggacgtggtgatcctgggcagaagcctgtag

SEQ ID NO: 88652 - DNA, 2751 bp, synthetic construct
  misc_feature 1..2751: note = Description of Artificial Sequence: Synthetic coding sequence
  source 1..2751: mol_type = other DNA
atggtgcagaaggagagccaggccaccctggaggagagagagagcgagctgagcagcaaccccgccgccagcgccggcgccagcctggagccccccgccgcccccgcccccggcgaggacaaccccgccggcgccggcggcgccgccgtggccggcgccgccggcggcgccagaagattcctgtgcggcgtggtggagggcttctacggcagaccctgggtgatggagcagagaaaggagctgttcagaagactgcagaagtgggagctgaacacctacctgtacgcccccaaggacgactacaagcacagaatgttctggagagagatgtacagcgtggaggaggccgagcagctgatgaccctgatcagcgccgccagagagtacgagatcgagttcatctacgccatcagccccggcctggacatcaccttcagcaaccccaaggaggtgagcaccctgaagagaaagctggaccaggtgagccagttcggctgcagaagcttcgccctgctgttcgacgacatcgaccacaacatgtgcgccgccgacaaggaggtgttcagcagcttcgcccacgcccaggtgagcatcaccaacgagatctaccagtacctgggcgagcccgagaccttcctgttctgccccaccgagtactgcggcaccttctgctaccccaacgtgagccagagcccctacctgagaaccgtgggcgagaagctgctgcccggcatcgaggtgctgtggaccggccccaaggtggtgagcaaggagatccccgtggagagcatcgaggaggtgagcaagatcatcaagagagcccccgtgatctgggacaacatccacgccaacgactacgaccagaagagactgttcctgggcccctacaagggcagaagcaccgagctgatccccagactgaagggcgtgctgaccaaccccaactgcgagttcgaggccaactacgtggccatccacaccctggccacctggtacaagagcaacatgaacggcgtgagaaaggacgtggtgatgaccgacagcgaggacagcaccgtgagcatccagatcaagctggagaacgagggcagcgacgaggacatcgagaccgacgtgctgtacagcccccagatggccctgaagctggccctgaccgagtggctgcaggagttcggcgtgccccaccagtacagcagcagacaggtggcccacagcggcgccaaggccagcgtggtggacggcacccccctggtggccgcccccagcctgaacgccaccaccgtggtgaccaccgtgtaccaggagcccatcatgagccagggcgccgccctgagcggcgagcccaccaccctgaccaaggaggaggagaagaagcagcccgacgaggagcccatggacatggtggtggagaagcaggaggagaccgaccacaagaacgacaaccagatcctgagcgagatcgtggaggccaagatggccgaggagctgaagcccatggacaccgacaaggagagcatcgccgagagcaagagccccgagatgagcatgcaggaggactgcatcagcgacatcgcccccatgcagaccgacgagcagaccaacaaggagcagttcgtgcccggccccaacgagaagcccctgtacaccgccgagcccgtgaccctggaggacctgcagctgctggccgacctgttctacctgccctacgagcacggccccaagggcgcccagatgctgagagagttccagtggctgagagccaacagcagcgtggtgagcgtgaactgcaagggcaaggacagcgagaagatcgaggagtggagaagcagagccgccaagttcgaggagatgtgcggcctggtgatgggcatgttcaccagactgagcaactgcgccaacagaaccatcctgtacgacatgtacagctacgtgtgggacatcaagagcatcatgagcatggtgaagagcttcgtgcagtggctgggctgcagaagccacagcagcgcccagttcctgatcggcgaccaggagccctgggccttcagaggcggcctggccggcgagttccagagactgctgcccatcgacggcgccaacgacctgttcttccagcccccccccctgacccccaccagcaaggtgtacaccatcagaccctacttccccaaggacgaggccagcgtgtacaagatctgcagagagatgtacgacgacggcgtgggcctgcccttccagagccagcccgacctgatcggcgacaagctggtgggcggcctgctgagcctgagcctggactactgcttcgtgctggaggacgaggacggcatctgcggctacgccctgggcaccgtggacgtgacccccttcatcaagaagtgcaagatcagctggatccccttcatgcaggagaagtacaccaagcccaacggcgacaaggagctgagcgaggccgagaagatcatgctgagcttccacgaggagcaggaggtgctgcccgagaccttcctggccaacttccccagcctgatcaagatggacatccacaagaaggtgaccgaccccagcgtggccaagagcatgatggcctgcctgctgagcagcctgaaggccaacggcagcagaggcgccttctgcgaggtgagacccgacgacaagagaatcctggagttctacagcaagctgggctgcttcgagatcgccaagatggagggcttccccaaggacgtggtgatcctgggcagaagcctgtag

SEQ ID NO: 88653 - DNA, 2034 bp, synthetic construct
  misc_feature 1..2034: note = Description of Artificial Sequence: Synthetic coding sequence
  source 1..2034: mol_type = other DNA
atggtgcagaaggagagccaggccaccctggaggagagagagagcgagctgagcagcaaccccgccgccagcgccggcgccagcctggagccccccgccgcccccgcccccggcgaggacaaccccgccggcgccggcggcgccgccgtggccggcgccgccggcggcgccagaagattcctgtgcggcgtggtggagggcttctacggcagaccctgggtgatggagcagagaaaggagctgttcagaagactgcagaagtgggagctgaacacctacctgtacgcccccaaggacgactacaagcacagaatgttctggagagagatgtacagcgtggaggaggccgagcagctgatgaccctgatcagcgccgccagagagtacgagatcgagttcatctacgccatcagccccggcctggacatcaccttcagcaaccccaaggaggtgagcaccctgaagagaaagctggaccaggtgagccagttcggctgcagaagcttcgccctgctgttcgacgacatcgaccacaacatgtgcgccgccgacaaggaggtgttcagcagcttcgcccacgcccaggtgagcatcaccaacgagatctaccagtacctgggcgagcccgagaccttcctgttctgccccaccgagtactgcggcaccttctgctaccccaacgtgagccagagcccctacctgagaaccgtgggcgagaagctgctgcccggcatcgaggtgctgtggaccggccccaaggtggtgagcaaggagatccccgtggagagcatcgaggaggtgagcaagatcatcaagagagcccccgtgatctgggacaacatccacgccaacgactacgaccagaagagactgttcctgggcccctacaagggcagaagcaccgagctgatccccagactgaagggcgtgctgaccaaccccaactgcgagttcgaggccaactacgtggccatccacaccctggccacctggtacaagagcaacatgaacggcgtgagaaaggacgtggtgatgaccgacagcgaggacagcaccgtgagcatccagatcaagctggagaacgagggcagcgacgaggacatcgagaccgacgtgctgtacagcccccagatggccctgaagctggccctgaccgagtggctgcaggagttcggcgtgccccaccagtacagcagcagacaggtggcccacagcggcgccaaggccagcgtggtggacggcacccccctggtggccgcccccagcctgaacgccaccaccgtggtgaccaccgtgtaccaggagcccatcatgagccagggcgccgccctgagcggcgagcccaccaccctgaccaaggaggaggagaagaagcagcccgacgaggagcccatggacatggtggtggagaagcaggaggagaccgaccacaagaacgacaaccagatcctgagcgagatcgtggaggccaagatggccgaggagctgaagcccatggacaccgacaaggagagcatcgccgagagcaagagccccgagatgagcatgcaggaggactgcatcagcgacatcgcccccatgcagaccgacgagcagaccaacaaggagcagttcgtgcccggccccaacgagaagcccctgtacaccgccgagcccgtgaccctggaggacctgcagctgctggccgacctgttctacctgccctacgagcacggccccaagggcgcccagatgctgagagagttccagtggctgagagccaacagcagcgtggtgagcgtgaactgcaagggcaaggacagcgagaagatcgaggagtggagaagcagagccgccaagttcgaggagatgtgcggcctggtgatgggcatgttcaccagactgagcaactgcgccaacagaaccatcctgtacgacatgtacagctacgtgtgggacatcaagagcatcatgagcatggtgaagagcttcgtgcagtggctgggcagatgcaccagaaacaacctgttcagcagcaacatcctgagcctgtag

SEQ ID NO: 88654 - DNA, 456 bp, synthetic construct
  misc_feature 1..456: note = Description of Artificial Sequence: Synthetic coding sequence
  source 1..456: mol_type = other DNA
atggtgcagaaggagagccaggccaccctggaggagagagagagcgagctgagcagcaaccccgccgccagcgccggcgccagcctggagccccccgccgcccccgcccccggcgaggacaaccccgccggcgccggcggcgccgccgtggccggcgccgccggcggcgccagaagattcctgtgcggcgtggtggagggcttctacggcagaccctgggtgatggagcagagaaaggagctgttcagaagactgcagaagtgggagctgaacacctacctgtacgcccccaaggacgactacaagcacagaatgttctggagagagatgtacagcgtggaggaggccggcagcttcctgttcttctacctggtgaccatccagctggccgagatcgagagagtgctgtgcgccagcaaggtgatgaccatctgcgtgatcagctgggcctgctag

SEQ ID NO: 88655 - DNA, 771 bp, synthetic construct
  misc_feature 1..771: note = Description of Artificial Sequence: Synthetic coding sequence
  source 1..771: mol_type = other DNA
gccgccggcggcgccagaagattcctgtgcggcgtggtggagggcttctacggcagaccctgggtgatggagcagagaaaggagctgttcagaagactgcagaagtgggagctgaacacctacctgtacgcccccaaggacgactacaagcacagaatgttctggagagagatgtacagcgtggaggaggccgagcagctgatgaccctgatcagcgccgccagagagtacgagatcgagttcatctacgccatcagccccggcctggacatcaccttcagcaaccccaaggaggtgagcaccctgaagagaaagctggaccaggtgagccagttcggctgcagaagcttcgccctgctgttcgacgacatcgaccacaacatgtgcgccgccgacaaggaggtgttcagcagcttcgcccacgcccaggtgagcatcaccaacgagatctaccagtacctgggcgagcccgagaccttcctgttctgccccaccggccccaaggtggtgagcaaggagatccccgtggagagcatcgaggaggtgagcaagatcatcaagagagcccccgtgatctgggacaacatccacgccaacgactacgaccagaagagactgttcctgggcccctacaagggcagaagcaccgagctgatccccagactgaagggcgtgctgaccaaccccaactgcgagttcgaggccaactacgtggccatccacaccctggccacctggtacaagagcaacatgaacggcgtgagaaagtag

SEQ ID NO: 88656 - DNA, 2592 bp, synthetic construct
  misc_feature 1..2592: note = Description of Artificial Sequence: Synthetic coding sequence
  source 1..2592: mol_type = other DNA
atggtgcagaaggagagccaggccaccctggaggagagagagagcgagctgagcagcaaccccgccgccagcgccggcgccagcctggagccccccgccgcccccgcccccggcgaggacaaccccgccggcgccggcggcgccgccgtggccggcgccgccggcggcgccagaagattcctgtgcggcgtggtggagggcttctacggcagaccctgggtgatggagcagagaaaggagctgttcagaagactgcagaagtgggagctgaacacctacctgtacgcccccaaggacgactacaagcacagaatgttctggagagagatgtacagcgtggaggaggccgagcagctgatgaccctgatcagcgccgccagagagtacgagatcgagttcatctacgccatcagccccggcctggacatcaccttcagcaaccccaaggaggtgagcaccctgaagagaaagctggaccaggtgagccagttcggctgcagaagcttcgccctgctgttcgacgacatcgaccacaacatgtgcgccgccgacaaggaggtgttcagcagcttcgcccacgcccaggtgagcatcaccaacgagatctaccagtacctgggcgagcccgagaccttcctgttctgccccaccgagtactgcggcaccttctgctaccccaacgtgagccagagcccctacctgagaaccgtgggcgagaagctgctgcccggcatcgaggtgctgtggaccggccccaaggtggtgagcaaggagatccccgtggagagcatcgaggaggtgagcaagatcatcaagagagcccccgtgatctgggacaacatccacgccaacgactacgaccagaagagactgttcctgggcccctacaagggcagaagcaccgagctgatccccagactgaagggcgtgctgaccaaccccaactgcgagttcgaggccaactacgtggccatccacaccctggccacctggtacaagagcaacatgaacggcgtgagaaaggacgtggtgatgagcagacaggtggcccacagcggcgccaaggccagcgtggtggacggcacccccctggtggccgcccccagcctgaacgccaccaccgtggtgaccaccgtgtaccaggagcccatcatgagccagggcgccgccctgagcggcgagcccaccaccctgaccaaggaggaggagaagaagcagcccgacgaggagcccatggacatggtggtggagaagcaggaggagaccgaccacaagaacgacaaccagatcctgagcgagatcgtggaggccaagatggccgaggagctgaagcccatggacaccgacaaggagagcatcgccgagagcaagagccccgagatgagcatgcaggaggactgcatcagcgacatcgcccccatgcagaccgacgagcagaccaacaaggagcagttcgtgcccggccccaacgagaagcccctgtacaccgccgagcccgtgaccctggaggacctgcagctgctggccgacctgttctacctgccctacgagcacggccccaagggcgcccagatgctgagagagttccagtggctgagagccaacagcagcgtggtgagcgtgaactgcaagggcaaggacagcgagaagatcgaggagtggagaagcagagccgccaagttcgaggagatgtgcggcctggtgatgggcatgttcaccagactgagcaactgcgccaacagaaccatcctgtacgacatgtacagctacgtgtgggacatcaagagcatcatgagcatggtgaagagcttcgtgcagtggctgggctgcagaagccacagcagcgcccagttcctgatcggcgaccaggagccctgggccttcagaggcggcctggccggcgagttccagagactgctgcccatcgacggcgccaacgacctgttcttccagcccccccccctgacccccaccagcaaggtgtacaccatcagaccctacttccccaaggacgaggccagcgtgtacaagatctgcagagagatgtacgacgacggcgtgggcctgcccttccagagccagcccgacctgatcggcgacaagctggtgggcggcctgctgagcctgagcctggactactgcttcgtgctggaggacgaggacggcatctgcggctacgccctgggcaccgtggacgtgacccccttcatcaagaagtgcaagatcagctggatccccttcatgcaggagaagtacaccaagcccaacggcgacaaggagctgagcgaggccgagaagatcatgctgagcttccacgaggagcaggaggtgctgcccgagaccttcctggccaacttccccagcctgatcaagatggacatccacaagaaggtgaccgaccccagcgtggccaagagcatgatggcctgcctgctgagcagcctgaaggccaacggcagcagaggcgccttctgcgaggtgagacccgacgacaagagaatcctggagttctacagcaagctgggctgcttcgagatcgccaagatggagggcttccccaaggacgtggtgatcctgggcagaagcctgtag

SEQ ID NO: 88657 - DNA, 1545 bp, synthetic construct
  misc_feature 1..1545: note = Description of Artificial Sequence: Synthetic coding sequence
  source 1..1545: mol_type = other DNA
atggccgtgtggctggcccagtggctgggccccctgctgctggtgagcctgtggggcctgctggcccccgccagcctgctgagaagactgggcgagcacatccagcagttccaggagagcagcgcccagggcctgggcctgagcctgggccccggcgccgccgccctgcccaaggtgggctggctggagcagctgctggaccccttcaacgtgagcgacagaagaagcttcctgcagagatactgggtgaacgaccagcactgggtgggccaggacggccccatcttcctgcacctgggcggcgagggcagcctgggccccggcagcgtgatgagaggccaccccgccgccctggcccccgcctggggcgccctggtgatcagcctggagcacagattctacggcctgagcatccccgccggcggcctggagatggcccagctgagattcctgagcagcagactggccctggccgacgtggtgagcgccagactggccctgagcagactgttcaacatcagcagcagcagcccctggatctgcttcggcggcagctacgccggcagcctggccgcctgggccagactgaagttcccccacctgatcttcgccagcgtggccagcagcgcccccgtgagagccgtgctggacttcagcgagtacaacgacgtggtgagcagaagcctgatgagcaccgccatcggcggcagcctggagtgcagagccgccgtgagcgtggccttcgccgaggtggagagaagactgagaagcggcggcgccgcccaggccgccctgagaaccgagctgagcgcctgcggccccctgggcagagccgagaaccaggccgagctgctgggcgccctgcaggccctggtgggcggcgtggtgcagtacgacggccagaccggcgcccccctgagcgtgagacagctgtgcggcctgctgctgggcggcggcggcaacagaagccacagcaccccctactgcggcctgagaagagccgtgcagatcgtgctgcacagcctgggccagaagtgcctgagcttcagcagagccgagaccgtggcccagctgagaagcaccgagccccagctgagcggcgtgggcgacagacagtggctgtaccagacctgcaccgagttcggcttctacgtgacctgcgagaaccccagatgccccttcagccagctgcccgccctgcccagccagctggacctgtgcgagcaggtgttcggcctgagcgccctgagcgtggcccaggccgtggcccagaccaacagctactacggcggccagacccccggcgccaacaaggtgctgttcgtgaacggcgacaccgacccctggcacgtgctgagcgtgacccaggccctgggcagcagcgagagcaccctgctgatcagaaccggcagccactgcctggacatggcccccgagagacccagcgacagccccagcctgagactgggcagacagaacatcttccagcagctgcagacctggctgaagctggccaaggagagccagatcaagggcgaggtgtag

SEQ ID NO: 88658 - DNA, 2106 bp, synthetic construct
  misc_feature 1..2106: note = Description of Artificial Sequence: Synthetic coding sequence
  source 1..2106: mol_type = other DNA
atggacctgtggaacctgagctggttcctgttcctggacgccctgctggtgatcagcggcctggccacccccgagaacttcgacgtggacggcggcatggaccaggacatcttcgacatcaacgagggcctgggcctggacctgttcgagggcgacatcagactggacagagcccagatcagaaacagcatcatcggcgagaagtacagatggccccacaccatcccctacgtgctggaggacagcctggagatgaacgccaagggcgtgatcctgaacgccttcgagagatacagactgaagacctgcatcgacttcaagccctgggccggcgagaccaactacatcagcgtgttcaagggcagcggctgctggagcagcgtgggcaacagaagagtgggcaagcaggagctgagcatcggcgccaactgcgacagaatcgccaccgtgcagcacgagttcctgcacgccctgggcttctggcacgagcagagcagaagcgacagagacgactacgtgagaatcatgtgggacagaatcctgagcggcagagagcacaacttcaacacctacagcgacgacatcagcgacagcctgaacgtgccctacgactacaccagcgtgatgcactacagcaagaccgccttccagaacggcaccgagcccaccatcgtgaccagaatcagcgacttcgaggacgtgatcggccagagaatggacttcagcgacagcgacctgctgaagctgaaccagctgtacaactgcagcagcagcctgagcttcatggacagctgcagcttcgagctggagaacgtgtgcggcatgatccagagcagcggcgacaacgccgactggcagagagtgagccaggtgcccagaggccccgagagcgaccacagcaacatgggccagtgccagggcagcggcttcttcatgcacttcgacagcagcagcgtgaacgtgggcgccaccgccgtgctggagagcagaaccctgtaccccaagagaggcttccagtgcctgcagttctacctgtacaacagcggcagcgagagcgaccagctgaacatctacatcagagagtacagcgccgacaacgtggacggcaacctgaccctggtggaggagatcaaggagatccccaccggcagctggcagctgtaccacgtgaccctgaaggtgaccaagaagttcagagtggtgttcgagggcagaaagggcagcggcgccagcctgggcggcctgagcatcgacgacatcaacctgagcgagaccagatgcccccaccacatctggcacatcagaaacttcacccagttcatcggcagccccaacggcaccctgtacagcccccccttctacagcagcaagggctacgccttccagatctacctgaacctggcccacgtgaccaacgccggcatctacttccacctgatcagcggcgccaacgacgaccagctgcagtggccctgcccctggcagcaggccaccatgaccctgctggaccagaaccccgacatcagacagagaatgagcaaccagagaagcatcaccaccgaccccttcatgaccaccgacaacggcaactacttctgggacagacccagcaaggtgggcaccgtggccctgttcagcaacggcacccagttcagaagaggcggcggctacggcaccagcgccttcatcacccacgagagactgaagagcagagacttcatcaagggcgacgacgtgtacatcctgctgaccgtggaggacatcagccacctgaacagcacccagatccagctgacccccgcccccagcgtgcaggacctgtgcagcaagaccacctgcaagaacgacggcgtgtgcaccgtgagagacggcaaggccgagtgcagatgccagagcggcgaggactggtggtacatgggcgagagatgcgagaagagaggcagcaccagagacaccatcgtgatcgccgtgagcagcaccgtggccgtgttcgccctgatgctgatcatcaccctggtgagcgtgtactgcaccagaaagaagtacagagagagaatgagcagcaacagacccaacctgaccccccagaaccagcacgccttctag

SEQ ID NO: 88659 - DNA, 894 bp, synthetic construct
  misc_feature 1..894: note = Description of Artificial Sequence: Synthetic coding sequence
  source 1..894: mol_type = other DNA
atggccagcccccagctgtgcagagccctggtgagcgcccagtgggtggccgaggccctgagagcccccagagccggccagcccctgcagctgctggacgccagctggtacctgcccaagctgggcagagacgccagaagagagttcgaggagagacacatccccggcgccgccttcttcgacatcgaccagtgcagcgacagaaccagcccctacgaccacatgctgcccggcgccgagcacttcgccgagtacgccggcagactgggcgtgggcgccgccacccacgtggtgatctacgacgccagcgaccagggcctgtacagcgcccccagagtgtggtggatgttcagagccttcggccaccacgccgtgagcctgctggacggcggcctgagacactggctgagacagaacctgcccctgagcagcggcaagagccagcccgcccccgccgagttcagagcccagctggaccccgccttcatcaagacctacgaggacatcaaggagaacctggagagcagaagattccaggtggtggacagcagagccaccggcagattcagaggcaccgagcccgagcccagagacggcatcgagcccggccacatccccggcaccgtgaacatccccttcaccgacttcctgagccaggagggcctggagaagagccccgaggagatcagacacctgttccaggagaagaaggtggacctgagcaagcccctggtggccacctgcggcagcggcgtgaccgcctgccacgtggccctgggcgcctacctgtgcggcaagcccgacgtgcccatctacgacggcagctgggtggagtggtacatgagagccagacccgaggacgtgatcagcgagggcagaggcaagacccactag

SEQ ID NO: 88660 - DNA, 954 bp, synthetic construct
  misc_feature 1..954: note = Description of Artificial Sequence: Synthetic coding sequence
  source 1..954: mol_type = other DNA
atggccgagcccggcagcagagagagcgagaccagagccagaagccccagcgtggccgccatggccagcccccagctgtgcagagccctggtgagcgcccagtgggtggccgaggccctgagagcccccagagccggccagcccctgcagctgctggacgccagctggtacctgcccaagctgggcagagacgccagaagagagttcgaggagagacacatccccggcgccgccttcttcgacatcgaccagtgcagcgacagaaccagcccctacgaccacatgctgcccggcgccgagcacttcgccgagtacgccggcagactgggcgtgggcgccgccacccacgtggtgatctacgacgccagcgaccagggcctgtacagcgcccccagagtgtggtggatgttcagagccttcggccaccacgccgtgagcctgctggacggcggcctgagacactggctgagacagaacctgcccctgagcagcggcaagagccagcccgcccccgccgagttcagagcccagctggaccccgccttcatcaagacctacgaggacatcaaggagaacctggagagcagaagattccaggtggtggacagcagagccaccggcagattcagaggcaccgagcccgagcccagagacggcatcgagcccggccacatccccggcaccgtgaacatccccttcaccgacttcctgagccaggagggcctggagaagagccccgaggagatcagacacctgttccaggagaagaaggtggacctgagcaagcccctggtggccacctgcggcagcggcgtgaccgcctgccacgtggccctgggcgcctacctgtgcggcaagcccgacgtgcccatctacgacggcagctgggtggagtggtacatgagagccagacccgaggacgtgatcagcgagggcagaggcaagacccactag

SEQ ID NO: 88661 - DNA, 894 bp, synthetic construct; identical to SEQ ID NO: 88659
  misc_feature 1..894: note = Description of Artificial Sequence: Synthetic coding sequence
  source 1..894: mol_type = other DNA

SEQ ID NO: 88662 - DNA, 894 bp, synthetic construct; identical to SEQ ID NO: 88659
  misc_feature 1..894: note = Description of Artificial Sequence: Synthetic coding sequence
  source 1..894: mol_type = other DNA

SEQ ID NO: 88663 - DNA, 894 bp, synthetic construct; identical to SEQ ID NO: 88659
  misc_feature 1..894: note = Description of Artificial Sequence: Synthetic coding sequence
  source 1..894: mol_type = other DNA

SEQ ID NO: 88664 - DNA, 894 bp, synthetic construct; identical to SEQ ID NO: 88659
  misc_feature 1..894: note = Description of Artificial Sequence: Synthetic coding sequence
  source 1..894: mol_type = other DNA

SEQ ID NO: 88665 - DNA, 738 bp, synthetic construct
  misc_feature 1..738: note = Description of Artificial Sequence: Synthetic coding sequence
  source 1..738: mol_type = other DNA
atggccagcccccagctgtgcagagccctggtgagcgcccagtgggtggccgaggccctgagagcccccagagccggccagcccctgcagctgctggacgccagctggtacctgcccaagctgggcagagacgccagaagagagttcgaggagagacacatccccggcgccgccttcttcgacatcgaccagtgcagcgacagaaccagcccctacgaccacatgctgcccggcgccgagcacttcgccgagtacgccggcagactgggcgtgggcgccgccacccacgtggtgatctacgacgccagcgaccagggcctgtacagcgcccccagagtgtggtggatgttcagagccttcggccaccacgccgtgagcctgctggacggcggcctgagacactggctgagacagaacctgcccctgagcagcggcaagagccagcccgcccccgccgagttcagagcccagctggaccccgccttcatcaagacctacgaggacatcaaggagaacctggagagcagaagattccaggtggtggacagcagagccaccggcagattcagaggcaccgagcccgagccccccgccgtgggcatcgagcccggccacatccccggcaccgtgaacatccccttcaccgacttcctgagccaggacggcagctgggtggagtggtacatgagagccagacccgaggacgtgatcagcgagggcagaggcaagacccactag

SEQ ID NO: 88666 - DNA, 765 bp, synthetic construct
  misc_feature 1..765: note = Description of Artificial Sequence: Synthetic coding sequence
  source 1..765: mol_type = other DNA
atggaccccgccgccagcagctgcatgagaagcctgcagccccccgcccccgtgtggggctgcctgagaaacccccacagcgagggcaacggcgccagcggcctgccccactacccccccacccccttcagcttccaccagaagcccgacttcctggccaccgccaccgccgcctaccccgacttcagcgccagctgcctggccgccaccccccacagcctgccccaggaggagcacatcttcaccgagcagcaccccgccttcccccagagccccaactggcacttccccgtgagcgacgccagaagaagacccaacagcggccccgccggcggcagcaaggagatgggcaccagcagcctgggcctggtggacaccaccggcggccccggcgacgactacggcgtgctgggcagcaccgccaacgagaccgagaagaagagcagcagaagaagaaaggagagcagcgacaaccaggagaacagaggcaagcccgagggcagcagcaaggccagaaaggagagaaccgccttcaccaaggagcagctgagagagctggaggccgagttcgcccaccacaactacctgaccagactgagaagatacgagatcgccgtgaacctggacctgagcgagagacaggtgaaggtgtggttccagaacagaagaatgaagtggaagagagtgaagggcggccagcccatcagccccaacggccaggaccccgaggacggcgacagcaccgccagccccagcagcgagtag

SEQ ID NO: 88667 - DNA, 555 bp, synthetic construct
  misc_feature 1..555: note = Description of Artificial Sequence: Synthetic coding sequence
  source 1..555: mol_type = other DNA
atggaccccgccgccagcagctgcatgagaagcctgcagccccccgcccccgtgtggggctgcctgagaaacccccacagcgagggcaacggcgccagcggcctgccccactacccccccacccccttcagcttccaccagaagcccgacttcctggccaccgccaccgccgcctaccccgacttcagcgccagctgcctggccgccaccccccacagcctgccccaggaggagcacatcttcaccgagcagcaccccgccttcccccagagccccaactggcacttccccgtgagcgacgccagaagaagacccaacagcggccccgccggcggcagcaaggagatgggcaccagcagcctgggcctggtggacaccaccggcggccccggcgacgactacggcgtgctgggcagcaccgccaacgagaccgagaagaagagcagcagaagaagaaaggagagcagcggccagagcgtggtgcccgagcccaaggacgaggtggaggcctgcgagggcagaagcgcccacctgccccagtgggccggcccctag

SEQ ID NO: 88668 - DNA, 420 bp, synthetic construct
  misc_feature 1..420: note = Description of Artificial Sequence: Synthetic coding sequence
  source 1..420: mol_type = other DNA
atgggcaccagcagcctgggcctggtggacaccaccggcggccccggcgacgactacggcgtgctgggcagcaccgccaacgagaccgagaagaagagcagcagaagaagaaaggagagcagcgacaaccaggagaacagaggcaagcccgagggcagcagcaaggccagaaaggagagaaccgccttcaccaaggagcagctgagagagctggaggccgagttcgcccaccacaactacctgaccagactgagaagatacgagatcgccgtgaacctggacctgagcgagagacaggtgaaggtgtggttccagaacagaagaatgaagtggaagagagtgaagggcggccagcccatcagccccaacggccaggaccccgaggacggcgacagcaccgccagccccagcagcgagtag

SEQ ID NO: 88669 - DNA, 915 bp, synthetic construct
  misc_feature 1..915: note = Description of Artificial Sequence: Synthetic coding sequence
  source 1..915: mol_type = other DNA
atggagcaccccctgttcggctgcctgagaagcccccacgccaccgcccagggcctgcaccccttcagccagagcagcctggccctgcacggcagaagcgaccacatgagctaccccgagctgagcaccagcagcagcagctgcatcatcgccggctaccccaacgaggagggcatgttcgccagccagcaccacagaggccaccaccaccaccaccaccaccaccaccaccaccaccaccagcagcagcagcaccaggccctgcagaccaactggcacctgccccagatgagcagcccccccagcgccgccagacacagcctgtgcctgcagcccgacagcggcggcccccccgagctgggcagcagcccccccgtgctgtgcagcaacagcagcagcctgggcagcagcacccccaccggcgccgcctgcgcccccggcgactacggcagacaggccctgagccccgccgaggccgagaagagaagcggcggcaagagaaagagcgacagcagcgacagccaggagggcaactacaagagcgaggtgaacagcaagcccagaaaggagagaaccgccttcaccaaggagcagatcagagagctggaggccgagttcgcccaccacaactacctgaccagactgagaagatacgagatcgccgtgaacctggacctgaccgagagacaggtgaaggtgtggttccagaacagaagaatgaagtggaagagagtgaagggcggccagcagggcgccgccgccagagagaaggagctggtgaacgtgaagaagggcaccctgctgcccagcgagctgagcggcatcggcgccgccaccctgcagcagaccggcgacagcatcgccaacgaggacagccacgacagcgaccacagcagcgagcacgcccacctgtag

SEQ ID NO: 88670 - DNA, 705 bp, synthetic construct
  misc_feature 1..705: note = Description of Artificial Sequence: Synthetic coding sequence
  source 1..705: mol_type = other DNA
atggccgccagcagatgggccagaaaggccgtggtgctgctgtgcgccagcgacctgctgctgctgctgctgctgctgcccccccccggcagctgcgccgccgagggcagccccggcacccccgacgagagcacccccccccccagaaagaagaagaaggacatcagagactacaacgacgccgacatggccagactgctggagcagtgggagaaggacgacgacatcgaggagggcgacctgcccgagcacaagagacccagcgcccccgtggacttcagcaagatcgaccccagcaagcccgagagcatcctgaagatgaccaagaagggcaagaccctgatgatgttcgtgaccgtgagcggcagccccaccgagaaggagaccgaggagatcaccagcctgtggcagggcagcctgttcaacgccaactacgacgtgcagagattcatcgtgggcagcgacagagccatcttcatgctgagagacggcagctacgcctgggagatcaaggacttcctggtgggccaggacagatgcgccgacgtgaccctggagggccaggtgtaccccggcaagggcggcggcagcaaggagaagaacaagaccaagcaggacaagggcaagaagaagaaggagggcgacctgaagagcagaagcagcaaggaggagaacagagccggcaacaagagagaggacctgtag

SEQ ID NO: 88671 - DNA, 705 bp, synthetic construct; identical to SEQ ID NO: 88670
  misc_feature 1..705: note = Description of Artificial Sequence: Synthetic coding sequence
  source 1..705: mol_type = other DNA

SEQ ID NO: 88672 - DNA, 1194 bp, synthetic construct
  misc_feature 1..1194: note = Description of Artificial Sequence: Synthetic coding sequence
  source 1..1194: mol_type = other DNA
atggcccagagcccccccccccagagcctgctgggccacgaccactggatcttcgcccagggctggggctgggccggccactgggacagcaccagccccgccagcagcagcgacagcagcggcagctgcccctgcgacggcgccagaggcctgccccagccccagccccccagctgcagcagcagagccgccgaggccgccgccaccacccccagaagagccagaaccggccccgccggcggccagagacagagcgccagcgagagagagaagctgagaatgagaaccctggccagagccctgcacgagctgagaagattcctgccccccagcctggcccccgccggccagagcctgaccaagatcgagaccctgagactggccatcagatacatcggccacctgagcgccgtgctgggcctgagcgaggagagcctgcagtgcagaagaagacagagaggcgacgccggcagcccctggggctgccccctgtgccccgacagaggccccgccgaggcccagacccaggccgagggccagggccagggccagggccagggccagggccagggccagggccagggccagggccagggccagggccagggccagggcagaagacccggcctggtgagcgccgtgctggccgaggccagctggggcagccccagcgcctgccccggcgcccaggccgcccccgagagactgggcagaggcgtgcacgacaccgacccctgggccacccccccctactgccccaagatccagagccccccctacagcagccagggcaccaccagcgacgccagcctgtggacccccccccagggctgcccctggacccagagcagccccgagcccagaaacccccccgtgccctggaccgccgcccccgccaccctggagctggccgccgtgtaccagggcctgagcgtgagccccgagccctgcctgagcctgggcgcccccagcctgctgccccaccccagctgccagagactgcagccccagacccccggcagatgctggagccacagcgccgaggtggtgcccaacagcgaggaccagggccccggcgccgccttccagctgagcgaggccagccccccccagagcagcggcctgagattcagcggctgccccgagctgtggcaggaggacctggagggcgccagactgggcatcttctactag

SEQ ID NO: 88673 - DNA, 3510 bp, synthetic construct
  misc_feature 1..3510: note = Description of Artificial Sequence: Synthetic coding sequence
  source 1..3510: mol_type = other DNA
atggagcccagagagagcggcaaggcccccgtgaccttcgacgacatcaccgtgtacctgctgcaggaggagtgggtgctgctgagccagcagcagaaggagctgtgcggcagcaacaagctggtggcccccctgggccccaccgtggccaaccccgagctgttcagaaagttcggcagaggccccgagccctggctgggcagcgtgcagggccagagaagcctgctggagcaccaccccggcaagaagcagatgggctacatgggcgagatggaggtgcagggccccaccagagagagcggccagagcctgcccccccagaagaaggcctacctgagccacctgagcaccggcagcggccacatcgagggcgactgggccggcagaaacagaaagctgctgaagcccagaagcatccagaagagctggttcgtgcagttcccctggctgatcatgaacgaggagcagaccgccctgttctgcagcgcctgcagagagtaccccagcatcagagacaagagaagcagactgatcgagggctacaccggccccttcaaggtggagaccctgaagtaccacgccaagagcaaggcccacatgttctgcgtgaacgccctggccgccagagaccccatctgggccgccagattcagaagcatcagagacccccccggcgacgtgctggccagccccgagcccctgttcaccgccgactgccccatcttctacccccccggccccctgggcggcttcgacagcatggccgagctgctgcccagcagcagagccgagctggaggaccccggcggcgacggcgccatccccgccatgtacctggactgcatcagcgacctgagacagaaggagatcaccgacggcatccacagcagcagcgacatcaacatcctgtacaacgacgccgtggagagctgcatccaggaccccagcgccgagggcctgagcgaggaggtgcccgtggtgttcgaggagctgcccgtggtgttcgaggacgtggccgtgtacttcaccagagaggagtggggcatgctggacaagagacagaaggagctgtacagagacgtgatgagaatgaactacgagctgctggccagcctgggccccgccgccgccaagcccgacctgatcagcaagctggagagaagagccgccccctggatcaaggaccccaacggccccaagtggggcaagggcagaccccccggcaacaagaagatggtggccgtgagagaggccgacacccaggccagcgccgccgacagcgccctgctgcccggcagccccgtggaggccagagccagctgctgcagcagcagcatctgcgaggagggcgacggccccagaagaatcaagagaacctacagacccagaagcatccagagaagctggttcggccagttcccctggctggtgatcgaccccaaggagaccaagctgttctgcagcgcctgcatcgagagacccaacctgcacgacaagagcagcagactggtgagaggctacaccggccccttcaaggtggagaccctgaagtaccacgaggtgagcaaggcccacagactgtgcgtgaacaccgtggagatcaaggaggacaccccccacaccgccctggtgcccgagatcagcagcgacctgatggccaacatggagcacttcttcaacgccgcctacagcatcgcctaccacagcagacccctgaacgacttcgagaagatcctgcagctgctgcagagcaccggcaccgtgatcctgggcaagtacagaaacagaaccgcctgcacccagttcatcaagtacatcagcgagaccctgaagagagagatcctggaggacgtgagaaacagcccctgcgtgagcgtgctgctggacagcagcaccgacgccagcgagcaggcctgcgtgggcatctacatcagatacttcaagcagatggaggtgaaggagagctacatcaccctggcccccctgtacagcgagaccgccgacggctacttcgagaccatcgtgagcgccctggacgagctggacatccccttcagaaagcccggctgggtggtgggcctgggcaccgacggcagcgccatgctgagctgcagaggcggcctggtggagaagttccaggaggtgatcccccagctgctgcccgtgcactgcgtggcccacagactgcacctggccgtggtggacgcctgcggcagcatcgacctggtgaagaagtgcgacagacacatcagaaccgtgttcaagttctaccagagcagcaacaagagactgaacgagctgcaggagggcgccgcccccctggagcaggagatcatcagactgaaggacctgaacgccgtgagatgggtggccagcagaagaagaaccctgcacgccctgctggtgagctggcccgccctggccagacacctgcagagagtggccgaggccggcggccagatcggccacagagccaagggcatgctgaagctgatgagaggcttccacttcgtgaagttctgccacttcctgctggacttcctgagcatctacagacccctgagcgaggtgtgccagaaggagatcgtgctgatcaccgaggtgaacgccaccctgggcagagcctacgtggccctggagagcctgagacaccaggccggccccaaggaggaggagttcaacgccagcttcaaggacggcagactgcacggcatctgcctggacaagctggaggtggccgagcagagattccaggccgacagagagagaaccgtgctgaccggcatcgagtacctgcagcagagattcgacgccgacagacccccccagctgaagaacatggaggtgttcgacaccatggcctggcccagcggcatcgagctggccagcttcggcaacgacgacatcctgaacctggccagatacttcgagtgcagcctgcccaccggctacagcgaggaggccctgctggaggagtggctgggcctgaagaccatcgcccagcacctgcccttcagcatgctgtgcaagaacgccctggcccagcactgcagattccccctgctgagcaagctgatggccgtggtggtgtgcgtgcccatcagcaccagctgctgcgagagaggcttcaaggccatgaacagaatcagaaccgacgagagaaccaagctgagcaacgaggtgctgaacatgctgatgatgaccgccgtgaacggcgtggccgtgaccgagtacgacccccagcccgccatccagcactggtacctgaccagcagcggcagaagattcagccacgtgtacacctgcgcccaggtgcccgccagaagccccgccagcgccagactgagaaaggaggagatgggcgccctgtacgtggaggagcccagaacccagaagccccccatcctgcccagcagagaggccgccgaggtgctgaaggactgcatcatggagccccccgagagactgctgtacccccacaccagccaggaggcccccggcatgagctag

SEQ ID NO: 88674 - DNA, 981 bp, synthetic construct
  misc_feature 1..981: note = Description of Artificial Sequence: Synthetic coding sequence
  source 1..981: mol_type = other DNA
atgagagagtggtgggtgcaggtgggcctgctggccgtgcccctgctggccgcctacctgcacatcccccccccccagctgagccccgccctgcacagctggaagagcagcggcaagttcttcacctacaagggcctgagaatcttctaccaggacagcgtgggcgtggtgggcagccccgagatcgtggtgctgctgcacggcttccccaccagcagctacgactggtacaagatctgggagggcctgaccctgagattccacagagtgatcgccctggacttcctgggcttcggcttcagcgacaagcccagaccccaccactacagcatcttcgagcaggccagcatcgtggaggccctgctgagacacctgggcctgcagaacagaagaatcaacctgctgagccacgactacggcgacatcgtggcccaggagctgctgtacagatacaagcagaacagaagcggcagactgaccatcaagagcctgtgcctgagcaacggcggcatcttccccgagacccacagacccctgctgctgcagaagctgctgaaggacggcggcgtgctgagccccatcctgaccagactgatgaacttcttcgtgttcagcagaggcctgacccccgtgttcggcccctacaccagacccagcgagagcgagctgtgggacatgtgggccggcatcagaaacaacgacggcaacctggtgatcgacagcctgctgcagtacatcaaccagagaaagaagttcagaagaagatgggtgggcgccctggccagcgtgaccatccccatccacttcatctacggccccctggaccccgtgaacccctaccccgagttcctggagctgtacagaaagaccctgcccagaagcaccgtgagcatcctggacgaccacatcagccactacccccagctggaggaccccatgggcttcctgaacgcctacatgggcttcatcaacagcttctag

SEQ ID NO: 88675 - DNA, 981 bp, synthetic construct; identical to SEQ ID NO: 88674
  misc_feature 1..981: note = Description of Artificial Sequence: Synthetic coding sequence
  source 1..981: mol_type = other DNA

SEQ ID NO: 88676 - DNA, 357 bp, synthetic construct
  misc_feature 1..357: note = Description of Artificial Sequence: Synthetic coding sequence
  source 1..357: mol_type = other DNA
atgagagagtggtgggtgcaggtgggcctgctggccgtgcccctgctggccgcctacctgcacatcccccccccccagctgagccccgccctgcacagctggaagagcagcggcaagttcttcacctacaagggcctgagaatcttctaccaggacagcgtgggcgtggtgggcagccccgagatcgtggtgctgctgcacggcttccccaccagcagctacgactggtacaagatctgggagggcctgaccctgagattccacagagtgatcgccctggacttcctgggcttcggcttcagcgacaagcccagaccccaccactacagcatcttcgagcaggccagcatcgtgtag

SEQ ID NO: 88677 - DNA, 624 bp, synthetic construct
  misc_feature 1..624: note = Description of Artificial Sequence: Synthetic coding sequence
  source 1..624: mol_type = other DNA
atgagagagtggtgggtgcaggtgggcctgctggccgtgcccctgctggccgcctacctgcacatcccccccccccagctgagccccgccctgcacagctggaagagcagcggcaagttcttcacctacaagggcctgagaatcttctaccaggacagcgtgggcgtggtgggcagccccgagatcgtggtgctgctgcacggcttccccaccagcagctacgactggtacaagatctgggagggcctgaccctgagattccacagagtgatcgccctggacttcctgggcttcggcttcagcgacaagcccagaccccaccactacagcatcttcgagcaggccagcatcgtggaggccctgctgagacacctgggcctgcagaacagaagaatcaacctgctgagccacgactacggcgacatcgtggcccaggagctgctgtacagatacaagcagaacagaagcggcagactgaccatcaagagcctgtgcctgagcaacggcggcatcttccccgagacccacagacccctgctgctgcagaagctgctgaaggacggcggcgtgctgagccccatcctgaccagactgatgaacttcttcgtgttcagcagaggctag

SEQ ID NO: 88678 - DNA, 483 bp, synthetic construct
  misc_feature 1..483: note = Description of Artificial Sequence: Synthetic coding sequence
  source 1..483: mol_type = other DNA
atgagagagtggtgggtgcaggtgggcctgctggccgtgcccctgctggccgcctacctgcacatcccccccccccagctgagccccgccctgcacagctggaagagcagcggcaagttcttcacctacaagggcctgagaatcttctaccaggacagcgtgggcgtggtgggcagccccgagatcgtggtgctgctgcacggcttccccaccagcagctacgactggtacaagatctgggagggcctgaccctgagattccacagagtgatcgccctggacttcctgggcttcggcttcagcgacaagcccagaccccaccactacagcatcttcgagcaggccagcatcgtggaggccctgctgagacacctgggcctgcagaacagaagaatcaacctgctgagccacgactacggcgacatcgtggcccaggagctgctgtacagatacaagcagaacagaagcggcagactgacctag

SEQ ID NO: 88679 - DNA, 384 bp, synthetic construct
  misc_feature 1..384: note = Description of Artificial Sequence: Synthetic coding sequence
  source 1..384: mol_type = other DNA
atgagagagtggtgggtgcaggtgggcctgctggccgtgcccctgctggccgcctacctgcacatcccccccccccagctgagccccgccctgcacagctggaagagcagcggcaagttcttcacctacaagggcctgagaatcttctaccaggacagcgtgggcgtggtgggcagccccgagatcgtggtgctgctgcacggcttccccaccagcagctacgactggtacaagatctgggagggcctgaccctgagattccacagagtgatcgccctggacttcctgggcttcggcttcagcgacaagcccagaccccaccactacagcatcttcgagcaggccagcatcgtggaggccctgctgagacacctgggcctgtag

SEQ ID NO: 88680 - DNA, 522 bp, synthetic construct
  misc_feature 1..522: note = Description of Artificial Sequence: Synthetic coding sequence
  source 1..522: mol_type = other DNA
atgagagagtggtgggtgcaggtgggcctgctggccgtgcccctgctggccgcctacctgcacatcccccccccccagctgagccccgccctgcacagctggaagagcagcggcaagttcttcacctacaagggcctgagaatcttctaccaggacagcgtgggcgtggtgggcagccccgagatcgtggtgctgctgcacggcttccccaccagcagctacgactggtacaagatctgggagggcctgaccctgagattccacagagtgatcgccctggacttcctgggcttcggcttcagcgacaagcccagaccccaccactacagcatcttcgagcaggccagcatcgtggaggccctgctgagacacctgggcctgcagaacagaagaatcaacctgctgagccacgactacggcgacatcgtggcccaggagctgctgtacagatacaagcagaacagaagcggcagactgaccatcaagagcctgtgcctgagcaacggcggcaactgcctgtag

SEQ ID NO: 88681 - DNA, 879 bp, synthetic construct
  misc_feature 1..879: note = Description of Artificial Sequence: Synthetic coding sequence
  source 1..879: mol_type = other DNA
atgagagagtggtgggtgcaggtgggcctgctggccgtgcccctgctggccgcctacctgcacatcccccccccccagctgagccccgccctgcacagctggaagagcagcggcaagttcttcacctacaagggcctgagaatcttctaccaggacagcgtgggcgtggtgggcagccccgagatcgtggtgctgctgcacggcttccccaccagcagctacgactggtacaagatctgggagggcctgaccctgagattccacagagtgatcgccctggacttcctgggcttcggcttcagcgacaagcccagaccccaccactacagcatcttcgagcaggccagcatcgtggaggccctgctgagacacctgggcctgcagaacagaagaatcaacctgctgagccacgactacggcgacatcgtggcccaggagctgctgtacagatacaagcagaacagaagcggcagactgaccatcaagagcctgtgcctgagcaacggcggcatcttccccgagacccacagacccctgctgctgcagaagctgctgaaggacggcggcgtgctgagccccatcctgaccagactgatgaacttcttcgtgttcagcagaggcctgctgcagtacatcaaccagagaaagaagttcagaagaagatgggtgggcgccctggccagcgtgaccatccccatccacttcatctacggccccctggaccccgtgaacccctaccccgagttcctggagctgtacagaaagaccctgcccagaagcaccgtgagcatcctggacgaccacatcagccactacccccagctggaggaccccatgggcttcctgaacgcctacatgggcttcatcaacagcttctag

SEQ ID NO: 88682 - DNA, 879 bp, synthetic construct; identical to SEQ ID NO: 88681
  misc_feature 1..879: note = Description of Artificial Sequence: Synthetic coding sequence
  source 1..879: mol_type = other DNA

SEQ ID NO: 88683 - DNA, 582 bp, synthetic construct
  misc_feature 1..582: note = Description of Artificial Sequence: Synthetic coding sequence
  source 1..582: mol_type = other DNA
atggacaacctgagagagaccttcctgagcctggaggacggcctgggcagcagcgacagccccggcctgctgagcagctgggactggaaggacagagccggccccttcgagctgaaccaggccagccccagccagagcctgagccccgcccccagcctggagagctacagcagcagcccctgccccgccgtggccggcctgccctgcgagcacggcggcgccagcagcggcggcagcgagggctgcagcgtgggcggcgccagcggcctggtggaggtggactacaacatgctggccttccagcccacccacctgcagggcggcggcggccccaaggcccagaagggcaccaaggtgagaatgagcgtgcagagaagaagaaaggccagcgagagagagaagctgagaatgagaaccctggccgacgccctgcacaccctgagaaactacctgccccccgtgtacagccagagaggccagcccctgaccaagatccagaccctgaagtacaccatcaagtacatcggcgagctgaccgacctgctgaacagaggcagagagcccagagcccagagcgcctag

SEQ ID NO: 88684 - DNA, 1893 bp, synthetic construct
  misc_feature 1..1893: note = Description of Artificial Sequence: Synthetic coding sequence
  source 1..1893: mol_type = other DNA
atggccctgcccaccgccagacccctgctgggcagctgcggcacccccgccctgggcagcctgctgttcctgctgttcagcctgggctgggtgcagcccagcagaaccctggccggcgagaccggccaggaggccgcccccctggacggcgtgctggccaacccccccaacatcagcagcctgagccccagacagctgctgggcttcccctgcgccgaggtgagcggcctgagcaccgagagagtgagagagctggccgtggccctggcccagaagaacgtgaagctgagcaccgagcagctgagatgcctggcccacagactgagcgagccccccgaggacctggacgccctgcccctggacctgctgctgttcctgaaccccgacgccttcagcggcccccaggcctgcaccagattcttcagcagaatcaccaaggccaacgtggacctgctgcccagaggcgcccccgagagacagagactgctgcccgccgccctggcctgctggggcgtgagaggcagcctgctgagcgaggccgacgtgagagccctgggcggcctggcctgcgacctgcccggcagattcgtggccgagagcgccgaggtgctgctgcccagactggtgagctgccccggccccctggaccaggaccagcaggaggccgccagagccgccctgcagggcggcggccccccctacggcccccccagcacctggagcgtgagcaccatggacgccctgagaggcctgctgcccgtgctgggccagcccatcatcagaagcatcccccagggcatcgtggccgcctggagacagagaagcagcagagaccccagctggagacagcccgagagaaccatcctgagacccagattcagaagagaggtggagaagaccgcctgccccagcggcaagaaggccagagagatcgacgagagcctgatcttctacaagaagtgggagctggaggcctgcgtggacgccgccctgctggccacccagatggacagagtgaacgccatccccttcacctacgagcagctggacgtgctgaagcacaagctggacgagctgtacccccagggctaccccgagagcgtgatccagcacctgggctacctgttcctgaagatgagccccgaggacatcagaaagtggaacgtgaccagcctggagaccctgaaggccctgctggaggtgaacaagggccacgagatgagcccccaggcccccagaagacccctgccccaggtggccaccctgatcgacagattcgtgaagggcagaggccagctggacaaggacaccctggacaccctgaccgccttctaccccggctacctgtgcagcctgagccccgaggagctgagcagcgtgccccccagcagcatctgggccgtgagaccccaggacctggacacctgcgaccccagacagctggacgtgctgtaccccaaggccagactggccttccagaacatgaacggcagcgagtacttcgtgaagatccagagcttcctgggcggcgcccccaccgaggacctgaaggccctgagccagcagaacgtgagcatggacctggccaccttcatgaagctgagaaccgacgccgtgctgcccctgaccgtggccgaggtgcagaagctgctgggcccccacgtggagggcctgaaggccgaggagagacacagacccgtgagagactggatcctgagacagagacaggacgacctggacaccctgggcctgggcctgcagggcggcatccccaacggctacctggtgctggacctgagcatgcaggaggccctgagcggcaccccctgcctgctgggccccggccccgtgctgaccgtgctggccctgctgctggccagcaccctggcctag

SEQ ID NO: 88685 - DNA, 1869 bp, synthetic construct
  misc_feature 1..1869: note = Description of Artificial Sequence: Synthetic coding sequence
  source 1..1869: mol_type = other DNA
atggccctgcccaccgccagacccctgctgggcagctgcggcacccccgccctgggcagcctgctgttcctgctgttcagcctgggctgggtgcagcccagcagaaccctggccggcgagaccggccaggaggccgcccccctggacggcgtgctggccaacccccccaacatcagcagcctgagccccagacagctgctgggcttcccctgcgccgaggtgagcggcctgagcaccgagagagtgagagagctggccgtggccctggcccagaagaacgtgaagctgagcaccgagcagctgagatgcctggcccacagactgagcgagccccccgaggacctggacgccctgcccctggacctgctgctgttcctgaaccccgacgccttcagcggcccccaggcctgcaccagattcttcagcagaatcaccaaggccaacgtggacctgctgcccagaggcgcccccgagagacagagactgctgcccgccgccctggcctgctggggcgtgagaggcagcctgctgagcgaggccgacgtgagagccctgggcggcctggcctgcgacctgcccggcagattcgtggccgagagcgccgaggtgctgctgcccagactggtgagctgccccggccccctggaccaggaccagcaggaggccgccagagccgccctgcagggcggcggccccccctacggcccccccagcacctggagcgtgagcaccatggacgccctgagaggcctgctgcccgtgctgggccagcccatcatcagaagcatcccccagggcatcgtggccgcctggagacagagaagcagcagagaccccagctggagacagcccgagagaaccatcctgagacccagattcagaagagaggtggagaagaccgcctgccccagcggcaagaaggccagagagatcgacgagagcctgatcttctacaagaagtgggagctggaggcctgcgtggacgccgccctgctggccacccagatggacagagtgaacgccatccccttcacctacgagcagctggacgtgctgaagcacaagctggacgagctgtacccccagggctaccccgagagcgtgatccagcacctgggctacctgttcctgaagatgagccccgaggacatcagaaagtggaacgtgaccagcctggagaccctgaaggccctgctggaggtgaacaagggccacgagatgagcccccaggtggccaccctgatcgacagattcgtgaagggcagaggccagctggacaaggacaccctggacaccctgaccgccttctaccccggctacctgtgcagcctgagccccgaggagctgagcagcgtgccccccagcagcatctgggccgtgagaccccaggacctggacacctgcgaccccagacagctggacgtgctgtaccccaaggccagactggccttccagaacatgaacggcagcgagtacttcgtgaagatccagagcttcctgggcggcgcccccaccgaggacctgaaggccctgagccagcagaacgtgagcatggacctggccaccttcatgaagctgagaaccgacgccgtgctgcccctgaccgtggccgaggtgcagaagctgctgggcccccacgtggagggcctgaaggccgaggagagacacagacccgtgagagactggatcctgagacagagacaggacgacctggacaccctgggcctgggcctgcagggcggcatccccaacggctacctggtgctggacctgagcatgcaggaggccctgagcggcaccccctgcctgctgggccccggccccgtgctgaccgtgctggccctgctgctggccagcaccctggcctag

SEQ ID NO: 88686 - DNA, 1893 bp, synthetic construct; identical to SEQ ID NO: 88684
  misc_feature 1..1893: note = Description of Artificial Sequence: Synthetic coding sequence
  source 1..1893: mol_type = other DNA

SEQ ID NO: 88687 - DNA, 1869 bp, synthetic construct; identical to SEQ ID NO: 88685
  misc_feature 1..1869: note = Description of Artificial Sequence: Synthetic coding sequence
  source 1..1869: mol_type = other DNA

SEQ ID NO: 88688 - DNA, 1869 bp, synthetic construct; identical to SEQ ID NO: 88685
  misc_feature 1..1869: note = Description of Artificial Sequence: Synthetic coding sequence
  source 1..1869: mol_type = other DNA

SEQ ID NO: 88689 - DNA, 1782 bp, synthetic construct
  misc_feature 1..1782: note = Description of Artificial Sequence: Synthetic coding sequence
  source 1..1782: mol_type = other DNA
atgagagacagcaccggcgccggcaacagcctggtgcacaagagaagccccctgagaagaaaccagaagacccccaccagcctgaccaagctgagcctgcaggacggccacaaggccaagaagcccgcctgcaagttcgaggagggccaggacgtgctggccagatggagcgacggcctgttctacctgggcaccatcaagaagatcaacatcctgaagcagagctgcttcatcatcttcgaggacagcagcaagagctgggtgctgtggaaggacatccagaccggcgccaccggcagcggcgagatggtgtgcaccatctgccaggaggagtacagcgaggcccccaacgagatggtgatctgcgacaagtgcggccagggctaccaccagctgtgccacaccccccacatcgactgcagcgtgatcgacagcgacgagaagtggctgtgcagacagtgcgtgttcgccaccaccaccaagagaggcggcgccctgaagaagggccccaacgccaaggccctgcaggtgatgaagcagaccctgccctacagcgtggccgacctggagtgggacgccggccacaagaccaacgtgcagcagtgctactgctactgcggcggccccggcgactggtacctgaagatgctgcagtgctgcaagtgcaagcagtggttccacgaggcctgcgtgcagtgcctgcagaagcccatgctgttcggcgacagattctacaccttcatctgcagcgtgtgcagcagcggccccgagtacctgaagagactgcccctgcagtgggtggacatcgcccacctgtgcctgtacaacctgagcgtgatccacaagaagaagtacttcgacagcgagctggagctgatgacctacatcaacgagaactgggacagactgcaccccggcgagctggccgacacccccaagagcgagagatacgagcacgtgctggaggccctgaacgactacaagaccatgttcatgagcggcaaggagatcaagaagaagaagcacctgttcggcctgagaatcagagtgccccccgtgccccccaacgtggccttcaaggccgagaaggagcccgagggcaccagccacgagttcaagatcaagggcagaaaggccagcaagcccatcagcgacagcagagaggtgagcaacggcatcgagaagaagggcaagaagaagagcgtgggcagaccccccggcccctacaccagaaagatgatccagaagaccgccgagcccctgctggacaaggagagcatcagcgagaaccccaccctggacctgccctgcagcatcggcagaaccgagggcaccgcccacagcagcaacaccagcgacgtggacttcaccggcgccagcagcgccaaggagaccaccagcagcagcatcagcagacactacggcctgagcgacagcagaaagagaaccagaaccggcagaagctggcccgccgccatcccccacctgagaagaagaagaggcagactgcccagaagagccctgcagacccagaacagcgagatcgtgaaggacgacgagggcaaggaggactaccagttcgacgagctgaacaccgagatcctgaacaacctggccgaccaggagctgcagctgaaccacctgaagaacagcatcaccagctacttcggcgccgccggcagaatcgcctgcggcgagaagtacagagtgctggccagaagagtgaccctggacggcaaggtgcagtacctggtggagtgggagggcgccaccgccagctag

SEQ ID NO: 88690 - DNA, 1611 bp, synthetic construct
  misc_feature 1..1611: note = Description of Artificial Sequence: Synthetic coding sequence
  source 1..1611: mol_type = other DNA
atgagagacagcaccggcgccggcaacagcctggtgcacaagagaagccccctgagaagaaaccagaagacccccaccagcctgaccaagctgagcctgcaggacggccacaaggccaagaagcccgcctgcaagttcgaggagggccaggacgtgctggccagatggagcgacggcctgttctacctgggcaccatcaagaagatcaacatcctgaagcagagctgcttcatcatcttcgaggacagcagcaagagctgggtgctgtggaaggacatccagaccggcgccaccggcagcggcgagatggtgtgcaccatctgccaggaggagtacagcgaggcccccaacgagatggtgatctgcgacaagtgcggccagggctaccaccagctgtgccacaccccccacatcgactgcagcgtgatcgacagcgacgagaagtggctgtgcagacagtgcgtgttcgccaccaccaccaagagaggcggcgccctgaagaagggccccaacgccaaggccctgcaggtgatgaagcagaccctgccctacagcgtggccgacctggagtgggacgccggccacaagaccaacgtgcagcagtgctactgctactgcggcggccccggcgactggtacctgaagatgctgcagtgctgcaagtgcaagcagtggttccacgaggcctgcgtgcagtgcctgcagaagcccatgctgttcggcgacagattctacaccttcatctgcagcgtgtgcagcagcggccccgagtacctgaagagactgcccctgcagtgggtggacatcgcccacctgtgcctgtacaacctgagcgtgatccacaagaagaagtacttcgacagcgagctggagctgatgacctacatcaacgagaactgggacagactgcaccccggcgagctggccgacacccccaagagcgagagatacgagcacgtgctggaggccctgaacgactacaagaccatggaggtgagcaacggcatcgagaagaagggcaagaagaagagcgtgggcagaccccccggcccctacaccagaaagatgatccagaagaccgccgagcccctgctggacaaggagagcatcagcgagaaccccaccctggacctgccctgcagcatcggcagaaccgagggcaccgcccacagcagcaacaccagcgacgtggacttcaccggcgccagcagcgccaaggagaccaccagcagcagcatcagcagacactacggcctgagcgacagcagaaagagaaccagaaccggcagaagctggcccgccgccatcccccacctgagaagaagaagaggcagactgcccagaagagccctgcagacccagaacagcgagatcgtgaaggacgacgagggcaaggaggactaccagttcgacgagctgaacaccgagatcctgaacaacctggccgaccaggagctgcagctgaaccacctgaagaacagcatcaccagctacttcggcgccgccggcagaatcgcctgcggcgagaagtacagagtgctggccagaagagtgaccctggacggcaaggtgcagtacctggtggagtgggagggcgccaccgccagctag

SEQ ID NO: 88691 - DNA, 861 bp, synthetic construct
  misc_feature 1..861: note = Description of Artificial Sequence: Synthetic coding sequence
  source 1..861: mol_type = other DNA
atggtgtgcaccatctgccaggaggagtacagcgaggcccccaacgagatggtgatctgcgacaagtgcggccagggctaccaccagctgtgccacaccccccacatcgactgcagcgtgatcgacagcgacgagaagtggctgtgcagacagtgcgtgttcgccaccaccaccaagagaggcggcgccctgaagaagggccccaacgccaaggccctgcaggtgatgaagcagaccctgccctacagcgtggccgacctggagtgggacgccggccacaagaccaacgtgcagcagtgctactgctactgcggcggccccggcgactggtacctgaagatgctgcagtgctgcaagtgcaagcagtggttccacgaggcctgcgtgcagtgcctgcagaagcccatgctgttcggcgacagattctacaccttcatctgcagcgtgtgcagcagcggccccgagtacctgaagagactgcccctgcagtgggtggacatcgcccacctgtgcctgtacaacctgagcgtgatccacaagaagaagtacttcgacagcgagctggagctgatgacctacatcaacgagaactgggacagactgcaccccggcgagctggccgacacccccaagagcgagagatacgagcacgtgctggaggccctgaacgactacaagaccatgttcatgagcggcaaggagatcaagaagaagaagcacctgttcggcctgagaatcagagtgccccccgtgccccccaacgtggccttcaaggccgagaaggagcccgagggcaccagccacgagttcaagctgaaggccgagagacaccccaacctgtacctgatccagggcaagtag

SEQ ID NO: 88692 - DNA, 1476 bp, synthetic construct
  misc_feature 1..1476: note = Description of Artificial Sequence: Synthetic coding sequence
  source 1..1476: mol_type = other DNA
atggtgtgcaccatctgccaggaggagtacagcgaggcccccaacgagatggtgatctgcgacaagtgcggccagggctaccaccagctgtgccacaccccccacatcgactgcagcgtgatcgacagcgacgagaagtggctgtgcagacagtgcgtgttcgccaccaccaccaagagaggcggcgccctgaagaagggccccaacgccaaggccctgcaggtgatgaagcagaccctgccctacagcgtggccgacctggagtgggacgccggccacaagaccaacgtgcagcagtgctactgctactgcggcggccccggcgactggtacctgaagatgctgcagtgctgcaagtgcaagcagtggttccacgaggcctgcgtgcagtgcctgcagaagcccatgctgttcggcgacagattctacaccttcatctgcagcgtgtgcagcagcggccccgagtacctgaagagactgcccctgcagtgggtggacatcgcccacctgtgcctgtacaacctgagcgtgatccacaagaagaagtacttcgacagcgagctggagctgatgacctacatcaacgagaactgggacagactgcaccccggcgagctggccgacacccccaagagcgagagatacgagcacgtgctggaggccctgaacgactacaagaccatgttcatgagcggcaaggagatcaagaagaagaagcacctgttcggcctgagaatcagagtgccccccgtgccccccaacgtggccttcaaggccgagaaggagcccgagggcaccagccacgagttcaagatcaagggcagaaaggccagcaagcccatcagcgacagcagagaggtgagcaacggcatcgagaagaagggcaagaagaagagcgtgggcagaccccccggcccctacaccagaaagatgatccagaagaccgccgagcccctgctggacaaggagagcatcagcgagaaccccaccctggacctgccctgcagcatcggcagaaccgagggcaccgcccacagcagcaacaccagcgacgtggacttcaccggcgccagcagcgccaaggagaccaccagcagcagcatcagcagacactacggcctgagcgacagcagaaagagaaccagaaccggcagaagctggcccgccgccatcccccacctgagaagaagaagaggcagactgcccagaagagccctgcagacccagaacagcgagatcgtgaaggacgacgagggcaaggaggactaccagttcgacgagctgaacaccgagatcctgaacaacctggccgaccaggagctgcagctgaaccacctgaagaacagcatcaccagctacttcggcgccgccggcagaatcgcctgcggcgagaagtacagagtgctggccagaagagtgaccctggacggcaaggtgcagtacctggtggagtgggagggcgccaccgccagctag

SEQ ID NO: 88693 - DNA, 1476 bp, synthetic construct; identical to SEQ ID NO: 88692
  misc_feature 1..1476: note = Description of Artificial Sequence: Synthetic coding sequence
  source 1..1476: mol_type = other DNA

SEQ ID NO: 88694 - DNA, 1191 bp, synthetic construct
  misc_feature 1..1191: note = Description of Artificial Sequence: Synthetic coding sequence
  source 1..1191: mol_type = other DNA
atggccatgatcgagctgggcttcggcagacagaacttccaccccctgaagagaaagagcagcctgctgctgaagctgatcgccgtggtgttcgccgtgctgctgttctgcgagttcctgatctactacctggccatcttccagtgcaactggcccgaggtgaagaccaccgccagcgacggcgagcagaccaccagagagcccgtgctgaaggccatgttcctggccgacacccacctgctgggcgagttcctgggccactggctggacaagctgagaagagagtggcagatggagagagccttccagaccgccctgtggctgctgcagcccgaggtggtgttcatcctgggcgacatcttcgacgagggcaagtggagcacccccgaggcctgggccgacgacgtggagagattccagaagatgttcagacaccccagccacgtgcagctgaaggtggtggccggcaaccacgacatcggcttccactacgagatgaacacctacaaggtggagagattcgagaaggtgttcagcagcgagagactgttcagctggaagggcatcaacttcgtgatggtgaacagcgtggccctgaacggcgacggctgcggcatctgcagcgagaccgaggccgagctgatcgaggtgagccacagactgaactgcagcagagaggccagaggcagcagcagatgcggccccggccccctgctgcccaccagcgcccccgtgctgctgcagcactaccccctgtacagaagaagcgacgccaactgcagcggcgaggacgccgcccccgccgaggagagagacatccccttcaaggagaactacgacgtgctgagcagagaggccagccagaagctgctgtggtggctgcagcccagactggtgctgagcggccacacccacagcgcctgcgaggtgcaccacggcggcagagtgcccgagctgagcgtgcccagcttcagctggagaaacagaaacaaccccagcttcatcatgggcagcatcacccccaccgactacaccctgagcaagtgctacctgcccagagaggacgtggtgctgatcatctactgcggcgtggtgggcttcctggtggtgctgaccctgacccacttcggcctgctggccagccccttcctgagcggcctgaacctgctgggcaagagaaagaccagatag

SEQ ID NO: 88695 - DNA, 1002 bp, synthetic construct
  misc_feature 1..1002: note = Description of Artificial Sequence: Synthetic coding sequence
  source 1..1002: mol_type = other DNA
atggccatgatcgagctgggcttcggcagacagaacttccaccccctgaagagaaagagcagcctgctgctgaagctgatcgccgtggtgttcgccgtgctgctgttctgcgagttcctgatctactacctggccatcttccagtgcaactggcccgaggtgaagaccaccgccagcgacggcgagcagaccaccagagagcccgtgctgaaggccatgttcctggccgacacccacctgctgggcgagttcctgggccactggctggacaagctgagaagagagtggcagatggagagagccttccagaccgccctgtggctgctgcagcccgaggtggtgttcatcctgggcgacatcttcgacgagggcaagtggagcacccccgaggcctgggccgacgacgtggagagattccagaagatgttcagacaccccagccacgtgcagctgaaggtggtggccggcaaccacgacatcggcttccactacgagatgaacacctacaaggtggagagattcgagaaggtgttcagcagcgagagactgttcagctggaagggcatcaacttcgtgatggtgaacagcgtggccctgaacggcgacggctgcggcatctgcagcgagaccgaggccgagctgatcgaggtgagccacagactgaactgcagcagagagctgctgtggtggctgcagcccagactggtgctgagcggccacacccacagcgcctgcgaggtgcaccacggcggcagagtgcccgagctgagcgtgcccagcttcagctggagaaacagaaacaaccccagcttcatcatgggcagcatcacccccaccgactacaccctgagcaagtgctacctgcccagagaggacgtggtgctgatcatctactgcggcgtggtgggcttcctggtggtgctgaccctgacccacttcggcctgctggccagccccttcctgagcggcctgaacctgctgggcaagagaaagaccagatag

SEQ ID NO: 88696 - DNA, 732 bp, synthetic construct
  misc_feature 1..732: note = Description of Artificial Sequence: Synthetic coding sequence
  source 1..732: mol_type = other DNA
atggagagagccttccagaccgccctgtggctgctgcagcccgaggtggtgttcatcctgggcgacatcttcgacgagggcaagtggagcacccccgaggcctgggccgacgacgtggagagattccagaagatgttcagacaccccagccacgtgcagctgaaggtggtggccggcaaccacgacatcggcttccactacgagatgaacacctacaaggtggagagattcgagaaggtgttcagcagcgagagactgttcagctggaagggcatcaacttcgtgatggtgaacagcgtggccctgaacggcgacggctgcggcatctgcagcgagaccgaggccgagctgatcgaggtgagccacagactgaactgcagcagagaggccagaggcagcagcagatgcggccccggccccctgctgcccaccagcgcccccgtgctgctgcagcactaccccctgtacagaagaagcgacgccaactgcagcggcgaggacgccgcccccgccgaggagagagacatccccttcaaggagaactacgacgtgctgagcagagaggccagccagaagctgctgtggtggctgcagcccagactggtgctgagcggccacacccacagcgcctgcgaggtgcaccacggcggcagagtgcccgagctgagcgtgcccagcttcagctggagaaacagaaacaaccccagcttcatcatgggcaccgacgcctag

SEQ ID NO: 88697 - DNA, 1194 bp, synthetic construct
  misc_feature 1..1194: note = Description of Artificial Sequence: Synthetic coding sequence
  source 1..1194: mol_type = other DNA
atggccatgatcgagctgggcttcggcagacagaacttccaccccctgaagagaaagagcagcctgctgctgaagctgatcgccgtggtgttcgccgtgctgctgttctgcgagttcctgatctactacctggccatcttccagtgcaactggcccgaggtgaagaccaccgccagcgacggcgagcagaccaccagagagcccgtgctgaaggccatgttcctggccgacacccacctgctgggcgagttcctgggccactggctggacaagctgagaagagagtggcagatggagagagccttccagaccgccctgtggctgctgcagcccgaggtggtgttcatcctgggcgacatcttcgacgagggcaagtggagcacccccgaggcctgggccgacgacgtggagagattccagaagatgttcagacaccccagccacgtgcagctgaaggtggtggccggcaaccacgacatcggcttccactacgagatgaacacctacaaggtggagagattcgagaaggtgttcagcagcgagagactgttcagctggaagggcatcaacttcgtgatggtgaacagcgtggccctgaacggcgacggctgcggcatctgcagcgagaccgaggccgagctgatcgaggtgagccacagactgaactgcagcagagagcaggccagaggcagcagcagatgcggccccggccccctgctgcccaccagcgcccccgtgctgctgcagcactaccccctgtacagaagaagcgacgccaactgcagcggcgaggacgccgcccccgccgaggagagagacatccccttcaaggagaactacgacgtgctgagcagagaggccagccagaagctgctgtggtggctgcagcccagactggtgctgagcggccacacccacagcgcctgcgaggtgcaccacggcggcagagtgcccgagctgagcgtgcccagcttcagctggagaaacagaaacaaccccagcttcatcatgggcagcatcacccccaccgactacaccctgagcaagtgctacctgcccagagaggacgtggtgctgatcatctactgcggcgtggtgggcttcctggtggtgctgaccctgacccacttcggcctgctggccagccccttcctgagcggcctgaacctgctgggcaagagaaagaccagatag

SEQ ID NO: 88698 - DNA, 1026 bp, synthetic construct
  misc_feature 1..1026: note = Description of Artificial Sequence: Synthetic coding sequence
  source 1..1026: mol_type = other DNA
atggccatgatcgagctgggcttcggcagacagaacttccaccccctgaagagaaagagcagcctgctgctgaagctgatcgccgtggtgttcgccgtgctgctgttctgcgagttcctgatctactacctggccatcttccagtgcaactggcccgaggtgaagaccaccgccagcgacggcgagcagaccaccagagagcccgtgctgaaggccatgttcctggccgacacccacctgctgggcgagttcctgggccactggctggacaagctgagaagagagtggcagatggagagagccttccagaccgccctgtggctgctgcagcccgaggtggtgttcatcctgggcgacatcttcgacgagggcaagtggagcacccccgaggcctgggccgacgacgtggagagattccagaagatgttcagacaccccagccacgtgcagctgaaggtggtggccggcaaccacgacatcggcttccactacgagatgaacacctacaaggtggagagattcgagaaggtgttcagcagcgagagactgttcagctggaagggcatcaacttcgtgatggtgaacagcgtggccctgaacggcgacggctgcggcatctgcagcgagaccgaggccgagctgatcgaggtgagccacagactgaactgcagcagagagcaggccagaggcagcagcagatgcggccccggccccctgctgcccaccagcgcccccgtgctgctgcagcactaccccctgtacagaagaagcgacgccaactgcagcggcgaggacgccgcccccgccgaggagagagacatccccttcaaggagaactacgacgtgctgagcagagaggccagccagaagctgctgtggtggctgcagcccagactggtgctgagcggccacacccacagcgcctgcgaggtgcaccacggcggcagagtgcccgagctgagcgtgcccagcttcagctggagaaacagaaacaaccccagcttcatcatgggcaccgacgcctag

SEQ ID NO: 88699 - DNA, 1191 bp, synthetic construct; identical to SEQ ID NO: 88694
  misc_feature 1..1191: note = Description of Artificial Sequence: Synthetic coding sequence
  source 1..1191: mol_type = other DNA

SEQ ID NO: 88700 - DNA, 360 bp, synthetic construct
  misc_feature 1..360: note = Description of Artificial Sequence: Synthetic coding sequence
  source 1..360: mol_type = other DNA
atgtggagaagcagatgggacgccagcgtgctgaaggccgaggccctggccctgctgccctgcggcctgggcatggccttcagccagagccacgtgatggccgccagaagacaccagcacagcagactgatcatcgaggtggacgagtacagcagcaaccccacccaggccttcaccttctacaacatcaaccagggcagattccagcccccccacgtgcagatggtggaccccgtgccccacgacgcccccaagccccccggctacaccagattcgtgtgcgtgagcgacacccacagcagaaccgaccccatccagatgccctacggcgacgtgctgatccacgccggcgacttctag

SEQ ID NO: 88701 - DNA, 663 bp, synthetic construct
  misc_feature 1..663: note = Description of Artificial Sequence: Synthetic coding sequence
  source 1..663: mol_type = other DNA
atgccctacggcgacgtgctgatccacgccggcgacttcaccgagctgggcctgcccagcgaggtgaagaagttcaacgagtggctgggcagcctgccctacgagtacaagatcgtgatcgccggcaaccacgagctgaccttcgaccaggagttcatggccgacctgatcaagcaggacttctactacttccccagcgtgagcaagctgaagcccgagaactacgagaacgtgcagagcctgctgaccaactgcatctacctgcaggacagcgaggtgaccgtgagaggcttcagaatctacggcagcccctggcagccctggttctacggctggggcttcaacctgcccagaggccaggccctgctggagaagtggaacctgatccccgagggcgtggacatcctgatcacccacggcccccccctgggcttcctggactgggtgcccaagaagatgcagagagtgggctgcgtggagctgctgaacaccgtgcagagaagagtgcagcccagactgcacgtgttcggccacatccacgagggctacggcgtgatggccgacggcaccaccacctacgtgaacgccagcgtgtgcaccgtgaactaccagcccgtgaacccccccatcgtgatcgacctgcccacccccagaaacagctag

SEQ ID NO: 88702 - DNA, 981 bp, synthetic construct
  misc_feature 1..981: note = Description of Artificial Sequence: Synthetic coding sequence
  source 1..981: mol_type = other DNA
atgtggagaagcagatgggacgccagcgtgctgaaggccgaggccctggccctgctgccctgcggcctgggcatggccttcagccagagccacgtgatggccgccagaagacaccagcacagcagactgatcatcgaggtggacgagtacagcagcaaccccacccaggccttcaccttctacaacatcaaccagggcagattccagcccccccacgtgcagatggtggaccccgtgccccacgacgcccccaagccccccggctacaccagattcgtgtgcgtgagcgacacccacagcagaaccgaccccatccagatgccctacggcgacgtgctgatccacgccggcgacttcaccgagctgggcctgcccagcgaggtgaagaagttcaacgagtggctgggcagcctgccctacgagtacaagatcgtgatcgccggcaaccacgagctgaccttcgaccaggagttcatggccgacctgatcaagcaggacttctactacttccccagcgtgagcaagctgaagcccgagaactacgagaacgtgcagagcctgctgaccaactgcatctacctgcaggacagcgaggtgaccgtgagaggcttcagaatctacggcagcccctggcagccctggttctacggctggggcttcaacctgcccagaggccaggccctgctggagaagtggaacctgatccccgagggcgtggacatcctgatcacccacggcccccccctgggcttcctggactgggtgcccaagaagatgcagagagtgggctgcgtggagctgctgaacaccgtgcagagaagagtgcagcccagactgcacgtgttcggccacatccacgagggctacggcgtgatggccgacggcaccaccacctacgtgaacgccagcgtgtgcaccgtgaactaccagcccgtgaacccccccatcgtgatcgacctgcccacccccagaaacagctag

SEQ ID NO: 88703 - DNA, 507 bp, synthetic construct
  misc_feature 1..507: note = Description of Artificial Sequence: Synthetic coding sequence
  source 1..507: mol_type = other DNA
atggccgacctgatcaagcaggacttctactacttccccagcgtgagcaagctgaagcccgagaactacgagaacgtgcagagcctgctgaccaactgcatctacctgcaggacagcgaggtgaccgtgagaggcttcagaatctacggcagcccctggcagccctggttctacggctggggcttcaacctgcccagaggccaggccctgctggagaagtggaacctgatccccgagggcgtggacatcctgatcacccacggcccccccctgggcttcctggactgggtgcccaagaagatgcagagagtgggctgcgtggagctgctgaacaccgtgcagagaagagtgcagcccagactgcacgtgttcggccacatccacgagggctacggcgtgatggccgacggcaccaccacctacgtgaacgccagcgtgtgcaccgtgaactaccagcccgtgaacccccccatcgtgatcgacctgcccacccccagaaacagctag

SEQ ID NO: 88704 - DNA, 981 bp, synthetic construct; identical to SEQ ID NO: 88702
  misc_feature 1..981: note = Description of Artificial Sequence: Synthetic coding sequence
  source 1..981: mol_type = other DNA

SEQ ID NO: 88705 - DNA, 225 bp, synthetic construct
  misc_feature 1..225: note = Description of Artificial Sequence: Synthetic coding sequence
  source 1..225: mol_type = other DNA
atgtggagaagcagatgggacgccagcgtgctgaaggccgaggccctggccctgctgccctgcggcctgggcatggccttcagccagagccacgtgatggccgccagaagacaccagcacagcagactgatcatcgaggtggacgagtacagcagcaaccccacccaggccttcaccttctacaacatcaaccagggcagattccagcccccccacgtgcagtag

SEQ ID NO: 88706 - DNA, 1080 bp, synthetic construct
  misc_feature 1..1080: note = Description of Artificial Sequence: Synthetic coding sequence
  source 1..1080: mol_type = other DNA
atgaacggcagagagacccagagcgtgagcagaagcggcggcggccccggctgcggcggcggcagcggcggcagatgcagaggcggcagaagaagaagcatgtggagaagcagatgggacgccagcgtgctgaaggccgaggccctggccctgctgccctgcggcctgggcatggccttcagccagagccacgtgatggccgccagaagacaccagcacagcagactgatcatcgaggtggacgagtacagcagcaaccccacccaggccttcaccttctacaacatcaaccagggcagattccagcccccccacgtgcagatggtggaccccgtgccccacgacgcccccaagccccccggctacaccagattcgtgtgcgtgagcgacacccacagcagaaccgaccccatccagatgccctacggcgacgtgctgatccacgccggcgacttcaccgagctgggcctgcccagcgaggtgaagaagttcaacgagtggctgggcagcctgccctacgagtacaagatcgtgatcgccggcaaccacgagctgaccttcgaccaggagttcatggccgacctgatcaagcaggacttctactacttccccagcgtgagcaagctgaagcccgagaactacgagaacgtgcagagcctgctgaccaactgcatctacctgcaggacagcgaggtgaccgtgagaggcttcagaatctacggcagcccctggcagccctggttctacggctggggcttcaacctgcccagaggccaggccctgctggagaagtggaacctgatccccgagggcgtggacatcctgatcacccacggcccccccctgggcttcctggactgggtgcccaagaagatgcagagagtgggctgcgtggagctgctgaacaccgtgcagagaagagtgcagcccagactgcacgtgttcggccacatccacgagggctacggcgtgatggccgacggcaccaccacctacgtgaacgccagcgtgtgcaccgtgaactaccagcccgtgaacccccccatcgtgatcgacctgcccacccccagaaacagctag

SEQ ID NO: 88707 - DNA, 981 bp, synthetic construct; identical to SEQ ID NO: 88702
  misc_feature 1..981: note = Description of Artificial Sequence: Synthetic coding sequence
  source 1..981: mol_type = other DNA

SEQ ID NO: 88708 - DNA, 915 bp, synthetic construct
  misc_feature 1..915: note = Description of Artificial Sequence: Synthetic coding sequence
  source 1..915: mol_type = other DNA
atgtggagaagcttcagccagagccacgtgatggccgccagaagacaccagcacagcagactgatcatcgaggtggacgagtacagcagcaaccccacccaggccttcaccttctacaacatcaaccagggcagattccagcccccccacgtgcagatggtggaccccgtgccccacgacgcccccaagccccccggctacaccagattcgtgtgcgtgagcgacacccacagcagaaccgaccccatccagatgccctacggcgacgtgctgatccacgccggcgacttcaccgagctgggcctgcccagcgaggtgaagaagttcaacgagtggctgggcagcctgccctacgagtacaagatcgtgatcgccggcaaccacgagctgaccttcgaccaggagttcatggccgacctgatcaagcaggacttctactacttccccagcgtgagcaagctgaagcccgagaactacgagaacgtgcagagcctgctgaccaactgcatctacctgcaggacagcgaggtgaccgtgagaggcttcagaatctacggcagcccctggcagccctggttctacggctggggcttcaacctgcccagaggccaggccctgctggagaagtggaacctgatccccgagggcgtggacatcctgatcacccacggcccccccctgggcttcctggactgggtgcccaagaagatgcagagagtgggctgcgtggagctgctgaacaccgtgcagagaagagtgcagcccagactgcacgtgttcggccacatccacgagggctacggcgtgatggccgacggcaccaccacctacgtgaacgccagcgtgtgcaccgtgaactaccagcccgtgaacccccccatcgtgatcgacctgcccacccccagaaacagctag

SEQ ID NO: 88709 - DNA, 885 bp, synthetic construct
  misc_feature 1..885: note = Description of Artificial Sequence: Synthetic coding sequence
  source 1..885: mol_type = other DNA
atggcccacggcatccccagccagggcaaggtgaccatcaccgtggacgagtacagcagcaaccccacccaggccttcacccactacaacatcaaccagagcagattccagcccccccacgtgcacatggtggaccccatcccctacgacacccccaagcccgccggccacaccagattcgtgtgcatcagcgacacccacagcagaaccgacggcatccagatgccctacggcgacatcctgctgcacaccggcgacttcaccgagctgggcctgcccagcgaggtgaagaagttcaacgactggctgggcaacctgccctacgagtacaagatcgtgatcgccggcaaccacgagctgaccttcgacaaggagttcatggccgacctggtgaagcaggactactacagattccccagcgtgagcaagctgaagcccgaggacttcgacaacgtgcagagcctgctgaccaacagcatctacctgcaggacagcgaggtgaccgtgaagggcttcagaatctacggcgccccctggaccccctggttcaacggctggggcttcaacctgcccagaggccagagcctgctggacaagtggaacctgatccccgagggcatcgacatcctgatgacccacggcccccccctgggcttcagagactgggtgcccaaggagctgcagagagtgggctgcgtggagctgctgaacaccgtgcagagaagagtgagacccaagctgcacgtgttcggcggcatccacgagggctacggcatcatgaccgacggctacaccacctacatcaacgccagcacctgcaccgtgagcttccagcccaccaacccccccatcatcttcgacctgcccaacccccagggcagctag

SEQ ID NO: 88710 - DNA, 834 bp, synthetic construct
  misc_feature 1..834: note = Description of Artificial Sequence: Synthetic coding sequence
  source 1..834: mol_type = other DNA
atggcccacggcatccccagccagggcaaggtgaccatcaccgtggacgagtacagcagcaaccccacccaggccttcacccactacaacatcaaccagagcagattccagcccccccacgtgcacatggtggaccccatcccctacgacacccccaagcccgccggccacaccagattcgtgtgcatcagcgacacccacagcagaaccgacggcatccagatgccctacggcgacatcctgctgcacaccggcgacttcaccgagctgggcctgcccagcgaggtgaagaagttcaacgactggctgggcaacctgccctacgagtacaagatcgtgatcgccggcaaccacgagctgaccttcgacaaggagttcatggccgacctggtgaagcaggactactacagattccccagcgtgagcaagctgaagcccgaggacttcgacaacgtgcagagcctgctgaccaacagcatctacctgcaggacagcgaggtgaccgtgaagggcttcagaatctacggcgccccctggaccccctggttcaacggctggggcttcaacctgcccagaggccagagcctgctggacaagtggaacctgatccccgagggcatcgacatcctgatgacccacggcccccccctgggcttcagagactgggtgcccaaggagctgcagagagtgggctgcgtggagctgctgaacaccgtgcagagaagagtgagacccaagctgcacgtgttcggcggcatccacgaggtgaaccccgtgagcatcagcaaggccctgagaaccaagatctgcagcctgcccagcaagaccagctag

SEQ ID NO: 88711 - DNA, 132 bp, synthetic construct
  misc_feature 1..132: note = Description of Artificial Sequence: Synthetic coding sequence
  source 1..132: mol_type = other DNA
atggcccacggcatccccagccagggcaaggtgaccatcaccgtggacgagtacagcagcaaccccacccaggccttcacccactacaacatcaaccagagcagattccagcccccccacgtgcacatgtag

SEQ ID NO: 88712 - DNA, 186 bp, synthetic construct
  misc_feature 1..186: note = Description of Artificial Sequence: Synthetic coding sequence
  source 1..186: mol_type = other DNA
atggaccccaactgcagctgcgccaccggcggcagctgcacctgcaccggcagctgcaagtgcaaggagtgcaagtgcaccagctgcaagaagagctgctgcagctgctgccccatgagctgcgccaagtgcgcccagggctgcatctgcaagggcgccagcgagaagtgcagctgctgcgcctag

SEQ ID NO: 88713 - DNA, 186 bp, synthetic construct
  misc_feature 1..186: note = Description of Artificial Sequence: Synthetic coding sequence
  source 1..186: mol_type = other DNA
atggaccccaactgcagctgcaccaccggcggcagctgcgcctgcgccggcagctgcaagtgcaaggagtgcaagtgcaccagctgcaagaagtgctgctgcagctgctgccccgtgggctgcgccaagtgcgcccagggctgcgtgtgcaagggcagcagcgagaagtgcagatgctgcgcctag

SEQ ID NO: 88714 - DNA, 186 bp, synthetic construct
  misc_feature 1..186: note = Description of Artificial Sequence: Synthetic coding sequence
  source 1..186: mol_type = other DNA
atggaccccaactgcagctgcgccaccggcggcagctgcacctgcgccggcagctgcaagtgcaaggagtgcaagtgcaccagctgcaagaagagctgctgcagctgctgccccgtgggctgcgccaagtgcgcccagggctgcgtgtgcaagggcgccagcgagaagtgcagctgctgcgcctag

SEQ ID NO: 88715 - DNA, 384 bp, synthetic construct
  misc_feature 1..384: note = Description of Artificial Sequence: Synthetic coding sequence
  source 1..384: mol_type = other DNA
atggaccccaactgcagctgcgccaccggcggcagctgcacctgcgccggcagctgcaagtgcaaggagtgcaagtgcaccagctgcaagaagagcgagtgcggcgccatcagcagaaacctgggcctgtggctgagactgggcggcaacagcagactggccctgagcgccagcttctggggcaccggcctgagcctgcccagcctgcccgtgagcttccccctgcaggccttctgccccaagttcagatggggcagaaccgccttcttcagctgggacaccaaccccaactgcaccccctacggcttcagaaccgagctgtgccagaccaagaagagcatcctgtgggtgtgggtgctgagcagcagccaggcctgctactag

SEQ ID NO: 88716 - DNA, 186 bp, synthetic construct
  misc_feature 1..186: note = Description of Artificial Sequence: Synthetic coding sequence
  source 1..186: mol_type = other DNA
atggaccccaactgcagctgcgccgccggcgtgagctgcacctgcgccggcagctgcaagtgcaaggagtgcaagtgcaccagctgcaagaagagctgctgcagctgctgccccgtgggctgcagcaagtgcgcccagggctgcgtgtgcaagggcgccagcgagaagtgcagctgctgcgactag

SEQ ID NO: 88717 - DNA, 189 bp, synthetic construct
  misc_feature 1..189: note = Description of Artificial Sequence: Synthetic coding sequence
  source 1..189: mol_type = other DNA
atggaccccaactgcagctgcgccgccgccggcgtgagctgcacctgcgccggcagctgcaagtgcaaggagtgcaagtgcaccagctgcaagaagagctgctgcagctgctgccccgtgggctgcagcaagtgcgcccagggctgcgtgtgcaagggcgccagcgagaagtgcagctgctgcgactag

SEQ ID NO: 88718 - DNA, 189 bp, synthetic construct
  misc_feature 1..189: note = Description of Artificial Sequence: Synthetic coding sequence
  source 1..189: mol_type = other DNA
atggaccccaactgcagctgcgccgccgccggcgtgagctgcacctgcgccagcagctgcaagtgcaaggagtgcaagtgcaccagctgcaagaagagctgctgcagctgctgccccgtgggctgcgccaagtgcgcccagggctgcatctgcaagggcgccagcgagaagtgcagctgctgcgcctag

SEQ ID NO: 88719 - DNA, 186 bp, synthetic construct
  misc_feature 1..186: note = Description of Artificial Sequence: Synthetic coding sequence
  source 1..186: mol_type = other DNA
atggaccccaactgcagctgcgccgccggcgtgagctgcacctgcgccagcagctgcaagtgcaaggagtgcaagtgcaccagctgcaagaagagctgctgcagctgctgccccgtgggctgcgccaagtgcgcccagggctgcatctgcaagggcgccagcgagaagtgcagctgctgcgcctag

SEQ ID NO: 88720 - DNA, 186 bp, synthetic construct
  misc_feature 1..186: note = Description of Artificial Sequence: Synthetic coding sequence
  source 1..186: mol_type = other DNA
atggaccccaactgcagctgcgaggccggcggcagctgcgcctgcgccggcagctgcaagtgcaagaagtgcaagtgcaccagctgcaagaagagctgctgcagctgctgccccctgggctgcgccaagtgcgcccagggctgcatctgcaagggcgccagcgagaagtgcagctgctgcgcctag

SEQ ID NO: 88721 - DNA, 186 bp, synthetic construct
  misc_feature 1..186: note = Description of Artificial Sequence: Synthetic coding sequence
  source 1..186: mol_type = other DNA
atggaccccaactgcagctgcagccccgtgggcagctgcgcctgcgccggcagctgcaagtgcaaggagtgcaagtgcaccagctgcaagaagagctgctgcagctgctgccccgtgggctgcgccaagtgcgcccagggctgcatctgcaagggcaccagcgacaagtgcagctgctgcgcctag

SEQ ID NO: 88722 - DNA, 186 bp, synthetic construct
  misc_feature 1..186: note = Description of Artificial Sequence: Synthetic coding sequence
  source 1..186: mol_type = other DNA
atggaccccaactgcagctgcgccgccggcgacagctgcacctgcgccggcagctgcaagtgcaaggagtgcaagtgcaccagctgcaagaagagctgctgcagctgctgccccgtgggctgcgccaagtgcgcccagggctgcatctgcaagggcgccagcgacaagtgcagctgctgcgcctag

SEQ ID NO: 88723 - DNA, 207 bp, synthetic construct
  misc_feature 1..207: note = Description of Artificial Sequence: Synthetic coding sequence
  source 1..207: mol_type = other DNA
atggaccccgagacctgcccctgccccagcggcggcagctgcacctgcgccgacagctgcaagtgcgagggctgcaagtgcaccagctgcaagaagagctgctgcagctgctgccccgccgagtgcgagaagtgcgccaaggactgcgtgtgcaagggcggcgaggccgccgaggccgaggccgagaagtgcagctgctgccagtag

SEQ ID NO: 88724 - DNA, 687 bp, synthetic construct
  misc_feature 1..687: note = Description of Artificial Sequence: Synthetic coding sequence
  source 1..687: mol_type = other DNA
atgaagatcaagcccggcttcatgggcaaggccacccccccctacgacgtgcagttccacatggaggccagcgtggagaactgcatcatcgtgagcatgaacaccgccgaccccggcagccagggcatcacccacagcctgctgctgcaggtgatcgacgacaagggcagcatcctgccccccaacaccgagggcaacatcggcatcagaatcaagcccgtgagacccgtgagcctgttcatgtgctacgagggcgaccccgagaagaccgccaaggtggagtgcggcgacttctacaacaccggcgacagaggcaagatggacgaggagggctacatctgcttcctgggcagaagcgacgacatcatcaacgccagcggctacagaatcggccccgccgaggtggagagcgccctggtggagcaccccgccgtggccgagagcgccgtggtgggcagccccgaccccatcagaggcgaggtggtgaaggccttcatcgtgctgaccccccagttcctgagccacgacaaggaccagctgaccaaggagctgcagcagcacgtgaagagcgtgaccgccccctacaagtaccccagaaaggtggagttcgtgagcgagctgcccaagaccatcaccggcaagatcgagagaaaggagctgagaaagaaggagaccggccagatgtag

SEQ ID NO: 88725 - DNA, 1527 bp, synthetic construct
  misc_feature 1..1527: note = Description of Artificial Sequence: Synthetic coding sequence
  source 1..1527: mol_type = other DNA
atggaggagggccccctgcccggcggcctgcccagccccgaggacgccatggtgaccgagctgctgagccccgagggccccttcgccagcgagaacatcggcctgaaggcccccgtgaagtacgaggaggacgagttccacgtgttcaaggaggcctacctgggccccgccgaccccaaggagcccgtgctgcacgccttcaaccccgccctgggcgccgactgcaagggccaggtgaaggccaagctggccggcggcgacagcgacggcggcgagctgctgggcgagtaccccggcatccccgagctgagcgccctggaggacgtggccctgctgcaggccccccagccccccgcctgcaacgtgcacttcctgagcagcctgctgcccgcccacagaagccccgccgtgctgcccctgggcgcctgggtgctggagggcgccagccaccccggcgtgagaatgatccccgtggagatcaaggaggccggcggcaccaccaccagcaacaaccccgaggaggccaccctgcagaacctgctggcccaggagagctgctgcaagttccccagcagccaggagctggaggacgccagctgctgcagcctgaagaaggacagcaaccccatggtgatctgccagctgaagggcggcacccagatgctgtgcatcgacaacagcagaaccagagagctgaaggccctgcacctggtgccccagtaccaggaccagaacaactacctgcagagcgacgtgcccaagcccatgaccgccctggtgggcagattcctgcccgccagcaccaagctgaacctgatcacccagcagctggagggcgccctgcccagcgtggtgaacggcagcgccttccccagcggcagcaccctgcccggcccccccaagatcaccctggccggctactgcgactgcttcgccagcggcgacttctgcaacaactgcaactgcaacaactgctgcaacaacctgcaccacgacatcgagagattcaaggccatcaaggcctgcctgggcagaaaccccgaggccttccagcccaagatcggcaagggccagctgggcaacgtgaagccccagcacaacaagggctgcaactgcagaagaagcggctgcctgaagaactactgcgagtgctacgaggcccagatcatgtgcagcagcatctgcaagtgcatcggctgcaagaactacgaggagagccccgagagaaagaccctgatgagcatgcccaactacatgcagaccggcggcctggagggcagccactacctgccccccaccaagttcagcggcctgcccagattcagccacgacagaagacccagcagctgcatcagctgggaggtggtggaggccacctgcgcctgcctgctggcccagggcgaggaggccgagaaggagcactgcagcaagtgcctggccgagcagatgatcctggaggagttcggcagatgcctgagccagatcctgcacaccgagttcaagagcaagggcctgaagatggagtag

SEQ ID NO: 88726 - DNA, 756 bp, synthetic construct
  misc_feature 1..756: note = Description of Artificial Sequence: Synthetic coding sequence
  source 1..756: mol_type = other DNA
atggaggagggccccctgcccggcggcctgcccagccccgaggacgccatggtgaccgagctgctgagccccgagggccccttcgccagcgagaacatcggcctgaaggcccccgtgaagtacgaggaggacgagttccacgtgttcaaggaggcctacctgggccccgccgaccccaaggagcccgtgctgcacgccttcaaccccgccctgggcgccgactgcaagggccaggtgaaggccaagctggccggcggcgacagcgacggcggcgagctgctgggcgagtaccccggcatccccgagctgagcgccctggaggacgtggccctgctgcaggccccccagccccccgcctgcaacgtgcacttcctgagcagcctgctgcccgcccacagaagccccgccgtgctgcccctgggcgcctgggtgctggagggcgccagccaccccggcgtgagaatgatccccgtggagatcaaggaggccggcggcaccaccaccagcaacaaccccgaggaggccaccctgcagaacctgctggcccaggagagctgctgcaagttccccagcagccaggagctggaggacgccagctgctgcagcctgaagaaggacagcaaccccatggtgatctgccagctgaagggcggcacccagatgctgtgcatcgacaacagcagaaccagagagctgaaggccctgcacctggtgccccagtaccaggaccagaacaactacctgcagagcgcctag

SEQ ID NO: 88727 - DNA, 921 bp, synthetic construct
  misc_feature 1..921: note = Description of Artificial Sequence: Synthetic coding sequence
  source 1..921: mol_type = other DNA
atggaggagggccccctgcccggcggcctgcccagccccgaggacgccatggtgaccgagctgctgagccccgagggccccttcgccagcgagaacatcggcctgaaggcccccgtgaagtacgaggaggacgagttccacgtgttcaaggaggcctacctgggccccgccgaccccaaggagcccgtgctgcacgccttcaaccccgccctgggcgccgactgcaagggccaggtgaaggccaagctggccggcggcgacagcgacggcggcgagctgctgggcgagtaccccggcatccccgagctgagcgccctggaggacgtggccctgctgcaggccccccagccccccgcctgcaacgtgcacttcctgagcagcctgctgcccgcccacagaagccccgccgtgctgcccctgggcgcctgggtgctggagggcgccagccaccccggcgtgagaatgatccccgtggagatcaaggaggccggcggcaccaccaccagcaacaaccccgaggaggccaccctgcagaacctgctggcccaggagagctgctgcaagttccccagcagccaggagctggaggacgccagctgctgcagcctgaagaaggacagcaaccccatggtgatctgccagctgaagggcggcacccagatgctgtgcatcgacaacagcagaaccagagagctgaaggccctgcacctggtgccccagtaccaggaccagaacaactacctgcagagcgacgtgcccaagcccatgaccgccctggtgggcagattcctgcccgccagcaccaagctgaacctgatcacccagcagctggagggcgccctgcccagcgtggtgaacggcagcgccttccccagcggcagcaccctgcccggcccccccaagatcaccctggccggctag

SEQ ID NO: 88728 - DNA, 2262 bp, synthetic construct
  misc_feature 1..2262: note = Description of Artificial Sequence: Synthetic coding sequence
  source 1..2262: mol_type = other DNA
atgggcgagcacagccccgacaacaacatcatctacttcgaggccgaggaggacgagctgacccccgacgacaagatgctgagattcgtggacaagaacggcctggtgcccagcagcagcggcaccgtgtacgacagaaccaccgtgctgatcgagcaggaccccggcaccctggaggacgaggacgacgacggccagtgcggcgagcacctgcccttcctggtgggcggcgaggagggcttccacctgatcgaccacgaggccatgagccagggctacgtgcagcacatcatcagccccgaccagatccacctgaccatcaaccccggcagcacccccatgcccagaaacatcgagggcgccaccctgaccctgcagagcgagtgccccgagaccaagagaaaggaggtgaagagataccagtgcaccttcgagggctgccccagaacctacagcaccgccggcaacctgagaacccaccagaagacccacagaggcgagtacaccttcgtgtgcaaccaggagggctgcggcaaggccttcctgaccagctacagcctgagaatccacgtgagagtgcacaccaaggagaagcccttcgagtgcgacgtgcagggctgcgagaaggccttcaacaccctgtacagactgaaggcccaccagagactgcacaccggcaagaccttcaactgcgagagcgagggctgcagcaagtacttcaccaccctgagcgacctgagaaagcacatcagaacccacaccggcgagaagcccttcagatgcgaccacgacggctgcggcaaggccttcgccgccagccaccacctgaagacccacgtgagaacccacaccggcgagagacccttcttctgccccagcaacggctgcgagaagaccttcagcacccagtacagcctgaagagccacatgaagggccacgacaacaagggccacagctacaacgccctgccccagcacaacggcagcgaggacaccaaccacagcctgtgcctgagcgacctgagcctgctgagcaccgacagcgagctgagagagaacagcagcaccacccagggccaggacctgagcaccatcagccccgccatcatcttcgagagcatgttccagaacagcgacgacaccgccatccaggaggacccccagcagaccgccagcctgaccgagagcttcaacggcgacgccgagagcgtgagcgacgtgccccccagcaccggcaacagcgccagcctgagcctgcccctggtgctgcagcccggcctgagcgagcccccccagcccctgctgcccgccagcgcccccagcgcccccccccccgcccccagcctgggccccggcagccagcaggccgccttcggcaacccccccgccctgctgcagccccccgaggtgcccgtgccccacagcacccagttcgccgccaaccaccaggagttcctgccccacccccaggccccccagcccatcgtgcccggcctgagcgtggtggccggcgccagcgccagcgccgccgccgtggccagcgccgtggccgcccccgcccccccccagagcaccaccgagcccctgcccgccatggtgcagaccctgcccctgggcgccaacagcgtgctgaccaacaaccccaccatcaccatcacccccacccccaacaccgccatcctgcagagcagcctggtgatgggcgagcagaacctgcagtggatcctgaacggcgccaccagcagcccccagaaccaggagcagatccagcaggccagcaaggtggagaaggtgttcttcaccaccgccgtgcccgtggccagcagccccggcagcagcgtgcagcagatcggcctgagcgtgcccgtgatcatcatcaagcaggaggaggcctgccagtgccagtgcgcctgcagagacagcgccaaggagagagccagcagcagaagaaagggctgcagcagcccccccccccccgagcccagcccccaggcccccgacggccccagcctgcagctgcccgcccagaccttcagcagcgcccccgtgcccggcagcagcagcagcaccctgcccagcagctgcgagcagagcagacaggccgagacccccagcgacccccagaccgagaccctgagcgccatggacgtgagcgagttcctgagcctgcagagcctggacacccccagcaacctgatccccatcgaggccctgctgcagggcgaggaggagatgggcctgaccagcagcttcagcaagtag

SEQ ID NO: 88729 - DNA, 603 bp, synthetic construct
  misc_feature 1..603: note = Description of Artificial Sequence: Synthetic coding sequence
  source 1..603: mol_type = other DNA
aagcagagccaggtgaagagataccagtgcaccttcgagggctgccccagaacctacagcaccgccggcaacctgagaacccaccagaagacccacagaggcgagtacaccttcgtgtgcaaccaggagggctgcggcaaggccttcctgaccagctacagcctgagaatccacgtgagagtgcacaccaaggagaagcccttcgagtgcgacgtgcagggctgcgagaaggccttcaacaccctgtacagactgaaggcccaccagagactgcacaccggcaagaccttcaactgcgagagcgagggctgcagcaagtacttcaccaccctgagcgacctgagaaagcacatcagaacccacaccggcgagaagcccttcagatgcgaccacgacggctgcggcaaggccttcgccgccagccaccacctgaagacccacgtgagaacccacaccggcgagagacccttcttctgccccagcaacggctgcgagaagaccttcagcacccagtacagcctgaagagccacatgaagggccacgacaacaagggccacagctacaacgccctgccccagcacaacggcagcgagagcacctag

SEQ ID NO: 88730 - DNA, 2559 bp, synthetic construct
  misc_feature 1..2559: note = Description of Artificial Sequence: Synthetic coding sequence
  source 1..2559: mol_type = other DNA
atgctgatcaccgagagaaagcacttcagaagcggcagaatcgcccagagcatgagcgaggccaacctgatcgacatggaggccggcaagctgagcaagagctgcaacatcaccgagtgccaggaccccgacctgctgcacaactggcccgacgccttcaccctgagaggcaacaacgccagcaaggtggccaaccccttctggaaccagctgagcgccagcaaccccttcctggacgacatcacccagctgagaaacaacagaaagagaaacaacatcagcatcctgaaggaggaccccttcctgttctgcagagagatcgagaacggcaacagcttcgacagcagcggcgacgagctggacgtgcaccagctgctgagacagaccagcagcagaaacagcggcagaagcaagagcgtgagcgagctgctggacatcctggacgacaccgcccacgcccaccagagcatccacaacagcgaccagatcctgctgcacgacctggagtggctgaagaacgacagagaggcctacaagatggcctggctgagccagagacagctggccagaagctgcctggacctgaacaccatcagccagagccccggctgggcccagacccagctggccgaggtgaccatcgcctgcaaggtgaaccaccagggcggcagcgtgcagctgcccgagagcgacatcaccgtgcacgtgccccagggccacgtggccgtgggcgagttccaggaggtgagcctgagagccttcctggaccccccccacatgctgaaccacgacctgagctgcaccgtgagccccctgctggagatcatgctgggcaacctgaacaccatggaggccctgctgctggagatgaagatcggcgccgaggtgagaaaggaccccttcagccaggtgatgaccgagatggtgtgcctgcacagcctgggcaaggagggccccttcaaggtgctgagcaactgctacatctacaaggacaccatccaggtgaagctgatcgacctgagccaggtgatgtacctggtggtggccgcccaggccaaggccctgcccagccccgccgccaccatctgggactacatccacaagaccaccagcatcggcatctacggccccaagtacatccaccccagcttcaccgtggtgctgaccgtgtgcggccacaactacatgcccggccagctgaccatcagcgacatcaagaagggcggcaagaacatcagccccgtggtgttccagctgtggggcaagcagagcttcctgctggacaagccccaggacctgagcatcagcatcttcagctgcgaccccgacttcgaggtgaagaccgagggcgagagaaaggagatcaagcagaagcagctggaggccggcgaggtggtgcaccagcagttcctgttcagcctggtggagcacagagagatgcacctgttcgacttctgcgtgcaggtggagccccccaacggcgagcccgtggcccagttcagcatcaccacccccgaccccacccccaacctgaagagactgagcaacctgcccggctacctgcagaagaaggaggagatcaagagcgcccccctgagccccaagatcctggtgaagtaccccaccttccaggacaagaccctgaacttcagcaactacggcgtgaccctgaaggccgtgctgagacagagcaagatcgactacttcctggagtacttcaagggcgacaccatcgccctgctgggcgagggcaaggtgaaggccatcggccagagcaaggtgaaggagtggtacgtgggcgtgctgagaggcaagatcggcctggtgcactgcaagaacgtgaaggtgatcagcaaggagcaggtgatgttcatgagcgacagcgtgttcaccaccagaaacctgctggagcagatcgtgctgcccctgaagaagctgacctacatctacagcgtggtgctgaccctggtgagcgagaaggtgtacgactggaaggtgctggccgacgtgctgggctacagccacctgagcctggaggacttcgaccagatccaggccgacaaggagagcgagaaggtgagctacgtgatcaagaagctgaaggaggactgccacaccgagagaaacaccagaaagttcctgtacgagctgatcgtggccctgctgaagatggactgccaggagctggtggccagactgatccaggaggccgccgtgctgaccagcgccgtgaagctgggcaagggctggagagagctggccgagaagctggtgagactgaccaagcagcagatggaggcctacgagatcccccacagaggcaacaccggcgacgtggccgtggagatgatgtggaagcccgcctacgacttcctgtacacctggagcgcccactacggcaacaactacagagacgtgctgcaggacctgcagagcgccctggacagaatgaagaaccccgtgaccaagcactggagagagctgaccggcgtgctgatcctggtgaacagcctggaggtgctgagagtgaccgccttcagcaccagcgaggaggtgtag

SEQ ID NO: 88731 - DNA, 2559 bp, synthetic construct; identical to SEQ ID NO: 88730
  misc_feature 1..2559: note = Description of Artificial Sequence: Synthetic coding sequence
  source 1..2559: mol_type = other DNA

SEQ ID NO: 88732 - DNA, 1308 bp, synthetic construct
  misc_feature 1..1308: note = Description of Artificial Sequence: Synthetic coding sequence
  source 1..1308: mol_type = other DNA
atgctgctgggcggcccccccagaagccccagaagcggcaccagccccaagggcccctggagcagcaccggccacgtgcagttcggcaagagcccccagacctggcccagaagaaccagacccagaagccccgagcccgccgcccccagcggcgtgagaggcagcacctggaccagaagaagagacacccccagaagagccggccccaccgccctgagcagatacgtgggccacctgtggatgggcagaagaccccccagccccgaggccagaggccccgtgcccagaagcagcgccgccagcagagccagaagaagcctggccagccccggcatcagccccggccccctgaccgccaccatcggcggcgccgtggccggcggcggccccagacagggcagagccgaggcccacaaggaggtgttccccggccagagagtgggcaagatggccgcccccatggagctgttctgctggagcggcggctggggcctgcccagcgtggacctggacagcctggccgtgctgacctacgccagattcaccggcgcccccctgaaggtgcacaagatcagcaacccctggcagagccccagcggcaccctgcccgccctgagaaccagccacggcgaggtgatcagcgtgccccacaagatcatcacccacctgagaaaggaggtgcacaccttctggatcgacaccaagaactacgtggaggtgaccagaaagtggtacgccgaggccatgcccttccccctgaacttcttcctgcccggcagaatgcagagacagtacatggagagactgcagctgctgaccggcgagcacagacccgaggacgaggaggagctggagaaggagctgtacagagaggccagagagtgcctgaccctgctgagccagagactgggcagccagaagttcttcttcggcgacgcccccgccagcctggacgccttcgtgttcagctacctggccctgctgctgcaggccaagctgcccagcggcaagctgcaggtgcacctgagaggcctgcacaacctgtgcgcctactgcacccacatcctgagcctgtacttcccctgggacggcgccgaggtgcccccccagagacagacccccgccggccccgagaccgaggaggagccctacagaagaagaaaccagatcctgagcgtgctggccggcctggccgccatggtgggctacgccctgctgagcggcatcgtgagcatccagagagccacccccgccagagcccccggcaccagaaccctgggcatggccgaggaggacgaggaggagtag

SEQ ID NO: 88733 - DNA, 1401 bp, synthetic construct
  misc_feature 1..1401: note = Description of Artificial Sequence: Synthetic coding sequence
  source 1..1401: mol_type = other DNA
atgctgctgggcggcccccccagaagccccagaagcggcaccagccccaagggcccctggagcagcaccggccacgtgcagttcggcaagagcccccagacctggcccagaagaaccagacccagaagccccgagcccgccgcccccagcggcgtgagaggcagcacctggaccagaagaagagacacccccagaagagccggccccaccgccctgagcagatacgtgggccacctgtggatgggcagaagaccccccagccccgaggccagaggccccgtgcccagaagcagcgccgccagcagagccagaagaagcctggccagccccggcatcagccccggccccctgaccgccaccatcggcggcgccgtggccggcggcggccccagacagggcagagccgaggcccacaaggaggtgttccccggccagagagtgggcaagatggccgcccccatggagctgttctgctggagcggcggctggggcctgcccagcgtggacctggacagcctggccgtgctgacctacgccagattcaccggcgcccccctgaaggtgcacaagatcagcaacccctggcagagccccagcggcaccctgcccgccctgagaaccagccacggcgaggtgatcagcgtgccccacaagatcatcacccacctgagaaaggagaagtacaacgccgactacgacctgagcgccagacagggcgccgacaccctggccttcatgagcctgctggaggagaagctgctgcccgtgctggtgcacaccttctggatcgacaccaagaactacgtggaggtgaccagaaagtggtacgccgaggccatgcccttccccctgaacttcttcctgcccggcagaatgcagagacagtacatggagagactgcagctgctgaccggcgagcacagacccgaggacgaggaggagctggagaaggagctgtacagagaggccagagagtgcctgaccctgctgagccagagactgggcagccagaagttcttcttcggcgacgcccccgccagcctggacgccttcgtgttcagctacctggccctgctgctgcaggccaagctgcccagcggcaagctgcaggtgcacctgagaggcctgcacaacctgtgcgcctactgcacccacatcctgagcctgtacttcccctgggacggcgccgaggtgcccccccagagacagacccccgccggccccgagaccgaggaggagccctacagaagaagaaaccagatcctgagcgtgctggccggcctggccgccatggtgggctacgccctgctgagcggcatcgtgagcatccagagagccacccccgccagagcccccggcaccagaaccctgggcatggccgaggaggacgaggaggagtag

SEQ ID NO: 88734 - DNA, 951 bp, synthetic construct
  misc_feature 1..951: note = Description of Artificial Sequence: Synthetic coding sequence
  source 1..951: mol_type = other DNA
tgagagggcggccaggacggcggcgcccacggcgccgtgctgctggtgagaggcctgggcgccgccgtgagcggccccggccagcccggcagagccgacctgtgccagatctactggtgcagcaccgagggcacccaggaccagcagcccctggccgagcccttcagataccccgtgagcctgggcggcaccctgcccgccctgagaaccagccacggcgaggtgatcagcgtgccccacaagatcatcacccacctgagaaaggagaagtacaacgccgactacgacctgagcgccagacagggcgccgacaccctggccttcatgagcctgctggaggagaagctgctgcccgtgctggtgcacaccttctggatcgacaccaagaactacgtggaggtgaccagaaagtggtacgccgaggccatgcccttccccctgaacttcttcctgcccggcagaatgcagagacagtacatggagagactgcagctgctgaccggcgagcacagacccgaggacgaggaggagctggagaaggagctgtacagagaggccagagagtgcctgaccctgctgagccagagactgggcagccagaagttcttcttcggcgacgcccccgccagcctggacgccttcgtgttcagctacctggccctgctgctgcaggccaagctgcccagcggcaagctgcaggtgcacctgagaggcctgcacaacctgtgcgcctactgcacccacatcctgagcctgtacttcccctgggacggcgccgaggtgcccccccagagacagacccccgccggccccgagaccgaggaggagccctacagaagaagaaaccagatcctgagcgtgctggccggcctggccgccatggtgggctacgccctgctgagcggcatcgtgagcatccagagagccacccccgccagagcccccggctag

SEQ ID NO: 88735 - DNA, 1188 bp, synthetic construct
  misc_feature 1..1188: note = Description of Artificial Sequence: Synthetic coding sequence
  source 1..1188: mol_type = other DNA
atgaacggccccgtggacggcctgtgcgaccacagcctgagcgagggcgtgttcatgttcaccagcgagagcgtgggcgagggccaccccgacaagatctgcgaccagatcagcgacgccgtgctggacgcccacctgaagcaggaccccaacgccaaggtggcctgcgagaccgtgtgcaagaccggcatggtgctgctgtgcggcgagatcaccagcatggccatggtggactaccagagagtggtgagagacaccatcaagcacatcggctacgacgacagcgccaagggcttcgacttcaagacctgcaacgtgctggtggccctggagcagcagagccccgacatcgcccagtgcgtgcacctggacagaaacgaggaggacgtgggcgccggcgaccagggcctgatgttcggctacgccaccgacgagaccgaggagtgcatgcccctgaccatcatcctggcccacaagctgaacgccagaatggccgacctgagaagaagcggcctgctgccctggctgagacccgacagcaagacccaggtgaccgtgcagtacatgcaggacaacggcgccgtgatccccgtgagaatccacaccatcgtgatcagcgtgcagcacaacgaggacatcaccctggaggagatgagaagagccctgaaggagcaggtgatcagagccgtggtgcccgccaagtacctggacgaggacaccgtgtaccacctgcagcccagcggcagattcgtgatcggcggcccccagggcgacgccggcgtgaccggcagaaagatcatcgtggacacctacggcggctggggcgcccacggcggcggcgccttcagcggcaaggactacaccaaggtggacagaagcgccgcctacgccgccagatgggtggccaagagcctggtgaaggccggcctgtgcagaagagtgctggtgcaggtgagctacgccatcggcgtggccgagcccctgagcatcagcatcttcacctacggcaccagccagaagaccgagagagagctgctggacgtggtgcacaagaacttcgacctgagacccggcgtgatcgtgagagacctggacctgaagaagcccatctaccagaagaccgcctgctacggccacttcggcagaagcgagttcccctgggaggtgcccagaaagctggtgttctag

SEQ ID NO: 88736 - DNA, 1188 bp, synthetic construct; identical to SEQ ID NO: 88735
  misc_feature 1..1188: note = Description of Artificial Sequence: Synthetic coding sequence
  source 1..1188: mol_type = other DNA

SEQ ID NO: 88737 - DNA, 438 bp, synthetic construct
  misc_feature 1..438: note = Description of Artificial Sequence: Synthetic coding sequence
  source 1..438: mol_type = other DNA
gagagcgtgggcgagggccaccccgacaagatctgcgaccagatcagcgacgccgtgctggacgcccacctgaagcaggaccccaacgccaaggtggcctgcggcttcgacttcaagacctgcaacgtgctggtggccctggagcagcagagccccgacatcgcccagtgcgtgcacctggacagaaacgaggaggacgtgggcgccggcgaccagggcctgatgttcggctacgccaccgacgagaccgaggagtgcatgcccctgaccatcatcctggcccacaagctgaacgccagaatggccgacctgagaagaagcggcctgctgccctggctgagacccgacagcaagacccaggtgaccgtgcagtacatgcaggacaacggcgccgtgatccccgtgagaatccacaccatcgtgatcagcgtgcagtag

SEQ ID NO: 88738 - DNA, 1188 bp, synthetic construct
  misc_feature 1..1188: note = Description of Artificial Sequence: Synthetic coding sequence
  source 1..1188: mol_type = other DNA
atgaacggccagctgaacggcttccacgaggccttcatcgaggagggcaccttcctgttcaccagcgagagcgtgggcgagggccaccccgacaagatctgcgaccagatcagcgacgccgtgctggacgcccacctgcagcaggaccccgacgccaaggtggcctgcgagaccgtggccaagaccggcatgatcctgctggccggcgagatcaccagcagagccgccgtggactaccagaaggtggtgagagaggccgtgaagcacatcggctacgacgacagcagcaagggcttcgactacaagacctgcaacgtgctggtggccctggagcagcagagccccgacatcgcccagggcgtgcacctggacagaaacgaggaggacatcggcgccggcgaccagggcctgatgttcggctacgccaccgacgagaccgaggagtgcatgcccctgaccatcgtgctggcccacaagctgaacgccaagctggccgagctgagaagaaacggcaccctgccctggctgagacccgacagcaagacccaggtgaccgtgcagtacatgcaggacagaggcgccgtgctgcccatcagagtgcacaccatcgtgatcagcgtgcagcacgacgaggaggtgtgcctggacgagatgagagacgccctgaaggagaaggtgatcaaggccgtggtgcccgccaagtacctggacgaggacaccatctaccacctgcagcccagcggcagattcgtgatcggcggcccccagggcgacgccggcctgaccggcagaaagatcatcgtggacacctacggcggctggggcgcccacggcggcggcgccttcagcggcaaggactacaccaaggtggacagaagcgccgcctacgccgccagatgggtggccaagagcctggtgaagggcggcctgtgcagaagagtgctggtgcaggtgagctacgccatcggcgtgagccaccccctgagcatcagcatcttccactacggcaccagccagaagagcgagagagagctgctggagatcgtgaagaagaacttcgacctgagacccggcgtgatcgtgagagacctggacctgaagaagcccatctaccagagaaccgccgcctacggccacttcggcagagacagcttcccctgggaggtgcccaagaagctgaagtactag

SEQ ID NO: 88739 - DNA, 531 bp, synthetic construct
  misc_feature 1..531: note = Description of Artificial Sequence: Synthetic coding sequence
  source 1..531: mol_type = other DNA
atgaacggccagctgaacggcttccacgaggccttcatcgaggagggcaccttcctgttcaccagcgagagcgtgggcgagggccaccccgacaagatctgcgaccagatcggcgacgccggcctgaccggcagaaagatcatcgtggacacctacggcggctggggcgcccacggcggcggcgccttcagcggcaaggactacaccaaggtggacagaagcgccgcctacgccgccagatgggtggccaagagcctggtgaagggcggcctgtgcagaagagtgctggtgcaggtgagctacgccatcggcgtgagccaccccctgagcatcagcatcttccactacggcaccagccagaagagcgagagagagctgctggagatcgtgaagaagaacttcgacctgagacccggcgtgatcgtgagagacctggacctgaagaagcccatctaccagagaaccgccgcctacggccacttcggcagagacagcttcccctgggaggtgcccaagaagctgaagtactag

SEQ ID NO: 88740 - DNA, 549 bp, synthetic construct
  misc_feature 1..549: note = Description of Artificial Sequence: Synthetic coding sequence
  source 1..549: mol_type = other DNA
atggccagactgctgtggctgctgagaggcctgaccctgggcaccgcccccagaagagccgtgagaggccaggccggcggcggcggccccggcaccggccccggcctgggcgaggccggcagcctggccacctgcgagctgcccctggccaagagcgagtggcagaagaagctgacccccgagcagttctacgtgaccagagagaagggcaccgagccccccttcagcggcatctacctgaacaacaaggaggccggcatgtaccactgcgtgtgctgcgacagccccctgttcagcagcgagaagaagtactgcagcggcaccggctggcccagcttcagcgaggcccacggcaccagcggcagcgacgagagccacaccggcatcctgagaagactggacaccagcctgggcagcgccagaaccgaggtggtgtgcaagcagtgcgaggcccacctgggccacgtgttccccgacggccccggccccaacggccagagattctgcatcaacagcgtggccctgaagttcaagcccagaaagcactag

SEQ ID NO: 88741 - DNA, 558 bp, synthetic construct
  misc_feature 1..558: note = Description of Artificial Sequence: Synthetic coding sequence
  source 1..558: mol_type = other DNA
atgagcgccttcaacctgctgcacctggtgaccaagagccagcccgtggccctgagagcctgcggcctgcccagcggcagctgcagagacaagaagaactgcaaggtggtgttcagccagcaggagctgagaaagagactgacccccctgcagtaccacgtgacccaggagaagggcaccgagagcgccttcgagggcgagtacacccaccacaaggaccccggcatctacaagtgcgtggtgtgcggcacccccctgttcaagagcgagaccaagttcgacagcggcagcggctggcccagcttccacgacgtgatcaacagcgaggccatcaccttcaccgacgacttcagctacggcatgcacagagtggagaccagctgcagccagtgcggcgcccacctgggccacatcttcgacgacggccccagacccaccggcaagagatactgcatcaacagcgccgccctgagcttcacccccgccgacagcagcggcaccgccgagggcggcagcggcgtggccagccccgcccaggccgacaaggccgagctgtag

SEQ ID NO: 88742 - DNA, 579 bp, synthetic construct
  misc_feature 1..579: note = Description of Artificial Sequence: Synthetic coding sequence
  source 1..579: mol_type = other DNA
atgagccccagaagaaccctgcccagacccctgagcctgtgcctgagcctgtgcctgtgcctgtgcctggccgccgccctgggcagcgcccagagcggcagctgcagagacaagaagaactgcaaggtggtgttcagccagcaggagctgagaaagagactgacccccctgcagtaccacgtgacccaggagaagggcaccgagagcgccttcgagggcgagtacacccaccacaaggaccccggcatctacaagtgcgtggtgtgcggcacccccctgttcaagagcgagaccaagttcgacagcggcagcggctggcccagcttccacgacgtgatcaacagcgaggccatcaccttcaccgacgacttcagctacggcatgcacagagtggagaccagctgcagccagtgcggcgcccacctgggccacatcttcgacgacggccccagacccaccggcaagagatactgcatcaacagcgccgccctgagcttcacccccgccgacagcagcggcaccgccgagggcggcagcggcgtggccagccccgcccaggccgacaaggccgagctgtag

SEQ ID NO: 88743 - DNA, 495 bp, synthetic construct
  misc_feature 1..495: note = Description of Artificial Sequence: Synthetic coding sequence
  source 1..495: mol_type = other DNA
atgagcgccttcaacctgctgcacctggtgaccaagagccagcccgtggccctgagagcctgcggcctgcccagcggcagctgcagagacaagaagaactgcaaggtggtgttcagccagcaggagctgagaaagagactgacccccctgcagtaccacgtgacccaggagaagggcaccgagagcgccttcgagggcgagtacacccaccacaaggaccccggcatctacaagtgcgtggtgtgcggcacccccctgttcaagagcgagaccaagttcgacagcggcagcggctggcccagcttccacgacgtgatcaacagcgaggccatcaccttcaccgacgacttcagctacggcatgcacagagtggagaccagctgcagccagtgcggcgcccacctgggccacatcttcgacgacggccccagacccaccggcaagagatactgcatcaacagcgccgccctgagcttcacccccgccgacagctag

SEQ ID NO: 88744 - DNA, 558 bp, synthetic construct; identical to SEQ ID NO: 88741
  misc_feature 1..558: note = Description of Artificial Sequence: Synthetic coding sequence
  source 1..558: mol_type = other DNA

SEQ ID NO: 88745 - DNA, 354 bp, synthetic construct
  misc_feature 1..354: note = Description of Artificial Sequence: Synthetic coding sequence
  source 1..354: mol_type = other DNA
atgagcgccttcaacctgctgcacctggtgaccaagagccagcccgtggccctgagagcctgcggcctgcccagcggcagctgcagagacaagaagaactgcaaggtggtgttcagccagcaggagctgagaaagagactgacccccctgcagtaccacgtgacccaggagaagggcaccgagagcgccttcgagggcgagtacacccaccacaaggaccccggcatctacaagtgcgtggtgtgcggcacccccctgttcaagagcgagaccaagttcgacagcggcagcggctggcccagcttccacgacgtgatcaacagcgaggccatcaccttcaccgacgacttctag

SEQ ID NO: 88746 - DNA, 2703 bp, synthetic construct
  misc_feature 1..2703: note = Description of Artificial Sequence: Synthetic coding sequence
  source 1..2703: mol_type = other DNA
atgagactgttcgtgagcgacggcgtgcccggctgcctgcccgtgctggccgccgccggcagagccagaggcagagccgaggtgctgatcagcaccgtgggccccgaggactgcgtggtgcccttcctgaccagacccaaggtgcccgtgctgcagctggacagcggcaactacctgttcagcaccagcgccatctgcagatacttcttcctgctgagcggctgggagcaggacgacctgaccaaccagtggctggagtgggaggccaccgagctgcagcccgccctgagcgccgccctgtactacctggtggtgcagggcaagaagggcgaggacgtgctgggcagcgtgagaagagccctgacccacatcgaccacagcctgagcagacagaactgccccttcctggccggcgagaccgagagcctggccgacatcgtgctgtggggcgccctgtaccccctgctgcaggaccccgcctacctgcccgaggagctgagcgccctgcacagctggttccagaccctgagcacccaggagccctgccagagagccgccgagaccgtgctgaagcagcagggcgtgctggccctgagaccctacctgcagaagcagccccagcccagccccgccgagggcagagccgtgaccaacgagcccgaggaggaggagctggccaccctgagcgaggaggagatcgccatggccgtgaccgcctgggagaagggcctggagagcctgccccccctgagaccccagcagaaccccgtgctgcccgtggccggcgagagaaacgtgctgatcaccagcgccctgccctacgtgaacaacgtgccccacctgggcaacatcatcggctgcgtgctgagcgccgacgtgttcgccagatacagcagactgagacagtggaacaccctgtacctgtgcggcaccgacgagtacggcaccgccaccgagaccaaggccctggaggagggcctgaccccccaggagatctgcgacaagtaccacatcatccacgccgacatctacagatggttcaacatcagcttcgacatcttcggcagaaccaccaccccccagcagaccaagatcacccaggacatcttccagcagctgctgaagagaggcttcgtgctgcaggacaccgtggagcagctgagatgcgagcactgcgccagattcctggccgacagattcgtggagggcgtgtgccccttctgcggctacgaggaggccagaggcgaccagtgcgacaagtgcggcaagctgatcaacgccgtggagctgaagaagccccagtgcaaggtgtgcagaagctgccccgtggtgcagagcagccagcacctgttcctggacctgcccaagctggagaagagactggaggagtggctgggcagaaccctgcccggcagcgactggacccccaacgcccagttcatcaccagaagctggctgagagacggcctgaagcccagatgcatcaccagagacctgaagtggggcacccccgtgcccctggagggcttcgaggacaaggtgttctacgtgtggttcgacgccaccatcggctacctgagcatcaccgccaactacaccgaccagtgggagagatggtggaagaaccccgagcaggtggacctgtaccagttcatggccaaggacaacgtgcccttccacagcctggtgttcccctgcagcgccctgggcgccgaggacaactacaccctggtgagccacctgatcgccaccgagtacctgaactacgaggacggcaagttcagcaagagcagaggcgtgggcgtgttcggcgacatggcccaggacaccggcatccccgccgacatctggagattctacctgctgtacatcagacccgagggccaggacagcgccttcagctggaccgacctgctgctgaagaacaacagcgagctgctgaacaacctgggcaacttcatcaacagagccggcatgttcgtgagcaagttcttcggcggctacgtgcccgagatggtgctgacccccgacgaccagagactgctggcccacgtgaccctggagctgcagcactaccaccagctgctggagaaggtgagaatcagagacgccctgagaagcatcctgaccatcagcagacacggcaaccagtacatccaggtgaacgagccctggaagagaatcaagggcagcgaggccgacagacagagagccggcaccgtgaccggcctggccgtgaacatcgccgccctgctgagcgtgatgctgcagccctacatgcccaccgtgagcgccaccatccaggcccagctgcagctgcccccccccgcctgcagcatcctgctgaccaacttcctgtgcaccctgcccgccggccaccagatcggcaccgtgagccccctgttccagaagctggagaacgaccagatcgagagcctgagacagagattcggcggcggccaggccaagaccagccccaagcccgccgtggtggagaccgtgaccaccgccaagccccagcagatccaggccctgatggacgaggtgaccaagcagggcaacatcgtgagagagctgaaggcccagaaggccgacaagaacgaggtggccgccgaggtggccaagctgctggacctgaagaagcagctggccgtggccgagggcaagccccccgaggcccccaagggcaagaagaagaagtag

SEQ ID NO: 88747 - DNA, 1908 bp, synthetic construct
  misc_feature 1..1908: note = Description of Artificial Sequence: Synthetic coding sequence
  source 1..1908: mol_type = other DNA
atggccgtgaccgcctgggagaagggcctggagagcctgccccccctgagaccccagcagaaccccgtgctgcccgtggccggcgagagaaacgtgctgatcaccagcgccctgccctacgtgaacaacgtgccccacctgggcaacatcatcggctgcgtgctgagcgccgacgtgttcgccagatacagcagactgagacagtggaacaccctgtacctgtgcggcaccgacgagtacggcaccgccaccgagaccaaggccctggaggagggcctgaccccccaggagatctgcgacaagtaccacatcatccacgccgacatctacagatggttcaacatcagcttcgacatcttcggcagaaccaccaccccccagcagaccaagatcacccaggacatcttccagcagctgctgaagagaggcttcgtgctgcaggacaccgtggagcagctgagatgcgagcactgcgccagattcctggccgacagattcgtggagggcgtgtgccccttctgcggctacgaggaggccagaggcgaccagtgcgacaagtgcggcaagctgatcaacgccgtggagctgaagaagccccagtgcaaggtgtgcagaagctgccccgtggtgcagagcagccagcacctgttcctggacctgcccaagctggagaagagactggaggagtggctgggcagaaccctgcccggcagcgactggacccccaacgcccagttcatcaccagaagctggctgagagacggcctgaagcccagatgcatcaccagagacctgaagtggggcacccccgtgcccctggagggcttcgaggacaaggtgttctacgtgtggttcgacgccaccatcggctacctgagcatcaccgccaactacaccgaccagtgggagagatggtggaagaaccccgagcaggtggacctgtaccagttcatggccaaggacaacgtgcccttccacagcctggtgttcccctgcagcgccctgggcgccgaggacaactacaccctggtgagccacctgatcgccaccgagtacctgaactacgaggacggcaagttcagcaagagcagaggcgtgggcgtgttcggcgacatggcccaggacaccggcatccccgccgacatctggagattctacctgctgtacatcagacccgagggccaggacagcgccttcagctggaccgacctgctgctgaagaacaacagcgagctgctgaacaacctgggcaacttcatcaacagagccggcatgttcgtgagcaagttcttcggcggctacgtgcccgagatggtgctgacccccgacgaccagagactgctggcccacgtgaccctggagctgcagcactaccaccagctgctggagaaggtgagaatcagagacgccctgagaagcatcctgaccatcagcagacacggcaaccagtacatccaggtgaacgagccctggaagagaatcaagggcagcgaggccgacagacagagagccggcaccgtgaccggcctggccgtgaacatcgccgccctgctgagcgtgatgctgcagccctacatgcccaccgtgagcgccaccatccaggcccagctgcagctgcccccccccgcctgcagcatcctgctgaccaacttcctgtgcaccctgcccgccggccaccagatcggcaccgtgagccccctgttccagaagctggagaacgaccagatcgagagcctgagacagagattcggcggcggccaggtgagaaagctgaaggccgtgcccagcctgcacaacagccacagcatcaccagcctgatcagcctgagcagcccccaccccagcctgttccccagcttcggccccgccgccagcagcctgaccgtgttcctgagctgcctgaactag

SEQ ID NO: 88748 - DNA, 1641 bp, synthetic construct
  misc_feature 1..1641: note = Description of Artificial Sequence: Synthetic coding sequence
  source 1..1641: mol_type = other DNA
atgagactgttcgtgagcgacggcgtgcccggctgcctgcccgtgctggccgccgccggcagagccagaggcagagccgaggtgctgatcagcaccgtgggccccgaggactgcgtggtgcccttcctgaccagacccaaggtgcccgtgctgcagctggacagcggcaactacctgttcagcaccagcgccatctgcagatacttcttcctgctgagcggctgggagcaggacgacctgaccaaccagtggctggagtgggaggccaccgagctgcagcccgccctgagcgccgccctgtactacctggtggtgcagggcaagaagggcgaggacgtgctgggcagcgtgagaagagccctgacccacatcgaccacagcctgagcagacagaactgccccttcctggccggcgagaccgagagcctggccgacatcgtgctgtggggcgccctgtaccccctgctgcaggaccccgcctacctgcccgaggagctgagcgccctgcacagctggttccagaccctgagcacccaggagccctgccagagagccgccgagaccgtgctgaagcagcagggcgtgctggccctgagaccctacctgcagaagcagccccagcccagccccgccgagggcagagccgtgaccaacgagcccgaggaggaggagctggccaccctgagcgaggaggagatcgccatggccgtgaccgcctgggagaagggcctggagagcctgccccccctgagaccccagcagaaccccgtgctgcccgtggccggcgagagaaacgtgctgatcaccagcgccctgccctacgtgaacaacgtgccccacctgggcaacatcatcggctgcgtgctgagcgccgacgtgttcgccagatacagcagactgagacagtggaacaccctgtacctgtgcggcaccgacgagtacggcaccgccaccgagaccaaggccctggaggagggcctgaccccccaggagatctgcgacaagtaccacatcatccacgccgacatctacagatggttcaacatcagcttcgacatcttcggcagaaccaccaccccccagcagaccaagatcacccaggacatcttccagcagctgctgaagagaggcttcgtgctgcaggacaccgtggagcagctgagatgcgagcactgcgccagattcctggccgacagattcgtggagggcgtgtgccccttctgcggctacgaggaggccagaggcgaccagtgcgacaagtgcggcaagctgatcaacgccgtggagctgaagaagccccagtgcaaggtgtgcagaagctgccccgtggtgcagagcagccagcacctgttcctggacctgcccaagctggagaagagactggaggagtggctgggcagaaccctgcccggcagcgactggacccccaacgcccagttcatcaccagaagctggctgagagacggcctgaagcccagatgcatcaccagagacctgaagtggggcacccccgtgcccctggagggcttcgaggacaaggtgttctacgtgtggttcgacgccaccatcggctacctgagcatcaccgccaactacaccgaccagtgggagagatggtggaagaaccccgagcagccctag

SEQ ID NO: 88749 - DNA, 1782 bp, synthetic construct
  misc_feature 1..1782: note = Description of Artificial Sequence: Synthetic coding sequence
  source 1..1782: mol_type = other DNA
atgctgagaaccagcgtgctgagactgctgggcagaaccggcgccagcagactgagcctgctggaggacttcggccccagatactacagcagcggcagcctgagcgccggcgacgacgcctgcgacgtgagagcctacttcaccacccccatcttctacgtgaacgccgccccccacatcggccacctgtacagcgccctgctggccgacgccctgtgcagacacagaagactgagaggccccagcaccgccgccaccagattcagcaccggcaccgacgagcacggcctgaagatccagcaggccgccgccaccgccggcctggcccccaccgagctgtgcgacagagtgagcgagcagttccagcagctgttccaggaggccggcatcagctgcaccgacttcatcagaaccaccgaggccagacacagagtggccgtgcagcacttctggggcgtgctgaagagcagaggcctgctgtacaagggcgtgtacgagggctggtactgcgccagcgacgagtgcttcctgcccgaggccaaggtgacccagcagcccggccccagcggcgacagcttccccgtgagcctggagagcggccaccccgtgagctggaccaaggaggagaactacatcttcagactgagccagttcagaaagcccctgcagagatggctgagaggcaacccccaggccatcacccccgagcccttccaccacgtggtgctgcagtggctggacgaggagctgcccgacctgagcgtgagcagaagaagcagccacctgcactggggcatccccgtgcccggcgacgacagccagaccatctacgtgtggctggacgccctggtgaactacctgaccgtgatcggctaccccaacgccgagttcaagagctggtggcccgccaccagccacatcatcggcaaggacatcctgaagttccacgccatctactggcccgccttcctgctgggcgccggcatgagccccccccagagaatctgcgtgcacagccactggaccgtgtgcggccagaagatgagcaagagcctgggcaacgtggtggaccccagaacctgcctgaacagatacaccgtggacggcttcagatacttcctgctgagacagggcgtgcccaactgggactgcgactactacgacgagaaggtggtgaagctgctgaacagcgagctggccgacgccctgggcggcctgctgaacagatgcaccgccaagagaatcaaccccagcgagacctaccccgccttctgcaccacctgcttccccagcgagcccggcctggtgggccccagcgtgagagcccaggccgaggactacgccctggtgagcgccgtggccaccctgcccaagcaggtggccgaccactacgacaacttcagaatctacaaggccctggaggccgtgagcagctgcgtgagacagaccaacggcttcgtgcagagacacgccccctggaagctgaactgggagagccccgtggacgccccctggctgggcaccgtgctgcacgtggccctggagtgcctgagagtgttcggcaccctgctgcagcccgtgacccccagcctggccgacaagctgctgagcagactgggcgtgagcgccagcgagagaagcctgggcgagctgtacttcctgcccagattctacggccacccctgccccttcgagggcagaagactgggccccgagaccggcctgctgttccccagactggaccagagcagaacctggctggtgaaggcccacagaacctag

SEQ ID NO: 88750 - DNA, 1563 bp, synthetic construct
  misc_feature 1..1563: note = Description of Artificial Sequence: Synthetic coding sequence
  source 1..1563: mol_type = other DNA
atgctgagaaccagcgtgctgagactgctgggcagaaccggcgccagcagactgagcctgctggaggacttcggccccagatactacagcagcggcagcctgagcgccggcgacgacgcctgcgacgtgagagcctacttcaccacccccatcttctacgtgaacgccgccccccacatcggccacctgtacagcgccctgctggccgacgccctgtgcagacacagaagactgagaggccccagcaccgccgccaccagattcagcaccggcaccgacgagcacggcctgaagatccagcaggccgccgccaccgccggcctggcccccaccgagctgtgcgacagagtgagcgagcagttccagcagctgttccaggaggccggcatcagctggaccaaggaggagaactacatcttcagactgagccagttcagaaagcccctgcagagatggctgagaggcaacccccaggccatcacccccgagcccttccaccacgtggtgctgcagtggctggacgaggagctgcccgacctgagcgtgagcagaagaagcagccacctgcactggggcatccccgtgcccggcgacgacagccagaccatctacgtgtggctggacgccctggtgaactacctgaccgtgatcggctaccccaacgccgagttcaagagctggtggcccgccaccagccacatcatcggcaaggacatcctgaagttccacgccatctactggcccgccttcctgctgggcgccggcatgagccccccccagagaatctgcgtgcacagccactggaccgtgtgcggccagaagatgagcaagagcctgggcaacgtggtggaccccagaacctgcctgaacagatacaccgtggacggcttcagatacttcctgctgagacagggcgtgcccaactgggactgcgactactacgacgagaaggtggtgaagctgctgaacagcgagctggccgacgccctgggcggcctgctgaacagatgcaccgccaagagaatcaaccccagcgagacctaccccgccttctgcaccacctgcttccccagcgagcccggcctggtgggccccagcgtgagagcccaggccgaggactacgccctggtgagcgccgtggccaccctgcccaagcaggtggccgaccactacgacaacttcagaatctacaaggccctggaggccgtgagcagctgcgtgagacagaccaacggcttcgtgcagagacacgccccctggaagctgaactgggagagccccgtggacgccccctggctgggcaccgtgctgcacgtggccctggagtgcctgagagtgttcggcaccctgctgcagcccgtgacccccagcctggccgacaagctgctgagcagactgggcgtgagcgccagcgagagaagcctgggcgagctgtacttcctgcccagattctacggccacccctgccccttcgagggcagaagactgggccccgagaccggcctgctgttccccagactggaccagagcagaacctggctggtgaaggcccacagaacctag

SEQ ID NO: 88751 - DNA, 1461 bp, synthetic construct
  misc_feature 1..1461: note = Description of Artificial Sequence: Synthetic coding sequence
  source 1..1461: mol_type = other DNA
atggtggccggcatgctgggcctgagagaggagaagagcgaggaccaggacctgcagggcctgaaggacaagcccctgaagttcaagaaggtgaagaaggacaagaaggaggagaaggagggcaagcacgagcccgtgcagcccagcgcccaccacagcgccgagcccgccgaggccggcaaggccgagaccagcgagggcagcggcagcgcccccgccgtgcccgaggccagcgccagccccaagcagagaagaagcatcatcagagacagaggccccatgtacgacgaccccaccctgcccgagggctggaccagaaagctgaagcagagaaagagcggcagaagcgccggcaagtacgacgtgtacctgatcaacccccagggcaaggccttcagaagcaaggtggagctgatcgcctacttcgagaaggtgggcgacaccagcctggaccccaacgacttcgacttcaccgtgaccggcagaggcagccccagcagaagagagcagaagccccccaagaagcccaagagccccaaggcccccggcaccggcagaggcagaggcagacccaagggcagcggcaccaccagacccaaggccgccaccagcgagggcgtgcaggtgaagagagtgctggagaagagccccggcaagctgctggtgaagatgcccttccagaccagccccggcggcaaggccgagggcggcggcgccaccaccagcacccaggtgatggtgatcaagagacccggcagaaagagaaaggccgaggccgacccccaggccatccccaagaagagaggcagaaagcccggcagcgtggtggccgccgccgccgccgaggccaagaagaaggccgtgaaggagagcagcatcagaagcgtgcaggagaccgtgctgcccatcaagaagagaaagaccagagagaccgtgagcatcgaggtgaaggaggtggtgaagcccctgctggtgagcaccctgggcgagaagagcggcaagggcctgaagacctgcaagagccccggcagaaagagcaaggagagcagccccaagggcagaagcagcagcgccagcagcccccccaagaaggagcaccaccaccaccaccaccacagcgagagccccaaggcccccgtgcccctgctgccccccctgcccccccccccccccgagcccgagagcagcgaggaccccaccagcccccccgagccccaggacctgagcagcagcgtgtgcaaggaggagaagatgcccagaggcggcagcctggagagcgacggctgccccaaggagcccgccaagacccagcccgccgtggccaccgccgccaccgccgccgagaagtacaagcacagaggcgagggcgagagaaaggacatcgtgagcagcagcatgcccagacccaacagagaggagcccgtggacagcagaacccccgtgaccgagagagtgagctag

SEQ ID NO: 88752 - DNA, 816 bp, synthetic construct
  misc_feature 1..816: note = Description of Artificial Sequence: Synthetic coding sequence
  source 1..816: mol_type = other DNA
atggtggccggcatgctgggcctgagagaggagaagagcgaggaccaggacctgcagggcctgaaggacaagcccctgaagttcaagaaggtgaagaaggacaagaaggaggagaaggagggcaagcacgagcccgtgcagcccagcgcccaccacagcgccgagcccgccgaggccggcaaggccgagaccagcgagggcagcggcagcgcccccgccgtgcccgaggccagcgccagccccaagcagagaagaagcatcatcagagacagaggccccatgtacgacgaccccaccctgcccgagggctggaccagaaagctgaagcagagaaagagcggcagaagcgccggcaagtacgacgtgtacctgatcaacccccagggcaaggccttcagaagcaaggtggagctgatcgcctacttcgagaaggtgggcgacaccagcctggaccccaacgacttcgacttcaccgtgaccggcagaggcagccccagcagaagagagcagaagccccccaagaagcccaagagccccaaggcccccggcaccggcagaggcagaggcagacccaagggcagcggcaccaccagacccaaggccgccaccagcgagggcgtgcaggtgaagagagtgctggagaagagccccggcaagctgctggtgaagatgcccttccagaccagccccggcggcaaggccgagggcggcggcgccaccaccagcacccaggtgatggtgatcaagagacccggcagaaagagaagccccagagcccccagaaccccccccgcccccctgagccccagaacctag

SEQ ID NO: 88753 - DNA, 153 bp, synthetic construct
  misc_feature 1..153: note = Description of Artificial Sequence: Synthetic coding sequence
  source 1..153: mol_type = other DNA
atggtggccggcatgctgggcctgagagaggagaagagcgaggaccaggacctgcagggcctgaaggacaagcccctgaagttcaagaaggtgaagaaggacaagaaggaggagaaggagggcaagcacgagcccgtgcagcccagcgcctag

SEQ ID NO: 88754 - DNA, 1497 bp, synthetic construct
  misc_feature 1..1497: note = Description of Artificial Sequence: Synthetic coding sequence
  source 1..1497: mol_type = other DNA
atggccgccgccgccgccgccgcccccagcggcggcggcggcggcggcgaggaggagagactggaggagaagagcgaggaccaggacctgcagggcctgaaggacaagcccctgaagttcaagaaggtgaagaaggacaagaaggaggagaaggagggcaagcacgagcccgtgcagcccagcgcccaccacagcgccgagcccgccgaggccggcaaggccgagaccagcgagggcagcggcagcgcccccgccgtgcccgaggccagcgccagccccaagcagagaagaagcatcatcagagacagaggccccatgtacgacgaccccaccctgcccgagggctggaccagaaagctgaagcagagaaagagcggcagaagcgccggcaagtacgacgtgtacctgatcaacccccagggcaaggccttcagaagcaaggtggagctgatcgcctacttcgagaaggtgggcgacaccagcctggaccccaacgacttcgacttcaccgtgaccggcagaggcagccccagcagaagagagcagaagccccccaagaagcccaagagccccaaggcccccggcaccggcagaggcagaggcagacccaagggcagcggcaccaccagacccaaggccgccaccagcgagggcgtgcaggtgaagagagtgctggagaagagccccggcaagctgctggtgaagatgcccttccagaccagccccggcggcaaggccgagggcggcggcgccaccaccagcacccaggtgatggtgatcaagagacccggcagaaagagaaaggccgaggccgacccccaggccatccccaagaagagaggcagaaagcccggcagcgtggtggccgccgccgccgccgaggccaagaagaaggccgtgaaggagagcagcatcagaagcgtgcaggagaccgtgctgcccatcaagaagagaaagaccagagagaccgtgagcatcgaggtgaaggaggtggtgaagcccctgctggtgagcaccctgggcgagaagagcggcaagggcctgaagacctgcaagagccccggcagaaagagcaaggagagcagccccaagggcagaagcagcagcgccagcagcccccccaagaaggagcaccaccaccaccaccaccacagcgagagccccaaggcccccgtgcccctgctgccccccctgcccccccccccccccgagcccgagagcagcgaggaccccaccagcccccccgagccccaggacctgagcagcagcgtgtgcaaggaggagaagatgcccagaggcggcagcctggagagcgacggctgccccaaggagcccgccaagacccagcccgccgtggccaccgccgccaccgccgccgagaagtacaagcacagaggcgagggcgagagaaaggacatcgtgagcagcagcatgcccagacccaacagagaggagcccgtggacagcagaacccccgtgaccgagagagtgagctag

SEQ ID NO: 88755 - DNA, 1185 bp, synthetic construct
  misc_feature 1..1185: note = Description of Artificial Sequence: Synthetic coding sequence
  source 1..1185: mol_type = other DNA
atggtggccggcatgctgggcctgagagaggagaagagcgaggaccaggacctgcagggcctgaaggacaagcccctgaagttcaagaaggtgaagaaggacaagaaggaggagaaggagggcaagcacgagcccgtgcagcccagcgcccaccacagcgccgagcccgccgaggccggcaaggccgagaccagcgagggcagcggcagcgcccccgccgtgcccgaggccagcgccagccccaagcagagaagaagcatcatcagagacagaggccccatgtacgacgaccccaccctgcccgagggctggaccagaaagctgaagcagagaaagagcggcagaagcgccggcaagtacgacgtgtacctgatcaacccccagggcaaggccttcagaagcaaggtggagctgatcgcctacttcgagaaggtgggcgacaccagcctggaccccaacgacttcgacttcaccgtgaccggcagaggcagccccagcagaagagagcagaagccccccaagaagcccaagagccccaaggcccccggcaccggcagaggcagaggcagacccaagggcagcggcaccaccagacccaaggccgccaccagcgagggcgtgcaggtgaagagagtgctggagaagagccccggcaagctgctggtgaagatgcccttccagaccagccccggcggcaaggccgagggcggcggcgccaccaccagcacccaggtgatggtgatcaagagacccggcagaaagagaaaggccgaggccgacccccaggccatccccaagaagagaggcagaaagcccggcagcgtggtggccgccgccgccgccgaggccaagaagaaggccgtgaaggagagcagcatcagaagcgtgcaggagaccgtgctgcccatcaagaagagaaagaccagagagaccgtgagcatcgaggtgaaggaggtggtgaagcccctgctggtgagcaccctgggcgagaagagcggcaagggcctgaagacctgcaagagccccggcagaaagagcaaggagagcagccccaagggcagaagcagcagcgccagcagcccccccaagaaggagcaccaccaccaccaccaccacagcgagagccccaaggcccccgtgcccaccagaatcaaggccgccgtggtgagcagcccctacggctag

SEQ ID NO: 88756 - DNA, 1818 bp, synthetic construct
  misc_feature 1..1818: note = Description of Artificial Sequence: Synthetic coding sequence
  source 1..1818: mol_type = other DNA
atggccgaggactggctggactgccccgccctgggccccggctggaagagaagagaggtgttcagaaagagcggcgccacctgcggcagaagcgacacctactaccagagccccaccggcgacagaatcagaagcaaggtggagctgaccagatacctgggccccgcctgcgacctgaccctgttcgacttcaagcagggcatcctgtgctaccccgcccccaaggcccaccccgtggccgtggccagcaagaagagaaagaagcccagcagacccgccaagaccagaaagagacaggtgggcccccagagcggcgaggtgagaaaggaggcccccagagacgagaccaaggccgacaccgacaccgcccccgccagcttccccgcccccggctgctgcgagaactgcggcatcagcttcagcggcgacggcacccagagacagagactgaagaccctgtgcaaggactgcagagcccagagaatcgccttcaacagagagcagagaatgttcaagagagtgggctgcggcgagtgcgccgcctgccaggtgaccgaggactgcggcgcctgcagcacctgcctgctgcagctgccccacgacgtggccagcggcctgttctgcaagtgcgagagaagaagatgcctgagaatcgtggagagaagcagaggctgcggcgtgtgcagaggctgccagacccaggaggactgcggccactgccccatctgcctgagaccccccagacccggcctgagaagacagtggaagtgcgtgcagagaagatgcctgagaggcaagcacgccagaagaaagggcggctgcgacagcaagatggccgccagaagaagacccggcgcccagcccctgcccccccccccccccagccagagccccgagcccaccgagccccaccccagagccctggcccccagcccccccgccgagttcatctactactgcgtggacgaggacgagctgcagccctacaccaacagaagacagaacagaaagtgcggcgcctgcgccgcctgcctgagaagaatggactgcggcagatgcgacttctgctgcgacaagcccaagttcggcggcagcaaccagaagagacagaagtgcagatggagacagtgcctgcagttcgccatgaagagactgctgcccagcgtgtggagcgagagcgaggacggcgccggcagcccccccccctacagaagaagaaagagacccagcagcgccagaagacaccacctgggccccaccctgaagcccaccctggccaccagaaccgcccagcccgaccacacccaggcccccaccaagcaggaggccggcggcggcttcgtgctgcccccccccggcaccgacctggtgttcctgagagagggcgccagcagccccgtgcaggtgcccggccccgtggccgccagcaccgaggccctgctgcaggaggcccagtgcagcggcctgagctgggtggtggccctgccccaggtgaagcaggagaaggccgacacccaggacgagtggacccccggcaccgccgtgctgaccagccccgtgctggtgcccggctgccccagcaaggccgtggaccccggcctgcccagcgtgaagcaggagccccccgaccccgaggaggacaaggaggagaacaaggacgacagcgccagcaagctggcccccgaggaggaggccggcggcgccggcacccccgtgatcaccgagatcttcagcctgggcggcaccagattcagagacaccgccgtgtggctgcccagaagcaaggacctgaagaagcccggcgccagaaagcagtag

SEQ ID NO: 88757 - DNA, 1761 bp, synthetic construct
  misc_feature 1..1761: note = Description of Artificial Sequence: Synthetic coding sequence
  source 1..1761: mol_type = other DNA
atggccgaggactggctggactgccccgccctgggccccggctggaagagaagagaggtgttcagaaagagcggcgccacctgcggcagaagcgacacctactaccagagccccaccggcgacagaatcagaagcaaggtggagctgaccagatacctgggccccgcctgcgacctgaccctgttcgacttcaagcagggcatcctgtgctaccccgcccccaaggcccaccccgtggccgtggccagcaagaagagaaagaagcccagcagacccgccaagaccagaaagagacaggtgggcccccagagcggcgaggtgagaaaggaggcccccagagacgagaccaaggccgacaccgacaccgcccccgccagcttccccgcccccggctgctgcgagaactgcggcatcagcttcagcggcgacggcacccagagacagagactgaagaccctgtgcaaggactgcagagcccagagaatcgccttcaacagagagcagagaatgttcaagagagtgggctgcggcgagtgcgccgcctgccaggtgaccgaggactgcggcgcctgcagcacctgcctgctgcagctgccccacgacgtggccagcggcctgttctgcaagtgcgagagaagaagatgcctgagaatcgtggagagaagcagaggctgcggcgtgtgcagaggctgccagacccaggaggactgcggccactgccccatctgcctgagaccccccagacccggcctgagaagacagtggaagtgcgtgcagagaagatgcctgagaggcaagcacgccagaagaaagggcggctgcgacagcaagatggccgccagaagaagacccggcgcccagcccctgcccccccccccccccagccagagccccgagcccaccgagccccagccctacaccaacagaagacagaacagaaagtgcggcgcctgcgccgcctgcctgagaagaatggactgcggcagatgcgacttctgctgcgacaagcccaagttcggcggcagcaaccagaagagacagaagtgcagatggagacagtgcctgcagttcgccatgaagagactgctgcccagcgtgtggagcgagagcgaggacggcgccggcagcccccccccctacagaagaagaaagagacccagcagcgccagaagacaccacctgggccccaccctgaagcccaccctggccaccagaaccgcccagcccgaccacacccaggcccccaccaagcaggaggccggcggcggcttcgtgctgcccccccccggcaccgacctggtgttcctgagagagggcgccagcagccccgtgcaggtgcccggccccgtggccgccagcaccgaggccctgctgcaggccgtggaccccggcctgcccagcgtgaagcaggagccccccgaccccgaggaggacaaggaggagaacaaggacgacagcgccagcaagctggcccccgaggaggaggccggcggcgccggcacccccgtgatcaccgagatcttcagcctgggcggcaccagattcagagacaccgccgtgtggctgcccagcctgcagggcagacacagcggcagagaggacggctgcaaggtgtgggagaccgaggacaccgtggagcccaccagcaccagctggaaccccagaggctggcccggcacccacgtgagcctgagccccccccccgccagcatgatgtgggtgagctgcagaagaagctggtgccccagcagccagagctag

SEQ ID NO: 88758 - DNA, 1653 bp, synthetic construct
  misc_feature 1..1653: note = Description of Artificial Sequence: Synthetic coding sequence
  source 1..1653: mol_type = other DNA
atggccgaggactggctggactgccccgccctgggccccggctggaagagaagagaggtgttcagaaagagcggcgccacctgcggcagaagcgacacctactaccagagccccaccggcgacagaatcagaagcaaggtggagctgaccagatacctgggccccgcctgcgacctgaccctgttcgacttcaagcagggcatcctgtgctaccccgcccccaaggcccaccccgtggccgtggccagcaagaagagaaagaagcccagcagacccgccaagaccagaaagagacaggtgggcccccagagcggcgaggtgagaaaggaggcccccagagacgagaccaaggccgacaccgacaccgcccccgccagcttccccgcccccggctgctgcgagaactgcggcatcagcttcagcggcgacggcacccagagacagagactgaagaccctgtgcaaggactgcagagcccagagaatcgccttcaacagagagcagagaatgttcaagagagtgggctgcggcgagtgcgccgcctgccaggtgaccgaggactgcggcgcctgcagcacctgcctgctgcagctgccccacgacgtggccagcggcctgttctgcaagtgcgagagaagaagatgcctgagaatcgtggagagaagcagaggctgcggcgtgtgcagaggctgccagacccaggaggactgcggccactgccccatctgcctgagaccccccagacccggcctgagaagacagtggaagtgcgtgcagagaagatgcctgagaggcaagcacgccagaagaaagggcggctgcgacagcaagatggccgccagaagaagacccggcgcccagcccctgcccccccccccccccagccagagccccgagcccaccgagccccaccccagagccctggcccccagcccccccgccgagttcatctactactgcgtggacgaggacgagctgcagccctacaccaacagaagacagaacagaaagtgcggcgcctgcgccgcctgcctgagaagaatggactgcggcagatgcgacttctgctgcgacaagcccaagttcggcggcagcaaccagaagagacagaagtgcagatggagacagtgcctgcagttcgccatgaagagactgctgcccagcgtgtggagcgagagcgaggacggcgccggcagcccccccccctacagaagaagaaagagacccagcagcgccagaagacaccacctgggccccaccctgaagcccaccctggccaccagaaccgcccagcccgaccacacccaggcccccaccaagcaggaggccggcggcggcttcgtgctgcccccccccggcaccgacctggtgttcctgagagagggcgccagcagccccgtgcaggtgcccggccccgtggccgccagcaccgaggccctgctgcaggccgtggaccccggcctgcccagcgtgaagcaggagccccccgaccccgaggaggacaaggaggagaacaaggacgacagcgccagcaagctggcccccgaggaggaggccggcggcgccggcacccccgtggagcccaccacccagccccagtacagcggcaacttcgacaacgacctgtacgagatctacctgatcgacatctag

SEQ ID NO: 88759 - DNA, 1650 bp, synthetic construct
  misc_feature 1..1650: note = Description of Artificial Sequence: Synthetic coding sequence
  source 1..1650: mol_type = other DNA
atggccgaggactggctggactgccccgccctgggccccggctggaagagaagagaggtgttcagaaagagcggcgccacctgcggcagaagcgacacctactaccagagccccaccggcgacagaatcagaagcaaggtggagctgaccagatacctgggccccgcctgcgacctgaccctgttcgacttcaagcagggcatcctgtgctaccccgcccccaaggcccaccccgtggccgtggccagcaagaagagaaagaagcccagcagacccgccaagaccagaaagagacaggtgggcccccagagcggcgaggtgagaaaggaggcccccagagacgagaccaaggccgacaccgacaccgcccccgccagcttccccgcccccggctgctgcgagaactgcggcatcagcttcagcggcgacggcacccagagacagagactgaagaccctgtgcaaggactgcagagcccagagaatcgccttcaacagagagcagagaatgttcaagagagtgggctgcggcgagtgcgccgcctgccaggtgaccgaggactgcggcgcctgcagcacctgcctgctgcagctgccccacgacgtggccagcggcctgttctgcaagtgcgagagaagaagatgcctgagaatcgtggagagaagcagaggctgcggcgtgtgcagaggctgccagacccaggaggactgcggccactgccccatctgcctgagaccccccagacccggcctgagaagacagtggaagtgcgtgcagagaagatgcctgagaggcaagcacgccagaagaaagggcggctgcgacagcaagatggccgccagaagaagacccggcgcccagcccctgcccccccccccccccagccagagccccgagcccaccgagccccaccccagagccctggcccccagcccccccgccgagttcatctactactgcgtggacgaggacgagctgaagagactgctgcccagcgtgtggagcgagagcgaggacggcgccggcagcccccccccctacagaagaagaaagagacccagcagcgccagaagacaccacctgggccccaccctgaagcccaccctggccaccagaaccgcccagcccgaccacacccaggcccccaccaagcaggaggccggcggcggcttcgtgctgcccccccccggcaccgacctggtgttcctgagagagggcgccagcagccccgtgcaggtgcccggccccgtggccgccagcaccgaggccctgctgcaggaggcccagtgcagcggcctgagctgggtggtggccctgccccaggtgaagcaggagaaggccgacacccaggacgagtggacccccggcaccgccgtgctgaccagccccgtgctggtgcccggctgccccagcaaggccgtggaccccggcctgcccagcgtgaagcaggagccccccgaccccgaggaggacaaggaggagaacaaggacgacagcgccagcaagctggcccccgaggaggaggccggcggcgccggcacccccgtgatcaccgagatcttcagcctgggcggcaccagattcagagacaccgccgtgtggctgcccagaagcaaggacctgaagaagcccggcgccagaaagcagtag

SEQ ID NO: 88760 - DNA, 1512 bp, synthetic construct
  misc_feature 1..1512: note = Description of Artificial Sequence: Synthetic coding sequence
  source 1..1512: mol_type = other DNA
atggccgaggactggctggactgccccgccctgggccccggctggaagagaagagaggtgttcagaaagagcggcgccacctgcggcagaagcgacacctactaccagagccccaccggcgacagaatcagaagcaaggtggagctgaccagatacctgggccccgcctgcgacctgaccctgttcgacttcaagcagggcatcctgtgctaccccgcccccaaggcccaccccgtggccgtggccagcaagaagagaaagaagcccagcagacccgccaagaccagaaagagacaggtgggcccccagagcggcgaggtgagaaaggaggcccccagagacgagaccaaggccgacaccgacaccgcccccgccagcttccccgcccccggctgctgcgagaactgcggcatcagcttcagcggcgacggcacccagagacagagactgaagaccctgtgcaaggactgcagagcccagagaatcgccttcaacagagagcagagaatgttcaagagagtgggctgcggcgagtgcgccgcctgccaggtgaccgaggactgcggcgcctgcagcacctgcctgctgcagctgccccacgacgtggccagcggcctgttctgcaagtgcgagagaagaagatgcctgagaatcgtggagagaagcagaggctgcggcgtgtgcagaggctgccagacccaggaggactgcggccactgccccatctgcctgagaccccccagacccggcctgagaagacagtggaagtgcgtgcagagaagatgcctgagaggcaagcacgccagaagaaagggcggctgcgacagcaagatggccgccagaagaagacccggcgcccagcccctgcccccccccccccccagccagagccccgagcccaccgagccccaccccagagccctggcccccagcccccccgccgagttcatctactactgcgtggacgaggacgagctgaagagactgctgcccagcgtgtggagcgagagcgaggacggcgccggcagcccccccccctacagaagaagaaagagacccagcagcgccagaagacaccacctgggccccaccctgaagcccaccctggccaccagaaccgcccagcccgaccacacccaggcccccaccaagcaggaggccggcggcggcttcgtgctgcccccccccggcaccgacctggtgttcctgagagagggcgccagcagccccgtgcaggtgcccggccccgtggccgccagcaccgaggccctgctgcaggccgtggaccccggcctgcccagcgtgaagcaggagccccccgaccccgaggaggacaaggaggagaacaaggacgacagcgccagcaagctggcccccgaggaggaggccggcggcgccggcacccccgtgatcaccgagatcttcagcctgggcggcaccagattcagagacaccgccgtgtggctgcccagaagcaaggacctgaagaagcccggcgccagaaagcagtag

SEQ ID NO: 88761 - DNA, 1671 bp, synthetic construct
  misc_feature 1..1671: note = Description of Artificial Sequence: Synthetic coding sequence
  source 1..1671: mol_type = other DNA
atggccgaggactggctggactgccccgccctgggccccggctggaagagaagagaggtgttcagaaagagcggcgccacctgcggcagaagcgacacctactaccagagccccaccggcgacagaatcagaagcaaggtggagctgaccagatacctgggccccgcctgcgacctgaccctgttcgacttcaagcagggcatcctgtgctaccccgcccccaaggcccaccccgtggccgtggccagcaagaagagaaagaagcccagcagacccgccaagaccagaaagagacaggtgggcccccagagcggcgaggtgagaaaggaggcccccagagacgagaccaaggccgacaccgacaccgcccccgccagcttccccgcccccggctgctgcgagaactgcggcatcagcttcagcggcgacggcacccagagacagagactgaagaccctgtgcaaggactgcagagcccagagaatcgccttcaacagagagcagagaatgttcaagagcagaggctgcggcgtgtgcagaggctgccagacccaggaggactgcggccactgccccatctgcctgagaccccccagacccggcctgagaagacagtggaagtgcgtgcagagaagatgcctgagaggcaagcacgccagaagaaagggcggctgcgacagcaagatggccgccagaagaagacccggcgcccagcccctgcccccccccccccccagccagagccccgagcccaccgagccccaccccagagccctggcccccagcccccccgccgagttcatctactactgcgtggacgaggacgagctgcagccctacaccaacagaagacagaacagaaagtgcggcgcctgcgccgcctgcctgagaagaatggactgcggcagatgcgacttctgctgcgacaagcccaagttcggcggcagcaaccagaagagacagaagtgcagatggagacagtgcctgcagttcgccatgaagagactgctgcccagcgtgtggagcgagagcgaggacggcgccggcagcccccccccctacagaagaagaaagagacccagcagcgccagaagacaccacctgggccccaccctgaagcccaccctggccaccagaaccgcccagcccgaccacacccaggcccccaccaagcaggaggccggcggcggcttcgtgctgcccccccccggcaccgacctggtgttcctgagagagggcgccagcagccccgtgcaggtgcccggccccgtggccgccagcaccgaggccctgctgcaggaggcccagtgcagcggcctgagctgggtggtggccctgccccaggtgaagcaggagaaggccgacacccaggacgagtggacccccggcaccgccgtgctgaccagccccgtgctggtgcccggctgccccagcaaggccgtggaccccggcctgcccagcgtgaagcaggagccccccgaccccgaggaggacaaggaggagaacaaggacgacagcgccagcaagctggcccccgaggaggaggccggcggcgccggcacccccgtgatcaccgagatcttcagcctgggcggcaccagattcagagacaccgccgtgtggctgcccagaagcaaggacctgaagaagcccggcgccagaaagcagtag

SEQ ID NO: 88762 - DNA, 1818 bp, synthetic construct; identical to SEQ ID NO: 88756
  misc_feature 1..1818: note = Description of Artificial Sequence: Synthetic coding sequence
  source 1..1818: mol_type = other DNA

SEQ ID NO: 88763 - DNA, 1512 bp, synthetic construct; identical to SEQ ID NO: 88760
  misc_feature 1..1512: note = Description of Artificial Sequence: Synthetic coding sequence
  source 1..1512: mol_type = other DNA

SEQ ID NO: 88764 - DNA, 1650 bp, synthetic construct; identical to SEQ ID NO: 88759
  misc_feature 1..1650: note = Description of Artificial Sequence: Synthetic coding sequence
  source 1..1650: mol_type = other DNA

SEQ ID NO: 88765 - DNA, 1818 bp, synthetic construct; identical to SEQ ID NO: 88756
  misc_feature 1..1818: note = Description of Artificial Sequence: Synthetic coding sequence
  source 1..1818: mol_type = other DNA

SEQ ID NO: 88766 - DNA, 1971 bp, synthetic construct
  misc_feature 1..1971: note = Description of Artificial Sequence: Synthetic coding sequence
  source 1..1971: mol_type = other DNA
atgggcggcttcagactgagaaccggcagaaacgccgccctgaacagcgacagactgctgctgctgcccgtggccagcatggccgaggactggctggactgccccgccctgggccccggctggaagagaagagaggtgttcagaaagagcggcgccacctgcggcagaagcgacacctactaccagagccccaccggcgacagaatcagaagcaaggtggagctgaccagatacctgggccccgcctgcgacctgaccctgttcgacttcaagcagggcatcctgtgctaccccgcccccaaggcccaccccgtggccgtggccagcaagaagagaaagaagcccagcagacccgccaagaccagaaagagacaggtgggcccccagagcggcgaggtgagaaaggaggcccccagagacgagaccaaggccgacaccgacaccgcccccgccagcttccccgcccccggctgctgcgagaactgcggcatcagcttcagcggcgacggcacccagagacagagactgaagaccctgtgcaaggactgcagagcccagagaatcgccttcaacagagagcagagaatgttcaagagagtgggctgcggcgagtgcgccgcctgccaggtgaccgaggactgcggcgcctgcagcacctgcctgctgcagctgccccacgacgtggccagcggcctgttctgcaagtgcgagagaagaagatgcctgagaatcgtggagagaagcagaggctgcggcgtgtgcagaggctgccagacccaggaggactgcggccactgccccatctgcctgagaccccccagacccggcctgagaagacagtggaagtgcgtgcagagaagatgcctgagacacctggcccacagactgagaagaagacaccagagatgccagagaagaacccccctggccgtggccccccccaccggcaagcacgccagaagaaagggcggctgcgacagcaagatggccgccagaagaagacccggcgcccagcccctgcccccccccccccccagccagagccccgagcccaccgagccccaccccagagccctggcccccagcccccccgccgagttcatctactactgcgtggacgaggacgagctgcagccctacaccaacagaagacagaacagaaagtgcggcgcctgcgccgcctgcctgagaagaatggactgcggcagatgcgacttctgctgcgacaagcccaagttcggcggcagcaaccagaagagacagaagtgcagatggagacagtgcctgcagttcgccatgaagagactgctgcccagcgtgtggagcgagagcgaggacggcgccggcagcccccccccctacagaagaagaaagagacccagcagcgccagaagacaccacctgggccccaccctgaagcccaccctggccaccagaaccgcccagcccgaccacacccaggcccccaccaagcaggaggccggcggcggcttcgtgctgcccccccccggcaccgacctggtgttcctgagagagggcgccagcagccccgtgcaggtgcccggccccgtggccgccagcaccgaggccctgctgcaggaggcccagtgcagcggcctgagctgggtggtggccctgccccaggtgaagcaggagaaggccgacacccaggacgagtggacccccggcaccgccgtgctgaccagccccgtgctggtgcccggctgccccagcaaggccgtggaccccggcctgcccagcgtgaagcaggagccccccgaccccgaggaggacaaggaggagaacaaggacgacagcgccagcaagctggcccccgaggaggaggccggcggcgccggcacccccgtgatcaccgagatcttcagcctgggcggcaccagattcagagacaccgccgtgtggctgcccagaagcaaggacctgaagaagcccggcgccagaaagcagtag

SEQ ID NO: 88767 - DNA, 1611 bp, synthetic construct
  misc_feature 1..1611: note = Description of Artificial Sequence: Synthetic coding sequence
  source 1..1611: mol_type = other DNA
atggccgaggactggctggactgccccgccctgggccccggctggaagagaagagaggtgttcagaaagagcggcgccacctgcggcagaagcgacacctactaccagagccccaccggcgacagaatcagaagcaaggtggagctgaccagatacctgggccccgcctgcgacctgaccctgttcgacttcaagcagggcatcctgtgctaccccgcccccaaggcccaccccgtggccgtggccagcaagaagagaaagaagcccagcagacccgccaagaccagaaagagacaggtgggcccccagagcggcgaggtgagaaaggaggcccccagagacgagaccaaggccgacaccgacaccgcccccgccagcttccccgcccccggctgctgcgagaactgcggcatcagcttcagcggcgacggcacccagagacagagactgaagaccctgtgcaaggactgcagagcccagagaatcgccttcaacagagagcagagaatgttcaagagagtgggctgcggcgagtgcgccgcctgccaggtgaccgaggactgcggcgcctgcagcacctgcctgctgcagctgccccacgacgtggccagcggcctgttctgcaagtgcgagagaagaagatgcctgagaatcgtggagagaagcagaggctgcggcgtgtgcagaggctgccagacccaggaggactgcggccactgccccatctgcctgagaccccccagacccggcctgagaagacagtggaagtgcgtgcagagaagatgcctgagaggcaagcacgccagaagaaagggcggctgcgacagcaagatggccgccagaagaagacccggcgcccagcccctgcccccccccccccccagccagagccccgagcccaccgagccccagccctacaccaacagaagacagaacagaaagtgcggcgcctgcgccgcctgcctgagaagaatggactgcggcagatgcgacttctgctgcgacaagcccaagttcggcggcagcaaccagaagagacagaagtgcagatggagacagtgcctgcagttcgccatgaagagactgctgcccagcgtgtggagcgagagcgaggacggcgccggcagcccccccccctacagaagaagaaagagacccagcagcgccagaagacaccacctgggccccaccctgaagcccaccctggccaccagaaccgcccagcccgaccacacccaggcccccaccaagcaggaggccggcggcggcttcgtgctgcccccccccggcaccgacctggtgttcctgagagagggcgccagcagccccgtgcaggtgcccggccccgtggccgccagcaccgaggccctgctgcaggccgtggaccccggcctgcccagcgtgaagcaggagccccccgaccccgaggaggacaaggaggagaacaaggacgacagcgccagcaagctggcccccgaggaggaggccggcggcgccggcacccccgtgatcaccgagatcttcagcctgggcggcaccagattcagagacaccgccgtgtggctgcccagaagcaaggacctgaagaagcccggcgccagaaagcagtag

SEQ ID NO: 88768 - DNA, 1893 bp, synthetic construct
  misc_feature 1..1893: note = Description of Artificial Sequence: Synthetic coding sequence
  source 1..1893: mol_type = other DNA
atggccgaggactggctggactgccccgccctgggccccggctggaagagaagagaggtgttcagaaagagcggcgccacctgcggcagaagcgacacctactaccagagccccaccggcgacagaatcagaagcaaggtggagctgaccagatacctgggccccgcctgcgacctgaccctgttcgacttcaagcagggcatcctgtgctaccccgcccccaaggcccaccccgtggccgtggccagcaagaagagaaagaagcccagcagacccgccaagaccagaaagagacaggtgggcccccagagcggcgaggtgagaaaggaggcccccagagacgagaccaaggccgacaccgacaccgcccccgccagcttccccgcccccggctgctgcgagaactgcggcatcagcttcagcggcgacggcacccagagacagagactgaagaccctgtgcaaggactgcagagcccagagaatcgccttcaacagagagcagagaatgttcaagagagtgggctgcggcgagtgcgccgcctgccaggtgaccgaggactgcggcgcctgcagcacctgcctgctgcagctgccccacgacgtggccagcggcctgttctgcaagtgcgagagaagaagatgcctgagaatcgtggagagaagcagaggctgcggcgtgtgcagaggctgccagacccaggaggactgcggccactgccccatctgcctgagaccccccagacccggcctgagaagacagtggaagtgcgtgcagagaagatgcctgagacacctggcccacagactgagaagaagacaccagagatgccagagaagaacccccctggccgtggccccccccaccggcaagcacgccagaagaaagggcggctgcgacagcaagatggccgccagaagaagacccggcgcccagcccctgcccccccccccccccagccagagccccgagcccaccgagccccaccccagagccctggcccccagcccccccgccgagttcatctactactgcgtggacgaggacgagctgcagccctacaccaacagaagacagaacagaaagtgcggcgcctgcgccgcctgcctgagaagaatggactgcggcagatgcgacttctgctgcgacaagcccaagttcggcggcagcaaccagaagagacagaagtgcagatggagacagtgcctgcagttcgccatgaagagactgctgcccagcgtgtggagcgagagcgaggacggcgccggcagcccccccccctacagaagaagaaagagacccagcagcgccagaagacaccacctgggccccaccctgaagcccaccctggccaccagaaccgcccagcccgaccacacccaggcccccaccaagcaggaggccggcggcggcttcgtgctgcccccccccggcaccgacctggtgttcctgagagagggcgccagcagccccgtgcaggtgcccggccccgtggccgccagcaccgaggccctgctgcaggaggcccagtgcagcggcctgagctgggtggtggccctgccccaggtgaagcaggagaaggccgacacccaggacgagtggacccccggcaccgccgtgctgaccagccccgtgctggtgcccggctgccccagcaaggccgtggaccccggcctgcccagcgtgaagcaggagccccccgaccccgaggaggacaaggaggagaacaaggacgacagcgccagcaagctggcccccgaggaggaggccggcggcgccggcacccccgtgatcaccgagatcttcagcctgggcggcaccagattcagagacaccgccgtgtggctgcccagaagcaaggacctgaagaagcccggcgccagaaagcagtag

SEQ ID NO: 88769 - DNA, 1704 bp, synthetic construct
  misc_feature 1..1704: note = Description of Artificial Sequence: Synthetic coding sequence
  source 1..1704: mol_type = other DNA
atggccgaggactggctggactgccccgccctgggccccggctggaagagaagagaggtgttcagaaagagcggcgccacctgcggcagaagcgacacctactaccagagccccaccggcgacagaatcagaagcaaggtggagctgaccagatacctgggccccgcctgcgacctgaccctgttcgacttcaagcagggcatcctgtgctaccccgcccccaaggcccaccccgtggccgtggccagcaagaagagaaagaagcccagcagacccgccaagaccagaaagagacaggtgggcccccagagcggcgaggtgagaaaggaggcccccagagacgagaccaaggccgacaccgacaccgcccccgccagcttccccgcccccggctgctgcgagaactgcggcatcagcttcagcggcgacggcacccagagacagagactgaagaccctgtgcaaggactgcagagcccagagaatcgccttcaacagagagcagagaatgttcaagagcagaggctgcggcgtgtgcagaggctgccagacccaggaggactgcggccactgccccatctgcctgagaccccccagacccggcctgagaagacagtggaagtgcgtgcagagaagatgcctgagaggcaagcacgccagaagaaagggcggctgcgacagcaagatggccgccagaagaagacccggcgcccagcccctgcccccccccccccccagccagagccccgagcccaccgagccccaccccagagccctggcccccagcccccccgccgagttcatctactactgcgtggacgaggacgagctgccctacaccaacagaagacagaacagaaagtgcggcgcctgcgccgcctgcctgagaagaatggactgcggcagatgcgacttctgctgcgacaagcccaagttcggcggcagcaaccagaagagacagaagtgcagatggagacagtgcctgcagttcgccatgaagagactgctgcccagcgtgtggagcgagagcgaggacggcgccggcagcccccccccctacagaagaagaaagagacccagcagcgccagaagacaccacctgggccccaccctgaagcccaccctggccaccagaaccgcccagcccgaccacacccaggcccccaccaagcaggaggccggcggcggcttcgtgctgcccccccccggcaccgacctggtgttcctgagagagggcgccagcagccccgtgcaggtgcccggccccgtggccgccagcaccgaggccctgctgcaggaggcccagtgcagcggcctgagctgggtggtggccctgccccaggtgaagcaggagaaggccgacacccaggacgagtggacccccggcaccgccgtgctgaccagccccgtgctggtgcccggctgccccagcaaggccgtggaccccggcctgcccagcgtgaagcaggagccccccgaccccgaggaggacaaggaggagaacaaggacgacagcgccagcaagctggcccccgaggaggaggccggcggcgccggcacccccgtgatcaccgagatcttcagcctgggcggcaccagattcagagacaccgccgtgtggctgcccagatactaccacctggccctggactggaagtgcaactgcggctaccacctgtgctgcagaagcgtgctggtgccctag

SEQ ID NO: 88770 - DNA, 1608 bp, synthetic construct
  misc_feature 1..1608: note = Description of Artificial Sequence: Synthetic coding sequence
  source 1..1608: mol_type = other DNA
atggccgaggactggctggactgccccgccctgggccccggctggaagagaagagaggtgttcagaaagagcggcgccacctgcggcagaagcgacacctactaccagagccccaccggcgacagaatcagaagcaaggtggagctgaccagatacctgggccccgcctgcgacctgaccctgttcgacttcaagcagggcatcctgtgctaccccgcccccaaggcccaccccgtggccgtggccagcaagaagagaaagaagcccagcagacccgccaagaccagaaagagacaggtgggcccccagagcggcgaggtgagaaaggaggcccccagagacgagaccaaggccgacaccgacaccgcccccgccagcttccccgcccccggctgctgcgagaactgcggcatcagcttcagcggcgacggcacccagagacagagactgaagaccctgtgcaaggactgcagagcccagagaatcgccttcaacagagagcagagaatgttcaagagagtgggctgcggcgagtgcgccgcctgccaggtgaccgaggactgcggcgcctgcagcacctgcctgctgcagctgccccacgacgtggccagcggcctgttctgcaagtgcgagagaagaagatgcctgagaatcgtggagagaagcagaggctgcggcgtgtgcagaggctgccagacccaggaggactgcggccactgccccatctgcctgagaccccccagacccggcctgagaagacagtggaagtgcgtgcagagaagatgcctgagaggcaagcacgccagaagaaagggcggctgcgacagcaagatggccgccagaagaagacccggcgcccagcccctgcccccccccccccccagccagagccccgagcccaccgagccccaccccagagccctggcccccagcccccccgccgagttcatctactactgcgtggacgaggacgagctgaagagactgctgcccagcgtgtggagcgagagcgaggacggcgccggcagcccccccccctacagaagaagaaagagacccagcagcgccagaagacaccacctgggccccaccctgaagcccaccctggccaccagaaccgcccagcccgaccacacccaggcccccaccaagcaggaggccggcggcggcttcgtgctgcccccccccggcaccgacctggtgttcctgagagagggcgccagcagccccgtgcaggtgcccggccccgtggccgccagcaccgaggccctgctgcaggccgtggaccccggcctgcccagcgtgaagcaggagccccccgaccccgaggaggacaaggaggagaacaaggacgacagcgccagcaagctggcccccgaggaggaggccggcggcgccggcacccccgtgatcaccgagatcttcagcctgggcggcaccagattcagagacaccgccgtgtggctgcccagagccggcaccagagagggcaagatggacgtgaagtgcggcagacccagaacccagtggagccccagagccagagccggcacccacgaggacggcctggagcccatgagcgtgagccaccacctgcagctgagatag

SEQ ID NO: 88771 - DNA, 1968 bp, synthetic construct
  misc_feature 1..1968: note = Description of Artificial Sequence: Synthetic coding sequence
  source 1..1968: mol_type = other DNA
atggccgaggactggctggactgccccgccctgggccccggctggaagagaagagaggtgttcagaaagagcggcgccacctgcggcagaagcgacacctactaccagagccccaccggcgacagaatcagaagcaaggtggagctgaccagatacctgggccccgcctgcgacctgaccctgttcgacttcaagcagggcatcctgtgctaccccgcccccaaggcccaccccgtggccgtggccagcaagaagagaaagaagcccagcagacccgccaagaccagaaagagacaggtgggcccccagagcggcgaggtgagaaaggaggcccccagagacgagaccaaggccgacaccgacaccgcccccgccagcttccccgcccccggctgctgcgagaactgcggcatcagcttcagcggcgacggcacccagagacagagactgaagaccctgtgcaaggactgcagagcccagagaatcgccttcaacagagagcagagaatgttcaagagagtgggctgcggcgagtgcgccgcctgccaggtgaccgaggactgcggcgcctgcagcacctgcctgctgcagctgccccacgacgtggccagcggcctgttctgcaagtgcgagagaagaagatgcctgagaatcgtggagagaagcagaggctgcggcgtgtgcagaggctgccagacccaggaggactgcggccactgccccatctgcctgagaccccccagacccggcctgagaagacagtggaagtgcgtgcagagaagatgcctgagaggcaagcacgccagaagaaagggcggctgcgacagcaagatggccgccagaagaagacccggcgcccagcccctgcccccccccccccccagccagagccccgagcccaccgagccccaccccagagccctggcccccagcccccccgccgagttcatctactactgcgtggacgaggacgagctgcagccctacaccaacagaagacagaacagaaagtgcggcgcctgcgccgcctgcctgagaagaatggactgcggcagatgcgacttctgctgcgacaagcccaagttcggcggcagcaaccagaagagacagaagtgcagatggagacagtgcctgcagttcgccatgaagagactgctgcccagcgtgtggagcgagagcgaggacggcgccggcagcccccccccctacagaagaagaaagagacccagcagcgccagaagacaccacctgggccccaccctgaagcccaccctggccaccagaaccgcccagcccgaccacacccaggcccccaccaagcaggaggccggcggcggcttcgtgctgcccccccccggcaccgacctggtgttcctgagagagggcgccagcagccccgtgcaggtgcccggccccgtggccgccagcaccgaggccctgctgcaggaggcccagtgcagcggcctgagctgggtggtggccctgccccaggtgaagcaggagaaggccgacacccaggacgagtggacccccggcaccgccgtgctgaccagccccgtgctggtgcccggctgccccagcaaggccgtggaccccggcctgcccagcgtgaagcaggagccccccgaccccgaggaggacaaggaggagaacaaggacgacagcgccagcaagctggcccccgaggaggaggccggcggcgccggcacccccgtgatcaccgagatcttcagcctgggcggcaccagattcagagacaccgccgtgtggctgcccagcctgcagggcagacacagcggcagagaggacggctgcaaggtgtgggagaccgaggacaccgtggagcccaccagcaccagctggaaccccagaggctggcccggcacccacgtgagcctgagccccccccccgccagcatgatgtgggtgagctgcagaagaagctggtgccccagcagccagagctag

SEQ ID NO: 88772 - DNA, 1236 bp, synthetic construct
  misc_feature 1..1236: note = Description of Artificial Sequence: Synthetic coding sequence
  source 1..1236: mol_type = other DNA
atgagagcccaccccggcggcggcagatgctgccccgagcaggaggagggcgagagcgccgccggcggcagcggcgccggcggcgacagcgccatcgagcagggcggccagggcagcgccctggcccccagccccgtgagcggcgtgagaagagagggcgccagaggcggcggcagaggcagaggcagatggaagcaggccggcagaggcggcggcgtgtgcggcagaggcagaggcagaggcagaggcagaggcagaggcagaggcagaggcagaggcagaggcagaccccccagcggcggcagcggcctgggcggcgacggcggcggctgcggcggcggcggcagcggcggcggcggcgcccccagaagagagcccgtgcccttccccagcggcagcgccggccccggccccagaggccccagagccaccgagagcggcaagagaatggactgccccgccctgccccccggctggaagaaggaggaggtgatcagaaagagcggcctgagcgccggcaagagcgacgtgtactacttcagccccagcggcaagaagttcagaagcaagccccagctggccagatacctgggcaacaccgtggacctgagcagcttcgacttcagaaccggcaagatgatgcccagcaagctgcagaagaacaagcagagactgagaaacgaccccctgaaccagaacaagggcaagcccgacctgaacaccaccctgcccatcagacagaccgccagcatcttcaagcagcccgtgaccaaggtgaccaaccaccccagcaacaaggtgaagagcgacccccagagaatgaacgagcagcccagacagctgttctgggagaagagactgcagggcctgagcgccagcgacgtgaccgagcagatcatcaagaccatggagctgcccaagggcctgcagggcgtgggccccggcagcaacgacgagaccctgctgagcgccgtggccagcgccctgcacaccagcagcgcccccatcaccggccaggtgagcgccgccgtggagaagaaccccgccgtgtggctgaacaccagccagcccctgtgcaaggccttcatcgtgaccgacgaggacatcagaaagcaggaggagagagtgcagcaggtgagaaagaagctggaggaggccctgatggccgacatcctgagcagagccgccgacaccgaggagatggacatcgagatggacagcggcgacgaggcctag

SEQ ID NO: 88773 - DNA, 909 bp, synthetic construct
  misc_feature 1..909: note = Description of Artificial Sequence: Synthetic coding sequence
  source 1..909: mol_type = other DNA
atgagagcccaccccggcggcggcagatgctgccccgagcaggaggagggcgagagcgccgccggcggcagcggcgccggcggcgacagcgccatcgagcagggcggccagggcagcgccctggcccccagccccgtgagcggcgtgagaagagagggcgccagaggcggcggcagaggcagaggcagatggaagcaggccggcagaggcggcggcgtgtgcggcagaggcagaggcagaggcagaggcagaggcagaggcagaggcagaggcagaggcagaggcagaccccccagcggcggcagcggcctgggcggcgacggcggcggctgcggcggcggcggcagcggcggcggcggcgcccccagaagagagcccgtgcccttccccagcggcagcgccggccccggccccagaggccccagagccaccgagagcggcaagagaatggactgccccgccctgccccccggctggaagaaggaggaggtgatcagaaagagcggcctgagcgccggcaagagcgacgtgtactacttcagccccagcggcaagaagttcagaagcaagccccagctggccagatacctgggcaacaccgtggacctgagcagcttcgacttcagaaccggcaagatgatgcccagcaagctgcagaagaacaagcagagactgagaaacgaccccctgaaccagaacaagctgagatggaacacccacagacccgccccctggcacgccctgagcagactgtgcctgctgatcagatgcctgctgtgcctggagtgcgcctaccccctgcccctgcacctggtgaacagctacagcagcaagacccagctgcactgcctgcacctgtgggaggcctgccccgcctacagcagacagaaccagagcttccccccctag

SEQ ID NO: 88774 - DNA, 909 bp, synthetic construct; identical to SEQ ID NO: 88773
  misc_feature 1..909: note = Description of Artificial Sequence: Synthetic coding sequence
  source 1..909: mol_type = other DNA

SEQ ID NO: 88775 - DNA, 876 bp, synthetic construct
  misc_feature 1..876: note = Description of Artificial Sequence: Synthetic coding sequence
  source 1..876: mol_type = other DNA
atggagagaaagagatgggagtgccccgccctgccccagggctgggagagagaggaggtgcccagaagaagcggcctgagcgccggccacagagacgtgttctactacagccccagcggcaagaagttcagaagcaagccccagctggccagatacctgggcggcagcatggacctgagcaccttcgacttcagaaccggcaagatgctgatgagcaagatgaacaagagcagacagagagtgagatacgacagcagcaaccaggtgaagggcaagcccgacctgaacaccgccctgcccgtgagacagaccgccagcatcttcaagcagcccgtgaccaagatcaccaaccaccccagcaacaaggtgaagagcgacccccagaaggccgtggaccagcccagacagctgttctgggagaagaagctgagcggcctgaacgccttcgacatcgccgaggagctggtgaagaccatggacctgcccaagggcctgcagggcgtgggccccggctgcaccgacgagaccctgctgagcgccatcgccagcgccctgcacaccagcaccatgcccatcaccggccagctgagcgccgccgtggagaagaaccccggcgtgtggctgaacaccacccagcccctgtgcaaggccttcatggtgaccgacgaggacatcagaaagcaggaggagctggtgcagcaggtgagaaagagactggaggaggccctgatggccgacatgctggcccacgtggaggagctggccagagacggcgaggcccccctggacaaggcctgcgccgaggacgacgacgaggaggacgaggaggaggaggaggaggagcccgaccccgaccccgagatggagcacgtgtag

SEQ ID NO: 88776 - DNA, 780 bp, synthetic construct
  misc_feature 1..780: note = Description of Artificial Sequence: Synthetic coding sequence
  source 1..780: mol_type = other DNA
atggagagaaagagccccagcggcaagaagttcagaagcaagccccagctggccagatacctgggcggcagcatggacctgagcaccttcgacttcagaaccggcaagatgctgatgagcaagatgaacaagagcagacagagagtgagatacgacagcagcaaccaggtgaagggcaagcccgacctgaacaccgccctgcccgtgagacagaccgccagcatcttcaagcagcccgtgaccaagatcaccaaccaccccagcaacaaggtgaagagcgacccccagaaggccgtggaccagcccagacagctgttctgggagaagaagctgagcggcctgaacgccttcgacatcgccgaggagctggtgaagaccatggacctgcccaagggcctgcagggcgtgggccccggctgcaccgacgagaccctgctgagcgccatcgccagcgccctgcacaccagcaccatgcccatcaccggccagctgagcgccgccgtggagaagaaccccggcgtgtggctgaacaccacccagcccctgtgcaaggccttcatggtgaccgacgaggacatcagaaagcaggaggagctggtgcagcaggtgagaaagagactggaggaggccctgatggccgacatgctggcccacgtggaggagctggccagagacggcgaggcccccctggacaaggcctgcgccgaggacgacgacgaggaggacgaggaggaggaggaggaggagcccgaccccgaccccgagatggagcacgtgtag

SEQ ID NO: 88777 - DNA, 4485 bp, synthetic construct
  misc_feature 1..4485: note = Description of Artificial Sequence: Synthetic coding sequence
  source 1..4485: mol_type = other DNA
atgaacggcggcaaggagtgcgacggcggcgacaaggagggcggcctgcccgccatccaggtgcccgtgggctggcagagaagagtggaccagaacggcgtgctgtacgtgagccccagcggcagcctgctgagctgcctggagcaggtgaagacctacctgctgaccgacggcacctgcaagtgcggcctggagtgccccctgatcctgcccaaggtgttcaacttcgaccccggcgccgccgtgaagcagagaaccgccgaggacgtgaaggccgacgaggacgtgaccaagctgtgcatccacaagagaaagatcatcgccgtggccaccctgcacaagagcatggaggccccccaccccagcctggtgctgaccagccccggcggcggcaccaacgccacccccgtggtgcccagcagagccgccacccccagaagcgtgagaaacaagagccacgagggcatcaccaacagcgtgatgcccgagtgcaagaaccccttcaagctgatgatcggcagcagcaacgccatgggcagactgtacgtgcaggagctgcccggcagccagcagcaggagctgcaccccgtgtaccccagacagagactgggcagcagcgagcacggccagaagagccccttcagaggcagccacggcggcctgcccagccccgccagcagcggcagccagatctacggcgacggcagcatcagccccagaaccgaccccctgggcagccccgacgtgttcaccagaagcaaccccggcttccacggcgcccccaacagcagccccatccacctgaacagaacccccctgagcccccccagcgtgatgctgcacggcagccccgtgcagagcagctgcgccatggccggcagaaccaacatccccctgagccccaccctgaccaccaagagccccgtgatgaagaagcccatgtgcaacttcagcaccaacatggagatccccagagccatgttccaccacaagcccccccagggccccccccccccccccccccccagctgcgccctgcagaagaagcccctgaccagcgagaaggaccccctgggcatcctggaccccatccccagcaagcccgtgaaccagaaccccgtgatcatcaaccccaccagcttccacagcaacgtgcacagccaggtgcccatgatgaacgtgagcatgccccccgccgtggtgcccctgcccagcaacctgcccctgcccaccgtgaagcccggccacatgaaccacggcagccacgtgcagagagtgcagcacagcgccagcaccagcctgagccccagccccgtgaccagccccgtgcacatgatgggcaccggcatcggcagaatcgaggccagcccccagagaagcagaagcagcagcaccagcagcgaccacggcaacttcatgatgccccccgtgggcccccaggccaccagcagcggcatcaaggtgccccccagaagccccagaagcaccatcggcagccccagacccagcatgcccagcagccccagcaccaagagcgacggccaccaccagtacaaggacatccccaaccccctgatcgccggcatcagcaacgtgctgaacacccccagcagcgccgccttccccaccgccagcgccggcagcagcagcgtgaagagccagcccggcctgctgggcatgcccctgaaccagatcctgaaccagcacaacgccgccagcttccccgccagcagcctgctgagcgccgccgccaaggcccagctggccaaccagaacaagctggccggcaacaacagcagcagcagcagcaacagcggcgccgtggccggcagcggcaacaccgagggccacagcaccctgaacaccatgttcccccccaccgccaacatgctgctgcccaccggcgagggccagagcggcagagccgccctgagagacaagctgatgagccagcagaaggacgccctgagaaagagaaagcagccccccaccaccgtgctgagcctgctgagacagagccagatggacagcagcgccgtgcccaagcccggccccgacctgctgagaaagcagggccagggcagcttccccatcagcagcatgagccagctgctgcagagcatgagctgccagagcagccacctgagcagcaacagcacccccggctgcggcgccagcaacaccgccctgccctgcagcgccaaccagctgcacttcaccgaccccagcatgaacagcagcgtgctgcagaacatccccctgagaggcgaggccgtgcactgccacaacgccaacaccaacttcgtgcacagcaacagccccgtgcccaaccaccacctggccggcctgatcaaccagatccaggccagcggcaactgcggcatgctgagccagagcggcatggccctgggcaacagcctgcaccccaaccccccccagagcagaatcagcaccagcagcacccccgtgatccccaacagcatcgtgagcagctacaaccagaccagcagcgaggccggcggcagcggccccagcagcagcatcgccatcgccggcaccaaccaccccgccatcaccaagaccaccagcgtgctgcaggacggcgtgatcgtgaccaccgccgccggcaaccccctgcagagccagctgcccatcggcagcgacttccccttcgtgggccaggagcacgccctgcacttccccagcaacagcaccagcaacaaccacctgccccaccccctgaaccccagcctgctgagcagcctgcccatcagcctgcccgtgaaccagcagcacctgctgaaccagaacctgctgaacatcctgcagcccagcgccggcgagggcgacatgagcagcatcaacaacaccctgagcaaccaccagctgacccacctgcagagcctgctgaacaacaaccagatgttcccccccaaccagcagcagcagcagctgctgcagggctaccagaacctgcaggccttccagggccagagcaccatcccctgccccgccaacaacaaccccatggcctgcctgttccagaacttccaggtgagaatgcaggaggacgccgccctgctgaacaagagaatcagcacccagcccggcctgaccgccctgcccgagaaccccaacaccaccctgccccccttccaggacaccccctgcgagctgcagcccagaatcgaccccagcctgggccagcaggtgaaggacggcctggtggtgggcggccccggcgacgccagcgtggacgccatctacaaggccgtggtggacgccgccagcaagggcatgcaggtggtgatcaccaccgccgtgaacagcaccacccagatcagccccatccccgccctgagcgccatgagcgccttcaccgccagcatcggcgaccccctgaacctgagcagcgccgtgagcgccgtgatccacggcagaaacatgggcggcgtggaccacgacggcagactgagaaacagcagaggcgccagactgcccaagaacctggaccacggcaagaacgtgaacgagggcgacggcttcgagtacttcaagagcgccagctgccacaccagcaagaagcagtgggacggcgagcagagccccagaggcgagagaaacagatggaagtacgaggagttcctggaccaccccggccacatccacagcagcccctgccacgagagacccaacaacgtgagcaccctgcccttcctgcccggcgagcagcaccccatcctgctgccccccagaaactgccccggcgacaagatcctggaggagaacttcagatacaacaactacaagagaaccatgatgagcttcaaggagagactggagaacaccgtggagagatgcgcccacatcaacggcaacagacccagacagagcagaggcttcggcgagctgctgagcaccgccaagcaggacctggtgctggaggagcagagccccagcagcagcaacagcctggagaacagcctggtgaaggactacatccactacaacggcgacttcaacgccaagagcgtgaacggctgcgtgcccagccccagcgacgccaagagcatcagcagcgaggacgacctgagaaaccccgacagccccagcagcaacgagctgatccactacagacccagaaccttcaacgtgggcgacctggtgtggggccagatcaagggcctgaccagctggcccggcaagctggtgagagaggacgacgtgcacaacagctgccagcagagccccgaggagggcaaggtggagcccgagaagctgaagaccctgaccgagggcctggaggcctacagcagagtgagaaagagaaacagaaagagcggcaagctgaacaaccacctggaggccgccatccacgaggccatgagcgagctggacaagatgagcggcaccgtgcaccagatcccccagggcgacagacagatgagaccccccaagcccaagagaagaaagatcagcagatag

SEQ ID NO: 88778 - DNA, 2178 bp, synthetic construct
  misc_feature 1..2178: note = Description of Artificial Sequence: Synthetic coding sequence
  source 1..2178: mol_type = other DNA
atggccgccgccagcgccgtgagcgtgctgctggtggccgccgagagaaacagatggcacagactgcccagcctgctgctgccccccagaacctgggtgtggagacagagaaccatgaagtacaccaccgccaccggcagaaacatcaccaaggtgctgatcgccaacagaggcgagatcgcctgcagagtgatgagaaccgccaagaagctgggcgtgcagaccgtggccgtgtacagcgaggccgacagaaacagcatgcacgtggacatggccgacgaggcctacagcatcggccccgcccccagccagcagagctacctgagcatggagaagatcatccaggtggccaagaccagcgccgcccaggccatccaccccggctgcggcttcctgagcgagaacatggagttcgccgagctgtgcaagcaggagggcatcatcttcatcggccccccccccagcgccatcagagacatgggcatcaagagcaccagcaagagcatcatggccgccgccggcgtgcccgtggtggagggctaccacggcgaggaccagagcgaccagtgcctgaaggagcacgccagaagaatcggctaccccgtgatgatcaaggccgtgagaggcggcggcggcaagggcatgagaatcgtgagaagcgagcaggagttccaggagcagctggagagcgccagaagagaggccaagaagagcttcaacgacgacgccatgctgatcgagaagttcgtggacacccccagacacgtggaggtgcaggtgttcggcgaccaccacggcaacgccgtgtacctgttcgagagagactgcagcgtgcagagaagacaccagaagatcatcgaggaggcccccgcccccggcatcaagagcgaggtgagaaagaagctgggcgaggccgccgtgagagccgccaaggccgtgaactacgtgggcgccggcaccgtggagttcatcatggacagcaagcacaacttctgcttcatggagatgaacaccagactgcaggtggagcaccccgtgaccgagatgatcaccggcaccgacctggtggagtggcagctgagaatcgccgccggcgagaagatccccctgagccaggaggagatcaccctgcagggccacgccttcgaggccagaatctacgccgaggaccccagcaacaacttcatgcccgtggccggccccctggtgcacctgagcacccccagagccgaccccagcaccagaatcgagaccggcgtgagacagggcgacgaggtgagcgtgcactacgaccccatgatcgccaagctggtggtgtgggccgccgacagacaggccgccctgaccaagctgagatacagcctgagacagtacaacatcgtgggcctgcacaccaacatcgacttcctgctgaacctgagcggccaccccgagttcgaggccggcaacgtgcacaccgacttcatcccccagcaccacaagcagctgctgctgagcagaaaggccgccgccaaggagagcctgtgccaggccgccctgggcctgatcctgaaggagaaggccatgaccgacaccttcaccctgcaggcccacgaccagttcagccccttcagcagcagcagcggcagaagactgaacatcagctacaccagaaacatgaccctgaaggacggcaagaacaacgtggccatcgccgtgacctacaaccacgacggcagctacagcatgcagatcgaggacaagaccttccaggtgctgggcaacctgtacagcgagggcgactgcacctacctgaagtgcagcgtgaacggcgtggccagcaaggccaagctgatcatcctggagaacaccatctacctgttcagcaaggagggcagcatcgagatcgacatccccgtgcccaagtacctgagcagcgtgagcagccaggagacccagggcggccccctggcccccatgaccggcaccatcgagaaggtgttcgtgaaggccggcgacaaggtgaaggccggcgacagcctgatggtgatgatcgccatgaagatggagcacaccatcaagagccccaaggacggcaccgtgaagaaggtgttctacagagagggcgcccaggccaacagacacacccccctggtggagttcgaggaggaggagagcgacaagagagagagcgagtag

SEQ ID NO: 88779 - DNA, 1728 bp, synthetic construct
  misc_feature 1..1728: note = Description of Artificial Sequence: Synthetic coding sequence
  source 1..1728: mol_type = other DNA
atggagaagatcatccaggtggccaagaccagcgccgcccagcacatccagagcatcatggccgccgccggcgtgcccgtggtggagggctaccacggcgaggaccagagcgaccagtgcctgaaggagcacgccagaagaatcggctaccccgtgatgatcaaggccgtgagaggcggcggcggcaagggcatgagaatcgtgagaagcgagcaggagttccaggagcagctggagagcgccagaagagaggccaagaagagcttcaacgacgacgccatgctgatcgagaagttcgtggacacccccagacacgtggaggtgcaggtgttcggcgaccaccacggcaacgccgtgtacctgttcgagagagactgcagcgtgcagagaagacaccagaagatcatcgaggaggcccccgcccccggcatcaagagcgaggtgagaaagaagctgggcgaggccgccgtgagagccgccaaggccgtgaactacgtgggcgccggcaccgtggagttcatcatggacagcaagcacaacttctgcttcatggagatgaacaccagactgcaggtggagcaccccgtgaccgagatgatcaccggcaccgacctggtggagtggcagctgagaatcgccgccggcgagaagatccccctgagccaggaggagatcaccctgcagggccacgccttcgaggccagaatctacgccgaggaccccagcaacaacttcatgcccgtggccggccccctggtgcacctgagcacccccagagccgaccccagcaccagaatcgagaccggcgtgagacagggcgacgaggtgagcgtgcactacgaccccatgatcgccaagctggtggtgtgggccgccgacagacaggccgccctgaccaagctgagatacagcctgagacagtacaacatcgtgggcctgcacaccaacatcgacttcctgctgaacctgagcggccaccccgagttcgaggccggcaacgtgcacaccgacttcatcccccagcaccacaagcagctgctgctgagcagaaaggccgccgccaaggagagcctgtgccaggccgccctgggcctgatcctgaaggagaaggccatgaccgacaccttcaccctgcaggcccacgaccagttcagccccttcagcagcagcagcggcagaagactgaacatcagctacaccagaaacatgaccctgaaggacggcaagaacaacgtggccatcgccgtgacctacaaccacgacggcagctacagcatgcagatcgaggacaagaccttccaggtgctgggcaacctgtacagcgagggcgactgcacctacctgaagtgcagcgtgaacggcgtggccagcaaggccaagctgatcatcctggagaacaccatctacctgttcagcaaggagggcagcatcgagatcgacatccccgtgcccaagtacctgagcagcgtgagcagccaggagacccagggcggccccctggcccccatgaccggcaccatcgagaaggtgttcgtgaaggccggcgacaaggtgaaggccggcgacagcctgatggtgatgatcgccatgaagatggagcacaccatcaagagccccaaggacggcaccgtgaagaaggtgttctacagagagggcgcccaggccaacagacacacccccctggtggagttcgaggaggaggagagcgacaagagagagagcgagtag

SEQ ID NO: 88780 - DNA, 1425 bp, synthetic construct
  misc_feature 1..1425: note = Description of Artificial Sequence: Synthetic coding sequence
  source 1..1425: mol_type = other DNA
atggccgccgccagcgccgtgagcgtgctgctggtggccgccgagagaaacagatggcacagactgcccagcctgctgctgccccccagaacctgggtgtggagacagagaaccatgaagtacaccaccgccaccgacgaggcctacagcatcggccccgcccccagccagcagagctacctgagcatggagaagatcatccaggtggccaagaccagcgccgcccaggccatccaccccggctgcggcttcctgagcgagaacatggagttcgccgagctgtgcaagcaggagggcatcatcttcatcggccccccccccagcgccatcagagacatgggcatcaagagcaccagcaagagcatcatggccgccgccggcgtgcccgtggtggagggctaccacggcgaggaccagagcgaccagtgcctgaaggagcacgccagaagaatcggctaccccgtgatgatcaaggccgtgagaggcggcggcggcaagggcatgagaatcgtgagaagcgagcaggagttccaggagcagctggagagcgccagaagagaggccaagaagagcttcaacgacgacgccatgctgatcgagaagttcgtggacacccccagacacgtggaggtgcaggtgttcggcgaccaccacggcaacgccgtgtacctgttcgagagagactgcagcgtgcagagaagacaccagaagatcatcgaggaggcccccgcccccggcatcaagagcgaggtgagaaagaagctgggcgaggccgccgtgagagccgccaaggccgtgaactacgtgggcgccggcaccgtggagttcatcatggacagcaagcacaacttctgcttcatggagatgaacaccagactgcaggtggagcaccccgtgaccgagatgatcaccggcaccgacctggtggagtggcagctgagaatcgccgccggcgagaagatccccctgagccaggaggagatcaccctgcagggccacgccttcgaggccagaatctacgccgaggaccccagcaacaacttcatgcccgtggccggccccctggtgcacctgagcacccccagagccgaccccagcaccagaatcgagaccggcgtgagacagggcgacgaggtgagcgtgcactacgaccccatgatcgccaagctggtggtgtgggccgccgacagacaggccgccctgaccaagctgagatacagcctgagacagtacaacatcgtgggcctgcacaccaacctgaccagctacagcacctgcctggccacccagagcctgaagctgggcacctgcaccctgatcagcagcctgaacaccaccaacagctgctgcagcgtgggcagactgcagcccaagagcctgtacgccagacagccctgggtgagcagcagcagaagaaagccctag

SEQ ID NO: 88781 - DNA, 1281 bp, synthetic construct
  misc_feature 1..1281: note = Description of Artificial Sequence: Synthetic coding sequence
  source 1..1281: mol_type = other DNA
atggagttcgccgagctgtgcaagcaggagggcatcatcttcatcggccccccccccagcgccatcagagacatgggcatcaagagcaccagcaagagcatcatggccgccgccggcgtgcccgtggtggagggctaccacggcgaggaccagagcgaccagtgcctgaaggagcacgccagaagaatcggctaccccgtgatgatcaaggccgtgagaggcggcggcggcaagggcatgagaatcgtgagaagcgagcaggagttccaggagcagctggagagcgccagaagagaggccaagaagagcttcaacgacgacgccatgctgatcgagaagttcgtggacacccccagacacgtggaggtgcaggtgttcggcgaccaccacggcaacgccgtgtacctgttcgagagagactgcagcgtgcagagaagacaccagaagatcatcgaggaggcccccgcccccggcatcaagagcgaggtgagaaagaagctgggcgaggccgccgtgagagccgccaaggccgtgaactacgtgggcgccggcaccgtggagttcatcatggacagcaagcacaacttctgcttcatggagatgaacaccagactgcaggtggagcaccccgtgaccgagatgatcaccggcaccgacctggtggagtggcagctgagaatcgccgccggcgagaagatccccctgagccaggaggagatcaccctgcagggccacgccttcgaggccagaatctacgccgaggaccccagcaacaacttcatgcccgtggccggccccctggtgcacctgagcacccccagagccgaccccagcaccagaatcgagaccggcgtgagacagggcgacgaggtgagcgtgcactacgaccccatgatcgccaagctggtggtgtgggccgccgacagacaggccgccctgaccaagctgagatacagcctgagacagtacaacatcgtgggcctgcacaccaacatcgacttcctgctgaacctgagcggccaccccgagttcgaggccggcaacgtgcacaccgacttcatcccccagcaccacaagcagctgctgctgagcagaaaggccgccgccaaggagagcctgtgccaggccgccctgggcctgatcctgaaggagaaggccatgaccgacaccttcaccctgcaggcccacgaccagttcagccccttcagcagcagcagcggcagaagactgaacatcagctacaccagaaacatgaccctgaaggacggcaagaacaactag

SEQ ID NO: 88782 - DNA, 603 bp, synthetic construct
  misc_feature 1..603: note = Description of Artificial Sequence: Synthetic coding sequence
  source 1..603: mol_type = other DNA
atggagaagatcatccaggtggccaagaccagcgccgcccaggccatccaccccggctgcggcttcctgagcgagaacatggagttcgccgagctgtgcaagcaggagggcatcatcttcatcggccccccccccagcgccatcagagacatgggcatcaagagcaccagcaagagcatcatggccgccgccggcgtgcccgtggtggagggctaccacggcgaggaccagagcgaccagtgcctgaaggagcacgccagaagaatcggctaccccgtgatgatcaaggccgtgagaggcggcggcggcaagggcatgagaatcgtgagaagcgagcaggagttccaggagcagctggagagcgccagaagagaggccaagaagagcttcaacgacgacgccatgctgatcgagaagttcgtggacacccccagacacgtggaggtgcaggtgttcggcgaccaccacggcaacgccgtgtacctgttcgagagagactgcagcgtgcagagaagacaccagaagatcatcgaggaggcccccgcccccggcatcaagagcgaggtgagaaagaagggcagaagctgcagccagagctgctag

SEQ ID NO: 88783 - DNA, 1578 bp, synthetic construct
  misc_feature 1..1578: note = Description of Artificial Sequence: Synthetic coding sequence
  source 1..1578: mol_type = other DNA
atgtgggccgtgctgagactggccctgagaccctgcgccagagccagccccgccggccccagagcctaccacggcgacagcgtggccagcctgggcacccagcccgacctgggcagcgccctgtaccaggagaactacaagcagatgaaggccctggtgaaccagctgcacgagagagtggagcacatcaagctgggcggcggcgagaaggccagagccctgcacatcagcagaggcaagctgctgcccagagagagaatcgacaacctgatcgaccccggcagccccttcctggagctgagccagttcgccggctaccagctgtacgacaacgaggaggtgcccggcggcggcatcatcaccggcatcggcagagtgagcggcgtggagtgcatgatcatcgccaacgacgccaccgtgaagggcggcgcctactaccccgtgaccgtgaagaagcagctgagagcccaggagatcgccatgcagaacagactgccctgcatctacctggtggacagcggcggcgcctacctgcccagacaggccgacgtgttccccgacagagaccacttcggcagaaccttctacaaccaggccatcatgagcagcaagaacatcgcccaggtgaaggccgccaccggcgaggaggtgagcgccgaggacctgggcggcgccgacctgcactgcagaaagagcggcgtgagcgaccactgggccctggacgaccaccacgccctgcacctgaccagaaaggtggtgagaaacctgaactaccagaagaagctggacgtgaccatcgagcccagcgaggagcccctgttccccgccgacgagctgtacggcatcgtgggcgccaacctgaagagaagcttcgacgtgagagaggtgatcgccagaatcgtggacggcagcagattcaccgagttcaaggccttctacggcgacaccctggtgaccggcttcgccagaatcttcggctaccccgtgggcatcgtgggcaacaacggcgtgctgttcagcgagagcgccaagaagggcacccacttcgtgcagctgtgctgccagagaaacatccccctgctgttcctgcagaacatcaccggcttcatggtgggcagagagtacgaggccgagggcatcgccaaggacggcgccaagatggtggccgccgtggcctgcgcccaggtgcccaagatcaccctgatcatcggcggcagctacggcgccggcaactacggcatgtgcggcagagcctacagccccagattcctgtacatctggcccaacgccagaatcagcgtgatgggcggcgagcaggccgccaacgtgctggccaccatcaccaaggaccagagagccagagagggcaagcagttcagcagcgccgacgaggccgccctgaaggagcccatcatcaagaagttcgaggaggagggcaacccctactacagcagcgccagagtgtgggacgacggcatcatcgaccccgccgacaccagactggtgctgggcctgagcttcagcgccgccctgaacgcccccatcgagaagaccgacttcggcatcttcagaatgtag

SEQ ID NO: 88784 - DNA, 1692 bp, synthetic construct
  misc_feature 1..1692: note = Description of Artificial Sequence: Synthetic coding sequence
  source 1..1692: mol_type = other DNA
atgtgggccgtgctgagactggccctgagaccctgcgccagagccagccccgccggccccagagcctaccacggcgacagcgtggccagcctgggcacccagcccgacctgggcagcgccctgtaccaggagaactacaagcagatgaaggccctggtgaaccagctgcacgagagagtggagcacatcaagctgggcggcggcgagaaggccagagccctgcacatcagcagaggcaagctgctgcccagagagagaatcgacaacctgatcgaccccggcagccccttcctggagctgagccagttcgccggctaccagctgtacgacaacgaggaggtgcccggcggcggcatcatcaccggcatcggcagagtgagcggcgtggagtgcatgatcatcgccaacgacgccaccgtgaagggcggcgcctactaccccgtgaccgtgaagaagcagctgagagcccaggagatcgccatgcagaacagactgccctgcatctacctggtggacagcggcggcgcctacctgcccagacaggccgacgtgttccccgacagagaccacttcggcagaaccttctacaaccaggccatcatgagcagcaagaacatcgcccagatcgccgtggtgatgggcagctgcaccgccggcggcgcctacgtgcccgccatggccgacgagaacatcatcgtgagaaagcagggcaccatcttcctggccggcccccccctggtgaaggccgccaccggcgaggaggtgagcgccgaggacctgggcggcgccgacctgcactgcagaaagagcggcgtgagcgaccactgggccctggacgaccaccacgccctgcacctgaccagaaaggtggtgagaaacctgaactaccagaagaagctggacgtgaccatcgagcccagcgaggagcccctgttccccgccgacgagctgtacggcatcgtgggcgccaacctgaagagaagcttcgacgtgagagaggtgatcgccagaatcgtggacggcagcagattcaccgagttcaaggccttctacggcgacaccctggtgaccggcttcgccagaatcttcggctaccccgtgggcatcgtgggcaacaacggcgtgctgttcagcgagagcgccaagaagggcacccacttcgtgcagctgtgctgccagagaaacatccccctgctgttcctgcagaacatcaccggcttcatggtgggcagagagtacgaggccgagggcatcgccaaggacggcgccaagatggtggccgccgtggcctgcgcccaggtgcccaagatcaccctgatcatcggcggcagctacggcgccggcaactacggcatgtgcggcagagcctacagccccagattcctgtacatctggcccaacgccagaatcagcgtgatgggcggcgagcaggccgccaacgtgctggccaccatcaccaaggaccagagagccagagagggcaagcagttcagcagcgccgacgaggccgccctgaaggagcccatcatcaagaagttcgaggaggagggcaacccctactacagcagcgccagagtgtgggacgacggcatcatcgaccccgccgacaccagactggtgctgggcctgagcttcagcgccgccctgaacgcccccatcgagaagaccgacttcggcatcttcagaatgtag

SEQ ID NO: 88785 - DNA, 870 bp, synthetic construct
  misc_feature 1..870: note = Description of Artificial Sequence: Synthetic coding sequence
  source 1..870: mol_type = other DNA
atggccaagcacatccagaaggagatccagagaggcgtggagagctgggtgagcctgggcaacagaagaccccacctgagcatcatcctggtgggcgacaaccccgccagccacacctacgtgagaaacaagatcagagccgccagcgccgtgggcatctgcagcgagctgatcctgaagcccaaggacgtgagccaggaggagctgctggacgtgaccgaccagctgaacatggaccccagagtgagcggcatcctggtgcagctgcccctgcccgaccacgtggacgagagaaccatctgcaacggcatcgcccccgagaaggacgtggacggcttccacatcatcaacatcggcagactgtgcctggaccagcacagcctgatccccgccaccgccagcgccgtgtgggagatcatcaagagaaccggcatccagaccttcggcaagaacgtggtggtggccggcagaagcaagaacgtgggcatgcccatcgccatgctgctgcacaccgacggcgagcacgagagacccggcggcgacgccaccgtgaccatcgcccacagatacacccccaaggagcagctgaagatccacacccagctggccgacatcatcatcgtggccgccggcatccccaagctgatcaccagcgacatggtgaaggagggcgccgccgtgatcgacgtgggcatcaactacgtgcacgaccccgtgaccggcaagaccaagctggtgggcgacgtggacttcgaggccgtgaagaagaaggccggcttcatcacccccgtgcccggcggcgtgggccccatgaccgtggccatgctgctgaagaacaccctgctggccgccaagaagatcatctactag

SEQ ID NO: 88786 - DNA, 672 bp, synthetic construct
  misc_feature 1..672: note = Description of Artificial Sequence: Synthetic coding sequence
  source 1..672: mol_type = other DNA
atggccaagcacatccagaaggagatccagagaggcgtggagagctgggtgagcctgggcaacagaagaccccacctgagcatcatcctggtgggcgacaaccccgccagccacacctacgtgagaaacaagatcagagccgccagcgccgtgggcatctgcagcgagctgatcctgaagcccaaggacgtgagccaggaggagctgctggacgtgaccgaccagctgaacatggaccccagagtgagcggcatcctggtgcagctgcccctgcccgaccacgtggacgagagaaccatctgcaacggcatcgcccccgagaaggacgtggacggcttccacatcatcaacatcggcagactgtgcctggaccagcacagcctgatccccgccaccgccagcgccgtgtgggagatcatcaagagaaccggcatccagaccttcggcaagaacgtggtggtggccggcagaagcaagaacgtgggcatgcccatcgccatgctgctgcacaccgacggcgagcacgagagacccggcggcgacgccaccgtgaccatcgcccacagatacacccccaaggagcagctgaagatccacacccagctggccgacatcatcatcgtggccgccgagagattccaccacttcgcccaggacctgagcaacagctag

SEQ ID NO: 88787 - DNA, 762 bp, synthetic construct
  misc_feature 1..762: note = Description of Artificial Sequence: Synthetic coding sequence
  source 1..762: mol_type = other DNA
atggccaagcacatccagaaggagatccagagaggcgtggagagctgggtgagcctgggcaacagaagaccccacctgagcatcatcctggtgggcgacaaccccgccagccacacctacgtgagaaacaagatcagagccgccagcgccgtgggcatctgcagcgagctgatcctgaagcccaaggacgtgagccaggaggagctgctggacgtgaccgaccagctgaacatggaccccagagtgagcggcatcctggtgcagctgcccctgcccgaccacgtggacgagagaaccatctgcaacggcatcgcccccgagaaggacgtggacggcttccacatcatcaacatcggcagactgtgcctggaccagcacagcctgatccccgccaccgccagcgccgtgtgggagatcatcaagagaaccggcatccagaccttcggcaagaacgtggtggtggccggcagaagcaagaacgtgggcatgcccatcgccatgctgctgcacaccgacggcgagcacgagagacccggcggcgacgccaccgtgaccatcgcccacagatacacccccaaggagcagctgaagatccacacccagctggccgacatcatcatcgtggccgccggcatccccaagctgatcaccagcgacatggtgaaggagggcgccgccgtgatcgacgtgggcatcaactacgtgcacgaccccgtgaccggcaagaccaagctggtgggcgacgtggacttcgaggcctag

SEQ ID NO: 88788 - DNA, 1044 bp, synthetic construct
  misc_feature 1..1044: note = Description of Artificial Sequence: Synthetic coding sequence
  source 1..1044: mol_type = other DNA
atgaccgtgcccgtgagaggcttcagcctgctgagaggcagactgggcagagcccccgccctgggcagaagcaccgcccccagcgtgagagcccccggcgagcccggcagcgccttcagaggcttcagaagcagcggcgtgagacacgaggccatcatcatcagcggcaccgagatggccaagcacatccagaaggagatccagagaggcgtggagagctgggtgagcctgggcaacagaagaccccacctgagcatcatcctggtgggcgacaaccccgccagccacacctacgtgagaaacaagatcagagccgccagcgccgtgggcatctgcagcgagctgatcctgaagcccaaggacgtgagccaggaggagctgctggacgtgaccgaccagctgaacatggaccccagagtgagcggcatcctggtgcagctgcccctgcccgaccacgtggacgagagaaccatctgcaacggcatcgcccccgagaaggacgtggacggcttccacatcatcaacatcggcagactgtgcctggaccagcacagcctgatccccgccaccgccagcgccgtgtgggagatcatcaagagaaccggcatccagaccttcggcaagaacgtggtggtggccggcagaagcaagaacgtgggcatgcccatcgccatgctgctgcacaccgacggcgagcacgagagacccggcggcgacgccaccgtgaccatcgcccacagatacacccccaaggagcagctgaagatccacacccagctggccgacatcatcatcgtggccgccggcatccccaagctgatcaccagcgacatggtgaaggagggcgccgccgtgatcgacgtgggcatcaactacgtgcacgaccccgtgaccggcaagaccaagctggtgggcgacgtggacttcgaggccgtgaagaagaaggccggcttcatcacccccgtgcccggcggcgtgggccccatgaccgtggccatgctgctgaagaacaccctgctggccgccaagaagatcatctactag

SEQ ID NO: 88789 - DNA, 441 bp, synthetic construct
  misc_feature 1..441: note = Description of Artificial Sequence: Synthetic coding sequence
  source 1..441: mol_type = other DNA
atggaccccagagtgagcggcatcctggtgcagctgcccctgcccgaccacgtggacgagagaaccatctgcaacggcatcgcccccgagaaggacgtggacggcttccacatcatcaacatcggcagactgtgcctggaccagcacagcctgatccccgccaccgccagcgccgtgtgggagatcatcaagagaaccggcatccagaccttcggcaagaacgtggtggtggccggcagaagcaagaacgtgggcatgcccatcgccatgctgctgcacaccgacggcgagcacgagagacccggcggcgacgccaccgtgaccatcgcccacagatacacccccaaggagcagctgaagatccacacccagctggccgacatcatcatcgtggccgccgagagattccaccacttcgcccaggacctgagcaacagctag

SEQ ID NO: 88790 - DNA, 1257 bp, synthetic construct
  misc_feature 1..1257: note = Description of Artificial Sequence: Synthetic coding sequence
  source 1..1257: mol_type = other DNA
atgcccatgctgctgccccacccccaccagcacttcctgaagggcctgctgagagcccccttcagatgctaccacttcatcttccacagcagcacccacctgggcagcggcatcccctgcgcccagcccttcaacagcctgggcctgcactgcaccaagtggatgctgctgagcgacggcctgaagagaaagctgtgcgtgcagaccaccctgaaggaccacaccgagggcctgagcgacaaggagcagagattcgtggacaagctgtacaccggcctgatccagggccagagagcctgcctggccgaggccatcaccctggtggagagcacccacagcagaaagaaggagctggcccaggtgctgctgcagaaggtgctgctgtaccacagagagcaggagcagagcaacaagggcaagcccctggccttcagagtgggcctgagcggcccccccggcgccggcaagagcaccttcatcgagtacttcggcaagatgctgaccgagagaggccacaagctgagcgtgctggccgtggaccccagcagctgcaccagcggcggcagcctgctgggcgacaagaccagaatgaccgagctgagcagagacatgaacgcctacatcagacccagccccaccagaggcaccctgggcggcgtgaccagaaccaccaacgaggccatcctgctgtgcgagggcgccggctacgacatcatcctgatcgagaccgtgggcgtgggccagagcgagttcgccgtggccgacatggtggacatgttcgtgctgctgctgccccccgccggcggcgacgagctgcagggcatcaagagaggcatcatcgagatggccgacctggtggccgtgaccaagagcgacggcgacctgatcgtgcccgccagaagaatccaggccgagtacgtgagcgccctgaagctgctgagaaagagaagccaggtgtggaagcccaaggtgatcagaatcagcgccagaagcggcgagggcatcagcgagatgtgggacaagatgaaggacttccaggacctgatgctggccagcggcgagctgaccgccaagagaagaaagcagcagaaggtgtggatgtggaacctgatccaggagagcgtgctggagcacttcagaacccaccccaccgtgagagagcagatccccctgctggagcagaaggtgctgatcggcgccctgagccccggcctggccgccgacttcctgctgaaggccttcaagagcagagactag

SEQ ID NO: 88791 - DNA, 1275 bp, synthetic construct
  misc_feature 1..1275: note = Description of Artificial Sequence: Synthetic coding sequence
  source 1..1275: mol_type = other DNA
atgcccatgctgctgccccacccccaccagcacttcctgaagggcctgctgagagcccccttcagatgctaccacttcatcttccacagcagcacccacctgggcagcggcatcccctgcgcccagcccttcaacagcctgggcctgcactgcaccaagtggatgctgctgagcgacggcctgaagagaaagctgtgcgtgcagaccaccctgaaggaccacaccgagggcctgagcgacaaggagcagagattcgtggacaagctgtacaccggcctgatccagggccagagagcctgcctggccgaggccatcaccctggtggagagcacccacagcagaaagaaggagctggcccaggtgctgctgcagaaggtgctgctgtaccacagagagcaggagcagagcaacaagggcaagcccctggccttcagagtgggcctgagcggcccccccggcgccggcaagagcaccttcatcgagtacttcggcaagatgctgaccgagagaggccacaagctgagcgtgctggccgtggaccccagcagctgcaccagcggcggcagcctgctgggcgacaagaccagaatgaccgagctgagcagagacatgaacgcctacatcagacccagccccaccagaggcaccctgggcggcgtgaccagaaccaccaacgaggccatcctgctgtgcgagggcgccggctacgacatcatcctgatcgagaccgtgggcgtgggccagagcgagttcgccgtggccgacatggtggacatgttcgtgctgctgctgccccccgccggcggcgacgagctgcagggcatcaagagaggcatcatcgagatggccgacctggtggccgtgaccaagagcgacggcgacctgatcgtgcccgccagaagaatccaggccgagtacgtgagcgccctgaagctgctgagaaagagaagccaggtgtggaagcccaaggtgatcagaatcagcgccagaagcggcgagggcatcagcgagatgtgggacaagatgaaggacttccaggacctgatgctggccagcggcgagctgaccgccaagagaagaaagcagcagaaggtgtggatgtggaacctgatccaggagagcgtgctggagcacttcagaacccaccccaccgtgagagagcagatccccctgctggagcagaaggtgctgatcggcgccctgagccccggcctggccgccgacttcctgctgaaggccctgaaggccgagaccaacaagatccaccccgtgtag

SEQ ID NO: 88792 - DNA, 414 bp, synthetic construct
  misc_feature 1..414: note = Description of Artificial Sequence: Synthetic coding sequence
  source 1..414: mol_type = other DNA
atggccgacctggtggccgtgaccaagagcgacggcgacctgatcgtgcccgccagaagaatccaggccgagtacgtgagcgccctgaagctgctgagaaagagaagccaggtgtggaagcccaaggtgatcagaatcagcgccagaagcggcgagggcatcagcgagatgtgggacaagatgaaggacttccaggacctgatgctggccagcggcgagctgaccgccaagagaagaaagcagcagaaggtgtggatgtggaacctgatccaggagagcgtgctggagcacttcagaacccaccccaccgtgagagagcagatccccctgctggagcagaaggtgctgatcggcgccctgagccccggcctggccgccgacttcctgctgaaggccttcaagagcagagactag

SEQ ID NO: 88793 - DNA, 480 bp, synthetic construct
  misc_feature 1..480: note = Description of Artificial Sequence: Synthetic coding sequence
  source 1..480: mol_type = other DNA
atggccggcctgaccagattcgccctggagctggtgaccgagaagggccacaccttcgccgaggagctgcagaagatccagtgcaccctgcaggacgtgggcagcgccctggccaccccctgcagcagcgccagagaggcccacctgaagtacaccaccttcaaggccggccccatcctggagctggagcagtggatcgacaagtacaccagccagctgccccccctgaccgccttcatcctgcccagcggcggcaagatcagcagcgccctgcacttctgcagagccgtgtgcagaagagccgagagaagagtggtgcccctggtgcagatgggcgagaccgacgccaacgtggccaagttcctgaacagactgagcgactacctgttcaccctggccagatacgccgccatgaaggagggcaaccaggagaagatctacatgaagaacgaccccagcgccgagagcgagggcctgtag

SEQ ID NO: 88794 - DNA, 753 bp, synthetic construct
  misc_feature 1..753: note = Description of Artificial Sequence: Synthetic coding sequence
  source 1..753: mol_type = other DNA
atggccgtgtgcggcctgggcagcagactgggcctgggcagcagactgggcctgagaggctgcttcggcgccgccagactgctgtaccccagattccagagcagaggcccccagggcgtggaggacggcgacagaccccagcccagcagcaagacccccagaatccccaagatctacaccaagaccggcgacaagggcttcagcagcaccttcaccggcgagagaagacccaaggacgaccaggtgttcgaggccgtgggcaccaccgacgagctgagcagcgccatcggcttcgccctggagctggtgaccgagaagggccacaccttcgccgaggagctgcagaagatccagtgcaccctgcaggacgtgggcagcgccctggccaccccctgcagcagcgccagagaggcccacctgaagtacaccaccttcaaggccggccccatcctggagctggagcagtggatcgacaagtacaccagccagctgccccccctgaccgccttcatcctgcccagcggcggcaagatcagcagcgccctgcacttctgcagagccgtgtgcagaagagccgagagaagagtggtgcccctggtgcagatgggcgagaccgacgccaacgtggccaagttcctgaacagactgagcgactacctgttcaccctggccagatacgccgccatgaaggagggcaaccaggagaagatctacatgaagaacgaccccagcgccgagagcgagggcctgtag

SEQ ID NO: 88795 - DNA, 849 bp, synthetic construct
  misc_feature 1..849: note = Description of Artificial Sequence: Synthetic coding sequence
  source 1..849: mol_type = other DNA
atggagcccaaggtggccgagctgaagcagaagatcgaggacaccctgtgccccttcggcttcgaggtgtaccccttccaggtggcctggtacaacgagctgctgccccccgccttccacctgcccctgcccggccccaccctggccttcctggtgctgagcacccccgccatgttcgacagagccctgaagcccttcctgcagagctgccacctgagaatgctgaccgaccccgtggaccagtgcgtggcctaccacctgggcagagtgagagagagcctgcccgagctgcagatcgagatcatcgccgactacgaggtgcaccccaacagaagacccaagatcctggcccagaccgccgcccacgtggccggcgccgcctactactaccagagacaggacgtggaggccgacccctggggcaaccagagaatcagcggcgtgtgcatccaccccagattcggcggctggttcgccatcagaggcgtggtgctgctgcccggcatcgaggtgcccgacctgccccccagaaagccccacgactgcgtgcccaccagagccgacagaatcgccctgctggagggcttcaacttccactggagagactggacctacagagacgccgtgaccccccaggagagatacagcgaggagcagaaggcctacttcagcaccccccccgcccagagactggccctgctgggcctggcccagcccagcgagaagcccagcagccccagccccgacctgcccttcaccacccccgcccccaagaagcccggcaaccccagcagagccagaagctggctgagccccagagtgagcccccccgccagccccggcccctag

SEQ ID NO: 88796 - DNA, 891 bp, synthetic construct
  misc_feature 1..891: note = Description of Artificial Sequence: Synthetic coding sequence
  source 1..891: mol_type = other DNA
atggccaacgtgctgtgcaacagagccagactggtgagctacctgcccggcttctgcagcctggtgaagagagtggtgaaccccaaggccttcagcaccgccggcagcagcggcagcgacgagagccacgtggccgccgccccccccgacatctgcagcagaaccgtgtggcccgacgagaccatgggccccttcggcccccaggaccagagattccagctgcccggcaacatcggcttcgactgccacctgaacggcaccgccagccagaagaagagcctggtgcacaagaccctgcccgacgtgctggccgagcccctgagcagcgagagacacgagttcgtgatggcccagtacgtgaacgagttccagggcaacgacgcccccgtggagcaggagatcaacagcgccgagacctacttcgagagcgccagagtggagtgcgccatccagacctgccccgagctgctgagaaaggacttcgagagcctgttccccgaggtggccaacggcaagctgatgatcctgaccgtgacccagaagaccaagaacgacatgaccgtgtggagcgaggaggtggagatcgagagagaggtgctgctggagaagttcatcaacggcgccaaggagatctgctacgccctgagagccgagggctactgggccgacttcatcgaccccagcagcggcctggccttcttcggcccctacaccaacaacaccctgttcgagaccgacgagagatacagacacctgggcttcagcgtggacgacctgggctgctgcaaggtgatcagacacagcctgtggggcacccacgtggtggtgggcagcatcttcaccaacgccacccccgacagccacatcatgaagaagctgagcggcaactag

SEQ ID NO: 88797 - DNA, 891 bp, synthetic construct; identical to SEQ ID NO: 88796
  misc_feature 1..891: note = Description of Artificial Sequence: Synthetic coding sequence
  source 1..891: mol_type = other DNA

SEQ ID NO: 88798 - DNA, 531 bp, synthetic construct
  misc_feature 1..531: note = Description of Artificial Sequence: Synthetic coding sequence
  source 1..531: mol_type = other DNA
atggccagagtgctgaaggccgccgccgccaacgccgtgggcctgttcagcagactgcaggcccccatccccaccgtgagagccagcagcaccagccagcccctggaccaggtgaccggcagcgtgtggaacctgggcagactgaaccacgtggccatcgccgtgcccgacctggagaaggccgccgccttctacaagaacatcctgggcgcccaggtgagcgaggccgtgcccctgcccgagcacggcgtgagcgtggtgttcgtgaacctgggcaacaccaagatggagctgctgcaccccctgggcagagacagccccatcgccggcttcctgcagaagaacaaggccggcggcatgcaccacatctgcatcgaggtggacaacatcaacgccgccgtgatggacctgaagaagaagaagatcagaagcctgagcgaggaggtgaagatcggcgcccacggcaagcccgtgatcttcctgcaccccaaggactgcggcggcgtgctggtggagctggagcaggcctag

SEQ ID NO: 88799 - DNA, 2070 bp, synthetic construct
  misc_feature 1..2070: note = Description of Artificial Sequence: Synthetic coding sequence
  source 1..2070: mol_type = other DNA
atgatcgagatggccgccgagaaggagcccttcctggtgcccgccccccccccccccctgaaggacgagagcggcggcggcggcggccccaccgtgcccccccaccaggaggccgccagcggcgagctgagaggcggcaccgagagaggccccggcagatgcgcccccagcgccggcagccccgccgccgccgtgggcagagagagccccggcgccgccgccaccagcagcagcggcccccaggcccagcagcacagaggcggcggcccccaggcccagagccacggcgaggccagactgagcgacccccccggcagagccgccccccccgacgtgggcgaggagagaagaggcggcggcggcaccgagctgggcccccccgccccccccagacccagaaacggctaccagccccacagaccccccggcggcggcggcggcaagagaagaaacagctgcaacgtgggcggcggcggcggcggcttcaagcaccccgccttcaagagaagaagaagagtgaacagcgactgcgacagcgtgctgcccagcaacttcctgctgggcggcaacatcttcgaccccctgaacctgaacagcctgctggacgaggaggtgagcagaaccctgaacgccgagacccccaagagcagccccctgcccgccaagggcagagaccccgtggagatcctgatccccaaggacatcaccgaccccctgagcctgaacacctgcaccgacgagggccacgtggtgctggccagccccctgaagaccggcagaaagagacacagacacagaggccagcaccaccagcagcagcaggccgccggcggcagcgagagccaccccgtgccccccaccgcccccctgacccccctgctgcacggcgagggcgccagccagcagcccagacacagaggccagaacagagacgccccccagccctacgagctgaacaccgccatcaactgcagagacgaggtggtgagccccctgcccagcgccctgcagggccccagcggcagcctgagcgccccccccgccgccagcgtgatcagcgccccccccagcagcagcagcagacacagaaagagaagaagaaccagcagcaagagcgaggccggcgccagaggcggcggccagggcagcaaggagaagggcagaggcagctggggcggcagacaccaccaccaccaccccctgcccgccgccggcttcaagaagcagcagagaaagttccagtacggcaactactgcaagtactacggctacagaaaccccagctgcgaggacggcagactgagagtgctgaagcccgagtggttcagaggcagagacgtgctggacctgggctgcaacgtgggccacctgaccctgagcatcgcctgcaagtggggccccagcagaatggtgggcctggacatcgacagcagactgatccacagcgccagacagaacatcagacactacctgagcgaggagctgagactgcccccccagaccctggagggcgaccccggcgccgagggcgaggagggcaccaccaccgtgagaaagagaagctgcttccccgccagcctgaccgccagcagaggccccatcgccgccccccaggtgcccctggacggcgccgacaccagcgtgttccccaacaacgtggtgttcgtgaccggcaactacgtgctggacagagacgacctggtggaggcccagacccccgagtacgacgtggtgctgtgcctgagcctgaccaagtgggtgcacctgaactggggcgacgagggcctgaagagaatgttcagaagaatctacagacacctgagacccggcggcatcctggtgctggagccccagccctggagcagctacggcaagagaaagaccctgaccgagaccatctacaagaactactacagaatccagctgaagcccgagcagttcagcagctacctgaccagccccgacgtgggcttcagcagctacgagctggtggccaccccccacaacaccagcaagggcttccagagacccgtgtacctgttccacaaggccagaagccccagccactag

SEQ ID NO: 88800 - DNA, 663 bp, synthetic construct
  misc_feature 1..663: note = Description of Artificial Sequence: Synthetic coding sequence
  source 1..663: mol_type = other DNA
atggtgggcctggacatcgacagcagactgatccacagcgccagacagaacatcagacactacctgagcgaggagctgagactgcccccccagaccctggagggcgaccccggcgccgagggcgaggagggcaccaccaccgtgagaaagagaagctgcttccccgccagcctgaccgccagcagaggccccatcgccgccccccaggtgcccctggacggcgccgacaccagcgtgttccccaacaacgtggtgttcgtgaccggcaactacgtgctggacagagacgacctggtggaggcccagacccccgagtacgacgtggtgctgtgcctgagcctgaccaagtgggtgcacctgaactggggcgacgagggcctgaagagaatgttcagaagaatctacagacacctgagacccggcggcatcctggtgctggagccccagccctggagcagctacggcaagagaaagaccctgaccgagaccatctacaagaactactacagaatccagctgaagcccgagcagttcagcagctacctgaccagccccgacgtgggcttcagcagctacgagctggtggccaccccccacaacaccagcaagggcttccagagacccgtgtacctgttccacaaggccagaagccccagccactag

SEQ ID NO: 88801 - DNA, 852 bp, synthetic construct
  misc_feature 1..852: note = Description of Artificial Sequence: Synthetic coding sequence
  source 1..852: mol_type = other DNA
atggccagcggcaccaccaccaccgccgtgaagatcggcatcatcggcggcaccggcctggacgaccccgagatcctggagggcagaaccgagaagtacgtggacacccccttcggcaagcccagcgacgccctgatcctgggcaagatcaagaacgtggactgcgtgctgctggccagacacggcagacagcacaccatcatgcccagcaaggtgaactaccaggccaacatctgggccctgaaggaggagggctgcacccacgtgatcgtgaccaccgcctgcggcagcctgagagaggagatccagcccggcgacatcgtgatcatcgaccagttcatcgacagaaccaccatgagaccccagagcttctacgacggcagccacagctgcgccagaggcgtgtgccacatccccatggccgagcccttctgccccaagaccagagaggtgctgatcgagaccgccaagaagctgggcctgagatgccacagcaagggcaccatggtgaccatcgagggccccagattcagcagcagagccgagagcttcatgttcagaacctggggcgccgacgtgatcaacatgaccaccgtgcccgaggtggtgctggccaaggaggccggcatctgctacgccagcatcgccatggccaccgactacgactgctggaaggagcacgaggaggccgtgagcgtggacagagtgctgaagaccctgaaggagaacgccaacaaggccaagagcctgctgctgaccaccatcccccagatcggcagcaccgagtggagcgagaccctgcacaacctgaagaacatggcccagttcagcgtgctgctgcccagacactag

SEQ ID NO: 88802 - DNA, 468 bp, synthetic construct
  misc_feature 1..468: note = Description of Artificial Sequence: Synthetic coding sequence
  source 1..468: mol_type = other DNA
atggccgccgagaccagaaacgtggccggcgccgaggccccccccccccagaagagatactacagacagagagcccacagcaaccccatggccgaccacaccctgagataccccgtgaagcccgaggagatggactggagcgagctgtaccccgagttcttcgcccccctgacccagaaccagagccacgacgaccccaaggacaagaaggagaagagagcccaggcccaggtggagttcgccgacatcggctgcggctacggcggcctgctggccgacaaggacgtgctgcccctgcccagacccaccttccaggccgacaaggcccaggtggccaaccaccagagccaccccgccagcagaatctgcctgagagccaagagctggggcgccggcgtgtaccacaacagatgcgccggcgccaccagactggacgtgcacagcttcagaagagcccccaccgtgtag

SEQ ID NO: 88803 - DNA, 831 bp, synthetic construct
  misc_feature 1..831: note = Description of Artificial Sequence: Synthetic coding sequence
  source 1..831: mol_type = other DNA
atggccgccgagaccagaaacgtggccggcgccgaggccccccccccccagaagagatactacagacagagagcccacagcaaccccatggccgaccacaccctgagataccccgtgaagcccgaggagatggactggagcgagctgtaccccgagttcttcgcccccctgacccagaaccagagccacgacgaccccaaggacaagaaggagaagagagcccaggcccaggtggagttcgccgacatcggctgcggctacggcggcctgctggtggagctgagccccctgttccccgacaccctgatcctgggcctggagatcagagtgaaggtgagcgactacgtgcaggacagaatcagagccctgagagccgcccccgccggcggcttccagaacatcgcctgcctgagaagcaacgccatgaagcacctgcccaacttcttctacaagggccagctgaccaagatgttcttcctgttccccgacccccacttcaagagaaccaagcacaagtggagaatcatcagccccaccctgctggccgagtacgcctacgtgctgagagtgggcggcctggtgtacaccatcaccgacgtgctggagctgcacgactggatgtgcacccacttcgaggagcaccccctgttcgagagagtgcccctggaggacctgagcgaggaccccgtggtgggccacctgggcaccagcaccgaggagggcaagaaggtgctgagaaacggcggcaagaacttccccgccatcttcagaagaatccaggaccccgtgctgcaggccgtgaccagccagaccagcctgcccggccactag

SEQ ID NO: 88804 - DNA, 2274 bp, synthetic construct
  misc_feature 1..2274: note = Description of Artificial Sequence: Synthetic coding sequence
  source 1..2274: mol_type = other DNA
atggccgaggtgggcagaaccggcatcagctaccccggcgccctgctgccccagggcttctgggccgccgtggaggtgtggctggagagaccccaggtggccaacaagagactgtgcggcgccagactggaggccagatggagcgccgccctgccctgcgccgaggccagaggccccggcaccagcgccggcagcgagcagaaggagagaggccccggccccggccagggcagccccggcggcggccccggccccagaagcctgagcggccccgagcagggcaccgcctgctgcgagctggaggaggcccagggccagtgccagcaggaggaggcccagagagaggccgccagcgtgcccctgagagacagcggccaccccggccacgccgagggcagagagggcgacttccccgccgccgacctggacagcctgtgggaggacttcagccagagcctggccagaggcaacagcgagctgctggccttcctgaccagcagcggcgccggcagccagcccgaggcccagagagagctggacgtggtgctgagaaccgtgatccccaagaccagcccccactgccccctgaccacccccagaagagagatcgtggtgcaggacgtgctgaacggcaccatcaccttcctgcccctggaggaggacgacgagggcaacctgaaggtgaagatgagcaacgtgtaccagatccagctgagccacagcaaggaggagtggttcatcagcgtgctgatcttctgccccgagagatggcacagcgacggcatcgtgtaccccaagcccacctggctgggcgaggagctgctggccaagctggccaagtggagcgtggagaacaagaagagcgacttcaagagcaccctgagcctgatcagcatcatgaagtacagcaaggcctaccaggagctgaaggagaagtacaaggagatggtgaaggtgtggcccgaggtgaccgaccccgagaagttcgtgtacgaggacgtggccatcgccgcctacctgctgatcctgtgggaggaggagagagccgagagaagactgaccgccagacagagcttcgtggacctgggctgcggcaacggcctgctggtgcacatcctgagcagcgagggccaccccggcagaggcatcgacgtgagaagaagaaagatctgggacatgtacggcccccagacccagctggaggaggacgccatcacccccaacgacaagaccctgttccccgacgtggactggctgatcggcaaccacagcgacgagctgaccccctggatccccgtgatcgccgccagaagcagctacaactgcagattcttcgtgctgccctgctgcttcttcgacttcatcggcagatacagcagaagacagagcaagaagacccagtacagagagtacctggacttcatcaaggaggtgggcttcacctgcggcttccacgtggacgaggactgcctgagaatccccagcaccaagagagtgtgcctggtgggcaagagcagaacctaccccagcagcagagaggccagcgtggacgagaagagaacccagtacatcaagagcagaagaggctgccccgtgagcccccccggctgggagctgagccccagccccagatgggtggccgccggcagcgccggccactgcgacggccagcaggccctggacgccagagtgggctgcgtgaccagagcctgggccgccgagcacggcgccggcccccaggccgagggcccctggctgcccggcttccaccccagagagaaggccgagagagtgagaaactgcgccgccctgcccagagacttcatcgaccaggtggtgctgcaggtggccaacctgctgctgggcggcaagcagctgaacaccagaagcagcagaaacggcagcctgaagacctggaacggcggcgagagcctgagcctggccgaggtggccaacgagctggacaccgagaccctgagaagactgaagagagagtgcggcggcctgcagaccctgctgagaaacagccaccaggtgttccaggtggtgaacggcagagtgcacatcagagactggagagaggagaccctgtggaagaccaagcagcccgaggccaagcagagactgctgagcgaggcctgcaagaccagactgtgctggttcttcatgcaccaccccgacggctgcgccctgagcaccgactgctgccccttcgcccacggccccgccgagctgagaccccccagaaccacccccagaaagaagatcagctag

SEQ ID NO: 88805 - DNA, 1236 bp, synthetic construct
  misc_feature 1..1236: note = Description of Artificial Sequence: Synthetic coding sequence
  source 1..1236: mol_type = other DNA
atgtgcatcaagttcagcagcgtgatcgccaagaagaacgagagatggcacagcgacggcatcgtgtaccccaagcccacctggctgggcgaggagctgctggccaagctggccaagtggagcgtggagaacaagaagagcgacttcaagagcaccctgagcctgatcagcatcatgaagtacagcaaggcctaccaggagctgaaggagaagtacaaggagatggtgaaggtgtggcccgaggtgaccgaccccgagaagttcgtgtacgaggacgtggccatcgccgcctacctgctgatcctgtgggaggaggagagagccgagagaagactgaccgccagacagagcttcgtggacctgggctgcggcaacggcctgctggtgcacatcctgagcagcgagggccaccccggcagaggcatcgacgtgagaagaagaaagatctgggacatgtacggcccccagacccagctggaggaggacgccatcacccccaacgacaagaccctgttccccgacgtggactggctgatcggcaaccacagcgacgagctgaccccctggatccccgtgatcgccgccagaagcagctacaactgcagattcttcgtgctgccctgctgcttcttcgacttcatcggcagatacagcagaagacagagcaagaagacccagtacagagagtacctggacttcatcaaggaggtgggcttcacctgcggcttccacgtggacgaggactgcctgagaatccccagcaccaagagagtgtgcctggtgggcaagagcagaacctaccccagcagcagagaggccagcgtggacgagaagagaacccagtacatcaagagcagaagaggctgccccgtgagcccccccggctgggagctgagccccagccccagatgggtggccgccggcagcgccggccactgcgacggccagcaggccctggacgccagagtgggctgcgtgaccagagcctgggccgccgagcacggcgccggcccccaggccgagggcccctggctgcccggcttccaccccagagagaaggccgagagagtgagaaactgcgccgccctgcccagagacttcatcgaccaggtggtgctgcaggtggccaacctgctgctgggcggcaagcagctgaacaccagaagcagcagaaacggcagcctgaagacctggaacggcggcggcaagctgagcaccatcctgggcagaggctag

SEQ ID NO: 88806 - DNA, 1743 bp, synthetic construct
  misc_feature 1..1743: note = Description of Artificial Sequence: Synthetic coding sequence
  source 1..1743: mol_type = other DNA
atgagcgacacctggagcagcatccaggcccacaagaagcagctggacagcctgagagagagactgcagagaagaagaaagcaggacagcggccacctggacctgagaaaccccgaggccgccctgagccccaccttcagaagcgacagccccgtgcccaccgcccccaccagcggcggccccaagcccagcaccgccagcgccgtgcccgagctggccaccgaccccgagctggagaagaagctgctgcaccacctgagcgacctggccctgaccctgcccaccgacgccgtgagcatctgcctggccatcagcacccccgacgcccccgccacccaggacggcgtggagagcctgctgcagaagttcgccgcccaggagctgatcgaggtgaagagaggcctgctgcaggacgacgcccaccccaccctggtgacctacgccgaccacagcaagctgagcgccatgatgggcgccgtggccgagaagaagggccccggcgaggtggccggcaccgtgaccggccagaagagaagagccgagcaggacagcaccaccgtggccgccttcgccagcagcctggtgagcggcctgaacagcagcgccagcgagcccgccaaggagcccgccaagaagagcagaaagcacgccgccagcgacgtggacctggagatcgagagcctgctgaaccagcagagcaccaaggagcagcagagcaagaaggtgagccaggagatcctggagctgctgaacaccaccaccgccaaggagcagagcatcgtggagaagttcagaagcagaggcagagcccaggtgcaggagttctgcgactacggcaccaaggaggagtgcatgaaggccagcgacgccgacagaccctgcagaaagctgcacttcagaagaatcatcaacaagcacaccgacgagagcctgggcgactgcagcttcctgaacacctgcttccacatggacacctgcaagtacgtgcactacgagatcgacgcctgcatggacagcgaggcccccggcagcaaggaccacacccccagccaggagctggccctgacccagagcgtgggcggcgacagcagcgccgacagactgttccccccccagtggatctgctgcgacatcagatacctggacgtgagcatcctgggcaagttcgccgtggtgatggccgaccccccctgggacatccacatggagctgccctacggcaccctgaccgacgacgagatgagaagactgaacatccccgtgctgcaggacgacggcttcctgttcctgtgggtgaccggcagagccatggagctgggcagagagtgcctgaacctgtggggctacgagagagtggacgagatcatctgggtgaagaccaaccagctgcagagaatcatcagaaccggcagaaccggccactggctgaaccacggcaaggagcactgcctggtgggcgtgaagggcaacccccagggcttcaaccagggcctggactgcgacgtgatcgtggccgaggtgagaagcaccagccacaagcccgacgagatctacggcatgatcgagagactgagccccggcaccagaaagatcgagctgttcggcagaccccacaacgtgcagcccaactggatcaccctgggcaaccagctggacggcatccacctgctggaccccgacgtggtggccagattcaagcagagataccccgacggcatcatcagcaagcccaagaacctgtag

SEQ ID NO: 88807 - DNA, 492 bp, synthetic construct
  misc_feature 1..492: note = Description of Artificial Sequence: Synthetic coding sequence
  source 1..492: mol_type = other DNA
atgagcgacacctggagcagcatccaggcccacaagaagcagctggacagcctgagagagagactgcagagaagaagaaagcaggacagcggccacctggacctgagaaaccccgaggccgccctgagccccaccttcagaagcgacagccccgtgcccaccgcccccaccagcggcggccccaagcccagcaccgccagcgccgtgcccgagctggccaccgaccccgagctggagaagaagctgctgcaccacctgagcgacctggccctgaccctgcccaccgacgccgtgagcatctgcctggccatcagcacccccgacgcccccgccacccaggacggcgtggagagcctgctgcagaagttcgccgcccaggagctgatcgaggtgaagagaggcctgctgcaggacgacgcccaccccaccctggtgacctacgccgaccacagcaagctgagcgccatgatgggcgccgtggccgagaagtag

SEQ ID NO: 88808 - DNA, 462 bp, synthetic construct
  misc_feature 1..462: note = Description of Artificial Sequence: Synthetic coding sequence
  source 1..462: mol_type = other DNA
atgagcgacacctggagcagcatccaggcccacaagaagcagctggacagcctgagagagagactgcagagaagaagaaagcaggacagcggccacctggacctgagaaaccccgaggccgccctgagccccaccttcagaagcgacagccccgtgcccaccgcccccaccagcggcggccccaagcccagcaccgccagcgccgtgcccgagctggccaccgaccccgagctggagaagaagctgctgcaccacctgagcgacctggccctgaccctgcccaccgacgccgtgagcatctgcctggccatcagcacccccgacgcccccgccacccaggacggcgtggagagcctgctgcagaagttcgccgcccaggagctgatcgagcacagaaaccagcagagaagccagcccagaaaccagggcaacatgctgccccagatgctgatctggagatag

SEQ ID NO: 88809 - DNA, 879 bp, synthetic construct
  misc_feature 1..879: note = Description of Artificial Sequence: Synthetic coding sequence
  source 1..879: mol_type = other DNA
atgctgggcgcctgggccgtggagggcaccgccgtggccctgctgagactgctgctgctgctgctgccccccgccatcagaggccccggcctgggcgtggccggcgtggccggcgccgccggcgccggcctgcccgagagcgtgatctgggccgtgaacgccggcggcgaggcccacgtggacgtgcacggcatccacttcagaaaggaccccctggagggcagagtgggcagagccagcgactacggcatgaagctgcccatcctgagaagcaaccccgaggaccagatcctgtaccagaccgagagatacaacgaggagaccttcggctacgaggtgcccatcaaggaggagggcgactacgtgctggtgctgaagttcgccgaggtgtacttcgcccagagccagcagaaggtgttcgacgtgagactgaacggccacgtggtggtgaaggacctggacatcttcgacagagtgggccacagcaccgcccacgacgagatcatccccatgagcatcagaaagggcaagctgagcgtgcagggcgaggtgagcaccttcaccggcaagctgtacatcgagttcgtgaagggctactacgacaaccccaaggtgtgcgccctgtacatcatggccggcaccgtggacgacgtgcccaagctgcagccccaccccggcctggagaagaaggaggaggaggaggaggaggaggagtacgacgagggcagcaacctgaagaagcagaccaacaagaacagagtgcagagcggccccagaacccccaacccctacgccagcgacaacagcagcctgatgttccccatcctggtggccttcggcgtgttcatccccaccctgttctgcctgtgcagactgtag

SEQ ID NO: 88810 - DNA, 1035 bp, synthetic construct
  misc_feature 1..1035: note = Description of Artificial Sequence: Synthetic coding sequence
  source 1..1035: mol_type = other DNA
atgctgagcgaggtgctgctggtgagcgcccccggcaaggtgatcctgcacggcgagcacgccgtggtgcacggcaaggtggccctggccgtgagcctgaacctgagaaccttcctgagactgcagccccacagcaacggcaaggtggacctgagcctgcccaacatcggcatcaagagagcctgggacgtggccagactgcagagcctggacaccagcttcctggagcagggcgacgtgaccacccccaccagcgagcaggtggagaagctgaaggaggtggccggcctgcccgacgactgcgccgtgaccgagagactggccgtgctggccttcctgtacctgtacctgagcatctgcagaaagcagagatggaccaaggaggacctggagctgatcaacaagtgggccttccagggcgagagaatgatccacggcaaccccagcggcgtggacaacgccgtgagcacctggggcggcgccctgagataccaccagggcaagatcagcagcctgaagagaagccccgccctgcagatcctgctgaccaacaccaaggtgcccagaaacaccagagccctggtggccggcgtgagaaacagactgctgaagttccccgagatcgtggcccccctgctgaccagcatcgacgccatcagcctggagtgcgagagagtgctgggcgagatgggcgaggcccccgcccccgagcagtacctggtgctggaggagctgatcgacatgaaccagcaccacctgaacgccctgggcgtgggccacgccagcctggaccagctgtgccaggtgaccagagccagaggcctgcacagcaagctgaccggcgccggcggcggcggctgcggcatcaccctgctgaagcccggcctggagcagcccgaggtggaggccaccaagcaggccctgaccagctgcggcttcgactgcctggagaccagcatcggcgcccccggcgtgagcatccacagcgccaccagcctggacagcagagtgcagcaggccctggacggcctgtag

SEQ ID NO: 88811 - DNA, 516 bp, synthetic construct
  misc_feature 1..516: note = Description of Artificial Sequence: Synthetic coding sequence
  source 1..516: mol_type = other DNA
atgctgagcgaggtgctgctggtgagcgcccccggcaaggtgatcctgcacggcgagcacgccgtggtgcacggcaaggtggccctggccgtgagcctgaacctgagaaccttcctgagactgcagccccacagcaacggcaaggtggacctgagcctgcccaacatcggcatcaagagagcctgggacgtggccagactgcagagcctggacaccagcttcctggagcagggcgacgtgaccacccccaccagcgagcaggtggagaagctgaaggaggtggccggcctgcccgacgactgcgccgtgaccgagagactggccgtgctggccttcctgtacctgtacctgagcatctgcagaaagcagagagccctgcccagcctggacatcgtggtgtggagcgagctgccccccggcgccggcctgggcagcagcgccgcctacagcgtgtgcctggccgccgccctgctgaccgtgtgcgaggagatccccaaccccctgaaggacggctag

SEQ ID NO: 88812 - DNA, 1035 bp, synthetic construct; identical to SEQ ID NO: 88810
  misc_feature 1..1035: note = Description of Artificial Sequence: Synthetic coding sequence
  source 1..1035: mol_type = other DNA

SEQ ID NO: 88813 - DNA, 609 bp, synthetic construct
  misc_feature 1..609: note = Description of Artificial Sequence: Synthetic coding sequence
  source 1..609: mol_type = other DNA
atgatccacggcaaccccagcggcgtggacaacgccgtgagcacctggggcggcgccctgagataccaccagggcaagatcagcagcctgaagagaagccccgccctgcagatcctgctgaccaacaccaaggtgcccagaaacaccagagccctggtggccggcgtgagaaacagactgctgaagttccccgagatcgtggcccccctgctgaccagcatcgacgccatcagcctggagtgcgagagagtgctgggcgagatgggcgaggcccccgcccccgagcagtacctggtgctggaggagctgatcgacatgaaccagcaccacctgaacgccctgggcgtgggccacgccagcctggaccagctgtgccaggtgaccagagccagaggcctgcacagcaagctgaccggcgccggcggcggcggctgcggcatcaccctgctgaagcccggcctggagcagcccgaggtggaggccaccaagcaggccctgaccagctgcggcttcgactgcctggagaccagcatcggcgcccccggcgtgagcatccacagcgccaccagcctggacagcagagtgcagcaggccctggacggcctgtag

SEQ ID NO: 88814 - DNA, 606 bp, synthetic construct
  misc_feature 1..606: note = Description of Artificial Sequence: Synthetic coding sequence
  source 1..606: mol_type = other DNA
atgctgagcgaggtgctgctggtgagcgcccccggcaaggtgatcctgcacggcgagcacgccgtggtgcacggcaaggtggccctggccgtgagcctgaacctgagaaccttcctgagactgcagccccacagcaacggcaaggtggacctgagcctgcccaacatcggcatcaagagagcctgggacgtggccagactgcagagcctggacaccagcttcctggagcagggcgacgtgaccacccccaccagcgagcaggtggagaagctgaaggaggtggccggcctgcccgacgactgcgccgtgaccgagagactggccgtgctggccttcctgtacctgtacctgagcatctgcagaaagcagagagccctgcccagcctggacatcgtggtgtggagcgagctgccccccggcgccggcctgggcagcagcgccgcctacagcgtgtgcctggccgccgccctgctgaccgtgtgcgaggagatccccaaccccctgaaggacggcgactgcgtgaacagatggaccaaggaggacctggagctgatcaacaagtgggccttccagggcgagagaatgatccacggcaaccccagctag

SEQ ID NO: 88815 - DNA, 1563 bp, synthetic construct
  misc_feature 1..1563: note = Description of Artificial Sequence: Synthetic coding sequence
  source 1..1563: mol_type = other DNA
atgcccagcctggtggtgagcggcatcatggagagaaacggcggcttcggcgagctgggctgcttcggcggcagcgccaaggacagaggcctgctggaggacgagagagccctgcagctggccctggaccagctgtgcctgctgggcctgggcgagccccccgcccccaccgccggcgaggacggcggcggcggcggcggcggcgcccccgcccagcccgccgcccccccccagcccgcccccccccccccccccgccgccccccccgccgcccccaccgccgcccccgccgcccagaccccccagccccccaccgcccccaagggcgccagcgacgccaagctgtgcgccctgtacaaggaggccgagctgagactgaagggcagcagcaacaccaccgagtgcgtgcccgtgcccaccagcgagcacgtggccgagatcgtgggcagacagggctgcaagatcaaggccctgagagccaagaccaacacctacatcaagacccccgtgagaggcgaggagcccgtgttcatggtgaccggcagaagagaggacgtggccaccgccagaagagagatcatcagcgccgccgagcacttcagcatgatcagagccagcagaaacaagagcggcgccgccttcggcgtggcccccgccctgcccggccaggtgaccatcagagtgagagtgccctacagagtggtgggcctggtggtgggccccaagggcgccaccatcaagagaatccagcagcagaccaacacctacatcatcacccccagcagagacagagaccccgtgttcgagatcaccggcgcccccggcaacgtggagagagccagagaggagatcgagacccacatcgccgtgagaaccggcaagatcctggagtacaacaacgagaacgacttcctggccggcagccccgacgccgccatcgacagcagatacagcgacgcctggagagtgcaccagcccggctgcaagcccctgagcaccttcagacagaacagcctgggctgcatcggcgagtgcggcgtggacagcggcttcgaggcccccagactgggcgagcagggcggcgacttcggctacggcggctacctgttccccggctacggcgtgggcaagcaggacgtgtactacggcgtggccgagaccagcccccccctgtgggccggccaggagaacgccacccccaccagcgtgctgttcagcagcgccagcagcagcagcagcagcagcgccaaggccagagccggcccccccggcgcccacagaagccccgccaccagcgccggccccgagctggccggcctgcccagaagaccccccggcgagcccctgcagggcttcagcaagctgggcggcggcggcctgagaagccccggcggcggcagagactgcatggtgtgcttcgagagcgaggtgaccgccgccctggtgccctgcggccacaacctgttctgcatggagtgcgccgtgagaatctgcgagagaaccgaccccgagtgccccgtgtgccacatcaccgccacccaggccatcagaatcttcagctag

SEQ ID NO: 88816 - DNA, 1710 bp, synthetic construct
  misc_feature 1..1710: note = Description of Artificial Sequence: Synthetic coding sequence
  source 1..1710: mol_type = other DNA
atgcccagcagcctgttcgccgacctggagagaaacggcagcggcggcggcggcggcggcagcagcggcggcggcgagaccctggacgaccagagagccctgcagctggccctggaccagctgagcctgctgggcctggacagcgacgagggcgccagcctgtacgacagcgagcccagaaagaagagcgtgaacatgaccgagtgcgtgcccgtgcccagcagcgagcacgtggccgagatcgtgggcagacagggctgcaagatcaaggccctgagagccaagaccaacacctacatcaagacccccgtgagaggcgaggagcccgtgttcgtggtgaccggcagaaaggaggacgtggccatggccagaagagagatcatcagcgccgccgagcacttcagcatgatcagagccagcagaaacaagaacaccgccctgaacggcgccgtgcccggcccccccaacctgcccggccagaccaccatccaggtgagagtgccctacagagtggtgggcctggtggtgggccccaagggcgccaccatcaagagaatccagcagcagacccacacctacatcgtgacccccagcagagacaaggagcccgtgttcgaggtgaccggcatgcccgagaacgtggacagagccagagaggagatcgaggcccacatcgccctgagaaccggcggcatcatcgagctgaccgacgagaacgacttccacgccaacggcaccgacgtgggcttcgacctgcaccacggcagcggcggcagcggccccggcagcctgtggagcaagcccacccccagcatcacccccacccccggcagaaagcccttcagcagctacagaaacgacagcagcagcagcctgggcagcgccagcaccgacagctacttcggcggcggcaccagcagcagcgccgccgccacccagagactggccgactacagcccccccagccccgccctgagcttcgcccacaacggcaacaacaacaacaacggcaacggctacacctacaccgccggcggcgaggccagcgtgcccagccccgacggctgccccgagctgcagcccaccttcgaccccgcccccgcccccccccccggcgcccccctgatctgggcccagttcgagagaagccccggcggcggccccgccgcccccgtgagcagcagctgcagcagcagcgccagcagcagcgccagcagcagcagcgtggtgttccccggcggcggcgccagcgcccccagcaacgccaacctgggcctgctggtgcacagaagactgcaccccggcaccagctgccccagactgagcccccccctgcacatggcccccggcgccggcgagcaccacctggccagaagagtgagaagcgaccccggcggcggcggcctggcctacgccgcctacgccaacggcctgggcgcccagctgcccggcctgcagcccagcgacaccagcggcagcagcagcagcagcagcagcagcagcagcagcagcagcagcagcagcggcctgagaagaaagggcagcagagactgcagcgtgtgcttcgagagcgaggtgatcgccgccctggtgccctgcggccacaacctgttctgcatggagtgcgccaacagaatctgcgagaagagcgagcccgagtgccccgtgtgccacaccgccgtgacccaggccatcagaatcttcagctag

SEQ ID NO: 88817 - DNA, 1980 bp, synthetic construct
  misc_feature 1..1980: note = Description of Artificial Sequence: Synthetic coding sequence
  source 1..1980: mol_type = other DNA
atgcccagcggcagcagcgccgccctggccctggccgccgcccccgcccccctgccccagcccccccccccccccccccccccccccccccccctgcccccccccagcggcggccccgagctggagggcgacggcctgctgctgagagagagactggccgccctgggcctggacgaccccagccccgccgagcccggcgcccccgccctgagagcccccgccgccgccgcccagggccaggccagaagagccgccgagctgagccccgaggagagagccccccccggcagacccggcgcccccgaggccgccgagctggagctggaggaggacgaggaggagggcgaggaggccgagctggacggcgacctgctggaggaggaggagctggaggaggccgaggaggaggacagaagcagcctgctgctgctgagcccccccgccgccaccgccagccagacccagcagatccccggcggcagcctgggcagcgtgctgctgcccgccgccagattcgacgccagagaggccgccgccgccgccgccgccgccggcgtgctgtacggcggcgacgacgcccagggcatgatggccgccatgctgagccacgcctacggccccggcggctgcggcgccgccgccgccgccctgaacggcgagcaggccgccctgctgagaagaaagagcgtgaacaccaccgagtgcgtgcccgtgcccagcagcgagcacgtggccgagatcgtgggcagacagggctgcaagatcaaggccctgagagccaagaccaacacctacatcaagacccccgtgagaggcgaggagcccatcttcgtggtgaccggcagaaaggaggacgtggccatggccaagagagagatcctgagcgccgccgagcacttcagcatgatcagagccagcagaaacaagaacggccccgccctgggcggcctgagctgcagccccaacctgcccggccagaccaccgtgcaggtgagagtgccctacagagtggtgggcctggtggtgggccccaagggcgccaccatcaagagaatccagcagcagacccacacctacatcgtgacccccagcagagacaaggagcccgtgttcgaggtgaccggcatgcccgagaacgtggacagagccagagaggagatcgagatgcacatcgccatgagaaccggcaactacatcgagctgaacgaggagaacgacttccactacaacggcaccgacgtgagcttcgagggcggcaccctgggcagcgcctggctgagcagcaaccccgtgccccccagcagagccagaatgatcagcaactacagaaacgacagcagcagcagcctgggcagcggcagcaccgacagctacttcggcagcaacagactggccgacttcagccccaccagccccttcagcaccggcaacttctggttcggcgacaccctgcccagcgtgggcagcgaggacctggccgtggacagccccgccttcgacagcctgcccaccagcgcccagaccatctggacccccttcgagcccgtgaaccccctgagcggcttcggcagcgaccccagcggcaacatgaagacccagagaagaggcagccagcccagcacccccagactgagccccaccttccccgagagcatcgagcaccccctggccagaagagtgagaagcgacccccccagcaccggcaaccacgtgggcctgcccatctacatccccgccttcagcaacggcaccaacagctacagcagcagcaacggcggcagcaccagcagcagcccccccgagagcagaagaaagcacgactgcgtgatctgcttcgagaacgaggtgatcgccgccctggtgccctgcggccacaacctgttctgcatggagtgcgccaacaagatctgcgagaagagaacccccagctgccccgtgtgccagaccgccgtgacccaggccatccagatccacagctag

SEQ ID NO: 88818 - DNA, 498 bp, synthetic construct
  misc_feature 1..498: note = Description of Artificial Sequence: Synthetic coding sequence
  source 1..498: mol_type = other DNA
tggagatggaccagctgcagaagaagcggctggggcgccctggccaccagaaccagaagaggcagacccggcaccccccccccccccagacccagcccccccgacgtgttcgccggcttcgccccccaccccgccgccctgggcccccccaccctgctggccgaccagatgagcgtgatcggcagcagaaagaagagcgtgaacatgaccgagtgcgtgcccgtgcccagcagcgagcacgtggccgagatcgtgggcagacagggctgcaagatcaaggccctgagagccaagaccaacacctacatcaagacccccgtgagaggcgaggagcccgtgttcatcgtgaccggcagaaaggaggacgtggagatggccaagagagagatcctgagcgccgccgagcacttcagcatcatcagagccaccagaagcaaggccggcggcctgcccggcgccgcccagggcccccccaacctgcccggccagaccacctag

SEQ ID NO: 88819 - DNA, 2001 bp, synthetic construct
  misc_feature 1..2001: note = Description of Artificial Sequence: Synthetic coding sequence
  source 1..2001: mol_type = other DNA
atgcccagcagcctgggccagcccgacggcggcggcggcggcggcggcggcggcggcggcgtgggcgccgccggcgaggaccccggccccggccccgcccccccccccgagggcgcccaggaggccgcccccgcccccagacccccccccgagcccgacgacgccgccgccgccctgagactggccctggaccagctgagcgccctgggcctgggcggcgccggcgacaccgacgaggagggcgccgccggcgacggcgccgccgccgccggcggcgccgacggcggcgccgcccccgagcccgtgccccccgacggccccgaggccggcgccccccccaccctggcccccgccgtggcccccggcagcctgcccctgctggaccccaacgccagccccccccccccccccccccccagacccagcccccccgacgtgttcgccggcttcgccccccaccccgccgccctgggcccccccaccctgctggccgaccagatgagcgtgatcggcagcagaaagaagagcgtgaacatgaccgagtgcgtgcccgtgcccagcagcgagcacgtggccgagatcgtgggcagacagggctgcaagatcaaggccctgagagccaagaccaacacctacatcaagacccccgtgagaggcgaggagcccgtgttcatcgtgaccggcagaaaggaggacgtggagatggccaagagagagatcctgagcgccgccgagcacttcagcatcatcagagccaccagaagcaaggccggcggcctgcccggcgccgcccagggcccccccaacctgcccggccagaccaccatccaggtgagagtgccctacagagtggtgggcctggtggtgggccccaagggcgccaccatcaagagaatccagcagagaacccacacctacatcgtgacccccggcagagacaaggagcccgtgttcgccgtgaccggcatgcccgagaacgtggacagagccagagaggagatcgaggcccacatcaccctgagaaccggcgccttcaccgacgccggccccgacagcgacttccacgccaacggcaccgacgtgtgcctggacctgctgggcgccgccgccagcctgtgggccaagacccccaaccagggcagaagaccccccaccgccaccgccggcctgagaggcgacaccgccctgggcgcccccagcgcccccgaggccttctacgccggcagcagaggcggccccagcgtgcccgaccccggccccgccagcccctacagcggcagcggcaacggcggcttcgccttcggcgccgagggccccggcgcccccgtgggcaccgccgcccccgacgactgcgacttcggcttcgacttcgacttcctggccctggacctgaccgtgcccgccgccgccaccatctgggcccccttcgagagagccgcccccctgcccgccttcagcggctgcagcaccgtgaacggcgcccccggcccccccgccgccggcgccagaagaagcagcggcgccggcacccccagacacagccccaccctgcccgagcccggcggcctgagactggagctgcccctgagcagaagaggcgcccccgaccccgtgggcgccctgagctggagacccccccagggccccgtgagcttccccggcggcgccgccttcagcaccgccaccagcctgcccagcagccccgccgccgccgcctgcgcccccctggacagcggcgccagcgagaacagcagaaagccccccagcgccagcagcgcccccgccctggccagagagtgcgtggtgtgcgccgagggcgaggtgatggccgccctggtgccctgcggccacaacctgttctgcatggactgcgccgtgagaatctgcggcaagagcgagcccgagtgccccgcctgcagaacccccgccacccaggccatcagagtggagaccgagaccccccagcccggcggcgccagcgccctgcagagacagtactag

SEQ ID NO: 88820 - DNA, 1956 bp, synthetic construct
  misc_feature 1..1956: note = Description of Artificial Sequence: Synthetic coding sequence
  source 1..1956: mol_type = other DNA
atgcccagcagcctgggccagcccgacggcggcggcggcggcggcggcggcggcggcggcgtgggcgccgccggcgaggaccccggccccggccccgcccccccccccgagggcgcccaggaggccgcccccgcccccagacccccccccgagcccgacgacgccgccgccgccctgagactggccctggaccagctgagcgccctgggcctgggcggcgccggcgacaccgacgaggagggcgccgccggcgacggcgccgccgccgccggcggcgccgacggcggcgccgcccccgagcccgtgccccccgacggccccgaggccggcgccccccccaccctggcccccgccgtggcccccggcagcctgcccctgctggaccccaacgccagccccccccccccccccccccccagacccagcccccccgacgtgttcgccggcttcgccccccaccccgccgccctgggcccccccaccctgctggccgaccagatgagcgtgatcggcagcagaaagaagagcgtgaacatgaccgagtgcgtgcccgtgcccagcagcgagcacgtggccgagatcgtgggcagacagggctgcaagatcaaggccctgagagccaagaccaacacctacatcaagacccccgtgagaggcgaggagcccgtgttcatcgtgaccggcagaaaggaggacgtggagatggccaagagagagatcctgagcgccgccgagcacttcagcatcatcagagccaccagaagcaaggccggcggcctgcccggcgccgcccagggcccccccaacctgcccggccagaccaccatccaggtgagagtgccctacagagtggtgggcctggtggtgggccccaagggcgccaccatcaagagaatccagcagagaacccacacctacatcgtgacccccggcagagacaaggagcccgtgttcgccgtgaccggcatgcccgagaacgtggacagagccagagaggagatcgaggcccacatcaccctgagaaccggcgccttcaccgacgccggccccgacagcgacttccacgccaacggcaccgacgtgtgcctggacctgctgggcgccgccgccagcctgtgggccaagacccccaaccagggcagaagaccccccaccgccaccgccggcctgagaggcgacaccgccctgggcgcccccagcgcccccgaggccttctacgccggcagcagaggcggccccagcgtgcccgaccccggccccgccagcccctacagcggcagcggcaacggcggcttcgccttcggcgccgagggccccggcgcccccgtgggcaccgccgcccccgacgactgcgacttcggcttcgacttcgacttcctggccctggacctgaccgtgcccgccgccgccaccatctgggcccccttcgagagagccgcccccctgcccgccttcagcggctgcagcaccgtgaacggcgcccccggcccccccgccgccggcgccagaagaagcagcggcgccggcacccccagacacagccccaccctgcccgagcccggcggcctgagactggagctgcccctgagcagaagaggcgcccccgaccccgtgggcgccctgagctggagacccccccagggccccgtgagcttccccggcggcgccgccttcagcaccgccaccagcctgcccagcagccccgccgccgccgcctgcgcccccctggacagcggcgccagcgagaacagcagaaagccccccagcgccagcagcgcccccgccctggccagagagtgcgtggtgtgcgccgagggcgaggtgatggccgccctggtgccctgcggccacaacctgttctgcatggactgcgccgtgagaatctgcggcaagagcgagcccgagtgccccgcctgcagaacccccgccacccaggccatccacatcttcagctag

SEQ ID NO: 88821 - DNA, 966 bp, synthetic construct
  misc_feature 1..966: note = Description of Artificial Sequence: Synthetic coding sequence
  source 1..966: mol_type = other DNA
atgcagtgcagactgcccagaggcctggccggcgccctgctgaccctgctgtgcatgggcctgctgtgcctgagataccacctgaacctgagcccccagagagtgcagggcacccccgagctgagccagcccaaccccggcccccccaagctgcagctgcacgacgtgttcatcgccgtgaagaccaccagagccttccacagactgagactggagctgctgctggacacctgggtgagcagaaccagagagcagaccttcgtgttcaccgacagccccgacaagggcctgcaggagagactgggcagccacctggtggtgaccaactgcagcgccgagcacagccaccccgccctgagctgcaagatggccgccgagttcgacaccttcctggccagcggcctgagatggttctgccacgtggacgacgacaactacgtgaaccccagagccctgctgcagctgctgagagccttccccctggccagagacgtgtacgtgggcagacccagcctgaacagacccatccacgccagcgagccccagccccacaacagaaccagactggtgcagttctggttcgccaccggcggcgccggcttctgcatcaacagaaagctggccctgaagatggccccctgggccagcggcagcagattcatggacaccagcgccctgatcagactgcccgacgactgcaccatgggctacatcatcgagtgcaagctgggcggcagactgcagcccagccccctgttccacagccacctggagaccctgcagctgctgagaaccgcccagctgcccgagcaggtgaccctgagctacggcgtgttcgagggcaagctgaacgtgatcaagctgcagggccccttcagccccgaggaggaccccagcagattcagaagcctgcactgcctgctgtaccccgacaccccctggtgcccccagctgggcgccagatag

SEQ ID NO: 88822 - DNA, 924 bp, synthetic construct
  misc_feature 1..924: note = Description of Artificial Sequence: Synthetic coding sequence
  source 1..924: mol_type = other DNA
atgcagtgcagactgcccagaggcctggccggcgccctgctgaccctgctgtgcatgggcctgctgtgcctgagataccacctgaacctgagcccccagagagtgcagggcacccccgagctgagccagcccaaccccggcccccccaagctgcagctgcacgacgtgttcatcgccgtgaagaccaccagagccttccacagactgagactggagctgctgctggacacctgggtgagcagaaccagagagcaggtgaccagaagccacctggtggtgaccaactgcagcgccgagcacagccaccccgccctgagctgcaagatggccgccgagttcgacaccttcctggccagcggcctgagatggttctgccacgtggacgacgacaactacgtgaaccccagagccctgctgcagctgctgagagccttccccctggccagagacgtgtacgtgggcagacccagcctgaacagacccatccacgccagcgagccccagccccacaacagaaccagactggtgcagttctggttcgccaccggcggcgccggcttctgcatcaacagaaagctggccctgaagatggccccctgggccagcggcagcagattcatggacaccagcgccctgatcagactgcccgacgactgcaccatgggctacatcatcgagtgcaagctgggcggcagactgcagcccagccccctgttccacagccacctggagaccctgcagctgctgagaaccgcccagctgcccgagcaggtgaccctgagctacggcgtgttcgagggcaagctgaacgtgatcaagctgcagggccccttcagccccgaggaggaccccagcagattcagaagcctgcactgcctgctgtaccccgacaccccctggtgcccccagctgggcgccagatag

SEQ ID NO: 88823 - DNA, 357 bp, synthetic construct
  misc_feature 1..357: note = Description of Artificial Sequence: Synthetic coding sequence
  source 1..357: mol_type = other DNA
atgcagtgcagactgcccagaggcctggccggcgccctgctgaccctgctgtgcatgggcctgctgtgcctgagataccacctgaacctgagcccccagagagtgcagggcacccccgagctgagccagcccaaccccggcccccccaagctgcagctgcacgacgtgttcatcgccgtgaagaccaccagagccttccacagactgagactggagctgctgctggacacctgggtgagcagaaccagagagcagaccttcgtgttcaccgacagccccgacaagggcctgcaggagagactgggcagccccgacagcagcagcctgctgcagggccccaccctgtggagcccctag

SEQ ID NO: 88824 - DNA, 399 bp, synthetic construct
  misc_feature 1..399: note = Description of Artificial Sequence: Synthetic coding sequence
  source 1..399: mol_type = other DNA
atggccgccgagttcgacaccttcctggccagcggcctgagatggttctgccacgtggacgacgacaactacgtgaaccccagagccctgctgcagctgctgagagccttccccctggccagagacgtgtacgtgggcagacccagcctgaacagacccatccacgccagcgagccccagccccacaacagaaccagactggtgcagttctggttcgccaccggcggcgccggcttctgcatcaacagaaagctggccctgaagatggccccctgggccagcggcagcagattcatggacaccagcgccctgatcagactgcccgacgactgcaccatgggctacatcatcgagtgcaagctgggcggcagactgcagcccagccccctgttccactag

SEQ ID NO: 88825 - DNA, 132 bp, synthetic construct
  misc_feature 1..132: note = Description of Artificial Sequence: Synthetic coding sequence
  source 1..132: mol_type = other DNA
atggccgccgagttcgacaccttcctggccagcggcctgagatggttctgccacgtggacgacgacaactacgtgaaccccagagccctgctgcagctgctgagagccttccccctggccagagacgtgtag

SEQ ID NO: 88826 - DNA, 264 bp, synthetic construct
  misc_feature 1..264: note = Description of Artificial Sequence: Synthetic coding sequence
  source 1..264: mol_type = other DNA
tgaagccacctggagaccctgcagctgctgagaaccgcccagctgcccgagcagatcagcctgccccccctgagcgccctgagcagatacaccctggtgagccccgccggctgccccatgaaccccgagctgctgggcaagggctgggccgagaccagcggctgcgccctggcccccaaggtggccctgtgggtgcccggcaagtgcctggtgatcggcagcccctggcagggcctgagagtggtgggcaagcccagaatctag

SEQ ID NO: 88827 - DNA, 999 bp, synthetic construct
  misc_feature 1..999: note = Description of Artificial Sequence: Synthetic coding sequence
  source 1..999: mol_type = other DNA
atgggcctgggccccgtgttcctgctgctggccggcatcttccccttcgccccccccggcgccgccgccgagccccacagcctgagatacaacctgaccgtgctgagctgggacggcagcgtgcagagcggcttcctggccgaggtgcacctggacggccagcccttcctgagatacgacagacagaagtgcagagccaagccccagggccagtgggccgaggacgtgctgggcaacaagacctgggacagagagaccagagacctgaccggcaacggcaaggacctgagaatgaccctggcccacatcaaggaccagaaggagggcctgcacagcctgcaggagatcagagtgtgcgagatccacgaggacaacagcaccagaagcagccagcacttctactacgacggcgagctgttcctgagccagaacctggagaccgaggagtggaccgtgccccagagcagcagagcccagaccctggccatgaacgtgagaaacttcctgaaggaggacgccatgaagaccaagacccactaccacgccatgcacgccgactgcctgcaggagctgagaagatacctggagagcggcgtggtgctgagaagaaccgtgccccccatggtgaacgtgaccagaagcgaggccagcgagggcaacatcaccgtgacctgcagagccagcagcttctaccccagaaacatcatcctgacctggagacaggacggcgtgagcctgagccacgacacccagcagtggggcgacgtgctgcccgacggcaacggcacctaccagacctgggtggccaccagaatctgcagaggcgaggagcagagattcacctgctacatggagcacagcggcaaccacagcacccaccccgtgcccagcggcaaggtgctggtgctgcagagccactggcagaccttccacgtgagcgccgtggccgccggctgctgctacttctgctactactacttcctgtgccccctgctgtag

SEQ ID NO: 88828 - DNA, 585 bp, synthetic construct
  misc_feature 1..585: note = Description of Artificial Sequence: Synthetic coding sequence
  source 1..585: mol_type = other DNA
atgggccagagagaccagggcctggacagagagagaaagggcccccaggacgaccccggcagctaccagggccccgagagaagaaacttcctgaaggaggacgccatgaagaccaagacccactaccacgccatgcacgccgactgcctgcaggagctgagaagatacctggagagcggcgtggtgctgagaagaaccgtgccccccatggtgaacgtgaccagaagcgaggccagcgagggcaacatcaccgtgacctgcagagccagcagcttctaccccagaaacatcatcctgacctggagacaggacggcgtgagcctgagccacgacacccagcagtggggcgacgtgctgcccgacggcaacggcacctaccagacctgggtggccaccagaatctgcagaggcgaggagcagagattcacctgctacatggagcacagcggcaaccacagcacccaccccgtgcccagcggcaaggtgctggtgctgcagagccactggcagaccttccacgtgagcgccgtggccgccggctgctgctacttctgctactactacttcctgtgccccctgctgtag

SEQ ID NO: 88829 - DNA, 870 bp, synthetic construct
  misc_feature 1..870: note = Description of Artificial Sequence: Synthetic coding sequence
  source 1..870: mol_type = other DNA
atgggcctgggccccgtgttcctgctgctggccggcatcttccccttcgccccccccggcgccgccgccgagccccacagcctgagatacaacctgaccgtgctgagctgggacggcagcgtgcagagcggcttcctggccgaggtgcacctggacggccagcccttcctgagatacgacagacagaagtgcagagccaagccccagggccagtgggccgaggacgtgctgggcaacaagacctgggacagagagaccagagacctgaccggcaacggcaaggacctgagaatgaccctggcccacatcaaggaccagaaggaggtgccccagagcagcagagcccagaccctggccatgaacgtgagaaacttcctgaaggaggacgccatgaagaccaagacccactaccacgccatgcacgccgactgcctgcaggagctgagaagatacctggagagcggcgtggtgctgagaagaaccgtgccccccatggtgaacgtgaccagaagcgaggccagcgagggcaacatcaccgtgacctgcagagccagcagcttctaccccagaaacatcatcctgacctggagacaggacggcgtgagcctgagccacgacacccagcagtggggcgacgtgctgcccgacggcaacggcacctaccagacctgggtggccaccagaatctgcagaggcgaggagcagagattcacctgctacatggagcacagcggcaaccacagcacccaccccgtgcccagcggcaaggtgctggtgctgcagagccactggcagaccttccacgtgagcgccgtggccgccggctgctgctacttctgctactactacttcctgtgccccctgctgtag

SEQ ID NO: 88830 - DNA, 738 bp, synthetic construct
  misc_feature 1..738: note = Description of Artificial Sequence: Synthetic coding sequence
  source 1..738: mol_type = other DNA
atgggccagagagaccagagactggacagagagagaaagggcccccaggacgaccccggcagctaccagggccccgagagaagaaacttcctgaaggaggacgccatgaagaccaagacccactaccacgccatgcacgccgactgcctgcaggagctgagaagatacctgaagagcggcgtggtgctgagaagaaccgtgccccccatggtgaacgtgaccagaagcgaggccagcgagggcaacatcaccgtgacctgcagagccagcggcttctacccctggaacatcaccctgagctggagacaggacggcgtgagcctgagccacgacacccagcagtggggcgacgtgctgcccgacggcaacggcacctaccagacctgggtggccaccagaatctgccagggcgaggagcagagattcacctgctacatggagcacagcggcaaccacagcacccaccccgtgcccagcggcaaggtgctggtgctgcagagccactggcagaccttccacgtgagcgccgtggccgccgccgccatcttcgtgatcatcatcttctacgtgagatgctgcaagaagaagaccagcgccgccgagggccccgagctggtgagcctgcaggtgctggaccagcaccccgtgggcaccagcgaccacagagacgccacccagctgggcttccagcccctgatgagcgacctgggcagcaccggcagcaccgagggcgcctag

SEQ ID NO: 88831 - DNA, 1152 bp, synthetic construct
  misc_feature 1..1152: note = Description of Artificial Sequence: Synthetic coding sequence
  source 1..1152: mol_type = other DNA
atgggcctgggccccgtgttcctgctgctggccggcatcttccccttcgccccccccggcgccgccgccgagccccacagcctgagatacaacctgaccgtgctgagctgggacggcagcgtgcagagcggcttcctgaccgaggtgcacctggacggccagcccttcctgagatgcgacagacagaagtgcagagccaagccccagggccagtgggccgaggacgtgctgggcaacaagacctgggacagagagaccagagacctgaccggcaacggcaaggacctgagaatgaccctggcccacatcaaggaccagaaggagggcctgcacagcctgcaggagatcagagtgtgcgagatccacgaggacaacagcaccagaagcagccagcacttctactacgacggcgagctgttcctgagccagaacctggagaccaaggagtggaccatgccccagagcagcagagcccagaccctggccatgaacgtgagaaacttcctgaaggaggacgccatgaagaccaagacccactaccacgccatgcacgccgactgcctgcaggagctgagaagatacctgaagagcggcgtggtgctgagaagaaccgtgccccccatggtgaacgtgaccagaagcgaggccagcgagggcaacatcaccgtgacctgcagagccagcggcttctacccctggaacatcaccctgagctggagacaggacggcgtgagcctgagccacgacacccagcagtggggcgacgtgctgcccgacggcaacggcacctaccagacctgggtggccaccagaatctgccagggcgaggagcagagattcacctgctacatggagcacagcggcaaccacagcacccaccccgtgcccagcggcaaggtgctggtgctgcagagccactggcagaccttccacgtgagcgccgtggccgccgccgccatcttcgtgatcatcatcttctacgtgagatgctgcaagaagaagaccagcgccgccgagggccccgagctggtgagcctgcaggtgctggaccagcaccccgtgggcaccagcgaccacagagacgccacccagctgggcttccagcccctgatgagcgacctgggcagcaccggcagcaccgagggcgcctag

SEQ ID NO: 88832 - DNA, 870 bp, synthetic construct; identical to SEQ ID NO: 88829
  misc_feature 1..870: note = Description of Artificial Sequence: Synthetic coding sequence
  source 1..870: mol_type = other DNA

SEQ ID NO: 88833 - DNA, 999 bp, synthetic construct; identical to SEQ ID NO: 88827
  misc_feature 1..999: note = Description of Artificial Sequence: Synthetic coding sequence
  source 1..999: mol_type = other DNA

SEQ ID NO: 88834 - DNA, 585 bp, synthetic construct; identical to SEQ ID NO: 88828
  misc_feature 1..585: note = Description of Artificial Sequence: Synthetic coding sequence
  source 1..585: mol_type = other DNA

SEQ ID NO: 88835 - DNA, 831 bp, synthetic construct
  misc_feature 1..831: note = Description of Artificial Sequence: Synthetic coding sequence
  source 1..831: mol_type = other DNA
ttccccttcgccccccccggcgccgccgccgagccccacagcctgagatacaacctgaccgtgctgagctgggacggcagcgtgcagagcggcttcctggccgaggtgcacctggacggccagcccttcctgagatacgacagacagaagtgcagagccaagccccagggccagtgggccgaggacgtgctgggcaacaagacctgggacagagagaccagagacctgaccggcaacggcaaggacctgagaatgaccctggcccacatcaaggaccagaaggaggtgccccccatggtgaacgtgaccagaagcgaggccagcgagggcaacatcaccgtgacctgcagagccagcagcttctaccccagaaacatcaccctgacctggagacaggacggcgtgagcctgagccacgacacccagcagtggggcgacgtgctgcccgacggcaacggcacctaccagacctgggtggccaccagaatctgccagggcgaggagcagagattcacctgctacatggagcacagcggcaaccacagcacccaccccgtgcccagcggcaaggtgctggtgctgcagagccactggcagaccttccacgtgagcgccgtggccgccgccgccgccgccatcttcgtgatcatcatcttctacgtgagatgctgcaagaagaagaccagcgccgccgagggccccgagctggtgagcctgcaggtgctggaccagcaccccgtgggcaccagcgaccacagagacgccacccagctgggcttccagcccctgatgagcgccctgggcagcaccggcagcaccgagggcgcctag

SEQ ID NO: 88836 - DNA, 1158 bp, synthetic construct
  misc_feature 1..1158: note = Description of Artificial Sequence: Synthetic coding sequence
  source 1..1158: mol_type = other DNA
atgggcctgggccccgtgttcctgctgctggccggcatcttccccttcgccccccccggcgccgccgccgagccccacagcctgagatacaacctgaccgtgctgagctgggacggcagcgtgcagagcggcttcctggccgaggtgcacctggacggccagcccttcctgagatacgacagacagaagtgcagagccaagccccagggccagtgggccgaggacgtgctgggcaacaagacctgggacagagagaccagagacctgaccggcaacggcaaggacctgagaatgaccctggcccacatcaaggaccagaaggagggcctgcacagcctgcaggagatcagagtgtgcgagatccacgaggacaacagcaccagaagcagccagcacttctactacgacggcgagctgttcctgagccagaacgtggagaccgaggagtggaccgtgccccagagcagcagagcccagaccctggccatgaacgtgagaaacttcctgaaggaggacgccatgaagaccaagacccactaccacgccatgcacgccgactgcctgcaggagctgagaagatacctggagagcagcgtggtgctgagaagaagagtgccccccatggtgaacgtgaccagaagcgaggccagcgagggcaacatcaccgtgacctgcagagccagcagcttctaccccagaaacatcaccctgacctggagacaggacggcgtgagcctgagccacgacacccagcagtggggcgacgtgctgcccgacggcaacggcacctaccagacctgggtggccaccagaatctgccagggcgaggagcagagattcacctgctacatggagcacagcggcaaccacagcacccaccccgtgcccagcggcaaggtgctggtgctgcagagccactggcagaccttccacgtgagcgccgtggccgccgccgccgccgccatcttcgtgatcatcatcttctacgtgagatgctgcaagaagaagaccagcgccgccgagggccccgagctggtgagcctgcaggtgctggaccagcaccccgtgggcaccagcgaccacagagacgccacccagctgggcttccagcccctgatgagcgccctgggcagcaccggcagcaccgagggcgcctag

SEQ ID NO: 88837 - DNA, 744 bp, synthetic construct
  misc_feature 1..744: note = Description of Artificial Sequence: Synthetic coding sequence
  source 1..744: mol_type = other DNA
atgggccagagagaccagggcctggacagagagagaaagggcccccaggacgaccccggcagctaccagggccccgagagaagaaacttcctgaaggaggacgccatgaagaccaagacccactaccacgccatgcacgccgactgcctgcaggagctgagaagatacctggagagcagcgtggtgctgagaagaagagtgccccccatggtgaacgtgaccagaagcgaggccagcgagggcaacatcaccgtgacctgcagagccagcagcttctaccccagaaacatcaccctgacctggagacaggacggcgtgagcctgagccacgacacccagcagtggggcgacgtgctgcccgacggcaacggcacctaccagacctgggtggccaccagaatctgccagggcgaggagcagagattcacctgctacatggagcacagcggcaaccacagcacccaccccgtgcccagcggcaaggtgctggtgctgcagagccactggcagaccttccacgtgagcgccgtggccgccgccgccgccgccatcttcgtgatcatcatcttctacgtgagatgctgcaagaagaagaccagcgccgccgagggccccgagctggtgagcctgcaggtgctggaccagcaccccgtgggcaccagcgaccacagagacgccacccagctgggcttccagcccctgatgagcgccctgggcagcaccggcagcaccgagggcgcctag

SEQ ID NO: 88838 - DNA, 672 bp, synthetic construct
  misc_feature 1..672: note = Description of Artificial Sequence: Synthetic coding sequence
  source 1..672: mol_type = other DNA
ttccccttcgccccccccggcgccgccgccgagccccacagcctgagatacaacctgaccgtgctgagctgggacggcagcgtgcagagcggcttcctggccgaggtgcacctggacggccagcccttcctgagatacgacagacagaagtgcagagccaagccccagggccagtgggccgaggacgtgctgggcaacaagacctgggacagagagaccagagacctgaccggcaacggcaaggacctgagaatgaccctggcccacatcaaggaccagaaggaggtgccccccatggtgaacgtgaccagaagcgaggccagcgagggcaacatcaccgtgacctgcagagccagcagcttctaccccagaaacatcatcctgacctggagacaggacggcgtgagcctgagccacgacacccagcagtggggcgacgtgctgcccgacggcaacggcacctaccagacctgggtggccaccagaatctgcagaggcgaggagcagagattcacctgctacatggagcacagcggcaaccacagcacccaccccgtgcccagcggcaaggtgctggtgctgcagagccactggcagaccttccacgtgagcgccgtggccgccggctgctgctacttctgctactactacttcctgtgccccctgctgtag

SEQ ID NO: 88839 - DNA, 672 bp, synthetic construct; identical to SEQ ID NO: 88838
  misc_feature 1..672: note = Description of Artificial Sequence: Synthetic coding sequence
  source 1..672: mol_type = other DNA

SEQ ID NO: 88840 - DNA, 672 bp, synthetic construct; identical to SEQ ID NO: 88838
  misc_feature 1..672: note = Description of Artificial Sequence: Synthetic coding sequence
  source 1..672: mol_type = other DNA

SEQ ID NO: 88841 - DNA, 999 bp, synthetic construct; identical to SEQ ID NO: 88827
  misc_feature 1..999: note = Description of Artificial Sequence: Synthetic coding sequence
  source 1..999: mol_type = other DNA

SEQ ID NO: 88842 - DNA, 1029 bp, synthetic construct
  misc_feature 1..1029: note = Description of Artificial Sequence: Synthetic coding sequence
  source 1..1029: mol_type = other DNA
atgggcctgggccccgtgttcctgctgctggccggcatcttccccttcgccccccccggcgccgccgccgagccccacagcctgagatacaacctgaccgtgctgagctgggacggcagcgtgcagagcggcttcctggccgaggtgcacctggacggccagcccttcctgagatacgacagacagaagtgcagagccaagccccagggccagtgggccgaggacgtgctgggcaacaagacctgggacagagagaccagagacctgaccggcaacggcaaggacctgagaatgaccctggcccacatcaaggaccagaaggaggtgccccagagcagcagagcccagaccctggccatgaacgtgagaaacttcctgaaggaggacgccatgaagaccaagacccactaccacgccatgcacgccgactgcctgcaggagctgagaagatacctggagagcagcgtggtgctgagaagaagagtgccccccatggtgaacgtgaccagaagcgaggccagcgagggcaacatcaccgtgacctgcagagccagcagcttctaccccagaaacatcaccctgacctggagacaggacggcgtgagcctgagccacgacacccagcagtggggcgacgtgctgcccgacggcaacggcacctaccagacctgggtggccaccagaatctgccagggcgaggagcagagattcacctgctacatggagcacagcggcaaccacagcacccaccccgtgcccagcggcaaggtgctggtgctgcagagccactggcagaccttccacgtgagcgccgtggccgccgccgccgccgccatcttcgtgatcatcatcttctacgtgagatgctgcaagaagaagaccagcgccgccgagggccccgagctggtgagcctgcaggtgctggaccagcaccccgtgggcaccagcgaccacagagacgccacccagctgggcttccagcccctgatgagcgccctgggcagcaccggcagcaccgagggcgcctag

SEQ ID NO: 88843 - DNA, 825 bp, synthetic construct
  misc_feature 1..825: note = Description of Artificial Sequence: Synthetic coding sequence
  source 1..825: mol_type = other DNA
ttccccttcgccccccccggcgccgccgccgagccccacagcctgagatacaacctgaccgtgctgagctgggacggcagcgtgcagagcggcttcctgaccgaggtgcacctggacggccagcccttcctgagatgcgacagacagaagtgcagagccaagccccagggccagtgggccgaggacgtgctgggcaacaagacctgggacagagagaccagagacctgaccggcaacggcaaggacctgagaatgaccctggcccacatcaaggaccagaaggaggtgccccccatggtgaacgtgaccagaagcgaggccagcgagggcaacatcaccgtgacctgcagagccagcggcttctacccctggaacatcaccctgagctggagacaggacggcgtgagcctgagccacgacacccagcagtggggcgacgtgctgcccgacggcaacggcacctaccagacctgggtggccaccagaatctgccagggcgaggagcagagattcacctgctacatggagcacagcggcaaccacagcacccaccccgtgcccagcggcaaggtgctggtgctgcagagccactggcagaccttccacgtgagcgccgtggccgccgccgccatcttcgtgatcatcatcttctacgtgagatgctgcaagaagaagaccagcgccgccgagggccccgagctggtgagcctgcaggtgctggaccagcaccccgtgggcaccagcgaccacagagacgccacccagctgggcttccagcccctgatgagcgacctgggcagcaccggcagcaccgagggcgcctag

SEQ ID NO: 88844 - DNA, 585 bp, synthetic construct; identical to SEQ ID NO: 88828
  misc_feature 1..585: note = Description of Artificial Sequence: Synthetic coding sequence
  source 1..585: mol_type = other DNA

SEQ ID NO: 88845 - DNA, 870 bp, synthetic construct; identical to SEQ ID NO: 88829
  misc_feature 1..870: note = Description of Artificial Sequence: Synthetic coding sequence
  source 1..870: mol_type = other DNA

SEQ ID NO: 88846 - DNA, 999 bp, synthetic construct; identical to SEQ ID NO: 88827
  misc_feature 1..999: note = Description of Artificial Sequence: Synthetic coding sequence
  source 1..999: mol_type = other DNA

SEQ ID NO: 88847 - DNA, 999 bp, synthetic construct; identical to SEQ ID NO: 88827
  misc_feature 1..999: note = Description of Artificial Sequence: Synthetic coding sequence
  source 1..999: mol_type = other DNA

SEQ ID NO: 88848 - DNA, 1152 bp, synthetic construct; identical to SEQ ID NO: 88831
  misc_feature 1..1152: note = Description of Artificial Sequence: Synthetic coding sequence
  source 1..1152: mol_type = other DNA

SEQ ID NO: 88849 - DNA, 999 bp, synthetic construct; identical to SEQ ID NO: 88827
  misc_feature 1..999: note = Description of Artificial Sequence: Synthetic coding sequence
  source 1..999: mol_type = other DNA

SEQ ID NO: 88850 - DNA, 999 bp, synthetic construct
  misc_feature 1..999: note = Description of Artificial Sequence: Synthetic coding sequence
  source 1..999: mol_type = other DNA
atgggcctgggccccgtgttcctgctgctggccggcatcttccccttcgccccccccggcgccgccgccgagccccacagcctgagatacaacctgaccgtgctgagctgggacggcagcgtgcagagcggcttcctggccgaggtgcacctggacggccagcccttcctgagatacgacagacagaagtgcagagccaagccccagggccagtgggccgaggacgtgctgggcaacaagacctgggacagagagaccagagacctgaccggcaacggcaaggacctgagaatgaccctggcccacatcaaggaccagaaggagggcctgcacagcctgcaggagatcagagtgtgcgagatccacgaggacaacagcaccagaagcagccagcacttctactacgacggcgagctgttcctgagccagaacgtggagaccgaggagtggaccgtgccccagagcagcagagcccagaccctggccatgaacgtgagaaacttcctgaaggaggacgccatgaagaccaagacccactaccacgccatgcacgccgactgcctgcaggagctgagaagatacctggagagcagcgtggtgctgagaagaagagtgccccccatggtgaacgtgaccagaagcgaggccagcgagggcaacatcaccgtgacctgcagagccagcagcttctaccccagaaacatcaccctgacctggagacaggacggcgtgagcctgagccacgacacccagcagtggggcgacgtgctgcccgacggcaacggcacctaccagacctgggtggccaccagaatctgccagggcgaggagcagagattcacctgctacatggagcacagcggcaaccacagcacccaccccgtgcccagcggcaaggtgctggtgctgcagagccactggcagaccttccacgtgagcgccgtggccgcctgctgctgctacttctgctactactacttcctgtgccccctgctgtag

SEQ ID NO: 88851 - DNA, 1152 bp, synthetic construct
  misc_feature 1..1152: note = Description of Artificial Sequence: Synthetic coding sequence
  source 1..1152: mol_type = other DNA
atgggcctgggcagagtgctgctgttcctggccgtggccttccccttcgccccccccgccgccgccgccgagccccacagcctgagatacaacctgatggtgctgagccaggacggcagcgtgcagagcggcttcctggccgagggccacctggacggccagcccttcctgagatacgacagacagaagagaagagccaagccccagggccagtgggccgagaacgtgctgggcgccaagacctgggacaccgagaccgaggacctgaccgagaacggccaggacctgagaagaaccctgacccacatcaaggaccagaagggcggcctgcacagcctgcaggagatcagagtgtgcgagatccacgaggacagcagcaccagaggcagcagacacttctactacgacggcgagctgttcctgagccagaacctggagacccaggagagcaccgtgccccagagcagcagagcccagaccctggccatgaacgtgaccaacttctggaaggaggacgccatgaagaccaagacccactacagagccatgcaggccgactgcctgcagaagctgcagagatacctgaagagcggcgtggccatcagaagaaccgtgccccccatggtgaacgtgacctgcagcgaggtgagcgagggcaacatcaccgtgacctgcagagccagcagcttctaccccagaaacatcaccctgacctggagacaggacggcgtgagcctgagccacaacacccagcagtggggcgacgtgctgcccgacggcaacggcacctaccagacctgggtggccaccagaatcagacagggcgaggagcagagattcacctgctacatggagcacagcggcaaccacggcacccaccccgtgcccagcggcaaggccctggtgctgcagagccagagaaccgacttcccctacgtgagcgccgccatgccctgcttcgtgatcatcatcatcctgtgcgtgccctgctgcaagaagaagaccagcgccgccgagggccccgagctggtgagcctgcaggtgctggaccagcaccccgtgggcaccggcgaccacagagacgccgcccagctgggcttccagcccctgatgagcgccaccggcagcaccggcagcaccgagggcacctag

SEQ ID NO: 88852 - DNA, 1152 bp, synthetic construct
  misc_feature 1..1152: note = Description of Artificial Sequence: Synthetic coding sequence
  source 1..1152: mol_type = other DNA
atgggcctgggcagagtgctgctgttcctggccgtggccttccccttcgccccccccgccgccgccgccgagccccacagcctgagatacaacctgatggtgctgagccaggacggcagcgtgcagagcggcttcctggccgagggccacctggacggccagcccttcctgagatacgacagacagaagagaagagccaagccccagggccagtgggccgaggacgtgctgggcgccaagacctgggacaccgagaccgaggacctgaccgagaacggccaggacctgagaagaaccctgacccacatcaaggaccagaagggcggcctgcacagcctgcaggagatcagagtgtgcgagatccacgaggacagcagcaccagaggcagcagacacttctactacgacggcgagctgttcctgagccagaacctggagacccaggagagcaccgtgccccagagcagcagagcccagaccctggccatgaacgtgaccaacttctggaaggaggacgccatgaagaccaagacccactacagagccatgcaggccgactgcctgcagaagctgcagagatacctgaagagcggcgtggccatcagaagaaccgtgccccccatggtgaacgtgatctgcagcgaggtgagcgagggcaacatcaccgtgacctgcagagccagcagcttctaccccagaaacatcaccctgacctggagacaggacggcgtgagcctgagccacaacacccagcagtggggcgacgtgctgcccgacggcaacggcacctaccagacctgggtggccaccagaatcagacagggcgaggagcagagattcacctgctacatggagcacagcggcaaccacggcacccaccccgtgcccagcggcaaggccctggtgctgcagagccagagaaccgacttcccctacgtgagcgccgccatgccctgcttcgtgatcatcatcatcctgtgcgtgccctgctgcaagaagaagaccagcgccgccgagggccccgagctggtgagcctgcaggtgctggaccagcaccccgtgggcaccggcgaccacagagacgccgcccagctgggcttccagcccctgatgagcgccaccggcagcaccggcagcaccgagggcacctag

SEQ ID NO: 88853 - DNA, 1023 bp, synthetic construct
  misc_feature 1..1023: note = Description of Artificial Sequence: Synthetic coding sequence
  source 1..1023: mol_type = other DNA
atgggcctgggcagagtgctgctgttcctggccgtggccttccccttcgccccccccgccgccgccgccgagccccacagcctgagatacaacctgatggtgctgagccaggacggcagcgtgcagagcggcttcctggccgagggccacctggacggccagcccttcctgagatacgacagacagaagagaagagccaagccccagggccagtgggccgagaacgtgctgggcgccaagacctgggacaccgagaccgaggacctgaccgagaacggccaggacctgagaagaaccctgacccacatcaaggaccagaagggcgtgccccagagcagcagagcccagaccctggccatgaacgtgaccaacttctggaaggaggacgccatgaagaccaagacccactacagagccatgcaggccgactgcctgcagaagctgcagagatacctgaagagcggcgtggccatcagaagaaccgtgccccccatggtgaacgtgacctgcagcgaggtgagcgagggcaacatcaccgtgacctgcagagccagcagcttctaccccagaaacatcaccctgacctggagacaggacggcgtgagcctgagccacaacacccagcagtggggcgacgtgctgcccgacggcaacggcacctaccagacctgggtggccaccagaatcagacagggcgaggagcagagattcacctgctacatggagcacagcggcaaccacggcacccaccccgtgcccagcggcaaggccctggtgctgcagagccagagaaccgacttcccctacgtgagcgccgccatgccctgcttcgtgatcatcatcatcctgtgcgtgccctgctgcaagaagaagaccagcgccgccgagggccccgagctggtgagcctgcaggtgctggaccagcaccccgtgggcaccggcgaccacagagacgccgcccagctgggcttccagcccctgatgagcgccaccggcagcaccggcagcaccgagggcacctag

SEQ ID NO: 88854 - DNA, 1023 bp, synthetic construct
  misc_feature 1..1023: note = Description of Artificial Sequence: Synthetic coding sequence
  source 1..1023: mol_type = other DNA
atgggcctgggcagagtgctgctgttcctggccgtggccttccccttcgccccccccgccgccgccgccgagccccacagcctgagatacaacctgatggtgctgagccaggacggcagcgtgcagagcggcttcctggccgagggccacctggacggccagcccttcctgagatacgacagacagaagagaagagccaagccccagggccagtgggccgaggacgtgctgggcgccaagacctgggacaccgagaccgaggacctgaccgagaacggccaggacctgagaagaaccctgacccacatcaaggaccagaagggcgtgccccagagcagcagagcccagaccctggccatgaacgtgaccaacttctggaaggaggacgccatgaagaccaagacccactacagagccatgcaggccgactgcctgcagaagctgcagagatacctgaagagcggcgtggccatcagaagaaccgtgccccccatggtgaacgtgacctgcagcgaggtgagcgagggcaacatcaccgtgacctgcagagccagcagcttctaccccagaaacatcaccctgacctggagacaggacggcgtgagcctgagccacaacacccagcagtggggcgacgtgctgcccgacggcaacggcacctaccagacctgggtggccaccagaatcagacagggcgaggagcagagattcacctgctacatggagcacagcggcaaccacggcacccaccccgtgcccagcggcaaggccctggtgctgcagagccagagaaccgacttcccctacgtgagcgccgccatgccctgcttcgtgatcatcatcatcctgtgcgtgccctgctgcaagaagaagaccagcgccgccgagggccccgagctggtgagcctgcaggtgctggaccagcaccccgtgggcaccggcgaccacagagacgccgcccagctgggcttccagcccctgatgagcgccaccggcagcaccggcagcaccgagggcgcctag

SEQ ID NO: 88855 - DNA, 126 bp, synthetic construct
  misc_feature 1..126: note = Description of Artificial Sequence: Synthetic coding sequence
  source 1..126: mol_type = other DNA
atgggcctgggcagagtgctgctgttcctggccgtggccttccccttcgccccccccgccgccgccgccgtggagatgggcttccacagagtgagccaggacggcctggacctgctgaccagctag

SEQ ID NO: 88856 - DNA, 1083 bp, synthetic construct
  misc_feature 1..1083: note = Description of Artificial Sequence: Synthetic coding sequence
  source 1..1083: mol_type = other DNA
tgaccccacagcctgagatacaacctgatggtgctgagccaggacggcagcgtgcagagcggcttcctggccgagggccacctggacggccagcccttcctgagatacgacagacagaagagaagagccaagccccagggccagtgggccgaggacgtgctgggcgccaagacctgggacaccgagaccgaggacctgaccgagaacggccaggacctgagaagaaccctgacccacatcaaggaccagaagggcggcctgcacagcctgcaggagatcagagtgtgcgagatccacgaggacagcagcaccagaggcagcagacacttctactacgacggcgagctgttcctgagccagaacctggagacccaggagagcaccgtgccccagagcagcagagcccagaccctggccatgaacgtgaccaacttctggaaggaggacgccatgaagaccaagacccactacagagccatgcaggccgactgcctgcagaagctgcagagatacctgaagagcggcgtggccatcagaagaaccgtgccccccatggtgaacgtgacctgcagcgaggtgagcgagggcaacatcaccgtgacctgcagagccagcagcttctaccccagaaacatcaccctgacctggagacaggacggcgtgagcctgagccacaacacccagcagtggggcgacgtgctgcccgacggcaacggcacctaccagacctgggtggccaccagaatcagacagggcgaggagcagagattcacctgctacatggagcacagcggcaaccacggcacccaccccgtgcccagcggcaaggccctggtgctgcagagccagagaaccgacttcccctacgtgagcgccgccatgccctgcttcgtgatcatcatcatcctgtgcgtgccctgctgcaagaagaagaccagcgccgccgagggccccgagctggtgagcctgcaggtgctggaccagcaccccgtgggcaccggcgaccacagagacgccgcccagctgggcttccagcccctgatgagcgccaccggcagcaccggcagcaccgagggcgcctag

SEQ ID NO: 88857 - DNA, 1152 bp, synthetic construct
  misc_feature 1..1152: note = Description of Artificial Sequence: Synthetic coding sequence
  source 1..1152: mol_type = other DNA
atgggcctgggcagagtgctgctgttcctggccgtggccttccccttcgccccccccgccgccgccgccgagccccacagcctgagatacaacctgatggtgctgagccaggacggcagcgtgcagagcggcttcctggccgagggccacctggacggccagcccttcctgagatacgacagacagaagagaagagccaagccccagggccagtgggccgaggacgtgctgggcgccaagacctgggacaccgagaccgaggacctgaccgagaacggccaggacctgagaagaaccctgacccacatcaaggaccagaagggcggcctgcacagcctgcaggagatcagagtgtgcgagatccacgaggacagcagcaccagaggcagcagacacttctactacgacggcgagctgttcctgagccagaacctggagacccaggagagcaccgtgccccagagcagcagagcccagaccctggccatgaacgtgaccaacttctggaaggaggacgccatgaagaccaagacccactacagagccatgcaggccgactgcctgcagaagctgcagagatacctgaagagcggcgtggccatcagaagaaccgtgccccccatggtgaacgtgacctgcagcgaggtgagcgagggcaacatcaccgtgacctgcagagccagcagcttctaccccagaaacatcaccctgacctggagacaggacggcgtgagcctgagccacaacacccagcagtggggcgacgtgctgcccgacggcaacggcacctaccagacctgggtggccaccagaatcagacagggcgaggagcagagattcacctgctacatggagcacagcggcaaccacggcacccaccccgtgcccagcggcaaggccctggtgctgcagagccagagaaccgacttcccctacgtgagcgccgccatgccctgcttcgtgatcatcatcatcctgtgcgtgccctgctgcaagaagaagaccagcgccgccgagggccccgagctggtgagcctgcaggtgctggaccagcaccccgtgggcaccggcgaccacagagacgccgcccagctgggcttccagcccctgatgagcgccaccggcagcaccggcagcaccgagggcgcctag

SEQ ID NO: 88858 - DNA, 1023 bp, synthetic construct
  misc_feature 1..1023: note = Description of Artificial Sequence: Synthetic coding sequence
  source 1..1023: mol_type = other DNA
atgggcctgggcagagtgctgctgttcctggccgtggccttccccttcgccccccccgccgccgccgccgagccccacagcctgagatacaacctgatggtgctgagccaggacggcagcgtgcagagcggcttcctggccgagggccacctggacggccagcccttcctgagatacgacagacagaagagaagagccaagccccagggccagtgggccgaggacgtgctgggcgccgagacctgggacaccgagaccgaggacctgaccgagaacggccaggacctgagaagaaccctgacccacatcaaggaccagaagggcgtgccccagagcagcagagcccagaccctggccatgaacgtgaccaacttctggaaggaggacgccatgaagaccaagacccactacagagccatgcaggccgactgcctgcagaagctgcagagatacctgaagagcggcgtggccatcagaagaaccgtgccccccatggtgaacgtgacctgcagcgaggtgagcgagggcaacatcaccgtgacctgcagagccagcagcttctaccccagaaacatcaccctgacctggagacaggacggcgtgagcctgagccacaacacccagcagtggggcgacgtgctgcccgacggcaacggcacctaccagacctgggtggccaccagaatcagacagggcgaggagcagagattcacctgctacatggagcacagcggcaaccacggcacccaccccgtgcccagcggcaaggccctggtgctgcagagccagagaaccgacttcccctacgtgagcgccgccatgccctgcttcgtgatcatcatcatcctgtgcgtgccctgctgcaagaagaagaccagcgccgccgagggccccgagctggtgagcctgcaggtgctggaccagcaccccgtgggcaccggcgaccacagagacgccgcccagctgggcttccagcccctgatgagcgccaccggcagcaccggcagcaccgagggcgcctag

SEQ ID NO: 88859 - DNA, 1152 bp, synthetic construct
  misc_feature 1..1152: note = Description of Artificial Sequence: Synthetic coding sequence
  source 1..1152: mol_type = other DNA
atgggcctgggcagagtgctgctgttcctggccgtggccttccccttcgccccccccgccgccgccgccgagccccacagcctgagatacaacctgatggtgctgagccaggacggcagcgtgcagagcggcttcctggccgagggccacctggacggccagcccttcctgagatacgacagacagaagagaagagccaagccccagggccagtgggccgaggacgtgctgggcgccgagacctgggacaccgagaccgaggacctgaccgagaacggccaggacctgagaagaaccctgacccacatcaaggaccagaagggcggcctgcacagcctgcaggagatcagagtgtgcgagatccacgaggacagcagcaccagaggcagcagacacttctactacaacggcgagctgttcctgagccagaacctggagacccaggagagcaccgtgccccagagcagcagagcccagaccctggccatgaacgtgaccaacttctggaaggaggacgccatgaagaccaagacccactacagagccatgcaggccgactgcctgcagaagctgcagagatacctgaagagcggcgtggccatcagaagaaccgtgccccccatggtgaacgtgacctgcagcgaggtgagcgagggcaacatcaccgtgacctgcagagccagcagcttctaccccagaaacatcaccctgacctggagacaggacggcgtgagcctgagccacaacacccagcagtggggcgacgtgctgcccgacggcaacggcacctaccagacctgggtggccaccagaatcagacagggcgaggagcagagattcacctgctacatggagcacagcggcaaccacggcacccaccccgtgcccagcggcaaggccctggtgctgcagagccagagaaccgacttcccctacgtgagcgccgccatgccctgcttcgtgatcatcatcatcctgtgcgtgccctgctgcaagaagaagaccagcgccgccgagggccccgagctggtgagcctgcaggtgctggaccagcaccccgtgggcaccggcgaccacagagacgccgcccagctgggcttccagcccctgatgagcgccaccggcagcaccggcagcaccgagggcgcctag

SEQ ID NO: 88860 - DNA, 1023 bp, synthetic construct
  misc_feature 1..1023: note = Description of Artificial Sequence: Synthetic coding sequence
  source 1..1023: mol_type = other DNA
atgggcctgggcagagtgctgctgttcctggccgtggccttccccttcgccccccccgccgccgccgccgagccccacagcctgagatacaacctgatggtgctgagccaggacggcagcgtgcagagcggcttcctggccgagggccacctggacggccagcccttcctgagatacgacagacagaagagaagagccaagccccagggccagtgggccgaggacgtgctgggcgccaagacctgggacaccgagaccgaggacctgaccgagaacggccaggacctgagaagaaccctgacccacatcaaggaccagaagggcgtgccccagagcagcagagcccagaccctggccatgaacgtgaccaacttctggaaggaggacgccatgaagaccaagacccactacagagccatgcaggccgactgcctgcagaagctgcagagatacctgaagagcggcgtggccatcagaagaaccgtgccccccatggtgaacgtgatctgcagcgaggtgagcgagggcaacatcaccgtgacctgcagagccagcagcttctaccccagaaacatcaccctgacctggagacaggacggcgtgagcctgagccacaacacccagcagtggggcgacgtgctgcccgacggcaacggcacctaccagacctgggtggccaccagaatcagacagggcgaggagcagagattcacctgctacatggagcacagcggcaaccacggcacccaccccgtgcccagcggcaaggccctggtgctgcagagccagagaaccgacttcccctacgtgagcgccgccatgccctgcttcgtgatcatcatcatcctgtgcgtgccctgctgcaagaagaagaccagcgccgccgagggccccgagctggtgagcctgcaggtgctggaccagcaccccgtgggcaccggcgaccacagagacgccgcccagctgggcttccagcccctgatgagcgccaccggcagcaccggcagcaccgagggcacctag

SEQ ID NO: 88861 - DNA, 1023 bp, synthetic construct; identical to SEQ ID NO: 88858
  misc_feature 1..1023: note = Description of Artificial Sequence: Synthetic coding sequence
  source 1..1023: mol_type = other DNA

SEQ ID NO: 88862 - DNA, 1023 bp, synthetic construct; identical to SEQ ID NO: 88853
  misc_feature 1..1023: note = Description of Artificial Sequence: Synthetic coding sequence
  source 1..1023: mol_type = other DNA

SEQ ID NO: 88863 - DNA, 1152 bp, synthetic construct; identical to SEQ ID NO: 88857
  misc_feature 1..1152: note = Description of Artificial Sequence: Synthetic coding sequence
  source 1..1152: mol_type = other DNA

SEQ ID NO: 88864 - DNA, 1152 bp, synthetic construct; identical to SEQ ID NO: 88851
  misc_feature 1..1152: note = Description of Artificial Sequence: Synthetic coding sequence
  source 1..1152: mol_type = other DNA

SEQ ID NO: 88865 - DNA, 1023 bp, synthetic construct; identical to SEQ ID NO: 88854
  misc_feature 1..1023: note = Description of Artificial Sequence: Synthetic coding sequence
  source 1..1023: mol_type = other DNA

SEQ ID NO: 88866 - DNA, 954 bp, synthetic construct
  misc_feature 1..954: note = Description of Artificial Sequence: Synthetic coding sequence
  source 1..954: mol_type = other DNA
tgaccccacagcctgagatacaacctgatggtgctgagccaggacggcagcgtgcagagcggcttcctggccgagggccacctggacggccagcccttcctgagatacgacagacagaagagaagagccaagccccagggccagtgggccgaggacgtgctgggcgccaagacctgggacaccgagaccgaggacctgaccgagaacggccaggacctgagaagaaccctgacccacatcaaggaccagaagggcgtgccccagagcagcagagcccagaccctggccatgaacgtgaccaacttctggaaggaggacgccatgaagaccaagacccactacagagccatgcaggccgactgcctgcagaagctgcagagatacctgaagagcggcgtggccatcagaagaaccgtgccccccatggtgaacgtgacctgcagcgaggtgagcgagggcaacatcaccgtgacctgcagagccagcagcttctaccccagaaacatcaccctgacctggagacaggacggcgtgagcctgagccacaacacccagcagtggggcgacgtgctgcccgacggcaacggcacctaccagacctgggtggccaccagaatcagacagggcgaggagcagagattcacctgctacatggagcacagcggcaaccacggcacccaccccgtgcccagcggcaaggccctggtgctgcagagccagagaaccgacttcccctacgtgagcgccgccatgccctgcttcgtgatcatcatcatcctgtgcgtgccctgctgcaagaagaagaccagcgccgccgagggccccgagctggtgagcctgcaggtgctggaccagcaccccgtgggcaccggcgaccacagagacgccgcccagctgggcttccagcccctgatgagcgccaccggcagcaccggcagcaccgagggcgcctag

SEQ ID NO: 88867 - DNA, 1152 bp, synthetic construct
  misc_feature 1..1152: note = Description of Artificial Sequence: Synthetic coding sequence
  source 1..1152: mol_type = other DNA
atgggcctgggcagagtgctgctgttcctggccgtggccttccccttcgccccccccgccgccgccgccgagccccacagcctgagatacaacctgatggtgctgagccaggacggcagcgtgcagagcggcttcctggccgagggccacctggacggccagcccttcctgagatacgacagacagaagagaagagccaagccccagggccagtgggccgaggacgtgctgggcgccgagacctgggacaccgagaccgaggacctgaccgagaacggccaggacctgagaagaaccctgacccacatcaaggaccagaagggcggcctgcacagcctgcaggagatcagagtgtgcgagatgcacgaggacagcagcaccagaggcagcagacacttctactacaacggcgagctgttcctgagccagaacctggagacccaggagagcaccgtgccccagagcagcagagcccagaccctggccatgaacgtgaccaacttctggaaggaggacgccatgaagaccaagacccactacagagccatgcaggccgactgcctgcagaagctgcagagatacctgaagagcggcgtggccatcagaagaaccgtgccccccatggtgaacgtgacctgcagcgaggtgagcgagggcaacatcaccgtgacctgcagagccagcagcttctaccccagaaacatcaccctgacctggagacaggacggcgtgagcctgagccacaacacccagcagtggggcgacgtgctgcccgacggcaacggcacctaccagacctgggtggccaccagaatcagacagggcgaggagcagagattcacctgctacatggagcacagcggcaaccacggcacccaccccgtgcccagcggcaaggccctggtgctgcagagccagagaaccgacttcccctacgtgagcgccgccatgccctgcttcgtgatcatcatcatcctgtgcgtgccctgctgcaagaagaagaccagcgccgccgagggccccgagctggtgagcctgcaggtgctggaccagcaccccgtgggcaccggcgaccacagagacgccgcccagctgggcttccagcccctgatgagcgccaccggcagcaccggcagcaccgagggcgcctag

SEQ ID NO: 88868 - DNA, 1056 bp, synthetic construct
  misc_feature 1..1056: note = Description of Artificial Sequence: Synthetic coding sequence
  source 1..1056: mol_type = other DNA
atggtgctgagccaggacggcagcgtgcagagcggcttcctggccgagggccacctggacggccagcccttcctgagatacgacagacagaagagaagagccaagccccagggccagtgggccgagaacgtgctgggcgccaagacctgggacaccgagaccgaggacctgaccgagaacggccaggacctgagaagaaccctgacccacatcaaggaccagaagggcggcctgcacagcctgcaggagatcagagtgtgcgagatccacgaggacagcagcaccagaggcagcagacacttctactacgacggcgagctgttcctgagccagaacctggagacccaggagagcaccgtgccccagagcagcagagcccagaccctggccatgaacgtgaccaacttctggaaggaggacgccatgaagaccaagacccactacagagccatgcaggccgactgcctgcagaagctgcagagatacctgaagagcggcgtggccatcagaagaaccgtgccccccatggtgaacgtgacctgcagcgaggtgagcgagggcaacatcaccgtgacctgcagagccagcagcttctaccccagaaacatcaccctgacctggagacaggacggcgtgagcctgagccacaacacccagcagtggggcgacgtgctgcccgacggcaacggcacctaccagacctgggtggccaccagaatcagacagggcgaggagcagagattcacctgctacatggagcacagcggcaaccacggcacccaccccgtgcccagcggcaaggccctggtgctgcagagccagagaaccgacttcccctacgtgagcgccgccatgccctgcttcgtgatcatcatcatcctgtgcgtgccctgctgcaagaagaagaccagcgccgccgagggccccgagctggtgagcctgcaggtgctggaccagcaccccgtgggcaccggcgaccacagagacgccgcccagctgggcttccagcccctgatgagcgccaccggcagcaccggcagcaccgagggcacctag

SEQ ID NO: 88869 - DNA, 126 bp, synthetic construct; identical to SEQ ID NO: 88855
  misc_feature 1..126: note = Description of Artificial Sequence: Synthetic coding sequence
  source 1..126: mol_type = other DNA

SEQ ID NO: 88870 - DNA, 126 bp, synthetic construct; identical to SEQ ID NO: 88855
  misc_feature 1..126: note = Description of Artificial Sequence: Synthetic coding sequence
  source 1..126: mol_type = other DNA

SEQ ID NO: 88871 - DNA, 1056 bp, synthetic construct
  misc_feature 1..1056: note = Description of Artificial Sequence: Synthetic coding sequence
  source 1..1056: mol_type = other DNA
atggtgctgagccaggacggcagcgtgcagagcggcttcctggccgagggccacctggacggccagcccttcctgagatacgacagacagaagagaagagccaagccccagggccagtgggccgaggacgtgctgggcgccgagacctgggacaccgagaccgaggacctgaccgagaacggccaggacctgagaagaaccctgacccacatcaaggaccagaagggcggcctgcacagcctgcaggagatcagagtgtgcgagatgcacgaggacagcagcaccagaggcagcagacacttctactacaacggcgagctgttcctgagccagaacctggagacccaggagagcaccgtgccccagagcagcagagcccagaccctggccatgaacgtgaccaacttctggaaggaggacgccatgaagaccaagacccactacagagccatgcaggccgactgcctgcagaagctgcagagatacctgaagagcggcgtggccatcagaagaaccgtgccccccatggtgaacgtgacctgcagcgaggtgagcgagggcaacatcaccgtgacctgcagagccagcagcttctaccccagaaacatcaccctgacctggagacaggacggcgtgagcctgagccacaacacccagcagtggggcgacgtgctgcccgacggcaacggcacctaccagacctgggtggccaccagaatcagacagggcgaggagcagagattcacctgctacatggagcacagcggcaaccacggcacccaccccgtgcccagcggcaaggccctggtgctgcagagccagagaaccgacttcccctacgtgagcgccgccatgccctgcttcgtgatcatcatcatcctgtgcgtgccctgctgcaagaagaagaccagcgccgccgagggccccgagctggtgagcctgcaggtgctggaccagcaccccgtgggcaccggcgaccacagagacgccgcccagctgggcttccagcccctgatgagcgccaccggcagcaccggcagcaccgagggcgcctag

SEQ ID NO: 88872 - DNA, 1056 bp, synthetic construct
  misc_feature 1..1056: note = Description of Artificial Sequence: Synthetic coding sequence
  source 1..1056: mol_type = other DNA
atggtgctgagccaggacggcagcgtgcagagcggcttcctggccgagggccacctggacggccagcccttcctgagatacgacagacagaagagaagagccaagccccagggccagtgggccgaggacgtgctgggcgccaagacctgggacaccgagaccgaggacctgaccgagaacggccaggacctgagaagaaccctgacccacatcaaggaccagaagggcggcctgcacagcctgcaggagatcagagtgtgcgagatccacgaggacagcagcaccagaggcagcagacacttctactacgacggcgagctgttcctgagccagaacctggagacccaggagagcaccgtgccccagagcagcagagcccagaccctggccatgaacgtgaccaacttctggaaggaggacgccatgaagaccaagacccactacagagccatgcaggccgactgcctgcagaagctgcagagatacctgaagagcggcgtggccatcagaagaaccgtgccccccatggtgaacgtgatctgcagcgaggtgagcgagggcaacatcaccgtgacctgcagagccagcagcttctaccccagaaacatcaccctgacctggagacaggacggcgtgagcctgagccacaacacccagcagtggggcgacgtgctgcccgacggcaacggcacctaccagacctgggtggccaccagaatcagacagggcgaggagcagagattcacctgctacatggagcacagcggcaaccacggcacccaccccgtgcccagcggcaaggccctggtgctgcagagccagagaaccgacttcccctacgtgagcgccgccatgccctgcttcgtgatcatcatcatcctgtgcgtgccctgctgcaagaagaagaccagcgccgccgagggccccgagctggtgagcctgcaggtgctggaccagcaccccgtgggcaccggcgaccacagagacgccgcccagctgggcttccagcccctgatgagcgccaccggcagcaccggcagcaccgagggcacctag

SEQ ID NO: 88873 - DNA, 126 bp, synthetic construct; identical to SEQ ID NO: 88855
  misc_feature 1..126: note = Description of Artificial Sequence: Synthetic coding sequence
  source 1..126: mol_type = other DNA

SEQ ID NO: 88874 - DNA, 126 bp, synthetic construct; identical to SEQ ID NO: 88855
  misc_feature 1..126: note = Description of Artificial Sequence: Synthetic coding sequence
  source 1..126: mol_type = other DNA

SEQ ID NO: 88875 - DNA, 1056 bp, synthetic construct; identical to SEQ ID NO: 88868
  misc_feature 1..1056: note = Description of Artificial Sequence: Synthetic coding sequence
  source 1..1056: mol_type = other DNA

SEQ ID NO: 88876 - DNA, 126 bp, synthetic construct; identical to SEQ ID NO: 88855
  misc_feature 1..126: note = Description of Artificial Sequence: Synthetic coding sequence
  source 1..126: mol_type = other DNA

SEQ ID NO: 88877 - DNA, 126 bp, synthetic construct; identical to SEQ ID NO: 88855
  misc_feature 1..126: note = Description of Artificial Sequence: Synthetic coding sequence
  source 1..126: mol_type = other DNA

SEQ ID NO: 88878 - DNA, 1056 bp, synthetic construct
  misc_feature 1..1056: note = Description of Artificial Sequence: Synthetic coding sequence
  source 1..1056: mol_type = other DNA
atggtgctgagccaggacggcagcgtgcagagcggcttcctggccgagggccacctggacggccagcccttcctgagatacgacagacagaagagaagagccaagccccagggccagtgggccgaggacgtgctgggcgccgagacctgggacaccgagaccgaggacctgaccgagaacggccaggacctgagaagaaccctgacccacatcaaggaccagaagggcggcctgcacagcctgcaggagatcagagtgtgcgagatccacgaggacagcagcaccagaggcagcagacacttctactacaacggcgagctgttcctgagccagaacctggagacccaggagagcaccgtgccccagagcagcagagcccagaccctggccatgaacgtgaccaacttctggaaggaggacgccatgaagaccaagacccactacagagccatgcaggccgactgcctgcagaagctgcagagatacctgaagagcggcgtggccatcagaagaaccgtgccccccatggtgaacgtgacctgcagcgaggtgagcgagggcaacatcaccgtgacctgcagagccagcagcttctaccccagaaacatcaccctgacctggagacaggacggcgtgagcctgagccacaacacccagcagtggggcgacgtgctgcccgacggcaacggcacctaccagacctgggtggccaccagaatcagacagggcgaggagcagagattcacctgctacatggagcacagcggcaaccacggcacccaccccgtgcccagcggcaaggccctggtgctgcagagccagagaaccgacttcccctacgtgagcgccgccatgccctgcttcgtgatcatcatcatcctgtgcgtgccctgctgcaagaagaagaccagcgccgccgagggccccgagctggtgagcctgcaggtgctggaccagcaccccgtgggcaccggcgaccacagagacgccgcccagctgggcttccagcccctgatgagcgccaccggcagcaccggcagcaccgagggcgcctag

SEQ ID NO: 88879 - DNA, 2088 bp, synthetic construct
  misc_feature 1..2088: note = Description of Artificial Sequence: Synthetic coding sequence
  source 1..2088: mol_type = other DNA
atgagcccccccaaggaccccagccccagcctgcccctgcccagcagcagcagccacagcagcagcccccccagcagcagcagcaccagcgtgagcggcaacgcccccgacggcagcagccccccccagatgaccgccagcgagcccctgagccaggtgagcagaggccaccccagcccccccacccccaacttcagaagaagagccgtggcccagggcgcccccagagagatccccctgtacctgccccaccaccccaagcccgagtgggccgagtactgcctggtgagccccggcgaggacggcctgagcgaccccgccgagatgaccagcgacgagtgccagcccgccgaggcccccctgggcgacatcggcagcaaccacagagacccccaccccatctggggcaaggacagaagctggaccggccaggagctgagccccctggccggcgaggacagagagaagggcagcaccggcgccagaaaggaggaggagggcggccccgtgctggtgaaggagaagctgggcctgaagaagctggtgctgacccaggagcagaagaccatgctgctggactggaacgacagcatccccgagagcgtgcacctgaaggccggcgagagaatcagccagaagagcgccgagaacggcagaggcggcagagtgctgaagcccgtgagacccctgctgctgcccagagccgccggcgagcccctgcccacccagagaggcgcccaggagaagatgggcacccccgccgagcaggcccagggcgagagaaacgtgcccccccccaagagccccctgagactgatcgccaacgccatcagaagaagcctggagcccctgctgagcaacagcgagggcggcaagaaggcctgggccaagcaggagagcaagaccctgcccgcccaggcctgcaccagaagcttcagcctgagaaagaccaacagcaacaaggacggcgaccagcacagccccggcagaaaccagagcagcgccttcagcccccccgaccccgccctgagaacccacagcctgcccaacagacccagcaaggtgttccccgccctgagaagccccccctgcagcaagatcgaggacgtgcccaccctgctggagaaggtgagcctgcaggagaacttccccgacgccagcaagccccccaagaagagaatcagcctgttcagcagcctgagactgaaggacaagagcttcgagagcttcctgcaggagagcagacagagaaaggacatcagagacctgttcggcagccccaagagaaaggtgctgcccgaggacagcgcccaggccctggagaagctgctgcagcccttcaagagcaccagcctgagacaggccgccccccccccccccccccccccccccccccccccccccccccccaccgccggcggcgccgacagcaagaacttccccctgagagcccaggtgaccgaggccagcagcagcgccagcagcaccagcagcagcagcgccgacgaggagttcgacccccagctgagcctgcagctgaaggagaagaagaccctgagaagaagaaagaagctggagaaggccatgaagcagctggtgaagcaggaggagctgaagagactgtacaaggcccaggccatccagagacagctggaggaggtggaggagagacagagagccagcgagatccagggcgtgagactggagaaggccctgagaggcgaggccgacagcggcacccaggacgaggcccagctgctgcaggagtggttcaagctggtgctggagaagaacaagctgatgagatacgagagcgagctgctgatcatggcccaggagctggagctggaggaccaccagagcagactggagcagaagctgagagagaagatgctgaaggaggagagccagaaggacgagaaggacctgaacgaggagcaggaggtgttcaccgagctgatgcaggtgatcgagcagagagacaagctggtggacagcctggaggagcagagaatcagagagaaggccgaggaccagcacttcgagagcttcgtgttcagcagaggctgccagctgagcagaacctag

SEQ ID NO: 88880 - DNA, 90 bp, synthetic construct
  misc_feature 1..90: note = Description of Artificial Sequence: Synthetic coding sequence
  source 1..90: mol_type = other DNA
atgagcccccccaaggaccccagccccagcctgcccctgcccagcagcagcagccacagcagcagcccccccagcagcagcagcacctag

SEQ ID NO: 88881 - DNA, 522 bp, synthetic construct
  misc_feature 1..522: note = Description of Artificial Sequence: Synthetic coding sequence
  source 1..522: mol_type = other DNA
atgagcctgctgggccccaaggtgctgctgttcctggccgccttcatcatcaccagcgactggatccccctgggcgtgaacagccagagaggcgacgacgtgacccaggccacccccgagaccttcaccgaggaccccaacctggtgaacgaccccgccaccgacgagaccgtgctggccgtgctggccgacatcgcccccagcaccgacgacctggccagcctgagcgagaagaacaccaccgccgagtgctgggacgagaagttcacctgcaccagactgtacagcgtgcacagacccgtgaagcagtgcatccaccagctgtgcttcaccagcctgagaagaatgtacatcgtgaacaaggagatctgcagcagactggtgtgcaaggagcacgaggccatgaaggacgagctgtgcagacagatggccggcctgccccccagaagactgagaagaagcaactacttcagactgcccccctgcgagaacgtggacctgcagagacccaacggcctgtag

SEQ ID NO: 88882 - DNA, 492 bp, synthetic construct
  misc_feature 1..492: note = Description of Artificial Sequence: Synthetic coding sequence
  source 1..492: mol_type = other DNA
atgagcctgctgggccccaaggtgctgctgttcctggccgccttcatcatcaccagcgactggatccccctgggcgtgaacagccagagaggcgacgacgtgacccaggccacccccgagaccttcaccgaggaccccaacctggtgaacgaccccgccaccgacgagaccgtgctggccgtgctggccgacatcgcccccagcaccgacgacctggagtgctgggacgagaagttcacctgcaccagactgtacagcgtgcacagacccgtgaagcagtgcatccaccagctgtgcttcaccagcctgagaagaatgtacatcgtgaacaaggagatctgcagcagactggtgtgcaaggagcacgaggccatgaaggacgagctgtgcagacagatggccggcctgccccccagaagactgagaagaagcaactacttcagactgcccccctgcgagaacgtggacctgcagagacccaacggcctgtag

SEQ ID NO: 88883 - DNA, 447 bp, synthetic construct
  misc_feature 1..447: note = Description of Artificial Sequence: Synthetic coding sequence
  source 1..447: mol_type = other DNA
atgagcctgctgggccccaaggtgctgctgttcctggccgccttcatcatcaccagcgactggatccccctgggcgtgaacagccagagaggcgacgacgtgacccaggccacccccgagaccttcaccgaggaccccaacctggtgaacgaccccgccaccgacgagaccgagtgctgggacgagaagttcacctgcaccagactgtacagcgtgcacagacccgtgaagcagtgcatccaccagctgtgcttcaccagcctgagaagaatgtacatcgtgaacaaggagatctgcagcagactggtgtgcaaggagcacgaggccatgaaggacgagctgtgcagacagatggccggcctgccccccagaagactgagaagaagcaactacttcagactgcccccctgcgagaacgtggacctgcagagacccaacggcctgtag

SEQ ID NO: 88884 - DNA, 492 bp, synthetic construct; identical to SEQ ID NO: 88882
  misc_feature 1..492: note = Description of Artificial Sequence: Synthetic coding sequence
  source 1..492: mol_type = other DNA

SEQ ID NO: 88885 - DNA, 276 bp, synthetic construct
  misc_feature 1..276: note = Description of Artificial Sequence: Synthetic coding sequence
  source 1..276: mol_type = other DNA
atgagcctgctgggccccaaggtgctgctgttcctggccgccttcatcatcaccagcgactggatccccctgggcgtgaacagccagagaggcgacgacgtgacccaggccacccccgagaccttcaccgaggaccccaacctggtgaacgaccccgccaccgacgagaccgtgctggccgtgctggccgacatcgcccccagcaccgacgacctggccagcctgagcgagaagaacaccaccgccgagtgctgggacgagaagttcacctgctag

SEQ ID NO: 88886 - DNA, 1320 bp, synthetic construct
  misc_feature 1..1320: note = Description of Artificial Sequence: Synthetic coding sequence
  source 1..1320: mol_type = other DNA
atgagcgtgcccagcgccctgatgaagcagccccccatccagagcaccgccggcgccgtgcccgtgagaaacgagaagggcgagatcagcatggagaaggtgaaggtgaagagatacgtgagcggcaagagacccgactacgcccccatggagagcagcgacgaggaggacgaggagttccagttcatcaagaaggccaaggagcaggaggccgagcccgaggagcaggaggaggacagcagcagcgaccccagactgagaagactgcagaacagaatcagcgaggacgtggaggagagactggccagacacagaaagatcgtggagcccgaggtggtgggcgagagcgacagcgaggtggagggcgacgcctggagaatggagagagaggacagcagcgaggaggaggaggaggagatcgacgacgaggagatcgagagaagaagaggcatgatgagacagagagcccaggagagaaagaacgaggagatggaggtgatggaggtggaggacgagggcagaagcggcgaggagagcgagagcgagagcgagtacgaggagtacaccgacagcgaggacgagatggagcccagactgaagcccgtgttcatcagaaagaaggacagagtgaccgtgcaggagagagaggccgaggccctgaagcagaaggagctggagcaggaggccaagagaatggccgaggagagaagaaagtacaccctgaagatcgtggaggaggagaccaagaaggagctggaggagaacaagagaagcctggccgccctggacgccctgaacaccgacgacgagaacgacgaggaggagtacgaggcctggaaggtgagagagctgaagagaatcaagagagacagagaggacagagaggccctggagaaggagaaggccgagatcgagagaatgagaaacctgaccgaggaggagagaagagccgagctgagagccaacggcaaggtgatcaccaacaaggccgtgaagggcaagtacaagttcctgcagaagtactaccacagaggcgccttcttcatggacgaggacgaggaggtgtacaagagagacttcagcgcccccaccctggaggaccacttcaacaagaccatcctgcccaaggtgatgcaggtgaagaacttcggcagaagcggcagaaccaagtacacccacctggtggaccaggacaccaccagcttcgacagcgcctggggccaggagagcgcccagaacaccaagttcttcaagcagaaggccgccggcgtgagagacgtgttcgagagacccagcgccaagaagagaaagaccacctag

SEQ ID NO: 88887 - DNA, 549 bp, synthetic construct
  misc_feature 1..549: note = Description of Artificial Sequence: Synthetic coding sequence
  source 1..549: mol_type = other DNA
atgagagccgcctacctgttcctgctgttcctgcccggcctgctggcccagggccagtacgacctggaccccctgccccccttccccgaccacgtgcagtacacccactacagcgaccagatcgacaaccccgactactacgactaccaggaggtgacccccagacccagcgaggagcagttccagttccagagccagcagcaggtgcagcaggaggtgatccccgcccccacccccgagcccggcaacgccgagctggagcccaccgagcccggccccctggactgcagagaggagcagtacccctgcaccagactgtacagcatccacagaccctgcaagcagtgcctgaacgaggtgtgcttctacagcctgagaagagtgtacgtgatcaacaaggagatctgcgtgagaaccgtgtgcgcccacgaggagctgctgagagccgacctgtgcagagacaagttcagcaagtgcggcgtgatggccagcagcggcctgtgccagagcgtggccgccagctgcgccagaagctgcggcagctgctag

SEQ ID NO: 88888 - DNA, 552 bp, synthetic construct
  misc_feature 1..552: note = Description of Artificial Sequence: Synthetic coding sequence
  source 1..552: mol_type = other DNA
atgagagccgcctacctgttcctgctgttcctgcccgccggcctgctggcccagggccagtacgacctggaccccctgccccccttccccgaccacgtgcagtacacccactacagcgaccagatcgacaaccccgactactacgactaccaggaggtgacccccagacccagcgaggagcagttccagttccagagccagcagcaggtgcagcaggaggtgatccccgcccccacccccgagcccggcaacgccgagctggagcccaccgagcccggccccctggactgcagagaggagcagtacccctgcaccagactgtacagcatccacagaccctgcaagcagtgcctgaacgaggtgtgcttctacagcctgagaagagtgtacgtgatcaacaaggagatctgcgtgagaaccgtgtgcgcccacgaggagctgctgagagccgacctgtgcagagacaagttcagcaagtgcggcgtgatggccagcagcggcctgtgccagagcgtggccgccagctgcgccagaagctgcggcagctgctag

SEQ ID NO: 88889 - DNA, 549 bp, synthetic construct; identical to SEQ ID NO: 88887
  misc_feature 1..549: note = Description of Artificial Sequence: Synthetic coding sequence
  source 1..549: mol_type = other DNA

SEQ ID NO: 88890 - DNA, 1089 bp, synthetic construct
  misc_feature 1..1089: note = Description of Artificial Sequence: Synthetic coding sequence
  source 1..1089: mol_type = other DNA
atgaagctgcactgctgcctgttcaccctggtggccagcatcatcgtgcccgccgccttcgtgctggaggacgtggacttcgaccagatggtgagcctggaggccaacagaagcagctacaacgccagcttccccagcagcttcgagctgagcgccagcagccacagcgacgacgacgtgatcatcgccaaggagggcaccagcgtgagcatcgagtgcctgctgaccgccagccactacgaggacgtgcactggcacaacagcaagggccagcagctggacggcagaagcagaggcggcaagtggctggtgagcgacaacttcctgaacatcaccaacgtggccttcgacgacagaggcctgtacacctgcttcgtgaccagccccatcagagccagctacagcgtgaccctgagagtgatcttcaccagcggcgacatgagcgtgtactacatgatcgtgtgcctgatcgccttcaccatcaccctgatcctgaacgtgaccagactgtgcatgatgagcagccacctgagaaagaccgagaaggccatcaacgagttcttcagaaccgagggcgccgagaagctgcagaaggccttcgagatcgccaagagaatccccatcatcaccagcgccaagaccctggagctggccaaggtgacccagttcaagaccatggagttcgccagatacatcgaggagctggccagaagcgtgcccctgccccccctgatcctgaactgcagagccttcgtggaggagatgttcgaggccgtgagagtggacgaccccgacgacctgggcgagagaatcaaggagagacccgccctgaacgcccagggcggcatctacgtgatcaaccccgagatgggcagaagcaacagccccggcggcgacagcgacgacggcagcctgaacgagcagggccaggagatcgccgtgcaggtgagcgtgcacctgcagagcgagaccaagagcatcgacaccgagagccagggcagcagccacttcagcccccccgacgacatcggcagcgccgagagcaactgcaactacaaggacggcgcctacgagaactgccagctgtag

SEQ ID NO: 88891 - DNA, 1089 bp, synthetic construct; identical to SEQ ID NO: 88890
  misc_feature 1..1089: note = Description of Artificial Sequence: Synthetic coding sequence
  source 1..1089: mol_type = other DNA

SEQ ID NO: 88892 - DNA, 651 bp, synthetic construct
  misc_feature 1..651: note = Description of Artificial Sequence: Synthetic coding sequence
  source 1..651: mol_type = other DNA
atgagcgtgtactacatgatcgtgtgcctgatcgccttcaccatcaccctgatcctgaacgtgaccagactgtgcatgatgagcagccacctgagaaagaccgagaaggccatcaacgagttcttcagaaccgagggcgccgagaagctgcagaaggccttcgagatcgccaagagaatccccatcatcaccagcgccaagaccctggagctggccaaggtgacccagttcaagaccatggagttcgccagatacatcgaggagctggccagaagcgtgcccctgccccccctgatcctgaactgcagagccttcgtggaggagatgttcgaggccgtgagagtggacgaccccgacgacctgggcgagagaatcaaggagagacccgccctgaacgcccagggcggcatctacgtgatcaaccccgagatgggcagaagcaacagccccggcggcgacagcgacgacggcagcctgaacgagcagggccaggagatcgccgtgcaggtgagcgtgcacctgcagagcgagaccaagagcatcgacaccgagagccagggcagcagccacttcagcccccccgacgacatcggcagcgccgagagcaactgcaactacaaggacggcgcctacgagaactgccagctgtag

SEQ ID NO: 88893 - DNA, 54 bp, synthetic construct
  misc_feature 1..54: note = Description of Artificial Sequence: Synthetic coding sequence
  source 1..54: mol_type = other DNA
atgaagctgcactgctgcctgttcaccctggtggccagcatcatcgtgccctag

SEQ ID NO: 88894 - DNA, 330 bp, synthetic construct
  misc_feature 1..330: note = Description of Artificial Sequence: Synthetic coding sequence
  source 1..330: mol_type = other DNA
atgaagctgcactgctgcctgttcaccctggtggccagcatcatcgtgcccgccgccttcgtgctggaggacgtggacttcgaccagatggtgagcctggaggccaacagaagcagctacaacgccagcttccccagcagcttcgagctgagcgccagcagccacagcgacgacgacgtgatcatcgccaaggagggcaccagcgtgagcatcgagtgcctgctgaccgccagccactacgaggacgtgcactggcacaacagcaagggccagcagctggacggcagaagcagaggcggcaagtggctggtgagcgacaacttcctgtag

SEQ ID NO: 88895 - DNA, 372 bp, synthetic construct
  misc_feature 1..372: note = Description of Artificial Sequence: Synthetic coding sequence
  source 1..372: mol_type = other DNA
atgaagctgcactgctgcctgttcaccctggtggccagcatcatcgtgcccgccgccttcgtgctggaggacgtggacttcgaccagatggtgagcctggaggccaacagaagcagctacaacgccagcttccccagcagcttcgagctgagcgccagcagccacagcgacgacgacgtgatcatcgccaaggagggcaccagcgtgagcatcgagtgcctgctgaccgccagccactacgaggacgtgcactggcacaacagcaagggccagcagctggacggcagaagcagaggcggcaagtggctggtgagcgacaacttcctgaacatcaccaacgtggccttcgacgacagaggcctgtacacctag

SEQ ID NO: 88896 - DNA, 768 bp, synthetic construct
  misc_feature 1..768: note = Description of Artificial Sequence: Synthetic coding sequence
  source 1..768: mol_type = other DNA
atgaaggccctgctggccctgcccctgctgctgctgctgagcacccccccctgcgccccccaggtgagcggcatcagaggcgacgccctggagagattctgcctgcagcagcccctggactgcgacgacatctacgcccagggctaccagagcgacggcgtgtacctgatctaccccagcggccccagcgtgcccgtgcccgtgttctgcgacatgaccaccgagggcggcaagtggaccgtgttccagaagagattcaacggcagcgtgagcttcttcagaggctggaacgactacaagctgggcttcggcagagccgacggcgagtactggctgggcctgcagaacatgcacctgctgaccctgaagcagaagtacgagctgagagtggacctggaggacttcgagaacaacaccgcctacgccaagtacgccgacttcagcatcagccccaacgccgtgagcgccgaggaggacggctacaccctgttcgtggccggcttcgaggacggcggcgccggcgacagcctgagctaccacagcggccagaagttcagcaccttcgacagagaccaggacctgttcgtgcagaactgcgccgccctgagcagcggcgccttctggttcagaagctgccacttcgccaacctgaacggcttctacctgggcggcagccacctgagctacgccaacggcatcaactgggcccagtggaagggcttctactacagcctgaagagaaccgagatgaagatcagaagagcctag

SEQ ID NO: 88897 - DNA, 840 bp, synthetic construct
  misc_feature 1..840: note = Description of Artificial Sequence: Synthetic coding sequence
  source 1..840: mol_type = other DNA
atgggcgagctgagccccctgcagagacccctggccaccgagggcaccatgaaggcccagggcgtgctgctgaagctggccctgctggccctgcccctgctgctgctgctgagcacccccccctgcgccccccaggtgagcggcatcagaggcgacgccctggagagattctgcctgcagcagcccctggactgcgacgacatctacgcccagggctaccagagcgacggcgtgtacctgatctaccccagcggccccagcgtgcccgtgcccgtgttctgcgacatgaccaccgagggcggcaagtggaccgtgttccagaagagattcaacggcagcgtgagcttcttcagaggctggaacgactacaagctgggcttcggcagagccgacggcgagtactggctgggcctgcagaacatgcacctgctgaccctgaagcagaagtacgagctgagagtggacctggaggacttcgagaacaacaccgcctacgccaagtacgccgacttcagcatcagccccaacgccgtgagcgccgaggaggacggctacaccctgttcgtggccggcttcgaggacggcggcgccggcgacagcctgagctaccacagcggccagaagttcagcaccttcgacagagaccaggacctgttcgtgcagaactgcgccgccctgagcagcggcgccttctggttcagaagctgccacttcgccaacctgaacggcttctacctgggcggcagccacctgagctacgccaacggcatcaactgggcccagtggaagggcttctactacagcctgaagagaaccgagatgaagatcagaagagcctag

SEQ ID NO: 88898 - DNA, 468 bp, synthetic construct
  misc_feature 1..468: note = Description of Artificial Sequence: Synthetic coding sequence
  source 1..468: mol_type = other DNA
atggtggacctgacccaggtgatggacgacgaggtgttcatggccttcgccagctacgccaccatcatcctgagcaagatgatgctgatgagcaccgccaccgccttctacagactgaccagaaaggtgttcgccaaccccgaggactgcgtggccttcggcaagggcgagaacgccaagaagtacctgagaaccgacgacagagtggagagagtgagaagagcccacctgaacgacctggagaacatcatccccttcctgggcatcggcctgctgtacagcctgagcggccccgaccccagcaccgccatcctgcacttcagactgttcgtgggcgccagaatctaccacaccatcgcctacctgacccccctgccccagcccaacagagccctgagcttcttcgtgggctacggcgtgaccctgagcatggcctacagactgctgaagagcaagctgtacctgtag

SEQ ID NO: 88899 - DNA, 468 bp, synthetic construct; identical to SEQ ID NO: 88898
  misc_feature 1..468: note = Description of Artificial Sequence: Synthetic coding sequence
  source 1..468: mol_type = other DNA

SEQ ID NO: 88900 - DNA, 468 bp, synthetic construct; identical to SEQ ID NO: 88898
  misc_feature 1..468: note = Description of Artificial Sequence: Synthetic coding sequence
  source 1..468: mol_type = other DNA

SEQ ID NO: 88901 - DNA, 468 bp, synthetic construct; identical to SEQ ID NO: 88898
  misc_feature 1..468: note = Description of Artificial Sequence: Synthetic coding sequence
  source 1..468: mol_type = other DNA

SEQ ID NO: 88902 - DNA, 234 bp, synthetic construct
  misc_feature 1..234: note = Description of Artificial Sequence: Synthetic coding sequence
  source 1..234: mol_type = other DNA
atggtggacctgacccaggtgatggacgacgaggtgttcatggccttcgccagctacgccaccatcatcctgagcaagatgatgctgatgagcaccgccaccgccttctacagactgaccagaaaggtgttcgccaaccccgaggactgcgtggccttcggcaagggcgagaacgccaagaagtacctgagaaccgacgacagagtggagagagtgagaagagcccacctgtag

SEQ ID NO: 88903 - DNA, 129 bp, synthetic construct
  misc_feature 1..129: note = Description of Artificial Sequence: Synthetic coding sequence
  source 1..129: mol_type = other DNA
atggtggacctgacccaggtgatggacgacgaggtgttcatggccttcgccagctacgccaccatcatcctgagcaagatgatgctgatgagcaccgccaccgccttctacagactgaccagaaagtag

SEQ ID NO: 88904 - DNA, 243 bp, synthetic construct
  misc_feature 1..243: note = Description of Artificial Sequence: Synthetic coding sequence
  source 1..243: mol_type = other DNA
atggtggacctgacccaggtgatggacgacgaggtgttcatggccttcgccagctacgccaccatcatcctgagcaagatgatgctgatgagcaccgccaccgccttctacagactgaccagaaaggtgttcgccaaccccgaggactgcgtggccttcggcaagggcgagaacgccaagaagtacctgagaaccgacgacagagtggagagagtgagaagagcccacctgaacgacctgtag

SEQ ID NO: 88905 - DNA, 264 bp, synthetic construct
  misc_feature 1..264: note = Description of Artificial Sequence: Synthetic coding sequence
  source 1..264: mol_type = other DNA
atggtggacctgacccaggtgatggacgacgaggtgttcatggccttcgccagctacgccaccatcatcctgagcaagatgatgctgatgagcaccgccaccgccttctacagactgaccagaaaggtgttcgccaaccccgaggactgcgtggccttcggcaagggcgagaacgccaagaagtacctgagaaccgacgacagagtggagagagtgagaagaatcaagcagaccctgagcatctacctggccagcagcatctag

SEQ ID NO: 88906 - DNA, 444 bp, synthetic construct
  misc_feature 1..444: note = Description of Artificial Sequence: Synthetic coding sequence
  source 1..444: mol_type = other DNA
atggccggcaacagcatcctgctggccgccgtgagcatcctgagcgcctgccagcagagctacttcgccctgcaggtgggcaaggccagactgaagtacaaggtgaccccccccgccgtgaccggcagccccgagttcgagagagtgttcagagcccagcagaactgcgtggagttctaccccatcttcatcatcaccctgtggatggccggctggtacttcaaccaggtgttcgccacctgcctgggcctggtgtacatctacggcagacacctgtacttctggggctacagcgaggccgccaagaagagaatcaccggcttcagactgagcctgggcatcctggccctgctgaccctgctgggcgccctgggcatcgccaacagcttcctggacgagtacctggacctgaacatcgccaagaagctgagaagacagttctag

SEQ ID NO: 88907 - DNA, 444 bp, synthetic construct; identical to SEQ ID NO: 88906
  misc_feature 1..444: note = Description of Artificial Sequence: Synthetic coding sequence
  source 1..444: mol_type = other DNA

SEQ ID NO: 88908 - DNA, 234 bp, synthetic construct
  misc_feature 1..234: note = Description of Artificial Sequence: Synthetic coding sequence
  source 1..234: mol_type = other DNA
atggccggcaacagcatcctgctggccgccgtgagcatcctgagcgcctgccagcagagctacttcgccctgcaggtgggcaaggccagactgaagtacaaggtgaccccccccgccgtgaccggcagccccgagttcgagagagtgttcagagcccacttctgctacctgagcggcagcggcgtgcacatctggcccagccccatcctgctgggcatcttcagaagctgctag

SEQ ID NO: 88909 - DNA, 501 bp, synthetic construct
  misc_feature 1..501: note = Description of Artificial Sequence: Synthetic coding sequence
  source 1..501: mol_type = other DNA
atgccctggagaggcagaagattcagactgtgcagaagaaagatggccgtgctgagcaaggagtacggcttcgtgctgctgaccggcgccgccagcttcatcatggtggcccacctggccatcaacgtgagcaaggccagaaagaagtacaaggtggagtaccccatcatgtacagcaccgaccccgagaacggccacatcttcaactgcatccagagagcccaccagaacaccctggaggtgtacccccccttcctgttcttcctggccgtgggcggcgtgtaccaccccagaatcgccagcggcctgggcctggcctggatcgtgggcagagtgctgtacgcctacggctactacaccggcgagcccagcaagagaagcagaggcgccctgggcagcatcgccctgctgggcctggtgggcaccaccgtgtgcagcgccttccagcacctgggctgggtgaagagcggcctgggcagcggccccaagtgctgccactag

SEQ ID NO: 88910 - DNA, 459 bp, synthetic construct
  misc_feature 1..459: note = Description of Artificial Sequence: Synthetic coding sequence
  source 1..459: mol_type = other DNA
atggccgtgctgagcaaggagtacggcttcgtgctgctgaccggcgccgccagcttcatcatggtggcccacctggccatcaacgtgagcaaggccagaaagaagtacaaggtggagtaccccatcatgtacagcaccgaccccgagaacggccacatcttcaactgcatccagagagcccaccagaacaccctggaggtgtacccccccttcctgttcttcctggccgtgggcggcgtgtaccaccccagaatcgccagcggcctgggcctggcctggatcgtgggcagagtgctgtacgcctacggctactacaccggcgagcccagcaagagaagcagaggcgccctgggcagcatcgccctgctgggcctggtgggcaccaccgtgtgcagcgccttccagcacctgggctgggtgaagagcggcctgggcagcggccccaagtgctgccactag

SEQ ID NO: 88911 - DNA, 501 bp, synthetic construct; identical to SEQ ID NO: 88909
  misc_feature 1..501: note = Description of Artificial Sequence: Synthetic coding sequence
  source 1..501: mol_type = other DNA

SEQ ID NO: 88912 - DNA, 501 bp, synthetic construct; identical to SEQ ID NO: 88909
  misc_feature 1..501: note = Description of Artificial Sequence: Synthetic coding sequence
  source 1..501: mol_type = other DNA

SEQ ID NO: 88913 - DNA, 459 bp, synthetic construct; identical to SEQ ID NO: 88910
  misc_feature 1..459: note = Description of Artificial Sequence: Synthetic coding sequence
  source 1..459: mol_type = other DNA

SEQ ID NO: 88914 - DNA, 501 bp, synthetic construct; identical to SEQ ID NO: 88909
  misc_feature 1..501: note = Description of Artificial Sequence: Synthetic coding sequence
  source 1..501: mol_type = other DNA

SEQ ID NO: 88915 - DNA, 972 bp, synthetic construct
  misc_feature 1..972: note = Description of Artificial Sequence: Synthetic coding sequence
  source 1..972: mol_type = other DNA
atgcccagactgaccttcgcccccaagggctggccccacccccccaccagcctgcactggtggctgttccaggagctgcccacccccagcgagaacagcatgccccccggcctgagcacccccaccgccagccaggagggcgccggccccgtgcccgaccccagccagcccaccagaagacagatcagactgagcagccccgagagacagagactgagcagcctgaacctgacccccgaccccgagatggagcccccccccaagccccccagaagctgcagcgccctggccagacacgccctggagagcagcttcgtgggctggggcctgcccgtgcagagcccccaggccctggtggccatggagaaggaggagaaggagagccccttcagcagcgaggaggaggaggaggacgtgcccctggacagcgacgtggagcaggccctgcagaccttcgccaagaccagcggcaccatgaacaactaccccacctggagaagaaccctgctgagaagagccaaggaggaggagatgaagagattctgcaaggcccagaccatccagagaagactgaacgagatcgaggccgccctgagagagctggaggccgagggcgtgaagctggagctggccctgagaagacagagcagcagccccgagcagcagaagaagctgtgggtgggccagctgctgcagctggtggacaagaagaacagcctggtggccgaggaggccgagctgatgatcaccgtgcaggagctgaacctggaggagaagcagtggcagctggaccaggagctgagaggctacatgaacagagaggagaacctgaagaccgccgccgacagacaggccgaggaccaggtgctgagaaagctggtggacctggtgaaccagagagacgccctgatcagattccaggaggagagaagactgagcgagctggccctgggcaccggcgcccagggctag

SEQ ID NO: 88916 - DNA, 2946 bp, synthetic construct
  misc_feature 1..2946: note = Description of Artificial Sequence: Synthetic coding sequence
  source 1..2946: mol_type = other DNA
atggccagccccaccagcaccaaccccgcccacgcccacttcgagagcttcctgcaggcccagctgtgccaggacgtgctgagcagcttccaggagctgtgcggcgccctgggcctggagcccggcggcggcctgccccagtaccacaagatcaaggaccagctgaactactggagcgccaagagcctgtggaccaagctggacaagagagccggccagcccgtgtaccagcagggcagagcctgcaccagcaccaagtgcctggtggtgggcgccggcccctgcggcctgagagtggccgtggagctggccctgctgggcgccagagtggtgctggtggagaagagaaccaagttcagcagacacaacgtgctgcacctgtggcccttcaccatccacgacctgagagccctgggcgccaagaagttctacggcagattctgcaccggcaccctggaccacatcagcatcagacagctgcagctgctgctgctgaaggtggccctgctgctgggcgtggagatccactggggcgtgaccttcaccggcctgcagcccccccccagaaagggcagcggctggagagcccagctgcagcccaacccccccgcccagctggccaactacgagttcgacgtgctgatcagcgccgccggcggcaagttcgtgcccgagggcttcaaggtgagagagatgagaggcaagctggccatcggcatcaccgccaacttcgtgaacggcagaaccgtggaggagacccaggtgcccgagatcagcggcgtggccagaatctacaaccagagcttcttccagagcctgctgaaggccaccggcatcgacctggagaacatcgtgtactacaaggacgacacccactacttcgtgatgaccgccaagaagcagtgcctgctgagactgggcgtgctgagacagcccttctggcccctgggcaccggcgtggccagaggcttcctggccgccttcgacgccgcctggatggtgaagagatgggccgagggcgccgagagcctggaggtgctggccgagagagagagcctgtaccagctgctgagccagaccagccccgagaacatgcacagaaacgtggcccagtacggcctggaccccgccaccagataccccaacctgaacctgagagccgtgacccccaaccaggtgagagacctgtacgacgtgctggccaaggagcccgtgcagagaaacaacgacaagaccgacaccggcatgcccgccaccggcagcgccggcacccaggaggagctgctgagatggtgccaggagcagaccgccggctaccccggcgtgcacgtgagcgacctgagcagcagctgggccgacggcctggccctgtgcgccctggtgtacagactgcagcccggcctgctggagcccagcgagctgcagggcctgggcgccctggaggccaccgcctgggccctgaaggtggccgagaacgagctgggcatcacccccgtggtgagcgcccaggccgtggtggccggcagcgaccccctgggcctgatcgcctacctgagccacttccacagcgccttcaagagcatggcccacagccccggccccgtgagccaggccagccccggcaccagcagcgccgtgctgttcctgagcaagctgcagagaaccctgcagagaagcagagccaaggagaacgccgaggacgccggcggcaagaagctgagactggagatggaggccgagacccccagcaccgaggtgccccccgaccccgagcccggcgtgcccctgaccccccccagccagcaccaggaggccggcgccggcgacctgtgcgccctgtgcggcgagcacctgtacgtgctggagagactgtgcgtgaacggccacttcttccacagaagctgcttcagatgccacacctgcgaggccaccctgtggcccggcggctacgagcagcaccccggcgacggccacttctactgcctgcagcacctgccccagaccgaccacaaggccgagggcagcgacagaggccccgagagccccgagctgcccacccccagcgagaacagcatgccccccggcctgagcacccccaccgccagccaggagggcgccggccccgtgcccgaccccagccagcccaccagaagacagatcagactgagcagccccgagagacagagactgagcagcctgaacctgacccccgaccccgagatggagcccccccccaagccccccagaagctgcagcgccctggccagacacgccctggagagcagcttcgtgggctggggcctgcccgtgcagagcccccaggccctggtggccatggagaaggaggagaaggagagccccttcagcagcgaggaggaggaggaggacgtgcccctggacagcgacgtggagcaggccctgcagaccttcgccaagaccagcggcaccatgaacaactaccccacctggagaagaaccctgctgagaagagccaaggaggaggagatgaagagattctgcaaggcccagaccatccagagaagactgaacgagatcgaggccgccctgagagagctggaggccgagggcgtgaagctggagctggccctgagaagacagagcagcagccccgagcagcagaagaagctgtgggtgggccagctgctgcagctggtggacaagaagaacagcctggtggccgaggaggccgagctgatgatcaccgtgcaggagctgaacctggaggagaagcagtggcagctggaccaggagctgagaggctacatgaacagagaggagaacctgaagaccgccgccgacagacaggccgaggaccaggtgctgagaaagctggtggacctggtgaaccagagagacgccctgatcagattccaggaggagagaagactgagcgagctggccctgggcaccggcgcccagggctag

SEQ ID NO: 88917 - DNA, 3204 bp, synthetic construct
  misc_feature 1..3204: note = Description of Artificial Sequence: Synthetic coding sequence
  source 1..3204: mol_type = other DNA
atggccagccccaccagcaccaaccccgcccacgcccacttcgagagcttcctgcaggcccagctgtgccaggacgtgctgagcagcttccaggagctgtgcggcgccctgggcctggagcccggcggcggcctgccccagtaccacaagatcaaggaccagctgaactactggagcgccaagagcctgtggaccaagctggacaagagagccggccagcccgtgtaccagcagggcagagcctgcaccagcaccaagtgcctggtggtgggcgccggcccctgcggcctgagagtggccgtggagctggccctgctgggcgccagagtggtgctggtggagaagagaaccaagttcagcagacacaacgtgctgcacctgtggcccttcaccatccacgacctgagagccctgggcgccaagaagttctacggcagattctgcaccggcaccctggaccacatcagcatcagacagctgcagctgctgctgctgaaggtggccctgctgctgggcgtggagatccactggggcgtgaccttcaccggcctgcagcccccccccagaaagggcagcggctggagagcccagctgcagcccaacccccccgcccagctggccaactacgagttcgacgtgctgatcagcgccgccggcggcaagttcgtgcccgagggcttcaaggtgagagagatgagaggcaagctggccatcggcatcaccgccaacttcgtgaacggcagaaccgtggaggagacccaggtgcccgagatcagcggcgtggccagaatctacaaccagagcttcttccagagcctgctgaaggccaccggcatcgacctggagaacatcgtgtactacaaggacgacacccactacttcgtgatgaccgccaagaagcagtgcctgctgagactgggcgtgctgagacaggactggcccgacaccaacagactgctgggcagcgccaacgtggtgcccgaggccctgcagagattcaccagagccgccgccgacttcgccacccacggcaagctgggcaagctggagttcgcccaggacgcccacggccagcccgacgtgagcgccttcgacttcaccagcatgatgagagccgagagcagcgccagagtgcaggagaagcacggcgccagactgctgctgggcctggtgggcgactgcctggtggagcccttctggcccctgggcaccggcgtggccagaggcttcctggccgccttcgacgccgcctggatggtgaagagatgggccgagggcgccgagagcctggaggtgctggccgagagagagagcctgtaccagctgctgagccagaccagccccgagaacatgcacagaaacgtggcccagtacggcctggaccccgccaccagataccccaacctgaacctgagagccgtgacccccaaccaggtgagagacctgtacgacgtgctggccaaggagcccgtgcagagaaacaacgacaagaccgacaccggcatgcccgccaccggcagcgccggcacccaggaggagctgctgagatggtgccaggagcagaccgccggctaccccggcgtgcacgtgagcgacctgagcagcagctgggccgacggcctggccctgtgcgccctggtgtacagactgcagcccggcctgctggagcccagcgagctgcagggcctgggcgccctggaggccaccgcctgggccctgaaggtggccgagaacgagctgggcatcacccccgtggtgagcgcccaggccgtggtggccggcagcgaccccctgggcctgatcgcctacctgagccacttccacagcgccttcaagagcatggcccacagccccggccccgtgagccaggccagccccggcaccagcagcgccgtgctgttcctgagcaagctgcagagaaccctgcagagaagcagagccaaggagaacgccgaggacgccggcggcaagaagctgagactggagatggaggccgagacccccagcaccgaggtgccccccgaccccgagcccggcgtgcccctgaccccccccagccagcaccaggaggccggcgccggcgacctgtgcgccctgtgcggcgagcacctgtacgtgctggagagactgtgcgtgaacggccacttcttccacagaagctgcttcagatgccacacctgcgaggccaccctgtggcccggcggctacgagcagcaccccggcgacggccacttctactgcctgcagcacctgccccagaccgaccacaaggccgagggcagcgacagaggccccgagagccccgagctgcccacccccagcgagaacagcatgccccccggcctgagcacccccaccgccagccaggagggcgccggccccgtgcccgaccccagccagcccaccagaagacagatcagactgagcagccccgagagacagagactgagcagcctgaacctgacccccgaccccgagatggagcccccccccaagccccccagaagctgcagcgccctggccagacacgccctggagagcagcttcgtgggctggggcctgcccgtgcagagcccccaggccctggtggccatggagaaggaggagaaggagagccccttcagcagcgaggaggaggaggaggacgtgcccctggacagcgacgtggagcaggccctgcagaccttcgccaagaccagcggcaccatgaacaactaccccacctggagaagaaccctgctgagaagagccaaggaggaggagatgaagagattctgcaaggcccagaccatccagagaagactgaacgagatcgaggccgccctgagagagctggaggccgagggcgtgaagctggagctggccctgagaagacagagcagcagccccgagcagcagaagaagctgtgggtgggccagctgctgcagctggtggacaagaagaacagcctggtggccgaggaggccgagctgatgatcaccgtgcaggagctgaacctggaggagaagcagtggcagctggaccaggagctgagaggctacatgaacagagaggagaacctgaagaccgccgccgacagacaggccgaggaccaggtgctgagaaagctggtggacctggtgaaccagagagacgccctgatcagattccaggaggagagaagactgagcgagctggccctgggcaccggcgcccagggctag

SEQ ID NO: 88918 - DNA, 3261 bp, synthetic construct
  misc_feature 1..3261: note = Description of Artificial Sequence: Synthetic coding sequence
  source 1..3261: mol_type = other DNA
atgagctgcctgagccacagcagcctgcccagctgctgccccccccaggaggccagcatggccagccccaccagcaccaaccccgcccacgcccacttcgagagcttcctgcaggcccagctgtgccaggacgtgctgagcagcttccaggagctgtgcggcgccctgggcctggagcccggcggcggcctgccccagtaccacaagatcaaggaccagctgaactactggagcgccaagagcctgtggaccaagctggacaagagagccggccagcccgtgtaccagcagggcagagcctgcaccagcaccaagtgcctggtggtgggcgccggcccctgcggcctgagagtggccgtggagctggccctgctgggcgccagagtggtgctggtggagaagagaaccaagttcagcagacacaacgtgctgcacctgtggcccttcaccatccacgacctgagagccctgggcgccaagaagttctacggcagattctgcaccggcaccctggaccacatcagcatcagacagctgcagctgctgctgctgaaggtggccctgctgctgggcgtggagatccactggggcgtgaccttcaccggcctgcagcccccccccagaaagggcagcggctggagagcccagctgcagcccaacccccccgcccagctggccaactacgagttcgacgtgctgatcagcgccgccggcggcaagttcgtgcccgagggcttcaaggtgagagagatgagaggcaagctggccatcggcatcaccgccaacttcgtgaacggcagaaccgtggaggagacccaggtgcccgagatcagcggcgtggccagaatctacaaccagagcttcttccagagcctgctgaaggccaccggcatcgacctggagaacatcgtgtactacaaggacgacacccactacttcgtgatgaccgccaagaagcagtgcctgctgagactgggcgtgctgagacaggactggcccgacaccaacagactgctgggcagcgccaacgtggtgcccgaggccctgcagagattcaccagagccgccgccgacttcgccacccacggcaagctgggcaagctggagttcgcccaggacgcccacggccagcccgacgtgagcgccttcgacttcaccagcatgatgagagccgagagcagcgccagagtgcaggagaagcacggcgccagactgctgctgggcctggtgggcgactgcctggtggagcccttctggcccctgggcaccggcgtggccagaggcttcctggccgccttcgacgccgcctggatggtgaagagatgggccgagggcgccgagagcctggaggtgctggccgagagagagagcctgtaccagctgctgagccagaccagccccgagaacatgcacagaaacgtggcccagtacggcctggaccccgccaccagataccccaacctgaacctgagagccgtgacccccaaccaggtgagagacctgtacgacgtgctggccaaggagcccgtgcagagaaacaacgacaagaccgacaccggcatgcccgccaccggcagcgccggcacccaggaggagctgctgagatggtgccaggagcagaccgccggctaccccggcgtgcacgtgagcgacctgagcagcagctgggccgacggcctggccctgtgcgccctggtgtacagactgcagcccggcctgctggagcccagcgagctgcagggcctgggcgccctggaggccaccgcctgggccctgaaggtggccgagaacgagctgggcatcacccccgtggtgagcgcccaggccgtggtggccggcagcgaccccctgggcctgatcgcctacctgagccacttccacagcgccttcaagagcatggcccacagccccggccccgtgagccaggccagccccggcaccagcagcgccgtgctgttcctgagcaagctgcagagaaccctgcagagaagcagagccaaggagaacgccgaggacgccggcggcaagaagctgagactggagatggaggccgagacccccagcaccgaggtgccccccgaccccgagcccggcgtgcccctgaccccccccagccagcaccaggaggccggcgccggcgacctgtgcgccctgtgcggcgagcacctgtacgtgctggagagactgtgcgtgaacggccacttcttccacagaagctgcttcagatgccacacctgcgaggccaccctgtggcccggcggctacgagcagcaccccggcgacggccacttctactgcctgcagcacctgccccagaccgaccacaaggccgagggcagcgacagaggccccgagagccccgagctgcccacccccagcgagaacagcatgccccccggcctgagcacccccaccgccagccaggagggcgccggccccgtgcccgaccccagccagcccaccagaagacagatcagactgagcagccccgagagacagagactgagcagcctgaacctgacccccgaccccgagatggagcccccccccaagccccccagaagctgcagcgccctggccagacacgccctggagagcagcttcgtgggctggggcctgcccgtgcagagcccccaggccctggtggccatggagaaggaggagaaggagagccccttcagcagcgaggaggaggaggaggacgtgcccctggacagcgacgtggagcaggccctgcagaccttcgccaagaccagcggcaccatgaacaactaccccacctggagaagaaccctgctgagaagagccaaggaggaggagatgaagagattctgcaaggcccagaccatccagagaagactgaacgagatcgaggccgccctgagagagctggaggccgagggcgtgaagctggagctggccctgagaagacagagcagcagccccgagcagcagaagaagctgtgggtgggccagctgctgcagctggtggacaagaagaacagcctggtggccgaggaggccgagctgatgatcaccgtgcaggagctgaacctggaggagaagcagtggcagctggaccaggagctgagaggctacatgaacagagaggagaacctgaagaccgccgccgacagacaggccgaggaccaggtgctgagaaagctggtggacctggtgaaccagagagacgccctgatcagattccaggaggagagaagactgagcgagctggccctgggcaccggcgcccagggctag

SEQ ID NO: 88919 - DNA, 1776 bp, synthetic construct
  misc_feature 1..1776: note = Description of Artificial Sequence: Synthetic coding sequence
  source 1..1776: mol_type = other DNA
cccaagtacgtgctgcccagcgaggcccaggtggtgcccgccaagcagctgcagccccaggacagaagcagcgtgcccgagcacagcctgctggccggcacccaggaggagctgctgagatggtgccaggagcagaccgccggctaccccggcgtgcacgtgagcgacctgagcagcagctgggccgacggcctggccctgtgcgccctggtgtacagactgcagcccggcctgctggagcccagcgagctgcagggcctgggcgccctggaggccaccgcctgggccctgaaggtggccgagaacgagctgggcatcacccccgtggtgagcgcccaggccgtggtggccggcagcgaccccctgggcctgatcgcctacctgagccacttccacagcgccttcaagagcatggcccacagccccggccccgtgagccaggccagccccggcaccagcagcgccgtgctgttcctgagcaagctgcagagaaccctgcagagaagcagagccaaggagaacgccgaggacgccggcggcaagaagctgagactggagatggaggccgagacccccagcaccgaggtgccccccgaccccgagcccggcgtgcccctgaccccccccagccagcaccaggaggccggcgccggcgacctgtgcgccctgtgcggcgagcacctgtacgtgctggagagactgtgcgtgaacggccacttcttccacagaagctgcttcagatgccacacctgcgaggccaccctgtggcccggcggctacgagcagcaccccggcgacggccacttctactgcctgcagcacctgccccagaccgaccacaaggccgagggcagcgacagaggccccgagagccccgagctgcccacccccagcgagaacagcatgccccccggcctgagcacccccaccgccagccaggagggcgccggccccgtgcccgaccccagccagcccaccagaagacagatcagactgagcagccccgagagacagagactgagcagcctgaacctgacccccgaccccgagatggagcccccccccaagccccccagaagctgcagcgccctggccagacacgccctggagagcagcttcgtgggctggggcctgcccgtgcagagcccccaggccctggtggccatggagaaggaggagaaggagagccccttcagcagcgaggaggaggaggaggacgtgcccctggacagcgacgtggagcaggccctgcagaccttcgccaagaccagcggcaccatgaacaactaccccacctggagaagaaccctgctgagaagagccaaggaggaggagatgaagagattctgcaaggcccagaccatccagagaagactgaacgagatcgaggccgccctgagagagctggaggccgagggcgtgaagctggagctggccctgagaagacagagcagcagccccgagcagcagaagaagctgtgggtgggccagctgctgcagctggtggacaagaagaacagcctggtggccgaggaggccgagctgatgatcaccgtgcaggagctgaacctggaggagaagcagtggcagctggaccaggagctgagaggctacatgaacagagaggagaacctgaagaccgccgccgacagacaggccgaggaccaggtgctgagaaagctggtggacctggtgaaccagagagacgccctgatcagattccaggaggagagaagactgagcgagctggccctgggcaccggcgcccagggctag

SEQ ID NO: 88920 - DNA, 735 bp, synthetic construct
  misc_feature 1..735: note = Description of Artificial Sequence: Synthetic coding sequence
  source 1..735: mol_type = other DNA
atggccagccccaccagcaccaaccccgcccacgcccacttcgagagcttcctgcaggcccagctgtgccaggacgtgctgagcagcttccaggagctgtgcggcgccctgggcctggagcccggcggcggcctgccccagtaccacaagatcaaggaccagctgaactactggagcgccaagagcctgtggaccaagctggacaagagagccggccagcccgtgtaccagcagggcagagcctgcaccagcaccaagtgcctggtggtgggcgccggcccctgcggcctgagagtggccgtggagctggccctgctgggcgccagagtggtgctggtggagaagagaaccaagttcagcagacacaacgtgctgcacctgtggcccttcaccatccacgacctgagagccctgggcgccaagaagttctacggcagattctgcaccggcaccctggaccacatcagcatcagacagctgcagctgctgctgctgaaggtggccctgctgctgggcgtggagatccactggggcgtgaccttcaccggcctgcagcccccccccagaaagggcagcggctggagagcccagctgcagcccaacccccccgcccagctggccaactacgagttcgacgtgctgatcagcgccgccggcggcaagttcgtgcccgagggcttcaaggtgagagagatgagaggcaagctggccatcggcatcaccgccaacttctag

SEQ ID NO: 88921 - DNA, 3375 bp, synthetic construct
  misc_feature 1..3375: note = Description of Artificial Sequence: Synthetic coding sequence
  source 1..3375: mol_type = other DNA
atgggcgagaacgaggacgagaagcaggcccaggccggccaggtgttcgagaacttcgtgcaggccagcacctgcaagggcaccctgcaggccttcaacatcctgaccagacacctggacctggaccccctggaccacagaaacttctacagcaagctgaagagcaaggtgaccacctggaaggccaaggccctgtggtacaagctggacaagagaggcagccacaaggagtacaagagaggcaagagctgcaccaacaccaagtgcctgatcgtgggcggcggcccctgcggcctgagaaccgccatcgagctggcctacctgggcgccaaggtggtggtggtggagaagagagacagcttcagcagaaacaacgtgctgcacctgtggcccttcaccatccacgacctgagaggcctgggcgccaagaagttctacggcaagttctgcgccggcagcatcgaccacatcagcatcagacagctgcagctgatcctgttcaaggtggccctgatgctgggcgtggagatccacgtgaacgtggagttcgtgaaggtgctggagccccccgaggaccaggagaaccagaagatcggctggagagccgagttcctgcccaccgaccacagcctgagcgagttcgagttcgacgtgatcatcggcgccgacggcagaagaaacaccctggagggcttcagaagaaaggagttcagaggcaagctggccatcgccatcaccgccaacttcatcaacagaaacagcaccgccgaggccaaggtggaggagatcagcggcgtggccttcatcttcaaccagaagttcttccaggacctgaaggaggagaccggcatcgacctggagaacatcgtgtactacaaggactgcacccactacttcgtgatgaccgccaagaagcagagcctgctggacaagggcgtgatcatcaacgactacatcgacaccgagatgctgctgtgcgccgagaacgtgaaccaggacaacctgctgagctacgccagagaggccgccgacttcgccaccaactaccagctgcccagcctggacttcgccatgaaccactacggccagcccgacgtggccatgttcgacttcacctgcatgtacgccagcgagaacgccgccctggtgagagagagacaggcccaccagctgctggtggccctggtgggcgacagcctgctggagcccttctggcccatgggcaccggctgcgccagaggcttcctggccgccttcgacaccgcctggatggtgaagagctggaaccagggcaccccccccctggagctgctggccgagagagagagcctgtacagactgctgccccagaccacccccgagaacatcaacaagaacttcgagcagtacaccctggaccccggcaccagataccccaacctgaacagccactgcgtgagaccccaccaggtgaagcacctgtacatcaccaaggagctggagcactaccccctggagagactgggcagcgtgagaagaagcgtgaacctgagcagaaaggagagcgacatcagacccagcaagctgctgacctggtgccagcagcagaccgagggctaccagcacgtgaacgtgaccgacctgaccaccagctggagaagcggcctggccctgtgcgccatcatccacagattcagacccgagctgatcaacttcgacagcctgaacgaggacgacgccgtggagaacaaccagctggccttcgacgtggccgagagagagttcggcatcccccccgtgaccaccggcaaggagatggccagcgcccaggagcccgacaagctgagcatggtgatgtacctgagcaagttctacgagctgttcagaggcacccccctgagacccgtggacagctggagaaagaactacggcgagaacgccgacctgagcctggccaagagcagcatcagcaacaactacctgaacctgaccttccccagaaagagaacccccagagtggacggccagaccggcgagaacgacatgaacaagagaagaagaaagggcttcaccaacctggacgagcccagcaacttcagcagcagaagcctgggcagcaaccaggagtgcggcagcagcaaggagggcggcaaccagaacaaggtgaagagcatggccaaccagctgctggccaagttcgaggagagcaccagaaaccccagcctgatgaagcaggagagaagagtgagcggcatcggcaagcccgtgctgtgcagcagcagcggcccccccgtgcacagctgctgccccaagcccgaggaggccacccccagccccagcccccccctgaagagacagttccccagcgtggtggtgaccggccacgtgctgagagagctgaagcaggtgagcgccggcagcgagtgcctgagcagaccctggagagccagagccaagagcgacctgcagctgggcggcaccgagaacttcgccaccctgcccagcaccagacccagagcccaggccctgagcggcgtgctgtggagactgcagcaggtggaggagaagatcctgcagaagagagcccagaacctggccaacagagagttccacaccaagaacatcaaggagaaggccgcccacctggccagcatgttcggccacggcgacttcccccagaacaagctgctgagcaagggcctgagccacacccacccccccagcccccccagcagactgcccagccccgaccccgccgccagcagcagccccagcaccgtggacagcgccagccccgccagaaaggagaagaagagccccagcggcttccacttccaccccagccacctgagaaccgtgcacccccagctgaccgtgggcaaggtgagcagcggcatcggcgccgccgccgaggtgctggtgaacctgtacatgaacgaccacagacccaaggcccaggccaccagccccgacctggagagcatgagaaagagcttccccctgaacctgggcggcagcgacacctgctacttctgcaagaagagagtgtacgtgatggagagactgagcgccgagggccacttcttccacagagagtgcttcagatgcagcatctgcgccaccaccctgagactggccgcctacaccttcgactgcgacgagggcaagttctactgcaagccccacttcatccactgcaagaccaacagcaagcagagaaagagaagagccgagctgaagcagcagagagaggaggaggccacctggcaggagcaggaggcccccagaagagacacccccaccgagagcagctgcgccgtggccgccatcggcaccctggagggcagcccccccgtgcacttcagcctgcccgtgctgcaccccctgctgggctag

SEQ ID NO: 88922 - DNA, 3312 bp, synthetic construct
  misc_feature 1..3312: note = Description of Artificial Sequence: Synthetic coding sequence
  source 1..3312: mol_type = other DNA
atgggcgagaacgaggacgagaagcaggcccaggccggccaggtgttcgagaacttcgtgcaggccagcacctgcaagggcaccctgcaggccttcaacatcctgaccagacacctggacctggaccccctggaccacagaaacttctacagcaagctgaagagcaaggtgaccacctggaaggccaaggccctgtggtacaagctggacaagagaggcagccacaaggagtacaagagaggcaagagctgcaccaacaccaagtgcctgatcgtgggcggcggcccctgcggcctgagaaccgccatcgagctggcctacctgggcgccaaggtggtggtggtggagaagagagacagcttcagcagaaacaacgtgctgcacctgtggcccttcaccatccacgacctgagaggcctgggcgccaagaagttctacggcaagttctgcgccggcagcatcgaccacatcagcatcagacagctgcagctgatcctgttcaaggtggccctgatgctgggcgtggagatccacgtgaacgtggagttcgtgaaggtgctggagccccccgaggaccaggagaaccagaagatcggctggagagccgagttcctgcccaccgaccacagcctgagcgagttcgagttcgacgtgatcatcggcgccgacggcagaagaaacaccctggagggcttcagaagaaaggagttcagaggcaagctggccatcgccatcaccgccaacttcatcaacagaaacagcaccgccgaggccaaggtggaggagatcagcggcgtggccttcatcttcaaccagaagttcttccaggacctgaaggaggagaccggcatcgacctggagaacatcgtgtactacaaggactgcacccactacttcgtgatgaccgccaagaagcagagcctgctggacaagggcgtgatcatcaacgactacatcgacaccgagatgctgctgtgcgccgagaacgtgaaccaggacaacctgctgagctacgccagagaggccgccgacttcgccaccaactaccagctgcccagcctggacttcgccatgaaccactacggccagcccgacgtggccatgttcgacttcacctgcatgtacgccagcgagaacgccgccctggtgagagagagacaggcccaccagctgctggtggccctggtgggcgacagcctgctggagcccttctggcccatgggcaccggctgcgccagaggcttcctggccgccttcgacaccgcctggatggtgaagagctggaaccagggcaccccccccctggagctgctggccgagagagagagcctgtacagactgctgccccagaccacccccgagaacatcaacaagaacttcgagcagtacaccctggaccccggcaccagataccccaacctgaacagccactgcgtgagaccccaccaggtgaagcacctgtacatcaccaaggagctggagcactaccccctggagagactgggcagcgtgagaagaagcgtgaacctgagcagaaaggagagcgacatcagacccagcaagctgctgacctggtgccagcagcagaccgagggctaccagcacgtgaacgtgaccgacctgaccaccagctggagaagcggcctggccctgtgcgccatcatccacagattcagacccgagctgatcaacttcgacagcctgaacgaggacgacgccgtggagaacaaccagctggccttcgacgtggccgagagagagttcggcatcccccccgtgaccaccggcaaggagatggccagcgcccaggagcccgacaagctgagcatggtgatgtacctgagcaagttctacgagctgttcagaggcacccccctgagacccgtggacagctggagaaagaactacggcgagaacgccgacctgagcctggccaagagcagcatcagcaacaactacctgaacctgaccttccccagaaagagaacccccagagtggacggccagaccggcgagaacgacatgaacaagagaagaagaaagggcttcaccaacctggacgagcccagcaacttcagcagcagaagcctgggcagcaaccaggagtgcggcagcagcaaggagggcggcaaccagaacaaggtgaagagcatggccaaccagctgctggccaagttcgaggagagcaccagaaaccccagcctgatgaagcaggagagaagagtgagcggcatcggcaagcccgtgctgtgcagcagcagcggcccccccgtgcacagctgctgccccaagcccgaggaggccacccccagccccagcccccccctgaagagacagttccccagcgtggtggtgaccggccacgtgctgagagagctgaagcaggtgagcgccggcagcgagtgcctgagcagaccctggagagccagagccaagagcgacctgcagctgggcggcaccgagaacttcgccaccctgcccagcaccagacccagagcccaggccctgagcggcgtgctgtggagactgcagcaggtggaggagaagatcctgcagaagagagcccagaacctggccaacagagagttccacaccaagaacatcaaggagaaggccgcccacctggccagcatgttcggccacggcgacttcccccagaacaagctgctgagcaagggcctgagccacacccacccccccagcccccccagcagactgcccagccccgaccccgccgccagcagcagccccagcaccgtggacagcgccagccccgccagaaagctgaccgtgggcaaggtgagcagcggcatcggcgccgccgccgaggtgctggtgaacctgtacatgaacgaccacagacccaaggcccaggccaccagccccgacctggagagcatgagaaagagcttccccctgaacctgggcggcagcgacacctgctacttctgcaagaagagagtgtacgtgatggagagactgagcgccgagggccacttcttccacagagagtgcttcagatgcagcatctgcgccaccaccctgagactggccgcctacaccttcgactgcgacgagggcaagttctactgcaagccccacttcatccactgcaagaccaacagcaagcagagaaagagaagagccgagctgaagcagcagagagaggaggaggccacctggcaggagcaggaggcccccagaagagacacccccaccgagagcagctgcgccgtggccgccatcggcaccctggagggcagcccccccgtgcacttcagcctgcccgtgctgcaccccctgctgggctag

SEQ ID NO: 88923 - DNA, 2931 bp, synthetic construct
  misc_feature 1..2931: note = Description of Artificial Sequence: Synthetic coding sequence
  source 1..2931: mol_type = other DNA
atgggcgagaacgaggacgagaagcaggcccaggccggccaggtgttcgagaacttcgtgcaggccagcacctgcaagggcaccctgcaggccttcaacatcctgaccagacacctggacctggaccccctggaccacagaaacttctacagcaagctgaagagcaaggtgaccacctggaaggccaaggccctgtggtacaagctggacaagagaggcagccacaaggagtacaagagaggcaagagctgcaccaacaccaagtgcctgatcgtgggcggcggcccctgcggcctgagaaccgccatcgagctggcctacctgggcgccaaggtggtggtggtggagaagagagacagcttcagcagaaacaacgtgctgcacctgtggcccttcaccatccacgacctgagaggcctgggcgccaagaagttctacggcaagttctgcgccggcagcatcgaccacatcagcatcagacagctgcagctgatcctgttcaaggtggccctgatgctgggcgtggagatccacgtgaacgtggagttcgtgaaggtgctggagccccccgaggaccaggagaaccagaagatcggctggagagccgagttcctgcccaccgaccacagcctgagcgagttcgagttcgacgtgatcatcggcgccgacggcagaagaaacaccctggagggcttcagaagaaaggagttcagaggcaagctggccatcgccatcaccgccaacttcatcaacagaaacagcaccgccgaggccaaggtggaggagatcagcggcgtggccttcatcttcaaccagaagttcttccaggacctgaaggaggagaccggcatcgacctggagaacatcgtgtactacaaggactgcacccactacttcgtgatgaccgccaagaagcagagcctgctggacaagggcgtgatcatcaacgactacatcgacaccgagatgctgctgtgcgccgagaacgtgaaccaggacaacctgctgagctacgccagagaggccgccgacttcgccaccaactaccagctgcccagcctggacttcgccatgaaccactacggccagcccgacgtggccatgttcgacttcacctgcatgtacgccagcgagaacgccgccctggtgagagagagacaggcccaccagctgctggtggccctggtgggcgacagcctgctggagcccttctggcccatgggcaccggctgcgccagaggcttcctggccgccttcgacaccgcctggatggtgaagagctggaaccagggcaccccccccctggagctgctggccgagagagagagcctgtacagactgctgccccagaccacccccgagaacatcaacaagaacttcgagcagtacaccctggaccccggcaccagataccccaacctgaacagccactgcgtgagaccccaccaggtgaagcacctgtacatcaccaaggagctggagcactaccccctggagagactgggcagcgtgagaagaagcgtgaacctgagcagaaaggagagcgacatcagacccagcaagctgctgacctggtgccagcagcagaccgagggctaccagcacgtgaacgtgaccgacctgaccaccagctggagaagcggcctggccctgtgcgccatcatccacagattcagacccgagctgatcaacttcgacagcctgaacgaggacgacgccgtggagaacaaccagctggccttcgacgtggccgagagagagttcggcatcccccccgtgaccaccggcaaggagatggccagcgcccaggagcccgacaagctgagcatggtgatgtacctgagcaagttctacgagctgttcagaggcacccccctgagacccgtggacagctggagaaagaactacggcgagaacgccgacctgagcctggccaagagcagcatcagcaacaactacctgaacctgaccttccccagaaagagaacccccagagtggacggccagaccggcgagaacgacatgaacaagagaagaagaaagggcttcaccaacctggacgagcccagcaacttcagcagcagaagcctgggcagcaaccaggagtgcggcagcagcaaggagggcggcaaccagaacaaggtgaagagcatggccaaccagctgctggccaagttcgaggagagcaccagaaaccccagcctgatgaagcaggagaagaagagccccagcggcttccacttccaccccagccacctgagaaccgtgcacccccaggagagcatgagaaagagcttccccctgaacctgggcggcagcgacacctgctacttctgcaagaagagagtgtacgtgatggagagactgagcgccgagggccacttcttccacagagagtgcttcagatgcagcatctgcgccaccaccctgagactggccgcctacaccttcgactgcgacgagggcaagttctactgcaagccccacttcatccactgcaagaccaacagcaagcagagaaagagaagagccgagctgaagcagcagagagaggaggaggccacctggcaggagcaggaggcccccagaagagacacccccaccgagagcagctgcgccgtggccgccatcggcaccctggagggcagcccccccggcatcagcaccagcttcttcagaaaggtgctgggctggcccctgagactgcccagagacctgtgcaactggatgcagggcctgctgcaggccgccggcctgcacatcagagacaacgcctacaactactgctacatgtacgagctgctgagcctgggcctgcccctgctgtgggccttcagcgaggtgctggccgccatgtacagagagagcgagggcagcctggagagcatctgcaactgggtgctgagatgcttccccgtgaagctgagatag

SEQ ID NO: 88924 - DNA, 363 bp, synthetic construct
  misc_feature 1..363: note = Description of Artificial Sequence: Synthetic coding sequence
  source 1..363: mol_type = other DNA
atgggcgagaacgaggacgagaagcaggcccaggccggccaggtgttcgagaacttcgtgcaggccagcacctgcaagggcaccctgcaggccttcaacatcctgaccagacacctggacctggaccccctggaccacagaaacttctacagcaagctgaagagcaaggtgaccacctggaaggccaaggccctgtggtacaagctggacaagagaggcagccacaaggagtacaagagaggcaagagctgcaccaacaccaagtgcctgatcgtgggcggcggcccctgcggcctgagaaccgccatcgagctggcctacctgggcgccaaggtggtggtggtggagaagagagacagctag

SEQ ID NO: 88925 - DNA, 405 bp, synthetic construct
  misc_feature 1..405: note = Description of Artificial Sequence: Synthetic coding sequence
  source 1..405: mol_type = other DNA
atgggcgagaacgaggacgagaagcaggcccaggccggccaggtgttcgagaacttcgtgcaggccagcacctgcaagggcaccctgcaggccttcaacatcctgaccagacacctggacctggaccccctggaccacagaaacttctacagcaagctgaagagcaaggtgaccacctggaaggccaaggccctgtggtacaagctggacaagagaggcagccacaaggagtacaagagaggcaagagctgcaccaacaccaagtgcctgatcgtgggcggcggcccctgcggcctgagaaccgccatcgagctggcctacctgggcgccaaggtggtggtggtggagaagagagacagcttcagcagaaacaacgtgctgcacctgtggcccttcaccatctag

SEQ ID NO: 88926 - DNA, 267 bp, synthetic construct
  misc_feature 1..267: note = Description of Artificial Sequence: Synthetic coding sequence
  source 1..267: mol_type = other DNA
atgggcgagaacgaggacgagaagcaggcccaggccggccaggtgttcgagaacttcgtgcaggccagcacctgcaagggcaccctgcaggccttcaacatcctgaccagacacctggacctggaccccctggaccacagaaacttctacagcaagctgaagagcaaggtgaccacctggaaggccaaggccctgtggtacaagctggacaagagaggcagccacaaggagtacaagagaggcaagagctgcaccaacaccaagtag

SEQ ID NO: 88927 - DNA, 12 bp, synthetic construct
  misc_feature 1..12: note = Description of Artificial Sequence: Synthetic coding sequence
  source 1..12: mol_type = other DNA
atgggcgagtag

SEQ ID NO: 88928 - DNA, 297 bp, synthetic construct
  misc_feature 1..297: note = Description of Artificial Sequence: Synthetic coding sequence
  source 1..297: mol_type = other DNA
atgggcgagaacgaggacgagaagcaggcccaggccggccaggtgttcgagaacttcgtgcaggccagcacctgcaagggcaccctgcaggccttcaacatcctgaccagacacctggacctggaccccctggaccacagaaacttctacagcaagctgaagagcaaggtgaccacctggaaggccaaggccctgtggtacaagctggacaagagaggcagccacaaggagtacaagagaggcaagagctgcaccaacaccaagtgcctgatcgtgggcggcggcccctgcggctag

SEQ ID NO: 88929 - DNA, 267 bp, synthetic construct; identical to SEQ ID NO: 88926
  misc_feature 1..267: note = Description of Artificial Sequence: Synthetic coding sequence
  source 1..267: mol_type = other DNA

SEQ ID NO: 88930 - DNA, 309 bp, synthetic construct
  misc_feature 1..309: note = Description of Artificial Sequence: Synthetic coding sequence
  source 1..309: mol_type = other DNA
atgggcgagaacgaggacgagaagcaggcccaggccggccaggtgttcgagaacttcgtgcaggccagcacctgcaagggcaccctgcaggccttcaacatcctgaccagacacctggacctggaccccctggaccacagaaacttctacagcaagctgaagagcaaggtgaccacctggaaggccaaggccctgtggtacaagctggacaagagaggcagccacaaggagtacaagagaggcaagagctgcaccaacaccaagtgcctgatcgtgggcggcggcccctgcggcctgagaaccgcctag

SEQ ID NO: 88931 - DNA, 2805 bp, synthetic construct
  misc_feature 1..2805: note = Description of Artificial Sequence: Synthetic coding sequence
  source 1..2805: mol_type = other DNA
atgggcgagaacgaggacgagaagcaggcccaggccggccaggtgttcgagaacttcgtgcaggccagcacctgcaagggcaccctgcaggccttcaacatcctgaccagacacctggacctggaccccctggaccacagaaacttctacagcaagctgaagagcaaggtgaccacctggaaggccaaggccctgtggtacaagctggacaagagaggcagccacaaggagtacaagagaggcaagagctgcaccaacaccaagtgcctgatcgtgggcggcggcccctgcggcctgagaaccgccatcgagctggcctacctgggcgccaaggtggtggtggtggagaagagagacagcttcagcagaaacaacgtgctgcacctgtggcccttcaccatccacgacctgagaggcctgggcgccaagaagttctacggcaagttctgcgccggcagcatcgaccacatcagcatcagacagctgcagctgatcctgttcaaggtggccctgatgctgggcgtggagatccacgtgaacgtggagttcgtgaaggtgctggagccccccgaggaccaggagaaccagaagatcggctggagagccgagttcctgcccaccgaccacagcctgagcgagttcgagttcgacgtgatcatcggcgccgacggcagaagaaacaccctggagggcttcagaagaaaggagttcagaggcaagctggccatcgccatcaccgccaacttcatcaacagaaacagcaccgccgaggccaaggtggaggagatcagcggcgtggccttcatcttcaaccagaagttcttccaggacctgaaggaggagaccggcatcgacctggagaacatcgtgtactacaaggactgcacccactacttcgtgatgaccgccaagaagcagagcctgctggacaagggcgtgatcatcaacgactacatcgacaccgagatgctgctgtgcgccgagaacgtgaaccaggacaacctgctgagctacgccagagaggccgccgacttcgccaccaactaccagctgcccagcctggacttcgccatgaaccactacggccagcccgacgtggccatgttcgacttcacctgcatgtacgccagcgagaacgccgccctggtgagagagagacaggcccaccagctgctggtggccctggtgggcgacagcctgctggagcccttctggcccatgggcaccggctgcgccagaggcttcctggccgccttcgacaccgcctggatggtgaagagctggaaccagggcaccccccccctggagctgctggccgagagagagagcctgtacagactgctgccccagaccacccccgagaacatcaacaagaacttcgagcagtacaccctggaccccggcaccagataccccaacctgaacagccactgcgtgagaccccaccaggtgaagcacctgtacatcaccaaggagctggagcactaccccctggagagactgggcagcgtgagaagaagcgtgaacctgagcagaaaggagagcgacatcagacccagcaagctgctgacctggtgccagcagcagaccgagggctaccagcacgtgaacgtgaccgacctgaccaccagctggagaagcggcctggccctgtgcgccatcatccacagattcagacccgagctgatcaacttcgacagcctgaacgaggacgacgccgtggagaacaaccagctggccttcgacgtggccgagagagagttcggcatcccccccgtgaccaccggcaaggagatggccagcgcccaggagcccgacaagctgagcatggtgatgtacctgagcaagttctacgagctgttcagaggcacccccctgagacccgtggacagctggagaaagaactacggcgagaacgccgacctgagcctggccaagagcagcatcagcaacaactacctgaacctgaccttccccagaaagagaacccccagagtggacggccagaccggcgagaacgacatgaacaagagaagaagaaagggcttcaccaacctggacgagcccagcaacttcagcagcagaagcctgggcagcaaccaggagtgcggcagcagcaaggagggcggcaaccagaacaaggtgaagagcatggccaaccagctgctggccaagttcgaggagagcaccagaaaccccagcctgatgaagcaggagaagaagagccccagcggcttccacttccaccccagccacctgagaaccgtgcacccccagctgaccgtgggcaaggtgagcagcggcatcggcgccgccgccgaggtgctggtgaacctgtacatgaacgaccacagacccaaggcccaggccaccagccccgacctggagagcatgagaaagagcttccccctgaacctgggcggcagcgacacctgctacttctgcaagaagagagtgtacgtgatggagagactgagcgccgagggccacttcttccacagagagtgcttcagatgcagcatctgcgccaccaccctgagactggccgcctacaccttcgactgcgacgagggcaagttctactgcaagccccacttcatccactgcaagaccaacagcaagcagagaaagagaagagccgagctgaagcagcagagagaggaggaggccacctggcaggagcaggaggcccccagaagagacacccccaccgagagcagctgcgccgtggccgccatcggcaccctggagggcagcccccccgtgcacttcagcctgcccgtgctgcaccccctgctgggctag

SEQ ID NO: 88932 - DNA, 1638 bp, synthetic construct
  misc_feature 1..1638: note = Description of Artificial Sequence: Synthetic coding sequence
  source 1..1638: mol_type = other DNA
atgagaagcagccccgacctgaacagccactgcgtgagaccccaccaggtgaagcacctgtacatcaccaaggagctggagcactaccccctggagagactgggcagcgtgagaagaagcgtgaacctgagcagaaaggagagcgacatcagacccagcaagctgctgacctggtgccagcagcagaccgagggctaccagcacgtgaacgtgaccgacctgaccaccagctggagaagcggcctggccctgtgcgccatcatccacagattcagacccgagctgatcaacttcgacagcctgaacgaggacgacgccgtggagaacaaccagctggccttcgacgtggccgagagagagttcggcatcccccccgtgaccaccggcaaggagatggccagcgcccaggagcccgacaagctgagcatggtgatgtacctgagcaagttctacgagctgttcagaggcacccccctgagacccgtggacagctggagaaagaactacggcgagaacgccgacctgagcctggccaagagcagcatcagcaacaactacctgaacctgaccttccccagaaagagaacccccagagtggacggccagaccggcgagaacgacatgaacaagagaagaagaaagggcttcaccaacctggacgagcccagcaacttcagcagcagaagcctgggcagcaaccaggagtgcggcagcagcaaggagggcggcaaccagaacaaggtgaagagcatggccaaccagctgctggccaagttcgaggagagcaccagaaaccccagcctgatgaagcaggagaagaagagccccagcggcttccacttccaccccagccacctgagaaccgtgcacccccagctgaccgtgggcaaggtgagcagcggcatcggcgccgccgccgaggtgctggtgaacctgtacatgaacgaccacagacccaaggcccaggccaccagccccgacctggagagcatgagaaagagcttccccctgaacctgggcggcagcgacacctgctacttctgcaagaagagagtgtacgtgatggagagactgagcgccgagggccacttcttccacagagagtgcttcagatgcagcatctgcgccaccaccctgagactggccgcctacaccttcgactgcgacgagggcaagttctactgcaagccccacttcatccactgcaagaccaacagcaagcagagaaagagaagagccgagctgaagcagcagagagaggaggaggccacctggcaggagcaggaggcccccagaagagacacccccaccgagagcagctgcgccgtggccgccatcggcaccctggagggcagcccccccggcatcagcaccagcttcttcagaaaggtgctgggctggcccctgagactgcccagagacctgtgcaactggatgcagggcctgctgcaggccgccggcctgcacatcagagacaacgcctacaactactgctacatgtacgagctgctgagcctgggcctgcccctgctgtgggccttcagcgaggtgctggccgccatgtacagagagagcgagggcagcctggagagcatctgcaactgggtgctgagatgcttccccgtgaagctgagatag

SEQ ID NO: 88933 - DNA, 3273 bp, synthetic construct
  misc_feature 1..3273: note = Description of Artificial Sequence: Synthetic coding sequence
  source 1..3273: mol_type = other DNA
atggccaccctgctgagccacccccagcagagaccccccttcctgagacaggccatcaagatcagaagaagaagagtgagagacctgcaggacccccccccccagatggcccccgagatccagccccccagccaccacttcagccccgagcagagagccctgctgtacgaggacgccctgtacaccgtgctgcacagactgggccaccccgagcccaaccacgtgaccgaggccagcgagctgctgagatacctgcaggaggccttccacgtggagcccgaggagcaccagcagaccctgcagagagtgagagagctggagaagcccatcttctgcctgaaggccaccgtgaagcaggccaagggcatcctgggcaaggacgtgagcggcttcagcgacccctactgcctgctgggcatcgagcagggcgtgggcgtgcccggcggcagccccggcagcagacacagacagaaggccgtggtgagacacaccatccccgaggaggagacccacagaacccaggtgatcacccagaccctgaaccccgtgtgggacgagaccttcatcctggagttcgaggacatcaccaacgccagcttccacctggacatgtgggacctggacaccgtggagagcgtgagacagaagctgggcgagctgaccgacctgcacggcctgagaagaatcttcaaggaggccagaaaggacaagggccaggacgacttcctgggcaacgtggtgctgagactgcaggacctgagatgcagagaggaccagtggtaccccctggagcccagaaccgagacctaccccgacagaggccagtgccacctgcagttccagctgatccacaagagaagagccaccagcgccagcagaagccagcccagctacaccgtgcacctgcacctgctgcagcagctggtgagccacgaggtgacccagcacgaggccggcagcaccagctgggacggcagcctgagcccccaggccgccaccgtgctgttcctgcacgccacccagaaggacctgagcgacttccaccagagcatggcccagtggctggcctacagcagactgtaccagagcctggagttccccagcagctgcctgctgcaccccatcaccagcatcgagtaccagtggatccagggcagactgaaggccgagcagcaggaggagctggccgccagcttcagcagcctgctgacctacggcctgagcctgatcagaagattcagaagcgtgttccccctgagcgtgagcgacagccccgccagactgcagagcctgctgagagtgctggtgcagatgtgcaagatgaaggccttcggcgagctgtgccccaacaccgcccccctgccccagctggtgaccgaggccctgcagaccggcaccaccgagtggttccacctgaagcagcagcaccaccagcccatggtgcagggcatccccgaggccggcaaggccctgctgggcctggtgcaggacgtgatcggcgacctgcaccagtgccagagaacctgggacaagatcttccacaacaccctgaagatccacctgttcagcatggccttcagagagctgcagtggctggtggccaagagagtgcaggaccacaccaccgtggtgggcgacgtggtgagccccgagatgggcgagagcctgttccagctgtacatcagcctgaaggagctgtgccagctgagaatgagcagcagcgagagagacggcgtgctggccctggacaacttccacagatggttccagcccgccatccccagctggctgcagaagacctacaacgaggccctggccagagtgcagagagccgtgcagatggacgagctggtgcccctgggcgagctgaccaagcacagcaccagcgccgtggacctgagcacctgcttcgcccagatcagccacaccgccagacagctggactggcccgaccccgaggaggccttcatgatcaccgtgaagttcgtggaggacacctgcagactggccctggtgtactgcagcctgatcaaggccagagccagagagctgagcagcggccagaaggaccagggccaggccgccaacatgctgtgcgtggtggtgaacgacatggagcagctgagactggtgatcggcaagctgcccgcccagctggcctgggaggccctggagcagagagtgggcgccgtgctggagcagggccagctgcagaacaccctgcacgcccagctgcagagcgccctggccggcctgggccacgagatcagaaccggcgtgagaaccctggccgagcagctggaggtgggcatcgccaagcacatccagaagctggtgggcgtgagagagagcgtgctgcccgaggacgccatcctgcccctgatgaagttcctggaggtggagctgtgctacatgaacaccaacctggtgcaggagaacttcagcagcctgctgaccctgctgtggacccacaccctgaccgtgctggtggaggccgccgccagccagagaagcagcagcctggccagcaacagactgaagatcgccctgcagaacctggagatctgcttccacgccgagggctgcggcctgccccccaaggccctgcacaccgccaccttccaggccctgcagagagacctggagctgcaggccgccagcagcagagagctgatcagaaagtacttctgcagcagaatccagcagcaggccgagaccaccagcgaggagctgggcgccgtgaccgtgaaggccagctacagagccagcgagcagaagctgagagtggagctgctgagcgccagcagcctgctgcccctggacagcaacggcagcagcgaccccttcgtgcagctgaccctggagcccagacacgagttccccgagctggccgccagagagacccagaagcacaagaaggacctgcaccccctgttcgacgagaccttcgagttcctggtgcccgccgagccctgcagaaaggccggcgcctgcctgctgctgaccgtgctggactacgacaccctgggcgccgacgacctggagggcgaggccttcctgcccctgagagaggtgcccggcctgagcggcagcgaggagcccggcgaggtgccccagaccagactgcccctgacctaccccgcccccaacggcgaccccatcctgcagctgctggagggcagaaagggcgacagagaggcccaggtgttcgtgagactgagaagacacagagccaagcaggccagccagcacgccctgagacccgccccctag

SEQ ID NO: 88934 - DNA, 2847 bp, synthetic construct
  misc_feature 1..2847: note = Description of Artificial Sequence: Synthetic coding sequence
  source 1..2847: mol_type = other DNA
atggaggagagaaagcacgagaccatgaaccccgcccacgtgctgttcgacagattcgtgcaggccaccacctgcaagggcaccctgaaggccttccaggagctgtgcgaccacctggagctgaagcccaaggactacagaagcttctaccacaagctgaagagcaagctgaactactggaaggccaaggccctgtgggccaagctggacaagagaggcagccacaaggactacaagaagggcaaggcctgcaccaacaccaagtgcctgatcatcggcgccggcccctgcggcctgagaaccgccatcgacctgagcctgctgggcgccaaggtggtggtgatcgagaagagagacgccttcagcagaaacaacgtgctgcacctgtggcccttcaccatccacgacctgagaggcctgggcgccaagaagttctacggcaagttctgcgccggcgccatcgaccacatcagcatcagacagctgcagctgatcctgctgaaggtggccctgatcctgggcatcgagatccacgtgaacgtggagttccagggcctgatccagccccccgaggaccaggagaacgagagaatcggctggagagccctggtgcaccccaagacccaccccgtgagcgagtacgagttcgaggtgatcatcggcggcgacggcagaagaaacaccctggagggcttcagaagaaaggagttcagaggcaagctggccatcgccatcaccgccaacttcatcaacagaaacaccaccgccgaggccaaggtggaggagatcagcggcgtggccttcatcttcaaccagaagttcttccaggagctgagagaggccaccggcatcgacctggagaacatcgtgtactacaaggacgacacccactacttcgtgatgaccgccaagaagcagagcctgctggacaagggcgtgatcctgcacgactacgccgacaccgagctgctgctgagcagagagaacgtggaccaggaggccctgctgagctacgccagagaggccgccgacttcagcacccagcagcagctgcccagcctggacttcgccatcaaccactacggccagcccgacgtggccatgttcgacttcacctgcatgtacgccagcgagaacgccgccctggtgagagagcagaacggccaccagctgctggtggccctggtgggcgacagcctgctggagcccttctggcccatgggcaccggcatcgccagaggcttcctggccgccatggacagcgcctggatggtgagaagctggagcctgggcaccagccccctggaggtgctggccgagagagagagcatctacagactgctgccccagaccacccccgagaacgtgagcaagaacttcagccagtacagcatcgaccccgtgaccagataccccaacatcaacgtgaacttcctgagacccagccaggtgagacacctgtacgacaccggcgagaccaaggacatccacctggagatggagagcctggtgaacagcagaaccacccccaagctgaccagaaacgagagcgtggccagaagcagcaagctgctgggctggtgccagagacagaccgacggctacgccggcgtgaacgtgaccgacctgaccatgagctggaagagcggcctggccctgtgcgccatcatccacagatacagacccgacctgatcgacttcgacagcctggacgagcagaacgtggagaagaacaaccagctggccttcgacatcgccgagaaggagctgggcatcagccccatcatgaccggcaaggagatggccagcgtgggcgagcccgacaagctgagcatggtgatgtacctgacccagttctacgagatgttcaaggacagcctgcccagcagcgacaccctggacctgaacgccgaggagaaggccgtgctgatcgccagcaccagaagccccatcagcttcctgagcaagctgggccagaccatcagcagaaagagaagccccaaggacaagaaggagaaggacctggacggcgccggcaagagaagaaagaccagccagagcgaggaggaggaggcccccagaggccacagaggcgagagacccaccctggtgagcaccctgaccgacagaagaatggacgtggccgtgggcaaccagaacaaggtgaagtacatggccacccagctgctggccaagttcgaggagaacgcccccgcccagagcatcggcatcagaagacagggcagcatgaagaaggagttcccccagaacctgggcggcagcgacacctgctacttctgccagaagagagtgtacgtgatggagagactgagcgccgagggcaagttcttccacagaagctgcttcaagtgcgagtactgcgccaccaccctgagactgagcgcctacgcctacgacatcgaggacggcaagttctactgcaagccccactactgctacagactgagcggctacgcccagagaaagagacccgccgtggcccccctgagcggcaaggaggccaagggccccctgcaggacggcgccaccaccgacgccaacggcagagccaacgccgtggccagcagcaccgagagaacccccggcagcggcgtgaacggcctggaggagcccagcatcgccaagagactgagaggcacccccgagagaatcgagctggagaactacagactgagcctgagacaggccgaggccctgcaggaggtgcccgaggagacccaggccgagcacaacctgagcagcgtgctggacaccggcgccgaggaggacgtggccagcagaagcgccagaagagccgccggcagaccccccgccaccagaccctag

SEQ ID NO: 88935 - DNA, 2901 bp, synthetic construct
  misc_feature 1..2901: note = Description of Artificial Sequence: Synthetic coding sequence
  source 1..2901: mol_type = other DNA
atggaggagagaaagcacgagaccatgaaccccgcccacgtgctgttcgacagattcgtgcaggccaccacctgcaagggcaccctgaaggccttccaggagctgtgcgaccacctggagctgaagcccaaggactacagaagcttctaccacaagctgaagagcaagctgaactactggaaggccaaggccctgtgggccaagctggacaagagaggcagccacaaggactacaagaagggcaaggcctgcaccaacaccaagtgcctgatcatcggcgccggcccctgcggcctgagaaccgccatcgacctgagcctgctgggcgccaaggtggtggtgatcgagaagagagacgccttcagcagaaacaacgtgctgcacctgtggcccttcaccatccacgacctgagaggcctgggcgccaagaagttctacggcaagttctgcgccggcgccatcgaccacatcagcatcagacagctgcagctgatcctgctgaaggtggccctgatcctgggcatcgagatccacgtgaacgtggagttccagggcctgatccagccccccgaggaccaggagaacgagagaatcggctggagagccctggtgcaccccaagacccaccccgtgagcgagtacgagttcgaggtgatcatcggcggcgacggcagaagaaacaccctggagggcttcagaagaaaggagttcagaggcaagctggccatcgccatcaccgccaacttcatcaacagaaacaccaccgccgaggccaaggtggaggagatcagcggcgtggccttcatcttcaaccagaagttcttccaggagctgagagaggccaccggcatcgacctggagaacatcgtgtactacaaggacgacacccactacttcgtgatgaccgccaagaagcagagcctgctggacaagggcgtgatcctgcacgactacgccgacaccgagctgctgctgagcagagagaacgtggaccaggaggccctgctgagctacgccagagaggccgccgacttcagcacccagcagcagctgcccagcctggacttcgccatcaaccactacggccagcccgacgtggccatgttcgacttcacctgcatgtacgccagcgagaacgccgccctggtgagagagcagaacggccaccagctgctggtggccctggtgggcgacagcctgctggagcccttctggcccatgggcaccggcatcgccagaggcttcctggccgccatggacagcgcctggatggtgagaagctggagcctgggcaccagccccctggaggtgctggccgagagagagagcatctacagactgctgccccagaccacccccgagaacgtgagcaagaacttcagccagtacagcatcgaccccgtgaccagataccccaacatcaacgtgaacttcctgagacccagccaggtgagacacctgtacgacaccggcgagaccaaggacatccacctggagatggagagcctggtgaacagcagaaccacccccaagctgaccagaaacgagagcgtggccagaagcagcaagctgctgggctggtgccagagacagaccgacggctacgccggcgtgaacgtgaccgacctgaccatgagctggaagagcggcctggccctgtgcgccatcatccacagatacagacccgacctgatcgacttcgacagcctggacgagcagaacgtggagaagaacaaccagctggccttcgacatcgccgagaaggagctgggcatcagccccatcatgaccggcaaggagatggccagcgtgggcgagcccgacaagctgagcatggtgatgtacctgacccagttctacgagatgttcaaggacagcctgcccagcagcgacaccctggacctgaacgccgaggagaaggccgtgctgatcgccagcaccagaagccccatcagcttcctgagcaagctgggccagaccatcagcagaaagagaagccccaaggacaagaaggagaaggacctggacggcgccggcaagagaagaaagaccagccagagcgaggaggaggaggcccccagaggccacagaggcgagagacccaccctggtgagcaccctgaccgacagaagaatggacgtggccgtgggcaaccagaacaaggtgaagtacatggccacccagctgctggccaagttcgaggagaacgcccccgcccagagcatcggcatcagaagacagggcagcatgaagaaggagttcccccagaacctgggcggcagcgacacctgctacttctgccagaagagagtgtacgtgatggagagactgagcgccgagggcaagttcttccacagaagctgcttcaagtgcgagtactgcgccaccaccctgagactgagcgcctacgcctacgacatcgaggacggcaagttctactgcaagccccactactgctacagactgagcggctacgcccagagaaagagacccgccgtggcccccctgagcggcaaggaggccaagggccccctgcaggacggcgccaccaccgacgccaacggcagagccaacgccgtggccagcagcaccgagagaacccccggcagcggcgtgaacggcctggaggagcccagcatcgccaagagactgagaggcacccccgagagaatcgagctggagaactacagactgagcctgagacaggccgaggccctgcaggaggtgcccgaggagacccaggccgagcacaacctgagcagcgtgctggacaccggcgccgaggaggacgtggccagcagagactgggtgagcccctggctgcccagaatggtgagcaacagctgggcccagatgatccaccccccccagccccccaccgtgctgggcagccagatgtag

SEQ ID NO: 88936 - DNA, 4713 bp, synthetic construct
  misc_feature 1..4713: note = Description of Artificial Sequence: Synthetic coding sequence
  source 1..4713: mol_type = other DNA
atgagcgacagcctgtggaccgccctgagcaacttcagcatgcccagcttccccggcggcagcatgttcagaagaaccaagagctgcagaaccagcaacagaaagagcctgatcctgaccagcaccagccccaccctgcccagaccccacagccccctgcccggccacctgggcagcagccccctggacagccccagaaacttcagccccaacacccccgcccacttcagcttcgccagcagcagaagagccgacggcagaagatggagcctggccagcctgcccagcagcggctacggcaccaacacccccagcagcaccgtgagcagcagctgcagcagccaggagagactgcaccagctgccctaccagcccaccgtggacgagctgcacttcctgagcaagcacttcggcagcaccgagagcatcaccgacgaggacggcggcagaagaagccccgccgtgagacccagaagcagaagcctgagccccggcagaagccccagcagctacgacaacgagatcgtgatgatgaaccacgtgtacaaggagagattccccaaggccaccgcccagatggaggagaagctgagagacttcaccagagcctacgagcccgacagcgtgctgcccctggccgacggcgtgctgagcttcatccaccaccagatcatcgagctggccagagactgcctgaccaagagcagagacggcctgatcaccaccgtgtacttctacgagctgcaggagaacctggagaagctgctgcaggacgcctacgagagaagcgagagcctggaggtggccttcgtgacccagctggtgaagaagctgctgatcatcatcagcagacccgccagactgctggagtgcctggagttcaaccccgaggagttctaccacctgctggaggccgccgagggccacgccaaggagggccacctggtgaagaccgacatccccagatacatcatcagacagctgggcctgaccagagaccccttccccgacgtggtgcacctggaggagcaggacagcggcggcagcaacacccccgagcaggacgacctgagcgagggcagaagcagcaaggccaagaagccccccggcgagaacgacttcgacaccatcaagctgatcagcaacggcgcctacggcgccgtgtacctggtgagacacagagacaccagacagagattcgccatgaagaagatcaacaagcagaacctgatcctgagaaaccagatccagcaggccttcgtggagagagacatcctgaccttcgccgagaaccccttcgtggtgggcatgttctgcagcttcgagaccagaagacacctgtgcatggtgatggagtacgtggagggcggcgactgcgccaccctgctgaagaacatcggcgccctgcccgtggagatggccagaatgtacttcgccgagaccgtgctggccctggagtacctgcacaactacggcatcgtgcacagagacctgaagcccgacaacctgctgatcaccagcatgggccacatcaagctgaccgacttcggcctgagcaagatgggcctgatgagcctgaccaccaacctgtacgagggccacatcgagaaggacgccagagagttcctggacaagcaggtgtgcggcacccccgagtacatcgcccccgaggtgatcctgagacagggctacggcaagcccgtggactggtgggccatgggcatcatcctgtacgagttcctggtgggctgcgtgcccttcttcggcgacacccccgaggagctgttcggccaggtgatcagcgacgacatcctgtggcccgagggcgacgaggccctgcccaccgaggcccagctgctgatcagcagcctgctgcagaccaaccccctggtgagactgggcgccggcggcgccttcgaggtgaagcagcacagcttcttcagagacctggactggaccggcctgctgagacagaaggccgagttcatcccccacctggagagcgaggacgacaccagctacttcgacaccagaagcgacagataccaccacgtgaacagctacgacgaggacgacaccaccgaggaggagcccgtggagatcagacagttcagcagctgcagccccagattcagcaaggtgtacagcagcatggagcagctgagccagcacgagcccaagacccccgtggccgccgccggcagcagcaagagagagcccagcaccaagggccccgaggagaaggtggccggcaagagagagggcctgggcggcctgaccctgagagagaagacctggagaggcggcagccccgagatcaagagattcagcgccagcgaggccagcttcctggagggcgaggccagcccccccctgggcgccagaagaagattcagcgccctgctggagcccagcagattcagcgccccccaggaggacgaggacgaggccagactgagaagaccccccagacccagcagcgaccccgccggcagcctggacgccagagcccccaaggaggagacccagggcgagggcaccagcagcgccggcgacagcgaggccaccgacagacccagacccggcgacctgtgcccccccagcaaggacggcgacgccagcggccccagagccaccaacgacctggtgctgagaagagccagacaccagcagatgagcggcgacgtggccgtggagaagagacccagcagaaccggcggcaaggtgatcaagagcgccagcgccaccgccctgagcgtgatgatccccgccgtggacccccacggcagcagccccctggccagccccatgagccccagaagcctgagcagcaaccccagcagcagagacagcagccccagcagagactacagccccgccgtgagcggcctgagaagccccatcaccatccagagaagcggcaagaagtacggcttcaccctgagagccatcagagtgtacatgggcgacaccgacgtgtacagcgtgcaccacatcgtgtggcacgtggaggagggcggccccgcccaggaggccggcctgtgcgccggcgacctgatcacccacgtgaacggcgagcccgtgcacggcatggtgcaccccgaggtggtggagctgatcctgaagagcggcaacaaggtggccgtgaccaccacccccttcgagaacaccagcatcagaatcggccccgccagaagaagcagctacaaggccaagatggccagaagaaacaagagacccagcgccaaggagggccaggagagcaagaagagaagcagcctgttcagaaagatcaccaagcagagcaacctgctgcacaccagcagaagcctgagcagcctgaacagaagcctgagcagcagcgacagcctgcccggcagccccacccacggcctgcccgccagaagccccacccacagctacagaagcacccccgacagcgcctacctgggcgccagcagccagagcagcagccccgccagcagcacccccaacagccccgccagcagcgccagccaccacatcagacccagcaccctgcacggcctgagccccaagctgcacagacagtacagaagcgccagatgcaagagcgccggcaacatccccctgagccccctggcccacacccccagccccacccaggccagccccccccccctgcccggccacaccgtgggcagcagccacaccacccagagcttccccgccaagctgcacagcagcccccccgtggtgagacccagacccaagagcgccgagccccccagaagccccctgctgaagagagtgcagagcgccgagaagctgggcgccagcctgagcgccgacaagaagggcgccctgagaaagcacagcctggaggtgggccaccccgacttcagaaaggacttccacggcgagctggccctgcacagcctggccgagagcgacggcgagaccccccccgtggagggcctgggcgcccccagacaggtggccgtgagaagactgggcagacaggagagccccctgagcctgggcgccgaccccctgctgcccgagggcgccagcagaccccccgtgagcagcaaggagaaggagagccccggcggcgccgaggcctgcaccccccccagagccaccacccccggcggcagaaccctggagagagacgtgggctgcaccagacaccagagcgtgcagaccgaggacggcaccggcggcatggccagagccgtggccaaggccgccctgagccccgtgcaggagcacgagaccggcagaagaagcagcagcggcgaggccggcacccccctggtgcccatcgtggtggagcccgccagacccggcgccaaggccgtggtgccccagcccctgggcgccgacagcaagggcctgcaggagcccgcccccctggcccccagcgtgcccgaggcccccagaggcagagagagatgggtgctggaggtggtggaggagagaaccaccctgagcggccccagaagcaagcccgccagccccaagctgagccccgagccccagacccccagcctggcccccgccaagtgcagcgcccccagcagcgccgtgacccccgtgccccccgccagcctgctgggcagcggcaccaagccccaggtgggcctgaccagcagatgccccgccgaggccgtgccccccgccggcctgaccaagaagggcgtgagcagccccgccccccccggcccctag

SEQ ID NO: 88937 - DNA, 2178 bp, synthetic construct
  misc_feature 1..2178: note = Description of Artificial Sequence: Synthetic coding sequence
  source 1..2178: mol_type = other DNA
atgagcgacagcctgtggaccgccctgagcaacttcagcatgcccagcttccccggcggcagcatgttcagaagaaccaagagctgcagaaccagcaacagaaagagcctgatcctgaccagcaccagccccaccctgcccagaccccacagccccctgcccggccacctgggcagcagccccctggacagccccagaaacttcagccccaacacccccgcccacttcagcttcgccagcagcagaagagccgacggcagaagatggagcctggccagcctgcccagcagcggctacggcaccaacacccccagcagcaccgtgagcagcagctgcagcagccaggagagactgcaccagctgccctaccagcccaccgtggacgagctgcacttcctgagcaagcacttcggcagcaccgagagcatcaccgacgaggacggcggcagaagaagccccgccgtgagacccagaagcagaagcctgagccccggcagaagccccagcagctacgacaacgagatcgtgatgatgaaccacgtgtacaaggagagattccccaaggccaccgcccagatggaggagaagctgagagacttcaccagagcctacgagcccgacagcgtgctgcccctggccgacggcgtgctgagcttcatccaccaccagatcatcgagctggccagagactgcctgaccaagagcagagacggcctgatcaccaccgtgtacttctacgagctgcaggagaacctggagaagctgctgcaggacgcctacgagagaagcgagagcctggaggtggccttcgtgacccagctggtgaagaagctgctgatcatcatcagcagacccgccagactgctggagtgcctggagttcaaccccgaggagttctaccacctgctggaggccgccgagggccacgccaaggagggccacctggtgaagaccgacatccccagatacatcatcagacagctgggcctgaccagagaccccttccccgacgtggtgcacctggaggagcaggacagcggcggcagcaacacccccgagcaggacgacctgagcgagggcagaagcagcaaggccaagaagccccccggcgagaacgacttcgacaccatcaagctgatcagcaacggcgcctacggcgccgtgtacctggtgagacacagagacaccagacagagattcgccatgaagaagatcaacaagcagaacctgatcctgagaaaccagatccagcaggccttcgtggagagagacatcctgaccttcgccgagaaccccttcgtggtgggcatgttctgcagcttcgagaccagaagacacctgtgcatggtgatggagtacgtggagggcggcgactgcgccaccctgctgaagaacatcggcgccctgcccgtggagatggccagaatgtacttcgccgagaccgtgctggccctggagtacctgcacaactacggcatcgtgcacagagacctgaagcccgacaacctgctgatcaccagcatgggccacatcaagctgaccgacttcggcctgagcaagatgggcctgatgagcctgaccaccaacctgtacgagggccacatcgagaaggacgccagagagttcctggacaagcaggtgtgcggcacccccgagtacatcgcccccgaggtgatcctgagacagggctacggcaagcccgtggactggtgggccatgggcatcatcctgtacgagttcctggtgggctgcgtgcccttcttcggcgacacccccgaggagctgttcggccaggtgatcagcgacgacatcctgtggcccgagggcgacgaggccctgcccaccgaggcccagctgctgatcagcagcctgctgcagaccaaccccctggtgagactgggcgccggcggcgccttcgaggtgaagcagcacagcttcttcagagacctggactggaccggcctgctgagacagaaggccgagttcatcccccacctggagagcgaggacgacaccagctacttcgacaccagaagcgacagataccaccacgtgaacagctacgacgaggacgacaccaccgaggaggagcccgtggagatcagacagttcagcagctgcagccccagattcagcaaggtgtacagcctgagaatccacatgtacacctacaagtag

SEQ ID NO: 88938 - DNA, 5397 bp, synthetic construct
  misc_feature 1..5397: note = Description of Artificial Sequence: Synthetic coding sequence
  source 1..5397: mol_type = other DNA
atgaagagaagcagatgcagagacagaccccagccccccccccccgacagaagagaggacggcgtgcagagagccgccgagctgagccagagcctgccccccagaagaagagccccccccggcagacagagactggaggagagaaccggccccgccggccccgagggcaaggagcaggacgtggtgaccggcgtgagccccctgctgttcagaaagctgagcaaccccgacatcttcagcagcaccggcaaggtgaagctgcagagacagctgagccaggacgactgcaagctgtggagaggcaacctggccagcagcctgagcggcaagcagctgctgcccctgagcagcagcgtgcacagcagcgtgggccaggtgacctggcagagcagcggcgaggccagcaacctggtgagaatgagaaaccagagcctgggccagagcgcccccagcctgaccgccggcctgaaggagctgagcctgcccagaagaggcagcttctgcagaaccagcaacagaaagagcctgatcgtgaccagcagcaccagccccaccctgcccagaccccacagccccctgcacggccacaccggcaacagccccctggacagccccagaaacttcagccccaacgcccccgcccacttcagcttcgtgcccgccagaagaaccgacggcagaagatggagcctggccagcctgcccagcagcggctacggcaccaacacccccagcagcaccgtgagcagcagctgcagcagccaggagaagctgcaccagctgcccttccagcccaccgccgacgagctgcacttcctgaccaagcacttcagcaccgagagcgtgcccgacgaggagggcagacagagccccgccatgagacccagaagcagaagcctgagccccggcagaagccccgtgagcttcgacagcgagatcatcatgatgaaccacgtgtacaaggagagattccccaaggccaccgcccagatggaggagagactggccgagttcatcagcagcaacacccccgacagcgtgctgcccctggccgacggcgccctgagcttcatccaccaccaggtgatcgagatggccagagactgcctggacaagagcagaagcggcctgatcaccagccagtacttctacgagctgcaggacaacctggagaagctgctgcaggacgcccacgagagaagcgagagcagcgaggtggccttcgtgatgcagctggtgaagaagctgatgatcatcatcgccagacccgccagactgctggagtgcctggagttcgaccccgaggagttctaccacctgctggaggccgccgagggccacgccaaggagggccagggcatcaagtgcgacatccccagatacatcgtgagccagctgggcctgaccagagaccccctggaggagatggcccagctgagcagctgcgacagccccgacacccccgagaccgacgacagcatcgagggccacggcgccagcctgcccagcaagaagacccccagcgaggaggacttcgagaccatcaagctgatcagcaacggcgcctacggcgccgtgttcctggtgagacacaagagcaccagacagagattcgccatgaagaagatcaacaagcagaacctgatcctgagaaaccagatccagcaggccttcgtggagagagacatcctgaccttcgccgagaaccccttcgtggtgagcatgttctgcagcttcgacaccaagagacacctgtgcatggtgatggagtacgtggagggcggcgactgcgccaccctgctgaagaacatcggcgccctgcccgtggacatggtgagactgtacttcgccgagaccgtgctggccctggagtacctgcacaactacggcatcgtgcacagagacctgaagcccgacaacctgctgatcaccagcatgggccacatcaagctgaccgacttcggcctgagcaagatcggcctgatgagcctgaccaccaacctgtacgagggccacatcgagaaggacgccagagagttcctggacaagcaggtgtgcggcacccccgagtacatcgcccccgaggtgatcctgagacagggctacggcaagcccgtggactggtgggccatgggcatcatcctgtacgagttcctggtgggctgcgtgcccttcttcggcgacacccccgaggagctgttcggccaggtgatcagcgacgagatcgtgtggcccgagggcgacgaggccctgccccccgacgcccaggacctgaccagcaagctgctgcaccagaaccccctggagagactgggcaccggcagcgcctacgaggtgaagcagcaccccttcttcaccggcctggactggaccggcctgctgagacagaaggccgagttcatcccccagctggagagcgaggacgacaccagctacttcgacaccagaagcgagagataccaccacatggacagcgaggacgaggaggaggtgagcgaggacggctgcctggagatcagacagttcagcagctgcagccccagattcaacaaggtgtacagcagcatggagagactgagcctgctggaggagagaagaacccccccccccaccaagagaagcctgagcgaggagaaggaggaccacagcgacggcctggccggcctgaagggcagagacagaagctgggtgatcggcagccccgagatcctgagaaagagactgagcgtgagcgagagcagccacaccgagagcgacagcagcccccccatgaccgtgagaagaagatgcagcggcctgctggacgcccccagattccccgagggccccgaggaggccagcagcaccctgagaagacagccccaggagggcatctgggtgctgaccccccccagcggcgagggcgtgagcggccccgtgaccgagcacagcggcgagcagagacccaagctggacgaggaggccgtgggcagaagcagcggcagcagccccgccatggagaccagaggcagaggcaccagccagctggccgagggcgccaccgccaaggccatcagcgacctggccgtgagaagagccagacacagactgctgagcggcgacagcaccgagaagagaaccgccagacccgtgaacaaggtgatcaagagcgccagcgccaccgccctgagcctgctgatccccagcgagcaccacacctgcagccccctggccagccccatgagcccccacagccagagcagcaaccccagcagcagagacagcagccccagcagagacttcctgcccgccctgggcagcatgagaccccccatcatcatccacagagccggcaagaagtacggcttcaccctgagagccatcagagtgtacatgggcgacagcgacgtgtacaccgtgcaccacatggtgtggcacgtggaggacggcggccccgccagcgaggccggcctgagacagggcgacctgatcacccacgtgaacggcgagcccgtgcacggcctggtgcacaccgaggtggtggagctgatcctgaagagcggcaacaaggtggccatcagcaccacccccctggagaacaccagcatcaaggtgggccccgccagaaagggcagctacaaggccaagatggccagaagaagcaagagaagcagaggcaaggacggccaggagagcagaaagagaagcagcctgttcagaaagatcaccaagcaggccagcctgctgcacaccagcagaagcctgagcagcctgaacagaagcctgagcagcggcgagagcggccccggcagccccacccacagccacagcctgagccccagaagccccacccagggctacagagtgacccccgacgccgtgcacagcgtgggcggcaacagcagccagagcagcagccccagcagcagcgtgcccagcagccccgccggcagcggccacaccagacccagcagcctgcacggcctggcccccaagctgcagagacagtacagaagccccagaagaaagagcgccggcagcatccccctgagccccctggcccacacccccagcccccccccccccaccgccagcccccagagaagccccagccccctgagcggccacgtggcccaggccttccccaccaagctgcacctgagcccccccctgggcagacagctgagcagacccaagagcgccgagccccccagaagccccctgctgaagagagtgcagagcgccgagaagctggccgccgccctggccgccagcgagaagaagctggccaccagcagaaagcacagcctggacctgccccacagcgagctgaagaaggagctgccccccagagaggtgagccccctggaggtggtgggcgccagaagcgtgctgagcggcaagggcgccctgcccggcaagggcgtgctgcagcccgcccccagcagagccctgggcaccctgagacaggacagagccgagagaagagagagcctgcagaagcaggaggccatcagagaggtggacagcagcgaggacgacaccgaggagggccccgagaacagccagggcgcccaggagctgagcctggccccccaccccgaggtgagccagagcgtggcccccaagggcgccggcgagagcggcgaggaggaccccttccccagcagagaccccagaagcctgggccccatggtgcccagcctgctgaccggcatcaccctgggcccccccagaatggagagccccagcggcccccacagaagactgggcagcccccaggccatcgaggaggccgccagcagcagcagcgccggccccaacctgggccagagcggcgccaccgaccccatcccccccgagggctgctggaaggcccagcacctgcacacccaggccctgaccgccctgagccccagcaccagcggcctgacccccaccagcagctgcagcccccccagcagcaccagcggcaagctgagcatgtggagctggaagagcctgatcgagggccccgacagagccagccccagcagaaaggccaccatggccggcggcctggccaacctgcaggacctggagaacaccacccccgcccagcccaagaacctgagccccagagagcagggcaagacccagccccccagcgcccccagactggcccaccccagctacgaggaccccagccagggctggctgtgggagagcgagtgcgcccaggccgtgaaggaggaccccgccctgagcatcacccaggtgcccgacgccagcggcgacagaagacaggacgtgccctgcagaggctgccccctgacccagaagagcgagcccagcctgagaagaggccaggagcccggcggccaccagaagcacagagacctggccctggtgcccgacgagctgctgaagcagacctag

SEQ ID NO: 88939 - DNA, 2379 bp, synthetic construct
  misc_feature 1..2379: note = Description of Artificial Sequence: Synthetic coding sequence
  source 1..2379: mol_type = other DNA
atgttcagccccaccagcgcccccgccctgttcctgaccaaggtgcccttcagcgccgactgcgccctggccaccagccccctggccatcttcctgaaccccagagcccacagcagccccggcaccccctgcagcagcagacccctgccctggagctgcagaaccagcaacagaaagagcctgatcgtgaccagcagcaccagccccaccctgcccagaccccacagccccctgcacggccacaccggcaacagccccctggacagccccagaaacttcagccccaacgcccccgcccacttcagcttcgtgcccgccagaagaaccgacggcagaagatggagcctggccagcctgcccagcagcggctacggcaccaacacccccagcagcaccgtgagcagcagctgcagcagccaggagaagctgcaccagctgcccttccagcccaccgccgacgagctgcacttcctgaccaagcacttcagcaccgagagcgtgcccgacgaggagggcagacagagccccgccatgagacccagaagcagaagcctgagccccggcagaagccccgtgagcttcgacagcgagatcatcatgatgaaccacgtgtacaaggagagattccccaaggccaccgcccagatggaggagagactggccgagttcatcagcagcaacacccccgacagcgtgctgcccctggccgacggcgccctgagcttcatccaccaccaggtgatcgagatggccagagactgcctggacaagagcagaagcggcctgatcaccagccagtacttctacgagctgcaggacaacctggagaagctgctgcaggacgcccacgagagaagcgagagcagcgaggtggccttcgtgatgcagctggtgaagaagctgatgatcatcatcgccagacccgccagactgctggagtgcctggagttcgaccccgaggagttctaccacctgctggaggccgccgagggccacgccaaggagggccagggcatcaagtgcgacatccccagatacatcgtgagccagctgggcctgaccagagaccccctggaggagatggcccagctgagcagctgcgacagccccgacacccccgagaccgacgacagcatcgagggccacggcgccagcctgcccagcaagaagacccccagcgaggaggacttcgagaccatcaagctgatcagcaacggcgcctacggcgccgtgttcctggtgagacacaagagcaccagacagagattcgccatgaagaagatcaacaagcagaacctgatcctgagaaaccagatccagcaggccttcgtggagagagacatcctgaccttcgccgagaaccccttcgtggtgagcatgttctgcagcttcgacaccaagagacacctgtgcatggtgatggagtacgtggagggcggcgactgcgccaccctgctgaagaacatcggcgccctgcccgtggacatggtgagactgtacttcgccgagaccgtgctggccctggagtacctgcacaactacggcatcgtgcacagagacctgaagcccgacaacctgctgatcaccagcatgggccacatcaagctgaccgacttcggcctgagcaagatcggcctgatgagcctgaccaccaacctgtacgagggccacatcgagaaggacgccagagagttcctggacaagcaggtgtgcggcacccccgagtacatcgcccccgaggtgatcctgagacagggctacggcaagcccgtggactggtgggccatgggcatcatcctgtacgagttcctggtgggctgcgtgcccttcttcggcgacacccccgaggagctgttcggccaggtgatcagcgacgagatcgtgtggcccgagggcgacgaggccctgccccccgacgcccaggacctgaccagcaagctgctgcaccagaaccccctggagagactgggcaccggcagcgcctacgaggtgaagcagcaccccttcttcaccggcctggactggaccggcctgctgagacagaaggccgagttcatcccccagctggagagcgaggacgacaccagctacttcgacaccagaagcgagagataccaccacatggacagcgaggacgaggaggaggtgagcgaggacggctgcctggagatcagacagttcagcagctgcagccccagattcaacaaggtgtacagcagcatggagagactgagcctgctggaggagagaagaacccccccccccaccaagagaagcctgagcgaggagaaggaggaccacagcgacggcctggccggcctgaagggcagagacagaagctgggtgatcggcagccccgagcaccaccccagcgcctag

SEQ ID NO: 88940 - DNA, 4827 bp, synthetic construct
  misc_feature 1..4827: note = Description of Artificial Sequence: Synthetic coding sequence
  source 1..4827: mol_type = other DNA
atgaagagaagcagatgcagagacagaccccagccccccccccccgacagaagagaggacggcgtgcagagagccgccgagctgagccagagcctgccccccagaagaagagccccccccggcagacagagactggaggagagaaccggccccgccggccccgagggcaaggagcaggacgtggtgaccggcgtgagccccctgctgttcagaaagctgagcaaccccgacatcttcagcagcaccggcaaggtgaagctgcagagacagctgagccaggacgactgcaagctgtggagaggcaacctggccagcagcctgagcggcaagcagctgctgcccctgagcagcagcgtgcacagcagcgtgggccaggtgacctggcagagcagcggcgaggccagcaacctggtgagaatgagaaaccagagcctgggccagagcgcccccagcctgaccgccggcctgaaggagctgagcctgcccagaagaggcagcttctgcagaaccagcaacagaaagagcctgatcgtgaccagcagcaccagccccaccctgcccagaccccacagccccctgcacggccacaccggcaacagccccctggacagccccagaaacttcagccccaacgcccccgcccacttcagcttcgtgcccgccagaagaaccgacggcagaagatggagcctggccagcctgcccagcagcggctacggcaccaacacccccagcagcaccgtgagcagcagctgcagcagccaggagaagctgcaccagctgcccttccagcccaccgccgacgagctgcacttcctgaccaagcacttcagcaccgagagcgtgcccgacgaggagggcagacagagccccgccatgagacccagaagcagaagcctgagccccggcagaagccccgtgagcttcgacagcgagatcatcatgatgaaccacgtgtacaaggagagattccccaaggcccacgagagaagcgagagcagcgaggtggccttcgtgatgcagctggtgaagaagctgatgatcatcatcgccagacccgccagactgctggagtgcctggagttcgaccccgaggagttctaccacctgctggaggccgccgagggccacgccaaggagggccagggcatcaagtgcgacatccccagatacatcgtgagccagctgggcctgaccagagaccccctggaggagatggcccagctgagcagctgcgacagccccgacacccccgagaccgacgacagcatcgagggccacggcgccagcctgcccagcaagaagacccccagcgaggaggacttcgagaccatcaagctgatcagcaacggcgcctacggcgccgtgttcctggtgagacacaagagcaccagacagagattcgccatgaagaagatcaacaagcagaacctgatcctgagaaaccagatccagcaggccttcgtggagagagacatcctgaccttcgccgagaaccccttcgtggtgagcatgttctgcagcttcgacaccaagagacacctgtgcatggtgatggagtacgtggagggcggcgactgcgccaccctgctgaagaacatcggcgccctgcccgtggacatggtgagactgtacttcgccgagaccgtgctggccctggagtacctgcacaactacggcatcgtgcacagagacctgaagcccgacaacctgctgatcaccagcatgggccacatcaagctgaccgacttcggcctgagcaagatcggcctgatgagcctgaccaccaacctgtacgagggccacatcgagaaggacgccagagagttcctggacaagcaggtgtgcggcacccccgagtacatcgcccccgaggtgatcctgagacagggctacggcaagcccgtggactggtgggccatgggcatcatcctgtacgagttcctggtgggctgcgtgcccttcttcggcgacacccccgaggagctgttcggccaggtgatcagcgacgagatcgtgtggcccgagggcgacgaggccctgccccccgacgcccaggacctgaccagcaagctgctgcaccagaaccccctggagagactgggcaccggcagcgcctacgaggtgaagcagcaccccttcttcaccggcctggactggaccggcctgctgagacagaaggccgagttcatcccccagctggagagcgaggacgacaccagctacttcgacaccagaagcgagagataccaccacatggacagcgaggacgaggaggaggtgagcgaggacggctgcctggagatcagacagttcagcagctgcagccccagattcaacaaggtgtacagcagcatggagagactgagcctgctggaggagagaagaacccccccccccaccaagagaagcctgagcgaggagaaggaggaccacagcgacggcctggccggcctgaagggcagagacagaagctgggtgatcggcagccccgagatcctgagaaagagactgagcgtgagcgagagcagccacaccgagagcgacagcagcccccccatgaccgtgagaagaagatgcagcggcctgctggacgcccccagattccccgagggccccgaggaggccagcagcaccctgagaagacagccccaggagggcatctgggtgctgaccccccccagcggcgagggcgtgagcggccccgtgaccgagcacagcggcgagcagagacccaagctggacgaggaggccgtgggcagaagcagcggcagcagccccgccatggagaccagaggcagaggcaccagccagctggccgagggcgccaccgccaaggccatcagcgacctggccgtgagaagagccagacacagactgctgagcggcgacagcaccgagaagagaaccgccagacccgtgaacaaggtgatcaagagcgccagcgccaccgccctgagcctgctgatccccagcgagcaccacacctgcagccccctggccagccccatgagcccccacagccagagcagcaaccccagcagcagagacagcagcccctacggcttcaccctgagagccatcagagtgtacatgggcgacagcgacgtgtacaccgtgcaccacatggtgtggcacgtggaggacggcggccccgccagcgaggccggcctgagacagggcgacctgatcacccacgtgaacggcgagcccgtgcacggcctggtgcacaccgaggtggtggagctgatcctgaagagcggcaacaaggtggccatcagcaccacccccctggagaacaccagcatcaaggtgggccccgccagaaagggcagctacaaggccaagatggccagaagaagcaagagaagcagaggcaaggacggccaggagagcagaaagagaagcagcctgttcagaaagatcaccaagcaggccagcctgctgcacaccagcagaagcctgagcagcctgaacagaagcctgagcagcggcgagagcggccccggcagccccacccacagccacagcctgagccccagaagccccacccagggctacagagtgacccccgacgccgtgcacagcgagctgagcagacccaagagcgccgagccccccagaagccccctgctgaagagagtgcagagcgccgagaagctggccgccgccctggccgccagcgagaagaagctggccaccagcagaaagcacagcctggacctgccccacagcgagctgaagaaggagctgccccccagagaggtgagccccctggaggtggtgggcgccagaagcgtgctgagcggcaagggcgccctgcccggcaagggcgtgctgcagcccgcccccagcagagccctgggcaccctgagacaggacagagccgagagaagagagagcctgcagaagcaggaggccatcagagaggtggacagcagcgaggacgacaccgaggagggccccgagaacagccagggcgcccaggagctgagcctggccccccaccccgaggtgagccagagcgtggcccccaagggcgccggcgagagcggcgaggaggaccccttccccagcagagaccccagaagcctgggccccatggtgcccagcctgctgaccggcatcaccctgggcccccccagaatggagagccccagcggcccccacagaagactgggcagcccccaggccatcgaggaggccgccagcagcagcagcgccggccccaacctgggccagagcggcgccaccgaccccatcccccccgagggctgctggaaggcccagcacctgcacacccaggccctgaccgccctgagccccagcaccagcggcctgacccccaccagcagctgcagcccccccagcagcaccagcggcaagctgagcatgtggagctggaagagcctgatcgagggccccgacagagccagccccagcagaaaggccaccatggccggcggcctggccaacctgcaggacctggagaacaccacccccgcccagcccaagaacctgagccccagagagcagggcaagacccagccccccagcgcccccagactggcccaccccagctacgaggaccccagccagggctggctgtgggagagcgagtgcgcccaggccgtgaaggaggaccccgccctgagcatcacccaggtgcccgacgccagcggcgacagaagacaggacgtgccctgcagaggctgccccctgacccagaagagcgagcccagcctgagaagaggccaggagcccggcggccaccagaagcacagagacctggccctggtgcccgacgagctgctgaagcagacctag

SEQ ID NO: 88941 - DNA, 1893 bp, synthetic construct
  misc_feature 1..1893: note = Description of Artificial Sequence: Synthetic coding sequence
  source 1..1893: mol_type = other DNA
atgagacccagaagcagaagcctgagccccggcagaagccccgtgagcttcgacagcgagatcatcatgatgaaccacgtgtacaaggagagattccccaaggccaccgcccagatggaggagagactggccgagttcatcagcagcaacacccccgacagcgtgctgcccctggccgacggcgccctgagcttcatccaccaccaggtgatcgagatggccagagactgcctggacaagagcagaagcggcctgatcaccagccagtacttctacgagctgcaggacaacctggagaagctgctgcaggacgagttcgaccccgaggagttctaccacctgctggaggccgccgagggccacgccaaggagggccagggcatcaagtgcgacatccccagatacatcgtgagccagctgggcctgaccagagaccccctggaggagatggcccagctgagcagctgcgacagccccgacacccccgagaccgacgacagcatcgagggccacggcgccagcctgcccagcaagaagacccccagcgaggaggacttcgagaccatcaagctgatcagcaacggcgcctacggcgccgtgttcctggtgagacacaagagcaccagacagagattcgccatgaagaagatcaacaagcagaacctgatcctgagaaaccagatccagcaggccttcgtggagagagacatcctgaccttcgccgagaaccccttcgtggtgagcatgttctgcagcttcgacaccaagagacacctgtgcatggtgatggagtacgtggagggcggcgactgcgccaccctgctgaagaacatcggcgccctgcccgtggacatggtgagactgtacttcgccgagaccgtgctggccctggagtacctgcacaactacggcatcgtgcacagagacctgaagcccgacaacctgctgatcaccagcatgggccacatcaagctgaccgacttcggcctgagcaagatcggcctgatgagcctgaccaccaacctgtacgagggccacatcgagaaggacgccagagagttcctggacaagcaggtgtgcggcacccccgagtacatcgcccccgaggtgatcctgagacagggctacggcaagcccgtggactggtgggccatgggcatcatcctgtacgagttcctggtgggctgcgtgcccttcttcggcgacacccccgaggagctgttcggccaggtgatcagcgacgagatcgtgtggcccgagggcgacgaggccctgccccccgacgcccaggacctgaccagcaagctgctgcaccagaaccccctggagagactgggcaccggcagcgcctacgaggtgaagcagcaccccttcttcaccggcctggactggaccggcctgctgagacagaaggccgagttcatcccccagctggagagcgaggacgacaccagctacttcgacaccagaagcgagagataccaccacatggacagcgaggacgaggaggaggtgagcgaggacggctgcctggagatcagacagttcagcagctgcagccccagattcaacaaggtgtacagcagcatggagagactgagcctgctggaggagagaagaacccccccccccaccaagagaagcctgagcgaggagaaggaggaccacagcgacggcctggccggcctgaagggcagagacagaagctgggtgatcggcagccccgagatcctgagaaagagactgagcgtgagcgagagcagcctgctgaaggtggccggcagacccagcaccttcagccagcacttcggcacccacccccaccagcagctgctgagcagccagctgcacctgtgggaggccgagcacgtggtgctggagatcccctactag

SEQ ID NO: 88942 - DNA, 1035 bp, synthetic construct
  misc_feature 1..1035: note = Description of Artificial Sequence: Synthetic coding sequence
  source 1..1035: mol_type = other DNA
atggacgacagcagcatcctgagaagaagaggcctgcagaaggagctgagcctgcccagaagaggcagcttctgcagaaccagcaacagaaagagcctgatcgtgaccagcagcaccagccccaccctgcccagaccccacagccccctgcacggccacaccggcaacagccccctggacagccccagaaacttcagccccaacgcccccgcccacttcagcttcgtgcccgccagaagccacagccacagagccgacagaaccgacggcagaagatggagcctggccagcctgcccagcagcggctacggcaccaacacccccagcagcaccgtgagcagcagctgcagcagccaggagaagctgcaccagctgcccttccagcccaccgccgacgagctgcacttcctgaccaagcacttcagcaccgagagcgtgcccgacgaggagggcagacagagccccgccatgagacccgcccccagcagagccctgggcaccctgagacaggacagagccgagagaagagagagcctgcagaagcaggaggccatcagagaggtggacagcagcgaggacgacaccgaggagggccccgagaacagccagggcgcccaggagctgagcctggccccccaccccgaggtgagccagagcgtggcccccaagggcgccggcgagagcggcgaggaggaccccttccccagcagagaccccagaagcctgggccccatggtgcccagcctgctgaccggcatcaccctgggcccccccagaatggagagccccagcggcccccacagaagactgggcagcccccaggccatcgaggaggccgccagcagcagcagcgccggccccaacctgggccagagcggcgccaccgaccccatcccccccgagggctgctggaaggcccagcacctgcacacccaggccctgaccgccctgagccccagcaccagcggcctggcccacctgatgagaatccccgccagagccggctacggcagcctgagcgtgcacaagcagtag

SEQ ID NO: 88943 - DNA, 3930 bp, synthetic construct
  misc_feature 1..3930: note = Description of Artificial Sequence: Synthetic coding sequence
  source 1..3930: mol_type = other DNA
atggacgagagcagcctgctgagaagaagaggcctgcagaaggagctgagcctgcccagaagaggcagaggctgcagaagcggcaacagaaagagcctggtggtgggcacccccagccccaccctgagcagacccctgagccccctgagcgtgcccaccgccggcagcagccccctggacagccccagaaacttcagcgccgccagcgccctgaacttccccttcgccagaagagccgacggcagaagatggagcctggccagcctgcccagcagcggctacggcaccaacacccccagcagcaccctgagcagcagcagcagcagcagagagagactgcaccagctgcccttccagcccacccccgacgagctgcacttcctgagcaagcacttcagaagcagcgagaacgtgctggacgaggagggcggcagaagccccagactgagacccagaagcagaagcctgagccccggcagagccaccggcaccttcgacaacgagatcgtgatgatgaaccacgtgtacagagagagattccccaaggccaccgcccagatggagggcagactgcaggagttcctgaccgcctacgcccccggcgccagactggccctggccgacggcgtgctgggcttcatccaccaccagatcgtggagctggccagagactgcctggccaagagcggcgagaacctggtgaccagcagatacttcctggagatgcaggagaagctggagagactgctgcaggacgcccacgagagaagcgacagcgaggaggtgagcttcatcgtgcagctggtgagaaagctgctgatcatcatcagcagacccgccagactgctggagtgcctggagttcgaccccgaggagttctaccacctgctggaggccgccgagggccacgccagagagggccagggcatcaagaccgacctgccccagtacatcatcggccagctgggcctggccaaggaccccctggaggagatggtgcccctgagccacctggaggaggagcagccccccgcccccgagagccccgagagcagagccctggtgggccagagcagaagaaagccctgcgagagcgacttcgagaccatcaagctgatcagcaacggcgcctacggcgccgtgtacctggtgagacacagagacaccagacagagattcgccatcaagaagatcaacaagcagaacctgatcctgagaaaccagatccagcaggtgttcgtggagagagacatcctgaccttcgccgagaaccccttcgtggtgagcatgttctgcagcttcgagaccagaagacacctgtgcatggtgatggagtacgtggagggcggcgactgcgccaccctgctgaagaacatgggccccctgcccgtggacatggccagactgtacttcgccgagaccgtgctggccctggagtacctgcacaactacggcatcgtgcacagagacctgaagcccgacaacctgctgatcaccagcctgggccacatcaagctgaccgacttcggcctgagcaagatcggcctgatgagcatggccaccaacctgtacgagggccacatcgagaaggacgccagagagttcatcgacaagcaggtgtgcggcacccccgagtacatcgcccccgaggtgatcttcagacagggctacggcaagcccgtggactggtgggccatgggcgtggtgctgtacgagttcctggtgggctgcgtgcccttcttcggcgacacccccgaggagctgttcggccaggtggtgagcgacgagatcatgtggcccgagggcgacgaggccctgcccgccgacgcccaggacctgatcaccagactgctgagacagagccccctggacagactgggcaccggcggcacccacgaggtgaagcagcaccccttcttcctggccctggactgggccggcctgctgagacacaaggccgagttcgtgccccagctggaggccgaggacgacaccagctacttcgacaccagaagcgagagatacagacacctgggcagcgaggacgacgagaccaacgacgaggagagcagcaccgagatcccccagttcagcagctgcagccacagattcagcaaggtgtacagcagcagcgagttcctggccgtgcagcccacccccaccttcgccgagagaagcttcagcgaggacagagaggagggctgggagagaagcgaggtggactacggcagaagactgagcgccgacatcagactgagaagctggaccagcagcggcagcagctgccagagcagcagcagccagcccgagagaggccccagccccagcctgctgaacaccatcagcctggacaccatgcccaagttcgccttcagcagcgaggacgagggcgtgggccccggccccgccggccccaagagacccgtgttcatcctgggcgagcccgaccccccccccgccgccacccccgtgatgcccaagcccagcagcctgagcgccgacaccgccgccctgagccacgccagactgagaagcaacagcatcggcgccagacacagcacccccagacccctggacgccggcagaggcagaagactgggcggccccagagaccccgcccccgagaagagcagagccagcagcagcggcggcagcggcggcggcagcggcggcagagtgcccaagagcgccagcgtgagcgccctgagcctgatcatcaccgccgacgacggcagcggcggccccctgatgagccccctgagccccagaagcctgagcagcaaccccagcagcagagacagcagccccagcagagaccccagccccgtgtgcggcagcctgagaccccccatcgtgatccacagcagcggcaagaagtacggcttcagcctgagagccatcagagtgtacatgggcgacagcgacgtgtacaccgtgcaccacgtggtgtggagcgtggaggacggcagccccgcccaggaggccggcctgagagccggcgacctgatcacccacatcaacggcgagagcgtgctgggcctggtgcacatggacgtggtggagctgctgctgaagagcggcaacaagatcagcctgagaaccaccgccctggagaacaccagcatcaaggtgggccccgccagaaagaacgtggccaagggcagaatggccagaagaagcaagagaagcagaagaagagagacccaggacagaagaaagagcctgttcaagaagatcagcaagcagaccagcgtgctgcacaccagcagaagcttcagcagcggcctgcaccacagcctgagcagcagcgagagcctgcccggcagccccacccacagcctgagccccagccccaccaccccctgcagaagccccgcccccgacgtgcccgccgacaccaccgccagcccccccagcgccagccccagcagcagcagccccgccagccccgccgccgccggccacaccagacccagcagcctgcacggcctggccgccaagctgggcccccccagacccaagaccggcagaagaaagagcaccagcagcatcccccccagccccctggcctgcccccccatcagcgcccccccccccagaagccccagccccctgcccggccacccccccgcccccgccagaagccccagactgagaagaggccagagcgccgacaagctgggcaccggcgagagactggacggcgaggccggcagaagaaccagaggccccgaggccgagctggtggtgatgagaagactgcacctgagcgagagaagagacagcttcaagaagcaggaggccgtgcaggaggtgagcttcgacgagccccaggaggaggccaccggcctgcccaccagcgtgccccagatcgccgtggagggcgaggaggccgtgcccgtggccctgggccccaccggcagagactag

SEQ ID NO: 88944 - DNA, 2523 bp, synthetic construct
  misc_feature 1..2523: note = Description of Artificial Sequence: Synthetic coding sequence
  source 1..2523: mol_type = other DNA
atggaccccaccgccggcagcaagaaggagcccggcggcggcgccgccaccgaggagggcgtgaacagaatcgccgtgcccaagccccccagcatcgaggagttcagcatcgtgaagcccatcagcagaggcgccttcggcaaggtgtacctgggccagaagggcggcaagctgtacgccgtgaaggtggtgaagaaggccgacatgatcaacaagaacatgacccaccaggtgcaggccgagagagacgccctggccctgagcaagagccccttcatcgtgcacctgtactacagcctgcagagcgccaacaacgtgtacctggtgatggagtacctgatcggcggcgacgtgaagagcctgctgcacatctacggctacttcgacgaggagatggccgtgaagtacatcagcgaggtggccctggccctggactacctgcacagacacggcatcatccacagagacctgaagcccgacaacatgctgatcagcaacgagggccacatcaagctgaccgacttcggcctgagcaaggtgaccctgaacagagacatcaacatgatggacatcctgaccacccccagcatggccaagcccagacaggactacagcagaacccccggccaggtgctgagcctgatcagcagcctgggcttcaacacccccatcgccgagaagaaccaggaccccgccaacatcctgagcgcctgcctgagcgagaccagccagctgagccagggcctggtgtgccccatgagcgtggaccagaaggacaccaccccctacagcagcaagctgctgaagagctgcctggagaccgtggccagcaaccccggcatgcccgtgaagtgcctgaccagcaacctgctgcagagcagaaagagactggccaccagcagcgccagcagccagagccacaccttcatcagcagcgtggagagcgagtgccacagcagccccaagtgggagaaggactgccaggagagcgacgaggccctgggccccaccatgatgagctggaacgccgtggagaagctgtgcgccaagagcgccaacgccatcgagaccaagggcttcaacaagaaggacctggagctggccctgagccccatccacaacagcagcgccctgcccaccaccggcagaagctgcgtgaacctggccaagaagtgcttcagcggcgaggtgagctgggaggccgtggagctggacgtgaacaacatcaacatggacaccgacaccagccagctgggcttccaccagagcaaccagtgggccgtggacagcggcggcatcagcgaggagcacctgggcaagagaagcctgaagagaaacttcgagctggtggacagcagcccctgcaagaagatcatccagaacaagaagacctgcgtggagtacaagcacaacgagatgaccaactgctacaccaaccagaacaccggcctgaccgtggaggtgcaggacctgaagctgagcgtgcacaagagccagcagaacgactgcgccaacaaggagaacatcgtgaacagcttcaccgacaagcagcagacccccgagaagctgcccatccccatgatcgccaagaacctgatgtgcgagctggacgaggactgcgagaagaacagcaagagagactacctgagcagcagcttcctgtgcagcgacgacgacagagccagcaagaacatcagcatgaacagcgacagcagcttccccggcatcagcatcatggagagccccctggagagccagcccctggacagcgacagaagcatcaaggagagcagcttcgaggagagcaacatcgaggaccccctgatcgtgacccccgactgccaggagaagaccagccccaagggcgtggagaaccccgccgtgcaggagagcaaccagaagatgctgggcccccccctggaggtgctgaagaccctggccagcaagagaaacgccgtggccttcagaagcttcaacagccacatcaacgccagcaacaacagcgagcccagcagaatgaacatgaccagcctggacgccatggacatcagctgcgcctacagcggcagctaccccatggccatcacccccacccagaagagaagaagctgcatgccccaccagacccccaaccagatcaagagcggcaccccctacagaacccccaagagcgtgagaagaggcgtggcccccgtggacgacggcagaatcctgggcacccccgactacctggcccccgagctgctgctgggcagagcccacgacatcccctggcccgagggcgaggagaagctgagcgacaacgcccagagcgccgtggagatcctgctgaccatcgacgacaccaagagagccggcatgaaggagctgaagagacaccccctgttcagcgacgtggactgggagaacctgcagcaccagaccatgcccttcatcccccagcccgacgacgagaccgacaccagctacttcgaggccagaaacaccgcccagcacctgaccgtgagcggcttcagcctgtag

SEQ ID NO: 88945 - DNA, 2640 bp, synthetic construct
  misc_feature 1..2640: note = Description of Artificial Sequence: Synthetic coding sequence
  source 1..2640: mol_type = other DNA
atggaccccaccgccggcagcaagaaggagcccggcggcggcgccgccaccgaggagggcgtgaacagaatcgccgtgcccaagccccccagcatcgaggagttcagcatcgtgaagcccatcagcagaggcgccttcggcaaggtgtacctgggccagaagggcggcaagctgtacgccgtgaaggtggtgaagaaggccgacatgatcaacaagaacatgacccaccaggtgcaggccgagagagacgccctggccctgagcaagagccccttcatcgtgcacctgtactacagcctgcagagcgccaacaacgtgtacctggtgatggagtacctgatcggcggcgacgtgaagagcctgctgcacatctacggctacttcgacgaggagatggccgtgaagtacatcagcgaggtggccctggccctggactacctgcacagacacggcatcatccacagagacctgaagcccgacaacatgctgatcagcaacgagggccacatcaagctgaccgacttcggcctgagcaaggtgaccctgaacagagacatcaacatgatggacatcctgaccacccccagcatggccaagcccagacaggactacagcagaacccccggccaggtgctgagcctgatcagcagcctgggcttcaacacccccatcgccgagaagaaccaggaccccgccaacatcctgagcgcctgcctgagcgagaccagccagctgagccagggcctggtgtgccccatgagcgtggaccagaaggacaccaccccctacagcagcaagctgctgaagagctgcctggagaccgtggccagcaaccccggcatgcccgtgaagtgcctgaccagcaacctgctgcagagcagaaagagactggccaccagcagcgccagcagccagagccacaccttcatcagcagcgtggagagcgagtgccacagcagccccaagtgggagaaggactgccaggagagcgacgaggccctgggccccaccatgatgagctggaacgccgtggagaagctgtgcgccaagagcgccaacgccatcgagaccaagggcttcaacaagaaggacctggagctggccctgagccccatccacaacagcagcgccctgcccaccaccggcagaagctgcgtgaacctggccaagaagtgcttcagcggcgaggtgagctgggaggccgtggagctggacgtgaacaacatcaacatggacaccgacaccagccagctgggcttccaccagagcaaccagtgggccgtggacagcggcggcatcagcgaggagcacctgggcaagagaagcctgaagagaaacttcgagctggtggacagcagcccctgcaagaagatcatccagaacaagaagacctgcgtggagtacaagcacaacgagatgaccaactgctacaccaaccagaacaccggcctgaccgtggaggtgcaggacctgaagctgagcgtgcacaagagccagcagaacgactgcgccaacaaggagaacatcgtgaacagcttcaccgacaagcagcagacccccgagaagctgcccatccccatgatcgccaagaacctgatgtgcgagctggacgaggactgcgagaagaacagcaagagagactacctgagcagcagcttcctgtgcagcgacgacgacagagccagcaagaacatcagcatgaacagcgacagcagcttccccggcatcagcatcatggagagccccctggagagccagcccctggacagcgacagaagcatcaaggagagcagcttcgaggagagcaacatcgaggaccccctgatcgtgacccccgactgccaggagaagaccagccccaagggcgtggagaaccccgccgtgcaggagagcaaccagaagatgctgggcccccccctggaggtgctgaagaccctggccagcaagagaaacgccgtggccttcagaagcttcaacagccacatcaacgccagcaacaacagcgagcccagcagaatgaacatgaccagcctggacgccatggacatcagctgcgcctacagcggcagctaccccatggccatcacccccacccagaagagaagaagctgcatgccccaccagcagacccccaaccagatcaagagcggcaccccctacagaacccccaagagcgtgagaagaggcgtggcccccgtggacgacggcagaatcctgggcacccccgactacctggcccccgagctgctgctgggcagagcccacggccccgccgtggactggtgggccctgggcgtgtgcctgttcgagttcctgaccggcatcccccccttcaacgacgagaccccccagcaggtgttccagaacatcctgaagagagacatcccctggcccgagggcgaggagaagctgagcgacaacgcccagagcgccgtggagatcctgctgaccatcgacgacaccaagagagccggcatgaaggagctgaagagacaccccctgttcagcgacgtggactgggagaacctgcagcaccagaccatgcccttcatcccccagcccgacgacgagaccgacaccagctacttcgaggccagaaacaccgcccagcacctgaccgtgagcggcttcagcctgtag

SEQ ID NO: 88946 - DNA, 2637 bp, synthetic construct
  misc_feature 1..2637: note = Description of Artificial Sequence: Synthetic coding sequence
  source 1..2637: mol_type = other DNA
atggaccccaccgccggcagcaagaaggagcccggcggcggcgccgccaccgaggagggcgtgaacagaatcgccgtgcccaagccccccagcatcgaggagttcagcatcgtgaagcccatcagcagaggcgccttcggcaaggtgtacctgggccagaagggcggcaagctgtacgccgtgaaggtggtgaagaaggccgacatgatcaacaagaacatgacccaccaggtgcaggccgagagagacgccctggccctgagcaagagccccttcatcgtgcacctgtactacagcctgcagagcgccaacaacgtgtacctggtgatggagtacctgatcggcggcgacgtgaagagcctgctgcacatctacggctacttcgacgaggagatggccgtgaagtacatcagcgaggtggccctggccctggactacctgcacagacacggcatcatccacagagacctgaagcccgacaacatgctgatcagcaacgagggccacatcaagctgaccgacttcggcctgagcaaggtgaccctgaacagagacatcaacatgatggacatcctgaccacccccagcatggccaagcccagacaggactacagcagaacccccggccaggtgctgagcctgatcagcagcctgggcttcaacacccccatcgccgagaagaaccaggaccccgccaacatcctgagcgcctgcctgagcgagaccagccagctgagccagggcctggtgtgccccatgagcgtggaccagaaggacaccaccccctacagcagcaagctgctgaagagctgcctggagaccgtggccagcaaccccggcatgcccgtgaagtgcctgaccagcaacctgctgcagagcagaaagagactggccaccagcagcgccagcagccagagccacaccttcatcagcagcgtggagagcgagtgccacagcagccccaagtgggagaaggactgccaggagagcgacgaggccctgggccccaccatgatgagctggaacgccgtggagaagctgtgcgccaagagcgccaacgccatcgagaccaagggcttcaacaagaaggacctggagctggccctgagccccatccacaacagcagcgccctgcccaccaccggcagaagctgcgtgaacctggccaagaagtgcttcagcggcgaggtgagctgggaggccgtggagctggacgtgaacaacatcaacatggacaccgacaccagccagctgggcttccaccagagcaaccagtgggccgtggacagcggcggcatcagcgaggagcacctgggcaagagaagcctgaagagaaacttcgagctggtggacagcagcccctgcaagaagatcatccagaacaagaagacctgcgtggagtacaagcacaacgagatgaccaactgctacaccaaccagaacaccggcctgaccgtggaggtgcaggacctgaagctgagcgtgcacaagagccagcagaacgactgcgccaacaaggagaacatcgtgaacagcttcaccgacaagcagcagacccccgagaagctgcccatccccatgatcgccaagaacctgatgtgcgagctggacgaggactgcgagaagaacagcaagagagactacctgagcagcagcttcctgtgcagcgacgacgacagagccagcaagaacatcagcatgaacagcgacagcagcttccccggcatcagcatcatggagagccccctggagagccagcccctggacagcgacagaagcatcaaggagagcagcttcgaggagagcaacatcgaggaccccctgatcgtgacccccgactgccaggagaagaccagccccaagggcgtggagaaccccgccgtgcaggagagcaaccagaagatgctgggcccccccctggaggtgctgaagaccctggccagcaagagaaacgccgtggccttcagaagcttcaacagccacatcaacgccagcaacaacagcgagcccagcagaatgaacatgaccagcctggacgccatggacatcagctgcgcctacagcggcagctaccccatggccatcacccccacccagaagagaagaagctgcatgccccaccagacccccaaccagatcaagagcggcaccccctacagaacccccaagagcgtgagaagaggcgtggcccccgtggacgacggcagaatcctgggcacccccgactacctggcccccgagctgctgctgggcagagcccacggccccgccgtggactggtgggccctgggcgtgtgcctgttcgagttcctgaccggcatcccccccttcaacgacgagaccccccagcaggtgttccagaacatcctgaagagagacatcccctggcccgagggcgaggagaagctgagcgacaacgcccagagcgccgtggagatcctgctgaccatcgacgacaccaagagagccggcatgaaggagctgaagagacaccccctgttcagcgacgtggactgggagaacctgcagcaccagaccatgcccttcatcccccagcccgacgacgagaccgacaccagctacttcgaggccagaaacaccgcccagcacctgaccgtgagcggcttcagcctgtag

SEQ ID NO: 88947 - DNA, 17817 bp, synthetic construct
  misc_feature 1..17817: note = Description of Artificial Sequence: Synthetic coding sequence
  source 1..17817: mol_type = other DNA
atgcagaagggcctgctggaccaggacaccggcctggtgctgctggagagccaggtgatcatgagcggcctgatcgcccccgagaccggcgagaacctgagcctggaggagggcatcgccagaaacctgatcaacccccagatgtaccagcagctgagagagctgcaggacgccctggccctgatcagcagactgaccgagagcagaggccccctgagcgtggtggaggccatcgagaagagaatcatcagcgagaccgtgggcctgaagatcctggaggcccacctggccaccggcggcttcagcctgagccccagcgagaactgcatcaacctggaggaggccttccaccagggcctgatcagcgcctggctgcacagcgtgctggagagctacctgagaaccagcaagaacctgatcgaccccaacaccgccgagaagatcggcctgctggacctgatgcagagatgcatcgtgcaccaggagagcggcttcaagctgctgcccgtgaagcagctggccggcggcatggtgagcctgaagagcggcagaaaggtgagcatcttcagagccgtgcaggagggcctgatcgacagacaggtgaccgtgagactgctggaggcccagctgttcgccggcggcatcgtggaccccagaaccggccacagactgaccgtggaggaggccgtgagacacaacctgatcgaccaggacatggcctgcgccatcctgatcagacagctgcagaccggcggcatcatcgacaccgtgaccggccagagactgaccatcgacgaggccgtgagcaacgacctggtggccgccaagatcgccctggtgatcctggagagcctgtggagcttcatgggcctgctgtggcccgagagcggcgagatcctgcccatcaccgacgccctggagcagggcatcgtgagcaccgagctggcccacaagatcctgagcaacagacagcacatcaaggccctgttcctgcccgccaccaccgagatcctgagctggaagaaggccatcgagagcggcatcctggacagagacctggccaacaacctgaagagcatctgcatccccgacgtgatgccccacatgcagctggccgacagcgccgagcagaacatcaaccccggcgccgccgtgctgccctgcagcaagagccaccccaaggccaccgccagccagagcgagaacctgctgttccagctgatgacccacagctacatcaacgtgcagaacggccagagactgctgctgctggacaaggagctgatggagaccctgaccagcagagacgagtaccagaccagcccccccaaggtggtggagatcggccaccagagacagaagacccccgagggcctgcaggagagcgccaacgtgaagatcagcggcaccttcagcagcggctggaccgtgagactgcccgagttccagttcagcagccagaacaaggagtaccccgacagagaggactgcaccaccgagaagggcaagaagaccaccgtggagaccgaggacagcagcgtggagaaccccgagcaggacctgttcgtggagcagaaggagagaaaccccaacatcgacgccctgaaggtgatcaacaaggtgaagctggaggtgcagagacagctgatcggcacccagagagaggaccagaccgccgtgagcgtgagagagaacgccagcagaggccacctgctgaccatcccccccgccgaggccgagggcgtgcccctggtggtggacaaggacgtgttcagcgtggagacccccaagaaggagcaccagcccctgagaaacaccagcttcacctgccagaacgagcaggcccacaccctggagaccgagtacatccacgacgagaccggcggcagccacatcaagccccagagcaagaagctgcaggtgcaggtgaagaagaccctgggcatcaagctggagctgaagagcgagaccgacggcaacgtgcaccccctggacaagaaggagatgctgaagaagaccttcctggccaaggacgaccacaaggagagccaggaggcccagaacatcgccggcggcagcatgatgatgagcgagaagaccgacgaggaggacagcggcagagagatcttcctgagctgcagccaccccctggagctgctggaggaggccaccctgaacgtgctgagcgcccagctgctggacggcggcatcttccacgagcagaccggccagaagctgctgctgaacgaggccatcagcagaggcatcgtgcccagccacaccgccgtgaagctgatggagaagctgaacatgttccagggcttcttcgacagccagacctgcgagagcctgaccaccgaggaggtgatcaacgagggcctgatggacgagaagctgctgcacaacgtgctgatggccgacaaggccatcagcggcgtgctggaccccagaacccagaccctgtgcagcgtgaaggacgccgtgaccgtgggcctgctggacaaggagaccgccaccagaatcctggagagacaggtggtgaccggcggcatcatcgacctgaagagaggcaagaaggtgagcgtgaccctggccagcaccctgggcctggtggacgtggccgaccagcccgagctgatcaacctggagaaggccagcaagggcagagacgccgagaagaccgtgagagagagactgatcagcctgcagatggagaccaccggcctgatcgaccccgacagcaaggcccccctgaccgtggtgcagagcatcgacagaggcctgctggagagagaggaggccgtgagactgctgaccaagcaggtggtggacggcggcatcatccaccacatcagcggcatgagactgagcgtggacaacgccttcagacacggcctgatcggcgaggacctggccgagaagctgaagagagtggagaacctgaacatccaccagatcttcaaccccgagaccaaggagaacatcagcctgcccaaggccatcaagctggacctgatcaccagcgacctgaagagagagatccaggaggtgcaggccttcaccggcaacttcgtggacctgatcagcggccagagactgaccctggccgaggccaagaaggagggcctgctgaccaacgaggccgtgctgagccccggcatgatgcacggcatcgtggaccccgagaactgcagaatcgtgccctacagcgagctggtgaagaagtgcaagatcgacatcgagagcggccagagatacctggaggtgatccccttcagcgacatcaaggacggcgtgagcgacaaggtgctgaccctgagccaggccatccagctgggcaaggtggacttcgccagcaccctgaaggtgctggaggcccaggccaacaccggcggcatcatcgacaccgccaccggcaagagactgaccctggccagcgccctggaggagaagctggtggacgagaacatggtgagaatcatcgccagccaccaggtgctgaacggcggcatcgtggacatcttcagcgaccagagagtgaccctggtggaggccatcgagaagagactgatcagccccgagctggccaacatgatccagatcgacagcagcgagttcagcgaccacagagcccagatcgagaagcaggagggcatcgaggtgtgcgccctgcagaacgagttcctgggcaaggacatgctgatcgcctgcaaccagaccgccgagatgagctgcaacaaggtggaggagagcgagagactgttccaggtggagaaccagagcgcccaggagaaggtgaaggtgagagtgagcgacggcgagcaggccaagaagagcagagagatcagcctgaaggagttcggctgcaaggaccagagaaagcccagaatgagcagcgacgccaaggagttcatcagcatcatcaacccccacaacctgaagggcaagagcctgggccaggtgagcctgacccacccctacagcgagtgcgacttcaagctgaaggaggtggccagaaacaacatgggcaacgacaccaacgaggagcaggagaaggccgtgaccaagatcgagatcatcagccacatgaagcagagcaccagctgcctggacagcgaggagatcagagagaaccagggcgaggtgatcctggaggtgcaggagacctactgcgagaccagcggcaagctgcccagcgagcaggtgctgcagcagcccatgaacgccagagtgaagagcaagagagagaagagagaggtgatcgtggaggagagcatcagaacctgcaagcccgccttcctgagcgaggagaagctgtaccaggagaccgccatcagagacgagcacgacagccacatcaagagccagcccagagagatgaccagcagcgagaagggcaaggaggccgacaccgagatgggcttcagcatcaccttcaagatcgaggagagcagcagccaggtggtgccccagggcatcagcgtgaagcacctggacgccctgaccctgttcagcagcaagcaggccaacgagggcaaggtgaacaacctgagcctgtgcctgaccctgaagcccgaggagaacctgagcagagagatcgcctgcggcgcccagagcgagcccttcccctgcatgacccccagacccgagggcctgcactaccaggagagcgacggcaaggcccaggtgaccggccccagccagatcagcaagaccgacaagagcttccagggcaccaccagacaggagaccaactaccaggacagctgggtgaccagcaagaccaaggagaccaagcaccagatcagcagcagcaacgagtgcaaggagaagagctaccaggaggtgagcttcgaccccgccagaggcctgaagctggaggagatcaccgtgagcagacccgacagcaaggaggtgagatacctggagttcagcgacagaaaggacctgcaccaccagggcagcaagagcgacgacaagctgtgcggcaccctgaagagcgagatcgccacccaggagctgaccggcgagaagttcctggagatggccaaccccaacgtggccggcctggaggccggcagcatcgaggacatcgtgacccagagaggcagcagagtgctgggcagcttcctgcccgagaagctgttcaagggcgtgagccagaaggagaacaccggccagcagaacgccatcatcagccccaccgtgctggagaccagcgaggagaagaccgtgagcctgaccgtgtgcagcgccgtgaagaccgagaagaccccccaggagaagctgagagagagccccggcagcgagcagacccccttcatgaccgcccccgagggcaagggcaacggcggcgtgaaccccgagcccttcagagccacccagaacgtgttcaccagacagctgtgcctggagcacgacgagaagctggtgagctacctgagcctgctgagaaacatcgagatgagaaccaagcagatccagcccctggagctgaacctggccgagctgcaggacctgctgtgccaggccaaggtgctggagagagagctgaaggacctgaccaccctggtgagccaggagctggagtgcgtgaaccagatcatcatcagccagccccaggaggtgcccgcccagctgctgaaggccctggagaaggacgccaagaacctgcagaagagcctgagcagcgtgagcgacacctggaacagcagactgctgcacttccagaacgccgtggagatcgagaagaccaaggtgctgaaccagcacacccagctggagggcagactgcaggacctgagagcctgggtgggcaacaagaacctgatcctgaacagcaagggcagcaacagcgagatcgacgtggacagcctgaacctgtgcctgcagcagtacgaggacctgaagcagcccatggccgagagaaaggcccagctggacgccctggccttcgacatccagttcttcatcagcgagcacgcccaggacctgagcccccagcagaacagacagatgctgagactgctgaacgagctgcagagaagcttccaggacatcctggagcagaccgccgcccaggtggacgccctgcagggccacctgcagcagatggagcaggaggccctggtgaagaccctgcagaagcagcagaacacctgccaccagcagctggaggacctgtgcagctgggtgggccaggccgagagagccctggccggccaccagggcagaaccacccagcaggacctgagcgccctgcagaagaaccagagcgacctgaaggacctgcaggacgacatccagaacagagccaccagcttcgccaccgtggtgaaggacatcgagggcttcatggaggagaaccagaccaagctgagccccagagagctgaccgccctgagagagaagctgcaccaggccaaggagcagtacgaggccctgcaggaggagaccagagtggcccagaaggagctggaggaggccgtgaccagcgccctgcagcaggagaccgagaagagcaaggccgccaaggagctggccgagaacaagaagaagatcgacgccctgctggactgggtgaccagcgtgggcagcagcggcggccagctgctgaccaacctgcccggcatggagcagctgagcggcgccagcctggagaagggcgccctggacaccaccgacggctacatgggcgtgaaccaggcccccgagaagctggacaagcagtgcgagatgatgaaggccagacaccaggagctgctgagccagcagcagaacttcatcctggccacccagagcgcccaggccttcctggaccagcacggccacaacctgacccccgaggagcagcagatgctgcagcagaagctgggcgagctgaaggagcagtacagcaccagcctggcccagagcgaggccgagctgaagcaggtgcagaccctgcaggacgagctgcagaagttcctgcaggaccacaaggagttcgagagctggctggagagaagcgagaaggagctggagaacatgcacaagggcggcagcagccccgagaccctgcccagcctgctgaagagacagggcagcttcagcgaggacgtgatcagccacaagggcgacctgagattcgtgaccatcagcggccagaaggtgctggacatggagaacagcttcaaggagggcaaggagcccagcgagatcggcaacctggtgaaggacaagctgaaggacgccaccgagagatacaccgccctgcacagcaagtgcaccagactgggcagccacctgaacatgctgctgggccagtaccaccagttccagaacagcgccgacagcctgcaggcctggatgcaggcctgcgaggccaacgtggagaagctgctgagcgacaccgtggccagcgaccccggcgtgctgcaggagcagctggccaccaccaagcagctgcaggaggagctggccgagcaccaggtgcccgtggagaagctgcagaaggtggccagagacatcatggagatcgagggcgagcccgcccccgaccacagacacgtgcaggagaccaccgacagcatcctgagccacttccagagcctgagctacagcctggccgagagaagcagcctgctgcagaaggccatcgcccagagccagagcgtgcaggagagcctggagagcctgctgcagagcatcggcgaggtggagcagaacctggagggcaagcaggtgagcagcctgagcagcggcgtgatccaggaggccctggccaccaacatgaagctgaagcaggacatcgccagacagaagagcagcctggaggccaccagagagatggtgaccagattcatggagaccgccgacagcaccaccgccgccgtgctgcagggcaagctggccgaggtgagccagagattcgagcagctgtgcctgcagcagcaggagaaggagagcagcctgaagaagctgctgccccaggccgagatgttcgagcacctgagcggcaagctgcagcagttcatggagaacaagagcagaatgctggccagcggcaaccagcccgaccaggacatcacccacttcttccagcagatccaggagctgaacctggagatggaggaccagcaggagaacctggacaccctggagcacctggtgaccgagctgagcagctgcggcttcgccctggacctgtgccagcaccaggacagagtgcagaacctgagaaaggacttcaccgagctgcagaagaccgtgaaggagagagagaaggacgccagcagctgccaggagcagctggacgagttcagaaagctggtgagaaccttccagaagtggctgaaggagaccgagggcagcatcccccccaccgagaccagcatgagcgccaaggagctggagaagcagatcgagcacctgaagagcctgctggacgactgggccagcaagggcaccctggtggaggagatcaactgcaagggcaccagcctggagaacctgatcatggagatcaccgcccccgacagccagggcaagaccggcagcatcctgcccagcgtgggcagcagcgtgggcagcgtgaacggctaccacacctgcaaggacctgaccgagatccagtgcgacatgagcgacgtgaacctgaagtacgagaagctgggcggcgtgctgcacgagagacaggagagcctgcaggccatcctgaacagaatggaggaggtgcacaaggaggccaacagcgtgctgcagtggctggagagcaaggaggaggtgctgaagagcatggacgccatgagcagccccaccaagaccgagaccgtgaaggcccaggccgagagcaacaaggccttcctggccgagctggagcagaacagccccaagatccagaaggtgaaggaggccctggccggcctgctggtgacctaccccaacagccaggaggccgagaactggaagaagatccaggaggagctgaacagcagatgggagagagccaccgaggtgaccgtggccagacagagacagctggaggagagcgccagccacctggcctgcttccaggccgccgagagccagctgagaccctggctgatggagaaggagctgatgatgggcgtgctgggccccctgagcatcgaccccaacatgctgaacgcccagaagcagcaggtgcagttcatgctgaaggagttcgaggccagaagacagcagcacgagcagctgaacgaggccgcccagggcatcctgaccggccccggcgacgtgagcctgagcaccagccaggtgcagaaggagctgcagagcatcaaccagaagtgggtggagctgaccgacaagctgaacagcagaagcagccagatcgaccaggccatcgtgaagagcacccagtaccaggagctgctgcaggacctgagcgagaaggtgagagccgtgggccagagactgagcgtgcagagcgccatcagcacccagcccgaggccgtgaagcagcagctggaggagaccagcgagatcagaagcgacctggagcagctggaccacgaggtgaaggaggcccagaccctgtgcgacgagctgagcgtgctgatcggcgagcagtacctgaaggacgagctgaagaagagactggagaccgtggccctgcccctgcagggcctggaggacctggccgccgacagaatcaacagactgcaggccgccctggccagcacccagcagttccagcagatgttcgacgagctgagaacctggctggacgacaagcagagccagcaggccaagaactgccccatcagcgccaagctggagagactgcagagccagctgcaggagaacgaggagttccagaagagcctgaaccagcacagcggcagctacgaggtgatcgtggccgagggcgagagcctgctgctgagcgtgccccccggcgaggagaagagaaccctgcagaaccagctggtggagctgaagaaccactgggaggagctgagcaagaagaccgccgacagacagagcagactgaaggactgcatgcagaaggcccagaagtaccagtggcacgtggaggacctggtgccctggatcgaggactgcaaggccaagatgagcgagctgagagtgaccctggaccccgtgcagctggagagcagcctgctgagaagcaaggccatgctgaacgaggtggagaagagaagaagcctgctggagatcctgaacagcgccgccgacatcctgatcaacagcagcgaggccgacgaggacggcatcagagacgagaaggccggcatcaaccagaacatggacgccgtgaccgaggagctgcaggccaagaccggcagcctggaggagatgacccagagactgagagagttccaggagagcttcaagaacatcgagaagaaggtggagggcgccaagcaccagctggagatcttcgacgccctgggcagccaggcctgcagcaacaagaacctggagaagctgagagcccagcaggaggtgctgcaggccctggagccccaggtggactacctgagaaacttcacccagggcctggtggaggacgcccccgacggcagcgacgccagccagctgctgcaccaggccgaggtggcccagcaggagttcctggaggtgaagcagagagtgaacagcggctgcgtgatgatggagaacaagctggagggcatcggccagttccactgcagagtgagagagatgttcagccagctggccgacctggacgacgagctggacggcatgggcgccatcggcagagacaccgacagcctgcagagccagatcgaggacgtgagactgttcctgaacaagatccacgtgctgaagctggacatcgaggccagcgaggccgagtgcagacacatgctggaggaggagggcaccctggacctgctgggcctgaagagagagctggaggccctgaacaagcagtgcggcaagctgaccgagagaggcaaggccagacaggagcagctggagctgaccctgggcagagtggaggacttctacagaaagctgaagggcctgaacgacgccaccaccgccgccgaggaggccgaggccctgcagtgggtggtgggcaccgaggtggagatcatcaaccagcagctggccgacttcaagatgttccagaaggagcaggtggaccccctgcagatgaagctgcagcaggtgaacggcctgggccagggcctgatccagagcgccggcaaggactgcgacgtgcagggcctggagcacgacatggaggagatcaacgccagatggaacaccctgaacaagaaggtggcccagagaatcgcccagctgcaggaggccctgctgcactgcggcaagttccaggacgccctggagcccctgctgagctggctggccgacaccgaggagctgatcgccaaccagaagccccccagcgccgagtacaaggtggtgaaggcccagatccaggagcagaagctgctgcagagactgctggacgacagaaaggccaccgtggacatgctgcaggccgagggcggcagaatcgcccagagcgccgagctggccgacagagagaagatcaccggccagctggagagcctggagagcagatggaccgagctgctgagcaaggccgccgccagacagaagcagctggaggacatcctggtgctggccaagcagttccacgagaccgccgagcccatcagcgacttcctgagcgtgaccgagaagaagctggccaacagcgagcccgtgggcacccagaccgccaagatccagcagcagatcatcagacacaaggccctggaggaggacatcgagaaccacgccaccgacgtgcaccaggccgtgaagatcggccagagcctgagcagcctgaccagccccgccgagcagggcgtgctgagcgagaagatcgacagcctgcaggccagatacagcgagatccaggacagatgctgcagaaaggccgccctgctggaccaggccctgagcaacgccagactgttcggcgaggacgaggtggaggtgctgaactggctggccgaggtggaggacaagctgagcagcgtgttcgtgaaggacttcaagcaggacgtgctgcacagacagcacgccgaccacctggccctgaacgaggagatcgtgaacagaaagaagaacgtggaccaggccatcaagaacggccaggccctgctgaagcagaccaccggcgaggaggtgctgctgatccaggagaagctggacggcatcaagaccagatacgccgacatcaccgtgaccagcagcaaggccctgagaaccctggagcaggccagacagctggccaccaagttccagagcacctacgaggagctgaccggctggctgagagaggtggaggaggagctggccaccagcggcggccagagccccaccggcgagcagatcccccagttccagcagagacagaaggagctgaagaaggaggtgatggagcacagactggtgctggacaccgtgaacgaggtgagcagagccctgctggagctggtgccctggagagccagagagggcctggacaagctggtgagcgacgccaacgagcagtacaagctggtgagcgacaccatcggccagagagtggacgagatcgacgccgccatccagagaagccagcagtacgagcaggccgccgacgccgagctggcctgggtggccgagaccaagagaaagctgatggccctgggccccatcagactggagcaggaccagaccaccgcccagctgcaggtgcagaaggccttcagcatcgacatcatcagacacaaggacagcatggacgagctgttcagccacagaagcgagatcttcggcacctgcggcgaggagcagaagaccgtgctgcaggagaagaccgagagcctgatccagcagtacgaggccatcagcctgctgaacagcgagagatacgccagactggagagagcccaggtgctggtgaaccagttctgggagacctacgaggagctgagcccctggatcgaggagaccagagccctgatcgcccagctgcccagccccgccatcgaccacgagcagctgagacagcagcaggaggagatgagacagctgagagagagcatcgccgagcacaagccccacatcgacaagctgctgaagatcggcccccagctgaaggagctgaaccccgaggagggcgagatggtggaggagaagtaccagaaggccgagaacatgtacgcccagatcaaggaggaggtgagacagagagccctggccctggacgaggccgtgagccagagcacccagatcaccgagttccacgacaagatcgagcccatgctggagaccctggagaacctgagcagcagactgagaatgccccccctgatccccgccgaggtggacaagatcagagagtgcatcagcgacaacaagagcgccaccgtggagctggagaagctgcagcccagcttcgaggccctgaagagaagaggcgaggagctgatcggcagaagccagggcgccgacaaggacctggccgccaaggagatccaggacaagctggaccagatggtgttcttctgggaggacatcaaggccagagccgaggagagagagatcaagttcctggacgtgctggagctggccgagaagttctggtacgacatggccgccctgctgaccaccatcaaggacacccaggacatcgtgcacgacctggagagccccggcatcgaccccagcatcatcaagcagcaggtggaggccgccgagaccatcaaggaggagaccgacggcctgcacgaggagctggagttcatcagaatcctgggcgccgacctgatcttcgcctgcggcgagaccgagaagcccgaggtgagaaagagcatcgacgagatgaacaacgcctgggagaacctgaacaagacctggaaggagagactggagaagctggaggacgccatgcaggccgccgtgcagtaccaggacaccctgcaggccatgttcgactggctggacaacaccgtgatcaagctgtgcaccatgccccccgtgggcaccgacctgaacaccgtgaaggaccagctgaacgagatgaaggagttcaaggtggaggtgtaccagcagcagatcgagatggagaagctgaaccaccagggcgagctgatgctgaagaaggccaccgacgagaccgacagagacatcatcagagagcccctgaccgagctgaagcacctgtgggagaacctgggcgagaagatcgcccacagacagcacaagctggagggcgccctgctggccctgggccagttccagcacgccctggaggagctgatgagctggctgacccacaccgaggagctgctggacgcccagagacccatcagcggcgaccccaaggtgatcgaggtggagctggccaagcaccacgtgctgaagaacgacgtgctggcccaccaggccaccgtggagaccgtgaacaaggccggcaacgagctgctggagagcagcgccggcgacgacgccagcagcctgagaagcagactggaggccatgaaccagtgctgggagagcgtgctgcagaagaccgaggagagagagcagcagctgcagagcaccctgcagcaggcccagggcttccacagcgagatcgaggacttcctgctggagctgaccagaatggagagccagctgagcgccagcaagcccaccggcggcctgcccgagaccgccagagagcagctggacacccacatggagctgtacagccagctgaaggccaaggaggagacctacaaccagctgctggacaagggcagactgatgctgctgagcagagacgacagcggcagcggcagcaagaccgagcagagcgtggccctgctggagcagaagtggcacgtggtgagcagcaagatggaggagagaaagagcaagctggaggaggccctgaacctggccaccgagttccagaacagcctgcaggagttcatcaactggctgaccctggccgagcagagcctgaacatcgccagcccccccagcctgatcctgaacaccgtgctgagccagatcgaggagcacaaggtgttcgccaacgaggtgaacgcccacagagaccagatcatcgagctggaccagaccggcaaccagctgaagttcctgagccagaagcaggacgtggtgctgatcaagaacctgctggtgagcgtgcagagcagatgggagaaggtggtgcagagaagcatcgagagaggcagaagcctggacgacgccagaaagagagccaagcagttccacgaggcctggaagaagctgatcgactggctggaggacgccgagagccacctggacagcgagctggagatcagcaacgaccccgacaagatcaagctgcagctgagcaagcacaaggagttccagaagaccctgggcggcaagcagcccgtgtacgacaccaccatcagaaccggcagagccctgaaggagaagaccctgctgcccgaggacagccagaagctggacaacttcctgggcgaggtgagagacaagtgggacaccgtgtgcggcaagagcgtggagagacagcacaagctggaggaggccctgctgttcagcggccagttcatggacgccctgcaggccctggtggactggctgtacaaggtggagccccagctggccgaggaccagcccgtgcacggcgacctggacctggtgatgaacctgatggacgcccacaaggtgttccagaaggagctgggcaagagaaccggcaccgtgcaggtgctgaagagaagcggcagagagctgatcgagaacagcagagacgacaccacctgggtgaagggccagctgcaggagctgagcaccagatgggacaccgtgtgcaagctgagcgtgagcaagcagagcagactggagcaggccctgaagcaggccgaggtgttcagagacaccgtgcacatgctgctggagtggctgagcgaggccgagcagaccctgagattcagaggcgccctgcccgacgacaccgaggccctgcagagcctgatcgacacccacaaggagttcatgaagaaggtggaggagaagagagtggacgtgaacagcgccgtggccatgggcgaggtgatcctggccgtgtgccaccccgactgcatcaccaccatcaagcactggatcaccatcatcagagccagattcgaggaggtgctgacctgggccaagcagcaccagcagagactggagaccgccctgagcgagctggtggccaacgccgagctgctggaggagctgctggcctggatccagtgggccgagaccaccctgatccagagagaccaggagcccatcccccagaacatcgacagagtgaaggccctgatcgccgagcaccagaccttcatggaggagatgaccagaaagcagcccgacgtggacagagtgaccaagacctacaagagaaagaacatcgagcccacccacgcccccttcatcgagaagagcagaagcggcggcagaaagagcctgagccagcccacccccccccccatgcccatcctgagccagagcgaggccaagaaccccagaatcaaccagctgagcgccagatggcagcaggtgtggctgctggccctggagagacagagaaagctgaacgacgccctggacagactggaggagctgaaggagttcgccaacttcgacttcgacgtgtggagaaagaagtacatgagatggatgaaccacaagaagagcagagtgatggacttcttcagaagaatcgacaaggaccaggacggcaagatcaccagacaggagttcatcgacggcatcctggccagcaagttccccaccaccaagctggagatgaccgccgtggccgacatcttcgacagagacggcgacggctacatcgactactacgagttcgtggccgccctgcaccccaacaaggacgcctacagacccaccaccgacgccgacaagatcgaggacgaggtgaccagacaggtggcccagtgcaagtgcgccaagagattccaggtggagcagatcggcgagaacaagtacagattcttcctgggcaaccagttcggcgacagccagcagctgagactggtgagaatcctgagaagcaccgtgatggtgagagtgggcggcggctggatggccctggacgagttcctggtgaagaacgacccctgcagagccagaggcagaaccaacatcgagctgagagagaagttcatcctgcccgagggcgccagccagggcatgacccccttcagaagcagaggcagaagaagcaagcccagcagcagagccgccagccccaccagaagcagcagcagcgccagccagagcaaccacagctgcaccagcatgcccagcagccccgccacccccgccagcggcaccaaggtgatccccagcagcggcagcaagctgaagagacccacccccaccttccacagcagcagaaccagcctggccggcgacaccagcaacagcagcagccccgccagcaccggcgccaagaccaacagagccgaccccaagaagagcgccagcagacccggcagcagagccggcagcagagccggcagcagagccagcagcagaagaggcagcgacgccagcgacttcgacctgctggagacccagagcgcctgcagcgacaccagcgagagcagcgccgccggcggccagggcaacagcagaagaggcctgaacaagcccagcaagatccccaccatgagcaagaagaccaccaccgccagccccagaacccccggccccaagagatag

SEQ ID NO: 88948 - DNA, 16293 bp, synthetic construct
  misc_feature 1..16293: note = Description of Artificial Sequence: Synthetic coding sequence
  source 1..16293: mol_type = other DNA
atgagcagcagcgacgaggagaccctgagcgagagaagctgcagaagcgagagaagctgcagaagcgagagaagctacagaagcgagagaagcggcagcctgagcccctgcccccccggcgacaccctgccctggaacctgcccctgcacgagcagaagaagagaaagagccaggacagcgtgctggaccccgccgagagagccgtggtgagagtggccgacgagagagacagagtgcagaagaagaccttcaccaagtgggtgaacaagcacctgatgaaggtgagaaagcacatcaacgacctgtacgaggacctgagagacggccacaacctgatcagcctgctggaggtgctgagcggcatcaagctgcccagagagaagggcagaatgagattccacagactgcagaacgtgcagatcgccctggacttcctgaagcagagacaggtgaagctggtgaacatcagaaacgacgacatcaccgacggcaaccccaagctgaccctgggcctgatctggaccatcatcctgcacttccagatcagcgacatctacatcagcggcgagagcggcgacatgagcgccaaggagaagctgctgctgtggacccagaaggtgaccgccggctacaccggcatcaagtgcaccaacttcagcagctgctggagcgacggcaagatgttcaacgccctgatccacagatacagacccgacctggtggacatggagagagtgcagatccagagcaacagagagaacctggagcaggccttcgaggtggccgagagactgggcgtgaccagactgctggacgccgaggacgtggacgtgcccagccccgacgagaagagcgtgatcacctacgtgagcagcatctacgacgccttccccaaggtgcccgagggcggcgagggcatcagcgccaccgaggtggacagcagatggcaggagtaccagagcagagtggacagcctgatcccctggatcaagcagcacaccatcctgatgagcgacaagaccttcccccagaaccccgtggagctgaaggccctgtacaaccagtacatccacttcaaggagaccgagatcctggccaaggagagagagaagggcagaatcgaggagctgtacaagctgctggaggtgtggatcgagttcggcagaatcaagctgccccagggctaccaccccaacgacgtggaggaggagtggggcaagctgatcatcgagatgctggagagagagaagagcctgagacccgccgtggagagactggagctgctgctgcagatcgccaacaagatccagaacggcgccctgaactgcgaggagaagctgaccctggccaagaacaccctgcaggccgacgccgcccacctggagagcggccagcccgtgcagtgcgagagcgacgtgatcatgtacatccaggagtgcgagggcctgatcagacagctgcaggtggacctgcagatcctgagagacgagaactactaccagctggaggagctggccttcagagtgatgagactgcaggacgagctggtgaccctgagactggagtgcaccaacctgtacagaaagggccacttcaccagcctggagctggtgccccccagcaccctgaccaccacccacctgaaggccgagcccctgaccaaggccacccacagcagcagcaccagctggttcagaaagcccatgaccagagccgagctggtggccatcagcagcagcgaggacgagggcaacctgagattcgtgtacgagctgctgagctgggtggaggagatgcagatgaagctggagagagccgagtggggcaacgacctgcccagcgtggagctgcagctggagacccagcagcacatccacaccagcgtggaggagctgggcagcagcgtgaaggaggccagactgtacgagggcaagatgagccagaacttccacaccagctacgccgagaccctgggcaagctggagacccagtactgcaagctgaaggagaccagcagcttcagaatgagacacctgcagagcctgcacaagttcgtgagcagagccaccgccgagctgatctggctgaacgagaaggaggaggaggagctggcctacgactggagcgacaacaacagcaacatcagcgccaagagaaactacttcagcgagctgaccatggagctggaggagaagcaggacgtgttcagaagcctgcaggacaccgccgagctgctgagcctggagaaccaccccgccaagcagaccgtggaggcctacagcgccgccgtgcagagccagctgcagtggatgaagcagctgtgcctgtgcgtggagcagcacgtgaaggagaacaccgcctacttccagttcttcagcgacgccagagagctggagagcttcctgagaaacctgcaggacagcatcaagagaaagtacagctgcgaccacaacaccagcctgagcagactggaggacctgctgcaggacagcatggacgagaaggagcagctgatccagagcaagagcagcgtggccagcctggtgggcagaagcaagaccatcgtgcagctgaagcccagaagccccgaccacgtgctgaagaacaccatcagcgtgaaggccgtgtgcgactacagacagatcgagatcaccatctgcaagaacgacgagtgcgtgctggaggacaacagccagagaaccaagtggaaggtgatcagccccaccggcaacgaggccatggtgcccagcgtgtgcttcctgatccccccccccaacaaggacgccatcgagatggccagcagagtggagcagagctaccagaaggtgatggccctgtggcaccagctgcacgtgaacaccaagagcctgatcagctggaactacctgagaaaggacctggacctggtgcagacctggaacctggagaagctgagaagcagcgcccccggcgagtgccaccagatcatgaagaacctgcaggcccactacgaggacttcctgcaggacagcagagacagcgtgctgttcagcgtggccgacagactgagactggaggaggaggtggaggcctgcaaggccagattccagcacctgatgaagagcatggagaacgaggacaaggaggagaccgtggccaagatgtacatcagcgagctgaagaacatcagactgagactggaggagtacgagcagagagtggtgaagagaatccagagcctggccagcagcagaaccgacagagacgcctggcaggacaacgccctgagaatcgccgagcaggagcacacccaggaggacctgcagcagctgagaagcgacctggacgccgtgagcatgaagtgcgacagcttcctgcaccagagccccagcagcagcagcgtgcccaccctgagaagcgagctgaacctgctggtggagaagatggaccacgtgtacggcctgagcaccgtgtacctgaacaagctgaagaccgtggacgtgatcgtgagaagcatccaggacgccgagctgctggtgaagggctacgagatcaagctgagccaggaggaggtggtgctggccgacctgagcgccctggaggcccactggagcaccctgagacactggctgagcgacgtgaaggacaagaacagcgtgttcagcgtgctggacgaggagatcgccaaggccaaggtggtggccgagcagatgagcagactgacccccgagagaaacctggacctggagagataccaggagaagggcagccagctgcaggagagatggcacagagtgatcgcccagctggagatcagacagagcgagctggagagcatccaggaggtgctgggcgactacagagcctgccacggcaccctgatcaagtggatcgaggagaccaccgcccagcaggagatgatgaagcccggccaggccgaggacagcagagtgctgagcgagcagctgagccagcagaccgccctgttcgccgagatcgagagaaaccagaccaagctggaccagtgccagaagttcagccagcagtacagcaccatcgtgaaggactacgagctgcagctgatgacctacaaggccttcgtggagagccagcagaagagccccggcaagagaagaagaatgctgagcagcagcgacgccatcacccaggagttcatggacctgagaaccagatacaccgccctggtgaccctgaccacccagcacgtgaagtacatcagcgacgccctgagaagactggaggaggaggagaaggtggtggaggaggagaagcaggagcacgtggagaaggtgaaggagctgctgggctgggtgagcaccctggccagaaacacccagggcaaggccaccagcagcgagaccaaggagagcaccgacatcgagaaggccatcctggagcagcaggtgctgagcgaggagctgaccaccaagaaggagcaggtgagcgaggccatcaagaccagccagatcttcctggccaagcacggccacaagctgagcgagaaggagaagaagcagatcagcgagcagctgaacgccctgaacaaggcctaccacgacctgtgcgacggcagcgccaaccagctgcagcagctgcagagccagctggcccaccagaccgagcagaagaccctgcagaagcagcagaacacctgccaccagcagctggaggacctgtgcagctgggtgggccaggccgagagagccctggccggccaccagggcagaaccacccagcaggacctgagcgccctgcagaagaaccagagcgacctgaaggacctgcaggacgacatccagaacagagccaccagcttcgccaccgtggtgaaggacatcgagggcttcatggaggagaaccagaccaagctgagccccagagagctgaccgccctgagagagaagctgcaccaggccaaggagcagtacgaggccctgcaggaggagaccagagtggcccagaaggagctggaggaggccgtgaccagcgccctgcagcaggagaccgagaagagcaaggccgccaaggagctggccgagaacaagaagaagatcgacgccctgctggactgggtgaccagcgtgggcagcagcggcggccagctgctgaccaacctgcccggcatggagcagctgagcggcgccagcctggagaagggcgccctggacaccaccgacggctacatgggcgtgaaccaggcccccgagaagctggacaagcagtgcgagatgatgaaggccagacaccaggagctgctgagccagcagcagaacttcatcctggccacccagagcgcccaggccttcctggaccagcacggccacaacctgacccccgaggagcagcagatgctgcagcagaagctgggcgagctgaaggagcagtacagcaccagcctggcccagagcgaggccgagctgaagcaggtgcagaccctgcaggacgagctgcagaagttcctgcaggaccacaaggagttcgagagctggctggagagaagcgagaaggagctggagaacatgcacaagggcggcagcagccccgagaccctgcccagcctgctgaagagacagggcagcttcagcgaggacgtgatcagccacaagggcgacctgagattcgtgaccatcagcggccagaaggtgctggacatggagaacagcttcaaggagggcaaggagcccagcgagatcggcaacctggtgaaggacaagctgaaggacgccaccgagagatacaccgccctgcacagcaagtgcaccagactgggcagccacctgaacatgctgctgggccagtaccaccagttccagaacagcgccgacagcctgcaggcctggatgcaggcctgcgaggccaacgtggagaagctgctgagcgacaccgtggccagcgaccccggcgtgctgcaggagcagctggccaccaccaagcagctgcaggaggagctggccgagcaccaggtgcccgtggagaagctgcagaaggtggccagagacatcatggagatcgagggcgagcccgcccccgaccacagacacgtgcaggagaccaccgacagcatcctgagccacttccagagcctgagctacagcctggccgagagaagcagcctgctgcagaaggccatcgcccagagccagagcgtgcaggagagcctggagagcctgctgcagagcatcggcgaggtggagcagaacctggagggcaagcaggtgagcagcctgagcagcggcgtgatccaggaggccctggccaccaacatgaagctgaagcaggacatcgccagacagaagagcagcctggaggccaccagagagatggtgaccagattcatggagaccgccgacagcaccaccgccgccgtgctgcagggcaagctggccgaggtgagccagagattcgagcagctgtgcctgcagcagcaggagaaggagagcagcctgaagaagctgctgccccaggccgagatgttcgagcacctgagcggcaagctgcagcagttcatggagaacaagagcagaatgctggccagcggcaaccagcccgaccaggacatcacccacttcttccagcagatccaggagctgaacctggagatggaggaccagcaggagaacctggacaccctggagcacctggtgaccgagctgagcagctgcggcttcgccctggacctgtgccagcaccaggacagagtgcagaacctgagaaaggacttcaccgagctgcagaagaccgtgaaggagagagagaaggacgccagcagctgccaggagcagctggacgagttcagaaagctggtgagaaccttccagaagtggctgaaggagaccgagggcagcatcccccccaccgagaccagcatgagcgccaaggagctggagaagcagatcgagcacctgaagagcctgctggacgactgggccagcaagggcaccctggtggaggagatcaactgcaagggcaccagcctggagaacctgatcatggagatcaccgcccccgacagccagggcaagaccggcagcatcctgcccagcgtgggcagcagcgtgggcagcgtgaacggctaccacacctgcaaggacctgaccgagatccagtgcgacatgagcgacgtgaacctgaagtacgagaagctgggcggcgtgctgcacgagagacaggagagcctgcaggccatcctgaacagaatggaggaggtgcacaaggaggccaacagcgtgctgcagtggctggagagcaaggaggaggtgctgaagagcatggacgccatgagcagccccaccaagaccgagaccgtgaaggcccaggccgagagcaacaaggccttcctggccgagctggagcagaacagccccaagatccagaaggtgaaggaggccctggccggcctgctggtgacctaccccaacagccaggaggccgagaactggaagaagatccaggaggagctgaacagcagatgggagagagccaccgaggtgaccgtggccagacagagacagctggaggagagcgccagccacctggcctgcttccaggccgccgagagccagctgagaccctggctgatggagaaggagctgatgatgggcgtgctgggccccctgagcatcgaccccaacatgctgaacgcccagaagcagcaggtgcagttcatgctgaaggagttcgaggccagaagacagcagcacgagcagctgaacgaggccgcccagggcatcctgaccggccccggcgacgtgagcctgagcaccagccaggtgcagaaggagctgcagagcatcaaccagaagtgggtggagctgaccgacaagctgaacagcagaagcagccagatcgaccaggccatcgtgaagagcacccagtaccaggagctgctgcaggacctgagcgagaaggtgagagccgtgggccagagactgagcgtgcagagcgccatcagcacccagcccgaggccgtgaagcagcagctggaggagaccagcgagatcagaagcgacctggagcagctggaccacgaggtgaaggaggcccagaccctgtgcgacgagctgagcgtgctgatcggcgagcagtacctgaaggacgagctgaagaagagactggagaccgtggccctgcccctgcagggcctggaggacctggccgccgacagaatcaacagactgcaggccgccctggccagcacccagcagttccagcagatgttcgacgagctgagaacctggctggacgacaagcagagccagcaggccaagaactgccccatcagcgccaagctggagagactgcagagccagctgcaggagaacgaggagttccagaagagcctgaaccagcacagcggcagctacgaggtgatcgtggccgagggcgagagcctgctgctgagcgtgccccccggcgaggagaagagaaccctgcagaaccagctggtggagctgaagaaccactgggaggagctgagcaagaagaccgccgacagacagagcagactgaaggactgcatgcagaaggcccagaagtaccagtggcacgtggaggacctggtgccctggatcgaggactgcaaggccaagatgagcgagctgagagtgaccctggaccccgtgcagctggagagcagcctgctgagaagcaaggccatgctgaacgaggtggagaagagaagaagcctgctggagatcctgaacagcgccgccgacatcctgatcaacagcagcgaggccgacgaggacggcatcagagacgagaaggccggcatcaaccagaacatggacgccgtgaccgaggagctgcaggccaagaccggcagcctggaggagatgacccagagactgagagagttccaggagagcttcaagaacatcgagaagaaggtggagggcgccaagcaccagctggagatcttcgacgccctgggcagccaggcctgcagcaacaagaacctggagaagctgagagcccagcaggaggtgctgcaggccctggagccccaggtggactacctgagaaacttcacccagggcctggtggaggacgcccccgacggcagcgacgccagccagctgctgcaccaggccgaggtggcccagcaggagttcctggaggtgaagcagagagtgaacagcggctgcgtgatgatggagaacaagctggagggcatcggccagttccactgcagagtgagagagatgttcagccagctggccgacctggacgacgagctggacggcatgggcgccatcggcagagacaccgacagcctgcagagccagatcgaggacgtgagactgttcctgaacaagatccacgtgctgaagctggacatcgaggccagcgaggccgagtgcagacacatgctggaggaggagggcaccctggacctgctgggcctgaagagagagctggaggccctgaacaagcagtgcggcaagctgaccgagagaggcaaggccagacaggagcagctggagctgaccctgggcagagtggaggacttctacagaaagctgaagggcctgaacgacgccaccaccgccgccgaggaggccgaggccctgcagtgggtggtgggcaccgaggtggagatcatcaaccagcagctggccgacttcaagatgttccagaaggagcaggtggaccccctgcagatgaagctgcagcaggtgaacggcctgggccagggcctgatccagagcgccggcaaggactgcgacgtgcagggcctggagcacgacatggaggagatcaacgccagatggaacaccctgaacaagaaggtggcccagagaatcgcccagctgcaggaggccctgctgcactgcggcaagttccaggacgccctggagcccctgctgagctggctggccgacaccgaggagctgatcgccaaccagaagccccccagcgccgagtacaaggtggtgaaggcccagatccaggagcagaagctgctgcagagactgctggacgacagaaaggccaccgtggacatgctgcaggccgagggcggcagaatcgcccagagcgccgagctggccgacagagagaagatcaccggccagctggagagcctggagagcagatggaccgagctgctgagcaaggccgccgccagacagaagcagctggaggacatcctggtgctggccaagcagttccacgagaccgccgagcccatcagcgacttcctgagcgtgaccgagaagaagctggccaacagcgagcccgtgggcacccagaccgccaagatccagcagcagatcatcagacacaaggccctggaggaggacatcgagaaccacgccaccgacgtgcaccaggccgtgaagatcggccagagcctgagcagcctgaccagccccgccgagcagggcgtgctgagcgagaagatcgacagcctgcaggccagatacagcgagatccaggacagatgctgcagaaaggccgccctgctggaccaggccctgagcaacgccagactgttcggcgaggacgaggtggaggtgctgaactggctggccgaggtggaggacaagctgagcagcgtgttcgtgaaggacttcaagcaggacgtgctgcacagacagcacgccgaccacctggccctgaacgaggagatcgtgaacagaaagaagaacgtggaccaggccatcaagaacggccaggccctgctgaagcagaccaccggcgaggaggtgctgctgatccaggagaagctggacggcatcaagaccagatacgccgacatcaccgtgaccagcagcaaggccctgagaaccctggagcaggccagacagctggccaccaagttccagagcacctacgaggagctgaccggctggctgagagaggtggaggaggagctggccaccagcggcggccagagccccaccggcgagcagatcccccagttccagcagagacagaaggagctgaagaaggaggtgatggagcacagactggtgctggacaccgtgaacgaggtgagcagagccctgctggagctggtgccctggagagccagagagggcctggacaagctggtgagcgacgccaacgagcagtacaagctggtgagcgacaccatcggccagagagtggacgagatcgacgccgccatccagagaagccagcagtacgagcaggccgccgacgccgagctggcctgggtggccgagaccaagagaaagctgatggccctgggccccatcagactggagcaggaccagaccaccgcccagctgcaggtgcagaaggccttcagcatcgacatcatcagacacaaggacagcatggacgagctgttcagccacagaagcgagatcttcggcacctgcggcgaggagcagaagaccgtgctgcaggagaagaccgagagcctgatccagcagtacgaggccatcagcctgctgaacagcgagagatacgccagactggagagagcccaggtgctggtgaaccagttctgggagacctacgaggagctgagcccctggatcgaggagaccagagccctgatcgcccagctgcccagccccgccatcgaccacgagcagctgagacagcagcaggaggagatgagacagctgagagagagcatcgccgagcacaagccccacatcgacaagctgctgaagatcggcccccagctgaaggagctgaaccccgaggagggcgagatggtggaggagaagtaccagaaggccgagaacatgtacgcccagatcaaggaggaggtgagacagagagccctggccctggacgaggccgtgagccagagcacccaggtgagccagttccacgacaagatcgagcccatgctggagaccctggagaacctgagcagcagactgagaatgccccccctgatccccgccgaggtggacaagatcagagagtgcatcagcgacaacaagagcgccaccgtggagctggagaagctgcagcccagcttcgaggccctgaagagaagaggcgaggagctgatcggcagaagccagggcgccgacaaggacctggccgccaaggagatccaggacaagctggaccagatggtgttcttctgggaggacatcaaggccagagccgaggagagagagatcaagttcctggacgtgctggagctggccgagaagttctggtacgacatggccgccctgctgaccaccatcaaggacacccaggacatcgtgcacgacctggagagccccggcatcgaccccagcatcatcaagcagcaggtggaggccgccgagaccatcaaggaggagaccgacggcctgcacgaggagctggagttcatcagaatcctgggcgccgacctgatcttcgcctgcggcgagaccgagaagcccgaggtgagaaagagcatcgacgagatgaacaacgcctgggagaacctgaacaagacctggaaggagagactggagaagctggaggacgccatgcaggccgccgtgcagtaccaggacaccctgcaggccatgttcgactggctggacaacaccgtgatcaagctgtgcaccatgccccccgtgggcaccgacctgaacaccgtgaaggaccagctgaacgagatgaaggagttcaaggtggaggtgtaccagcagcagatcgagatggagaagctgaaccaccagggcgagctgatgctgaagaaggccaccgacgagaccgacagagacatcatcagagagcccctgaccgagctgaagcacctgtgggagaacctgggcgagaagatcgcccacagacagcacaagctggagggcgccctgctggccctgggccagttccagcacgccctggaggagctgatgagctggctgacccacaccgaggagctgctggacgcccagagacccatcagcggcgaccccaaggtgatcgaggtggagctggccaagcaccacgtgctgaagaacgacgtgctggcccaccaggccaccgtggagaccgtgaacaaggccggcaacgagctgctggagagcagcgccggcgacgacgccagcagcctgagaagcagactggaggccatgaaccagtgctgggagagcgtgctgcagaagaccgaggagagagagcagcagctgcagagcaccctgcagcaggcccagggcttccacagcgagatcgaggacttcctgctggagctgaccagaatggagagccagctgagcgccagcaagcccaccggcggcctgcccgagaccgccagagagcagctggacacccacatggagctgtacagccagctgaaggccaaggaggagacctacaaccagctgctggacaagggcagactgatgctgctgagcagagacgacagcggcagcggcagcaagaccgagcagagcgtggccctgctggagcagaagtggcacgtggtgagcagcaagatggaggagagaaagagcaagctggaggaggccctgaacctggccaccgagttccagaacagcctgcaggagttcatcaactggctgaccctggccgagcagagcctgaacatcgccagcccccccagcctgatcctgaacaccgtgctgagccagatcgaggagcacaaggtgttcgccaacgaggtgaacgcccacagagaccagatcatcgagctggaccagaccggcaaccagctgaagttcctgagccagaagcaggacgtggtgctgatcaagaacctgctggtgagcgtgcagagcagatgggagaaggtggtgcagagaagcatcgagagaggcagaagcctggacgacgccagaaagagagccaagcagttccacgaggcctggaagaagctgatcgactggctggaggacgccgagagccacctggacagcgagctggagatcagcaacgaccccgacaagatcaagctgcagctgagcaagcacaaggagttccagaagaccctgggcggcaagcagcccgtgtacgacaccaccatcagaaccggcagagccctgaaggagaagaccctgctgcccgaggacagccagaagctggacaacttcctgggcgaggtgagagacaagtgggacaccgtgtgcggcaagagcgtggagagacagcacaagctggaggaggccctgctgttcagcggccagttcatggacgccctgcaggccctggtggactggctgtacaaggtggagccccagctggccgaggaccagcccgtgcacggcgacctggacctggtgatgaacctgatggacgcccacaaggtgttccagaaggagctgggcaagagaaccggcaccgtgcaggtgctgaagagaagcggcagagagctgatcgagaacagcagagacgacaccacctgggtgaagggccagctgcaggagctgagcaccagatgggacaccgtgtgcaagctgagcgtgagcaagcagagcagactggagcaggccctgaagcaggccgaggtgttcagagacaccgtgcacatgctgctggagtggctgagcgaggccgagcagaccctgagattcagaggcgccctgcccgacgacaccgaggccctgcagagcctgatcgacacccacaaggagttcatgaagaaggtggaggagaagagagtggacgtgaacagcgccgtggccatgggcgaggtgatcctggccgtgtgccaccccgactgcatcaccaccatcaagcactggatcaccatcatcagagccagattcgaggaggtgctgacctgggccaagcagcaccagcagagactggagaccgccctgagcgagctggtggccaacgccgagctgctggaggagctgctggcctggatccagtgggccgagaccaccctgatccagagagaccaggagcccatcccccagaacatcgacagagtgaaggccctgatcgccgagcaccagaccttcatggaggagatgaccagaaagcagcccgacgtggacagagtgaccaagacctacaagagaaagaacatcgagcccacccacgcccccttcatcgagaagagcagaagcggcggcagaaagagcctgagccagcccacccccccccccatgcccatcctgagccagagcgaggccaagaaccccagaatcaaccagctgagcgccagatggcagcaggtgtggctgctggccctggagagacagagaaagctgaacgacgccctggacagactggaggagctgaaggagttcgccaacttcgacttcgacgtgtggagaaagaagtacatgagatggatgaaccacaagaagagcagagtgatggacttcttcagaagaatcgacaaggaccaggacggcaagatcaccagacaggagttcatcgacggcatcctggccagcaagttccccaccaccaagctggagatgaccgccgtggccgacatcttcgacagagacggcgacggctacatcgactactacgagttcgtggccgccctgcaccccaacaaggacgcctacagacccaccaccgacgccgacaagatcgaggacgaggtgaccagacaggtggcccagtgcaagtgcgccaagagattccaggtggagcagatcggcgagaacaagtacagattcggcgacagccagcagctgagactggtgagaatcctgagaagcaccgtgatggtgagagtgggcggcggctggatggccctggacgagttcctggtgaagaacgacccctgcagagccagaggcagaaccaacatcgagctgagagagaagttcatcctgcccgagggcgccagccagggcatgacccccttcagaagcagaggcagaagaagcaagcccagcagcagagccgccagccccaccagaagcagcagcagcgccagccagagcaaccacagctgcaccagcatgcccagcagccccgccacccccgccagcggcaccaaggtgatccccagcagcggcagcaagctgaagagacccacccccaccttccacagcagcagaaccagcctggccggcgacaccagcaacagcagcagccccgccagcaccggcgccaagaccaacagagccgaccccaagaagagcgccagcagacccggcagcagagccggcagcagagccggcagcagagccagcagcagaagaggcagcgacgccagcgacttcgacctgctggagacccagagcgcctgcagcgacaccagcgagagcagcgccgccggcggccagggcaacagcagaagaggcctgaacaagcccagcaagatccccaccatgagcaagaagaccaccaccgccagccccagaacccccggccccaagagatag

SEQ ID NO: 88949 - DNA, 16293 bp, synthetic construct
  misc_feature 1..16293: note = Description of Artificial Sequence: Synthetic coding sequence
  source 1..16293: mol_type = other DNA
atgagcagcagcgacgaggagaccctgagcgagagaagctgcagaagcgagagaagctgcagaagcgagagaagctacagaagcgagagaagcggcagcctgagcccctgcccccccggcgacaccctgccctggaacctgcccctgcacgagcagaagaagagaaagagccaggacagcgtgctggaccccgccgagagagccgtggtgagagtggccgacgagagagacagagtgcagaagaagaccttcaccaagtgggtgaacaagcacctgatgaaggtgagaaagcacatcaacgacctgtacgaggacctgagagacggccacaacctgatcagcctgctggaggtgctgagcggcatcaagctgcccagagagaagggcagaatgagattccacagactgcagaacgtgcagatcgccctggacttcctgaagcagagacaggtgaagctggtgaacatcagaaacgacgacatcaccgacggcaaccccaagctgaccctgggcctgatctggaccatcatcctgcacttccagatcagcgacatctacatcagcggcgagagcggcgacatgagcgccaaggagaagctgctgctgtggacccagaaggtgaccgccggctacaccggcatcaagtgcaccaacttcagcagctgctggagcgacggcaagatgttcaacgccctgatccacagatacagacccgacctggtggacatggagagagtgcagatccagagcaacagagagaacctggagcaggccttcgaggtggccgagagactgggcgtgaccagactgctggacgccgaggacgtggacgtgcccagccccgacgagaagagcgtgatcacctacgtgagcagcatctacgacgccttccccaaggtgcccgagggcggcgagggcatcagcgccaccgaggtggacagcagatggcaggagtaccagagcagagtggacagcctgatcccctggatcaagcagcacaccatcctgatgagcgacaagaccttcccccagaaccccgtggagctgaaggccctgtacaaccagtacatccacttcaaggagaccgagatcctggccaaggagagagagaagggcagaatcgaggagctgtacaagctgctggaggtgtggatcgagttcggcagaatcaagctgccccagggctaccaccccaacgacgtggaggaggagtggggcaagctgatcatcgagatgctggagagagagaagagcctgagacccgccgtggagagactggagctgctgctgcagatcgccaacaagatccagaacggcgccctgaactgcgaggagaagctgaccctggccaagaacaccctgcaggccgacgccgcccacctggagagcggccagcccgtgcagtgcgagagcgacgtgatcatgtacatccaggagtgcgagggcctgatcagacagctgcaggtggacctgcagatcctgagagacgagaactactaccagctggaggagctggccttcagagtgatgagactgcaggacgagctggtgaccctgagactggagtgcaccaacctgtacagaaagggccacttcaccagcctggagctggtgccccccagcaccctgaccaccacccacctgaaggccgagcccctgaccaaggccacccacagcagcagcaccagctggttcagaaagcccatgaccagagccgagctggtggccatcagcagcagcgaggacgagggcaacctgagattcgtgtacgagctgctgagctgggtggaggagatgcagatgaagctggagagagccgagtggggcaacgacctgcccagcgtggagctgcagctggagacccagcagcacatccacaccagcgtggaggagctgggcagcagcgtgaaggaggccagactgtacgagggcaagatgagccagaacttccacaccagctacgccgagaccctgggcaagctggagacccagtactgcaagctgaaggagaccagcagcttcagaatgagacacctgcagagcctgcacaagttcgtgagcagagccaccgccgagctgatctggctgaacgagaaggaggaggaggagctggcctacgactggagcgacaacaacagcaacatcagcgccaagagaaactacttcagcgagctgaccatggagctggaggagaagcaggacgtgttcagaagcctgcaggacaccgccgagctgctgagcctggagaaccaccccgccaagcagaccgtggaggcctacagcgccgccgtgcagagccagctgcagtggatgaagcagctgtgcctgtgcgtggagcagcacgtgaaggagaacaccgcctacttccagttcttcagcgacgccagagagctggagagcttcctgagaaacctgcaggacagcatcaagagaaagtacagctgcgaccacaacaccagcctgagcagactggaggacctgctgcaggacagcatggacgagaaggagcagctgatccagagcaagagcagcgtggccagcctggtgggcagaagcaagaccatcgtgcagctgaagcccagaagccccgaccacgtgctgaagaacaccatcagcgtgaaggccgtgtgcgactacagacagatcgagatcaccatctgcaagaacgacgagtgcgtgctggaggacaacagccagagaaccaagtggaaggtgatcagccccaccggcaacgaggccatggtgcccagcgtgtgcttcctgatccccccccccaacaaggacgccatcgagatggccagcagagtggagcagagctaccagaaggtgatggccctgtggcaccagctgcacgtgaacaccaagagcctgatcagctggaactacctgagaaaggacctggacctggtgcagacctggaacctggagaagctgagaagcagcgcccccggcgagtgccaccagatcatgaagaacctgcaggcccactacgaggacttcctgcaggacagcagagacagcgtgctgttcagcgtggccgacagactgagactggaggaggaggtggaggcctgcaaggccagattccagcacctgatgaagagcatggagaacgaggacaaggaggagaccgtggccaagatgtacatcagcgagctgaagaacatcagactgagactggaggagtacgagcagagagtggtgaagagaatccagagcctggccagcagcagaaccgacagagacgcctggcaggacaacgccctgagaatcgccgagcaggagcacacccaggaggacctgcagcagctgagaagcgacctggacgccgtgagcatgaagtgcgacagcttcctgcaccagagccccagcagcagcagcgtgcccaccctgagaagcgagctgaacctgctggtggagaagatggaccacgtgtacggcctgagcaccgtgtacctgaacaagctgaagaccgtggacgtgatcgtgagaagcatccaggacgccgagctgctggtgaagggctacgagatcaagctgagccaggaggaggtggtgctggccgacctgagcgccctggaggcccactggagcaccctgagacactggctgagcgacgtgaaggacaagaacagcgtgttcagcgtgctggacgaggagatcgccaaggccaaggtggtggccgagcagatgagcagactgacccccgagagaaacctggacctggagagataccaggagaagggcagccagctgcaggagagatggcacagagtgatcgcccagctggagatcagacagagcgagctggagagcatccaggaggtgctgggcgactacagagcctgccacggcaccctgatcaagtggatcgaggagaccaccgcccagcaggagatgatgaagcccggccaggccgaggacagcagagtgctgagcgagcagctgagccagcagaccgccctgttcgccgagatcgagagaaaccagaccaagctggaccagtgccagaagttcagccagcagtacagcaccatcgtgaaggactacgagctgcagctgatgacctacaaggccttcgtggagagccagcagaagagccccggcaagagaagaagaatgctgagcagcagcgacgccatcacccaggagttcatggacctgagaaccagatacaccgccctggtgaccctgaccacccagcacgtgaagtacatcagcgacgccctgagaagactggaggaggaggagaaggtggtggaggaggagaagcaggagcacgtggagaaggtgaaggagctgctgggctgggtgagcaccctggccagaaacacccagggcaaggccaccagcagcgagaccaaggagagcaccgacatcgagaaggccatcctggagcagcaggtgctgagcgaggagctgaccaccaagaaggagcaggtgagcgaggccatcaagaccagccagatcttcctggccaagcacggccacaagctgagcgagaaggagaagaagcagatcagcgagcagctgaacgccctgaacaaggcctaccacgacctgtgcgacggcagcgccaaccagctgcagcagctgcagagccagctggcccaccagaccgagcagaagaccctgcagaagcagcagaacacctgccaccagcagctggaggacctgtgcagctgggtgggccaggccgagagagccctggccggccaccagggcagaaccacccagcaggacctgagcgccctgcagaagaaccagagcgacctgaaggacctgcaggacgacatccagaacagagccaccagcttcgccaccgtggtgaaggacatcgagggcttcatggaggagaaccagaccaagctgagccccagagagctgaccgccctgagagagaagctgcaccaggccaaggagcagtacgaggccctgcaggaggagaccagagtggcccagaaggagctggaggaggccgtgaccagcgccctgcagcaggagaccgagaagagcaaggccgccaaggagctggccgagaacaagaagaagatcgacgccctgctggactgggtgaccagcgtgggcagcagcggcggccagctgctgaccaacctgcccggcatggagcagctgagcggcgccagcctggagaagggcgccctggacaccaccgacggctacatgggcgtgaaccaggcccccgagaagctggacaagcagtgcgagatgatgaaggccagacaccaggagctgctgagccagcagcagaacttcatcctggccacccagagcgcccaggccttcctggaccagcacggccacaacctgacccccgaggagcagcagatgctgcagcagaagctgggcgagctgaaggagcagtacagcaccagcctggcccagagcgaggccgagctgaagcaggtgcagaccctgcaggacgagctgcagaagttcctgcaggaccacaaggagttcgagagctggctggagagaagcgagaaggagctggagaacatgcacaagggcggcagcagccccgagaccctgcccagcctgctgaagagacagggcagcttcagcgaggacgtgatcagccacaagggcgacctgagattcgtgaccatcagcggccagaaggtgctggacatggagaacagcttcaaggagggcaaggagcccagcgagatcggcaacctggtgaaggacaagctgaaggacgccaccgagagatacaccgccctgcacagcaagtgcaccagactgggcagccacctgaacatgctgctgggccagtaccaccagttccagaacagcgccgacagcctgcaggcctggatgcaggcctgcgaggccaacgtggagaagctgctgagcgacaccgtggccagcgaccccggcgtgctgcaggagcagctggccaccaccaagcagctgcaggaggagctggccgagcaccaggtgcccgtggagaagctgcagaaggtggccagagacatcatggagatcgagggcgagcccgcccccgaccacagacacgtgcaggagaccaccgacagcatcctgagccacttccagagcctgagctacagcctggccgagagaagcagcctgctgcagaaggccatcgcccagagccagagcgtgcaggagagcctggagagcctgctgcagagcatcggcgaggtggagcagaacctggagggcaagcaggtgagcagcctgagcagcggcgtgatccaggaggccctggccaccaacatgaagctgaagcaggacatcgccagacagaagagcagcctggaggccaccagagagatggtgaccagattcatggagaccgccgacagcaccaccgccgccgtgctgcagggcaagctggccgaggtgagccagagattcgagcagctgtgcctgcagcagcaggagaaggagagcagcctgaagaagctgctgccccaggccgagatgttcgagcacctgagcggcaagctgcagcagttcatggagaacaagagcagaatgctggccagcggcaaccagcccgaccaggacatcacccacttcttccagcagatccaggagctgaacctggagatggaggaccagcaggagaacctggacaccctggagcacctggtgaccgagctgagcagctgcggcttcgccctggacctgtgccagcaccaggacagagtgcagaacctgagaaaggacttcaccgagctgcagaagaccgtgaaggagagagagaaggacgccagcagctgccaggagcagctggacgagttcagaaagctggtgagaaccttccagaagtggctgaaggagaccgagggcagcatcccccccaccgagaccagcatgagcgccaaggagctggagaagcagatcgagcacctgaagagcctgctggacgactgggccagcaagggcaccctggtggaggagatcaactgcaagggcaccagcctggagaacctgatcatggagatcaccgcccccgacagccagggcaagaccggcagcatcctgcccagcgtgggcagcagcgtgggcagcgtgaacggctaccacacctgcaaggacctgaccgagatccagtgcgacatgagcgacgtgaacctgaagtacgagaagctgggcggcgtgctgcacgagagacaggagagcctgcaggccatcctgaacagaatggaggaggtgcacaaggaggccaacagcgtgctgcagtggctggagagcaaggaggaggtgctgaagagcatggacgccatgagcagccccaccaagaccgagaccgtgaaggcccaggccgagagcaacaaggccttcctggccgagctggagcagaacagccccaagatccagaaggtgaaggaggccctggccggcctgctggtgacctaccccaacagccaggaggccgagaactggaagaagatccaggaggagctgaacagcagatgggagagagccaccgaggtgaccgtggccagacagagacagctggaggagagcgccagccacctggcctgcttccaggccgccgagagccagctgagaccctggctgatggagaaggagctgatgatgggcgtgctgggccccctgagcatcgaccccaacatgctgaacgcccagaagcagcaggtgcagttcatgctgaaggagttcgaggccagaagacagcagcacgagcagctgaacgaggccgcccagggcatcctgaccggccccggcgacgtgagcctgagcaccagccaggtgcagaaggagctgcagagcatcaaccagaagtgggtggagctgaccgacaagctgaacagcagaagcagccagatcgaccaggccatcgtgaagagcacccagtaccaggagctgctgcaggacctgagcgagaaggtgagagccgtgggccagagactgagcgtgcagagcgccatcagcacccagcccgaggccgtgaagcagcagctggaggagaccagcgagatcagaagcgacctggagcagctggaccacgaggtgaaggaggcccagaccctgtgcgacgagctgagcgtgctgatcggcgagcagtacctgaaggacgagctgaagaagagactggagaccgtggccctgcccctgcagggcctggaggacctggccgccgacagaatcaacagactgcaggccgccctggccagcacccagcagttccagcagatgttcgacgagctgagaacctggctggacgacaagcagagccagcaggccaagaactgccccatcagcgccaagctggagagactgcagagccagctgcaggagaacgaggagttccagaagagcctgaaccagcacagcggcagctacgaggtgatcgtggccgagggcgagagcctgctgctgagcgtgccccccggcgaggagaagagaaccctgcagaaccagctggtggagctgaagaaccactgggaggagctgagcaagaagaccgccgacagacagagcagactgaaggactgcatgcagaaggcccagaagtaccagtggcacgtggaggacctggtgccctggatcgaggactgcaaggccaagatgagcgagctgagagtgaccctggaccccgtgcagctggagagcagcctgctgagaagcaaggccatgctgaacgaggtggagaagagaagaagcctgctggagatcctgaacagcgccgccgacatcctgatcaacagcagcgaggccgacgaggacggcatcagagacgagaaggccggcatcaaccagaacatggacgccgtgaccgaggagctgcaggccaagaccggcagcctggaggagatgacccagagactgagagagttccaggagagcttcaagaacatcgagaagaaggtggagggcgccaagcaccagctggagatcttcgacgccctgggcagccaggcctgcagcaacaagaacctggagaagctgagagcccagcaggaggtgctgcaggccctggagccccaggtggactacctgagaaacttcacccagggcctggtggaggacgcccccgacggcagcgacgccagccagctgctgcaccaggccgaggtggcccagcaggagttcctggaggtgaagcagagagtgaacagcggctgcgtgatgatggagaacaagctggagggcatcggccagttccactgcagagtgagagagatgttcagccagctggccgacctggacgacgagctggacggcatgggcgccatcggcagagacaccgacagcctgcagagccagatcgaggacgtgagactgttcctgaacaagatccacgtgctgaagctggacatcgaggccagcgaggccgagtgcagacacatgctggaggaggagggcaccctggacctgctgggcctgaagagagagctggaggccctgaacaagcagtgcggcaagctgaccgagagaggcaaggccagacaggagcagctggagctgaccctgggcagagtggaggacttctacagaaagctgaagggcctgaacgacgccaccaccgccgccgaggaggccgaggccctgcagtgggtggtgggcaccgaggtggagatcatcaaccagcagctggccgacttcaagatgttccagaaggagcaggtggaccccctgcagatgaagctgcagcaggtgaacggcctgggccagggcctgatccagagcgccggcaaggactgcgacgtgcagggcctggagcacgacatggaggagatcaacgccagatggaacaccctgaacaagaaggtggcccagagaatcgcccagctgcaggaggccctgctgcactgcggcaagttccaggacgccctggagcccctgctgagctggctggccgacaccgaggagctgatcgccaaccagaagccccccagcgccgagtacaaggtggtgaaggcccagatccaggagcagaagctgctgcagagactgctggacgacagaaaggccaccgtggacatgctgcaggccgagggcggcagaatcgcccagagcgccgagctggccgacagagagaagatcaccggccagctggagagcctggagagcagatggaccgagctgctgagcaaggccgccgccagacagaagcagctggaggacatcctggtgctggccaagcagttccacgagaccgccgagcccatcagcgacttcctgagcgtgaccgagaagaagctggccaacagcgagcccgtgggcacccagaccgccaagatccagcagcagatcatcagacacaaggccctggaggaggacatcgagaaccacgccaccgacgtgcaccaggccgtgaagatcggccagagcctgagcagcctgaccagccccgccgagcagggcgtgctgagcgagaagatcgacagcctgcaggccagatacagcgagatccaggacagatgctgcagaaaggccgccctgctggaccaggccctgagcaacgccagactgttcggcgaggacgaggtggaggtgctgaactggctggccgaggtggaggacaagctgagcagcgtgttcgtgaaggacttcaagcaggacgtgctgcacagacagcacgccgaccacctggccctgaacgaggagatcgtgaacagaaagaagaacgtggaccaggccatcaagaacggccaggccctgctgaagcagaccaccggcgaggaggtgctgctgatccaggagaagctggacggcatcaagaccagatacgccgacatcaccgtgaccagcagcaaggccctgagaaccctggagcaggccagacagctggccaccaagttccagagcacctacgaggagctgaccggctggctgagagaggtggaggaggagctggccaccagcggcggccagagccccaccggcgagcagatcccccagttccagcagagacagaaggagctgaagaaggaggtgatggagcacagactggtgctggacaccgtgaacgaggtgagcagagccctgctggagctggtgccctggagagccagagagggcctggacaagctggtgagcgacgccaacgagcagtacaagctggtgagcgacaccatcggccagagagtggacgagatcgacgccgccatccagagaagccagcagtacgagcaggccgccgacgccgagctggcctgggtggccgagaccaagagaaagctgatggccctgggccccatcagactggagcaggaccagaccaccgcccagctgcaggtgcagaaggccttcagcatcgacatcatcagacacaaggacagcatggacgagctgttcagccacagaagcgagatcttcggcacctgcggcgaggagcagaagaccgtgctgcaggagaagaccgagagcctgatccagcagtacgaggccatcagcctgctgaacagcgagagatacgccagactggagagagcccaggtgctggtgaaccagttctgggagacctacgaggagctgagcccctggatcgaggagaccagagccctgatcgcccagctgcccagccccgccatcgaccacgagcagctgagacagcagcaggaggagatgagacagctgagagagagcatcgccgagcacaagccccacatcgacaagctgctgaagatcggcccccagctgaaggagctgaaccccgaggagggcgagatggtggaggagaagtaccagaaggccgagaacatgtacgcccagatcaaggaggaggtgagacagagagccctggccctggacgaggccgtgagccagagcacccagatcaccgagttccacgacaagatcgagcccatgctggagaccctggagaacctgagcagcagactgagaatgccccccctgatccccgccgaggtggacaagatcagagagtgcatcagcgacaacaagagcgccaccgtggagctggagaagctgcagcccagcttcgaggccctgaagagaagaggcgaggagctgatcggcagaagccagggcgccgacaaggacctggccgccaaggagatccaggacaagctggaccagatggtgttcttctgggaggacatcaaggccagagccgaggagagagagatcaagttcctggacgtgctggagctggccgagaagttctggtacgacatggccgccctgctgaccaccatcaaggacacccaggacatcgtgcacgacctggagagccccggcatcgaccccagcatcatcaagcagcaggtggaggccgccgagaccatcaaggaggagaccgacggcctgcacgaggagctggagttcatcagaatcctgggcgccgacctgatcttcgcctgcggcgagaccgagaagcccgaggtgagaaagagcatcgacgagatgaacaacgcctgggagaacctgaacaagacctggaaggagagactggagaagctggaggacgccatgcaggccgccgtgcagtaccaggacaccctgcaggccatgttcgactggctggacaacaccgtgatcaagctgtgcaccatgccccccgtgggcaccgacctgaacaccgtgaaggaccagctgaacgagatgaaggagttcaaggtggaggtgtaccagcagcagatcgagatggagaagctgaaccaccagggcgagctgatgctgaagaaggccaccgacgagaccgacagagacatcatcagagagcccctgaccgagctgaagcacctgtgggagaacctgggcgagaagatcgcccacagacagcacaagctggagggcgccctgctggccctgggccagttccagcacgccctggaggagctgatgagctggctgacccacaccgaggagctgctggacgcccagagacccatcagcggcgaccccaaggtgatcgaggtggagctggccaagcaccacgtgctgaagaacgacgtgctggcccaccaggccaccgtggagaccgtgaacaaggccggcaacgagctgctggagagcagcgccggcgacgacgccagcagcctgagaagcagactggaggccatgaaccagtgctgggagagcgtgctgcagaagaccgaggagagagagcagcagctgcagagcaccctgcagcaggcccagggcttccacagcgagatcgaggacttcctgctggagctgaccagaatggagagccagctgagcgccagcaagcccaccggcggcctgcccgagaccgccagagagcagctggacacccacatggagctgtacagccagctgaaggccaaggaggagacctacaaccagctgctggacaagggcagactgatgctgctgagcagagacgacagcggcagcggcagcaagaccgagcagagcgtggccctgctggagcagaagtggcacgtggtgagcagcaagatggaggagagaaagagcaagctggaggaggccctgaacctggccaccgagttccagaacagcctgcaggagttcatcaactggctgaccctggccgagcagagcctgaacatcgccagcccccccagcctgatcctgaacaccgtgctgagccagatcgaggagcacaaggtgttcgccaacgaggtgaacgcccacagagaccagatcatcgagctggaccagaccggcaaccagctgaagttcctgagccagaagcaggacgtggtgctgatcaagaacctgctggtgagcgtgcagagcagatgggagaaggtggtgcagagaagcatcgagagaggcagaagcctggacgacgccagaaagagagccaagcagttccacgaggcctggaagaagctgatcgactggctggaggacgccgagagccacctggacagcgagctggagatcagcaacgaccccgacaagatcaagctgcagctgagcaagcacaaggagttccagaagaccctgggcggcaagcagcccgtgtacgacaccaccatcagaaccggcagagccctgaaggagaagaccctgctgcccgaggacagccagaagctggacaacttcctgggcgaggtgagagacaagtgggacaccgtgtgcggcaagagcgtggagagacagcacaagctggaggaggccctgctgttcagcggccagttcatggacgccctgcaggccctggtggactggctgtacaaggtggagccccagctggccgaggaccagcccgtgcacggcgacctggacctggtgatgaacctgatggacgcccacaaggtgttccagaaggagctgggcaagagaaccggcaccgtgcaggtgctgaagagaagcggcagagagctgatcgagaacagcagagacgacaccacctgggtgaagggccagctgcaggagctgagcaccagatgggacaccgtgtgcaagctgagcgtgagcaagcagagcagactggagcaggccctgaagcaggccgaggtgttcagagacaccgtgcacatgctgctggagtggctgagcgaggccgagcagaccctgagattcagaggcgccctgcccgacgacaccgaggccctgcagagcctgatcgacacccacaaggagttcatgaagaaggtggaggagaagagagtggacgtgaacagcgccgtggccatgggcgaggtgatcctggccgtgtgccaccccgactgcatcaccaccatcaagcactggatcaccatcatcagagccagattcgaggaggtgctgacctgggccaagcagcaccagcagagactggagaccgccctgagcgagctggtggccaacgccgagctgctggaggagctgctggcctggatccagtgggccgagaccaccctgatccagagagaccaggagcccatcccccagaacatcgacagagtgaaggccctgatcgccgagcaccagaccttcatggaggagatgaccagaaagcagcccgacgtggacagagtgaccaagacctacaagagaaagaacatcgagcccacccacgcccccttcatcgagaagagcagaagcggcggcagaaagagcctgagccagcccacccccccccccatgcccatcctgagccagagcgaggccaagaaccccagaatcaaccagctgagcgccagatggcagcaggtgtggctgctggccctggagagacagagaaagctgaacgacgccctggacagactggaggagctgaaggagttcgccaacttcgacttcgacgtgtggagaaagaagtacatgagatggatgaaccacaagaagagcagagtgatggacttcttcagaagaatcgacaaggaccaggacggcaagatcaccagacaggagttcatcgacggcatcctggccagcaagttccccaccaccaagctggagatgaccgccgtggccgacatcttcgacagagacggcgacggctacatcgactactacgagttcgtggccgccctgcaccccaacaaggacgcctacagacccaccaccgacgccgacaagatcgaggacgaggtgaccagacaggtggcccagtgcaagtgcgccaagagattccaggtggagcagatcggcgagaacaagtacagattcggcgacagccagcagctgagactggtgagaatcctgagaagcaccgtgatggtgagagtgggcggcggctggatggccctggacgagttcctggtgaagaacgacccctgcagagccagaggcagaaccaacatcgagctgagagagaagttcatcctgcccgagggcgccagccagggcatgacccccttcagaagcagaggcagaagaagcaagcccagcagcagagccgccagccccaccagaagcagcagcagcgccagccagagcaaccacagctgcaccagcatgcccagcagccccgccacccccgccagcggcaccaaggtgatccccagcagcggcagcaagctgaagagacccacccccaccttccacagcagcagaaccagcctggccggcgacaccagcaacagcagcagccccgccagcaccggcgccaagaccaacagagccgaccccaagaagagcgccagcagacccggcagcagagccggcagcagagccggcagcagagccagcagcagaagaggcagcgacgccagcgacttcgacctgctggagacccagagcgcctgcagcgacaccagcgagagcagcgccgccggcggccagggcaacagcagaagaggcctgaacaagcccagcaagatccccaccatgagcaagaagaccaccaccgccagccccagaacccccggccccaagagatag

SEQ ID NO: 88950 - DNA, 3189 bp, synthetic construct
  misc_feature 1..3189: note = Description of Artificial Sequence: Synthetic coding sequence
  source 1..3189: mol_type = other DNA
atgggcaacagcctgggctgcttcaaggagcccaaggagagcatcgccatccccgagaaggcccccatcagccccaagaagagagtgagattcaagagaagatggagaggcaagaagatccccacccccgaggccagccaccaggaggagaccagcgagggcaccggcgtgatcgaggagaccgagaccctgaccaagctgaccgagagcctgcagaaggaggacggcgtgggcggcgtggagcacaccccccccgacatcctgctgcccggcgacagcgcccccaacagcagagtggtggacagaggcatgatcgtgcaggtgaaggagagattccagggcgaggtgcagaccgcccacctgctgctggagaacgagagcagcgtggccggcggcgtgtgggacagcctggaggagggcatgaccgtgatcgcccacctgctggacaaccccgccgagagaaactgcgagaagagcgtgagccagctggtggagttccccagaaccgccagctgcagcagcagagccgtgctgctgcccctgcagggcgagaccgccgtggagaagggcaacatccagagaggcttcagaagctgcgccctgcccagaaccgactaccccaccgacaagggcaaccaggagcagttcagcgagggctggagcgtggaggagggcaccaagagcgtgagcggcgccccccagaccgccagctggatcatcgagtgcagcgtgagcagcctgctgctggaccagcccggcggccagagaagaaccgagcccagccacgtgggccaggtgcccccccaggacagcagactgcccaccagccagagcgacctgagcatcagcggcgtgaccgtgagcatcctgcccagcagcagcggctacggcagcgacggcccccacatccacggcatccagcccaaggacaccgagcccgagaagagcagcaccagcttcagcgaggaggacggcaccctgagcctggaggccagccacacccccagctggggcctggaggagatcagcgacatctacatcagcggcgagagcggcgacatgagcgccaaggagaagctgctgctgtggacccagaaggtgaccgccggctacaccggcatcaagtgcaccaacttcagcagctgctggagcgacggcaagatgttcaacgccctgatccacagatacagacccgacctggtggacatggagagagtgcagatccagagcaacagagagaacctggagcaggccttcgaggtggccgagagactgggcgtgaccagactgctggacgccgaggacgtggacgtgcccagccccgacgagaagagcgtgatcacctacgtgagcagcatctacgacgccttccccaaggtgcccgagggcggcgagggcatcagcgccaccgaggtggacagcagatggcaggagtaccagagcagagtggacagcctgatcccctggatcaagcagcacaccatcctgatgagcgacaagaccttcccccagaaccccgtggagctgaaggccctgtacaaccagtacatccacttcaaggagaccgagatcctggccaaggagagagagaagggcagaatcgaggagctgtacaagctgctggaggtgtggatcgagttcggcagaatcaagctgccccagggctaccaccccaacgacgtggaggaggagtggggcaagctgatcatcgagatgctggagagagagaagagcctgagacccgccgtggagagactggagctgctgctgcagatcgccaacaagatccagaacggcgccctgaactgcgaggagaagctgaccctggccaagaacaccctgcaggccgacgccgcccacctggagagcggccagcccgtgcagtgcgagagcgacgtgatcatgtacatccaggagtgcgagggcctgatcagacagctgcaggtggacctgcagatcctgagagacgagaactactaccagctggaggagctggccttcagagtgatgagactgcaggacgagctggtgaccctgagactggagtgcaccaacctgtacagaaagggccacttcaccagcctggagctggtgccccccagcaccctgaccaccacccacctgaaggccgagcccctgaccaaggccacccacagcagcagcaccagctggttcagaaagcccatgaccagagccgagctggtggccatcagcagcagcgaggacgagggcaacctgagattcgtgtacgagctgctgagctgggtggaggagatgcagatgaagctggagagagccgagtggggcaacgacctgcccagcgtggagctgcagctggagacccagcagcacatccacaccagcgtggaggagctgggcagcagcgtgaaggaggccagactgtacgagggcaagatgagccagaacttccacaccagctacgccgagaccctgggcaagctggagacccagtactgcaagctgaaggagaccagcagcttcagaatgagacacctgcagagcctgcacaagttcgtgagcagagccaccgccgagctgatctggctgaacgagaaggaggaggaggagctggcctacgactggagcgacaacaacagcaacatcagcgccaagagaaactacttcagcgagctgaccatggagctggaggagaagcaggacgtgttcagaagcctgcaggacaccgccgagctgctgagcctggagaaccaccccgccaagcagaccgtggaggcctacagcgccgccgtgcagagccagctgcagtggatgaagcagctgtgcctgtgcgtggagcagcacgtgaaggagaacaccgcctacttccagttcttcagcgacgccagagagctggagagcttcctgagaaacctgcaggacagcatcaagagaaagtacagctgcgaccacaacaccagcctgagcagactggaggacctgctgcaggacagcatgttccaggacgagaaggagcagctgatccagagcaagagcagcgtggccagcctggtgggcagaagcaagaccatcgtgcagctgaagcccagaagccccgaccacgtgctgaagaacaccatcagcgtgaaggccgtgtgcgactacagacagatcgagggcagaaccatcctgagcgagggctacggccccctggccagcgccgcctgctag

SEQ ID NO: 88951 - DNA, 22167 bp, synthetic construct
  misc_feature 1..22167: note = Description of Artificial Sequence: Synthetic coding sequence
  source 1..22167: mol_type = other DNA
atgagcagcagcgacgaggagaccctgagcgagagaagctgcagaagcgagagaagctgcagaagcgagagaagctacagaagcgagagaagcggcagcctgagcccctgcccccccggcgacaccctgccctggaacctgcccctgcacgagcagaagaagagaaagagccaggacagcgtgctggaccccgccgagagagccgtggtgagagtggccgacgagagagacagagtgcagaagaagaccttcaccaagtgggtgaacaagcacctgatgaaggtgagaaagcacatcaacgacctgtacgaggacctgagagacggccacaacctgatcagcctgctggaggtgctgagcggcatcaagctgcccagagagaagggcagaatgagattccacagactgcagaacgtgcagatcgccctggacttcctgaagcagagacaggtgaagctggtgaacatcagaaacgacgacatcaccgacggcaaccccaagctgaccctgggcctgatctggaccatcatcctgcacttccagatcagcgacatctacatcagcggcgagagcggcgacatgagcgccaaggagaagctgctgctgtggacccagaaggtgaccgccggctacaccggcatcaagtgcaccaacttcagcagctgctggagcgacggcaagatgttcaacgccctgatccacagatacagacccgacctggtggacatggagagagtgcagatccagagcaacagagagaacctggagcaggccttcgaggtggccgagagactgggcgtgaccagactgctggacgccgaggacgtggacgtgcccagccccgacgagaagagcgtgatcacctacgtgagcagcatctacgacgccttccccaaggtgcccgagggcggcgagggcatcagcgccaccgaggtggacagcagatggcaggagtaccagagcagagtggacagcctgatcccctggatcaagcagcacaccatcctgatgagcgacaagaccttcccccagaaccccgtggagctgaaggccctgtacaaccagtacatccacttcaaggagaccgagatcctggccaaggagagagagaagggcagaatcgaggagctgtacaagctgctggaggtgtggatcgagttcggcagaatcaagctgccccagggctaccaccccaacgacgtggaggaggagtggggcaagctgatcatcgagatgctggagagagagaagagcctgagacccgccgtggagagactggagctgctgctgcagatcgccaacaagatccagaacggcgccctgaactgcgaggagaagctgaccctggccaagaacaccctgcaggccgacgccgcccacctggagagcggccagcccgtgcagtgcgagagcgacgtgatcatgtacatccaggagtgcgagggcctgatcagacagctgcaggtggacctgcagatcctgagagacgagaactactaccagctggaggagctggccttcagagtgatgagactgcaggacgagctggtgaccctgagactggagtgcaccaacctgtacagaaagggccacttcaccagcctggagctggtgccccccagcaccctgaccaccacccacctgaaggccgagcccctgaccaaggccacccacagcagcagcaccagctggttcagaaagcccatgaccagagccgagctggtggccatcagcagcagcgaggacgagggcaacctgagattcgtgtacgagctgctgagctgggtggaggagatgcagatgaagctggagagagccgagtggggcaacgacctgcccagcgtggagctgcagctggagacccagcagcacatccacaccagcgtggaggagctgggcagcagcgtgaaggaggccagactgtacgagggcaagatgagccagaacttccacaccagctacgccgagaccctgggcaagctggagacccagtactgcaagctgaaggagaccagcagcttcagaatgagacacctgcagagcctgcacaagttcgtgagcagagccaccgccgagctgatctggctgaacgagaaggaggaggaggagctggcctacgactggagcgacaacaacagcaacatcagcgccaagagaaactacttcagcgagctgaccatggagctggaggagaagcaggacgtgttcagaagcctgcaggacaccgccgagctgctgagcctggagaaccaccccgccaagcagaccgtggaggcctacagcgccgccgtgcagagccagctgcagtggatgaagcagctgtgcctgtgcgtggagcagcacgtgaaggagaacaccgcctacttccagttcttcagcgacgccagagagctggagagcttcctgagaaacctgcaggacagcatcaagagaaagtacagctgcgaccacaacaccagcctgagcagactggaggacctgctgcaggacagcatggacgagaaggagcagctgatccagagcaagagcagcgtggccagcctggtgggcagaagcaagaccatcgtgcagctgaagcccagaagccccgaccacgtgctgaagaacaccatcagcgtgaaggccgtgtgcgactacagacagatcgagatcaccatctgcaagaacgacgagtgcgtgctggaggacaacagccagagaaccaagtggaaggtgatcagccccaccggcaacgaggccatggtgcccagcgtgtgcttcctgatccccccccccaacaaggacgccatcgagatggccagcagagtggagcagagctaccagaaggtgatggccctgtggcaccagctgcacgtgaacaccaagagcctgatcagctggaactacctgagaaaggacctggacctggtgcagacctggaacctggagaagctgagaagcagcgcccccggcgagtgccaccagatcatgaagaacctgcaggcccactacgaggacttcctgcaggacagcagagacagcgtgctgttcagcgtggccgacagactgagactggaggaggaggtggaggcctgcaaggccagattccagcacctgatgaagagcatggagaacgaggacaaggaggagaccgtggccaagatgtacatcagcgagctgaagaacatcagactgagactggaggagtacgagcagagagtggtgaagagaatccagagcctggccagcagcagaaccgacagagacgcctggcaggacaacgccctgagaatcgccgagcaggagcacacccaggaggacctgcagcagctgagaagcgacctggacgccgtgagcatgaagtgcgacagcttcctgcaccagagccccagcagcagcagcgtgcccaccctgagaagcgagctgaacctgctggtggagaagatggaccacgtgtacggcctgagcaccgtgtacctgaacaagctgaagaccgtggacgtgatcgtgagaagcatccaggacgccgagctgctggtgaagggctacgagatcaagctgagccaggaggaggtggtgctggccgacctgagcgccctggaggcccactggagcaccctgagacactggctgagcgacgtgaaggacaagaacagcgtgttcagcgtgctggacgaggagatcgccaaggccaaggtggtggccgagcagatgagcagactgacccccgagagaaacctggacctggagagataccaggagaagggcagccagctgcaggagagatggcacagagtgatcgcccagctggagatcagacagagcgagctggagagcatccaggaggtgctgggcgactacagagcctgccacggcaccctgatcaagtggatcgaggagaccaccgcccagcaggagatgatgaagcccggccaggccgaggacagcagagtgctgagcgagcagctgagccagcagaccgccctgttcgccgagatcgagagaaaccagaccaagctggaccagtgccagaagttcagccagcagtacagcaccatcgtgaaggactacgagctgcagctgatgacctacaaggccttcgtggagagccagcagaagagccccggcaagagaagaagaatgctgagcagcagcgacgccatcacccaggagttcatggacctgagaaccagatacaccgccctggtgaccctgaccacccagcacgtgaagtacatcagcgacgccctgagaagactggaggaggaggagaaggtggtggaggaggagaagcaggagcacgtggagaaggtgaaggagctgctgggctgggtgagcaccctggccagaaacacccagggcaaggccaccagcagcgagaccaaggagagcaccgacatcgagaaggccatcctggagcagcaggtgctgagcgaggagctgaccaccaagaaggagcaggtgagcgaggccatcaagaccagccagatcttcctggccaagcacggccacaagctgagcgagaaggagaagaagcagatcagcgagcagctgaacgccctgaacaaggcctaccacgacctgtgcgacggcagcgccaaccagctgcagcagctgcagagccagctggcccaccagaccgagcagaaggagtgcagagccgtggccggcgtgatcgacctgggcaccgtggagatcttccccatcttcaaggccatgcagaagggcctgctggaccaggacaccggcctggtgctgctggagagccaggtgatcatgagcggcctgatcgcccccgagaccggcgagaacctgagcctggaggagggcatcgccagaaacctgatcaacccccagatgtaccagcagctgagagagctgcaggacgccctggccctgatcagcagactgaccgagagcagaggccccctgagcgtggtggaggccatcgagaagagaatcatcagcgagaccgtgggcctgaagatcctggaggcccacctggccaccggcggcttcagcctgagccccagcgagaactgcatcaacctggaggaggccttccaccagggcctgatcagcgcctggctgcacagcgtgctggagagctacctgagaaccagcaagaacctgatcgaccccaacaccgccgagaagatcggcctgctggacctgatgcagagatgcatcgtgcaccaggagagcggcttcaagctgctgcccgtgaagcagctggccggcggcatggtgagcctgaagagcggcagaaaggtgagcatcttcagagccgtgcaggagggcctgatcgacagacaggtgaccgtgagactgctggaggcccagctgttcgccggcggcatcgtggaccccagaaccggccacagactgaccgtggaggaggccgtgagacacaacctgatcgaccaggacatggcctgcgccatcctgatcagacagctgcagaccggcggcatcatcgacaccgtgaccggccagagactgaccatcgacgaggccgtgagcaacgacctggtggccgccaagatcgccctggtgatcctggagagcctgtggagcttcatgggcctgctgtggcccgagagcggcgagatcctgcccatcaccgacgccctggagcagggcatcgtgagcaccgagctggcccacaagatcctgagcaacagacagcacatcaaggccctgttcctgcccgccaccaccgagatcctgagctggaagaaggccatcgagagcggcatcctggacagagacctggccaacaacctgaagagcatctgcatccccgacgtgatgccccacatgcagctggccgacagcgccgagcagaacatcaaccccggcgccgccgtgctgccctgcagcaagagccaccccaaggccaccgccagccagagcgagaacctgctgttccagctgatgacccacagctacatcaacgtgcagaacggccagagactgctgctgctggacaaggagctgatggagaccctgaccagcagagacgagtaccagaccagcccccccaaggtggtggagatcggccaccagagacagaagacccccgagggcctgcaggagagcgccaacgtgaagatcagcggcaccttcagcagcggctggaccgtgagactgcccgagttccagttcagcagccagaacaaggagtaccccgacagagaggactgcaccaccgagaagggcaagaagaccaccgtggagaccgaggacagcagcgtggagaaccccgagcaggacctgttcgtggagcagaaggagagaaaccccaacatcgacgccctgaaggtgatcaacaaggtgaagctggaggtgcagagacagctgatcggcacccagagagaggaccagaccgccgtgagcgtgagagagaacgccagcagaggccacctgctgaccatcccccccgccgaggccgagggcgtgcccctggtggtggacaaggacgtgttcagcgtggagacccccaagaaggagcaccagcccctgagaaacaccagcttcacctgccagaacgagcaggcccacaccctggagaccgagtacatccacgacgagaccggcggcagccacatcaagccccagagcaagaagctgcaggtgcaggtgaagaagaccctgggcatcaagctggagctgaagagcgagaccgacggcaacgtgcaccccctggacaagaaggagatgctgaagaagaccttcctggccaaggacgaccacaaggagagccaggaggcccagaacatcgccggcggcagcatgatgatgagcgagaagaccgacgaggaggacagcggcagagagatcttcctgagctgcagccaccccctggagctgctggaggaggccaccctgaacgtgctgagcgcccagctgctggacggcggcatcttccacgagcagaccggccagaagctgctgctgaacgaggccatcagcagaggcatcgtgcccagccacaccgccgtgaagctgatggagaagctgaacatgttccagggcttcttcgacagccagacctgcgagagcctgaccaccgaggaggtgatcaacgagggcctgatggacgagaagctgctgcacaacgtgctgatggccgacaaggccatcagcggcgtgctggaccccagaacccagaccctgtgcagcgtgaaggacgccgtgaccgtgggcctgctggacaaggagaccgccaccagaatcctggagagacaggtggtgaccggcggcatcatcgacctgaagagaggcaagaaggtgagcgtgaccctggccagcaccctgggcctggtggacgtggccgaccagcccgagctgatcaacctggagaaggccagcaagggcagagacgccgagaagaccgtgagagagagactgatcagcctgcagatggagaccaccggcctgatcgaccccgacagcaaggcccccctgaccgtggtgcagagcatcgacagaggcctgctggagagagaggaggccgtgagactgctgaccaagcaggtggtggacggcggcatcatccaccacatcagcggcatgagactgagcgtggacaacgccttcagacacggcctgatcggcgaggacctggccgagaagctgaagagagtggagaacctgaacatccaccagatcttcaaccccgagaccaaggagaacatcagcctgcccaaggccatcaagctggacctgatcaccagcgacctgaagagagagatccaggaggtgcaggccttcaccggcaacttcgtggacctgatcagcggccagagactgaccctggccgaggccaagaaggagggcctgctgaccaacgaggccgtgctgagccccggcatgatgcacggcatcgtggaccccgagaactgcagaatcgtgccctacagcgagctggtgaagaagtgcaagatcgacatcgagagcggccagagatacctggaggtgatccccttcagcgacatcaaggacggcgtgagcgacaaggtgctgaccctgagccaggccatccagctgggcaaggtggacttcgccagcaccctgaaggtgctggaggcccaggccaacaccggcggcatcatcgacaccgccaccggcaagagactgaccctggccagcgccctggaggagaagctggtggacgagaacatggtgagaatcatcgccagccaccaggtgctgaacggcggcatcgtggacatcttcagcgaccagagagtgaccctggtggaggccatcgagaagagactgatcagccccgagctggccaacatgatccagatcgacagcagcgagttcagcgaccacagagcccagatcgagaagcaggagggcatcgaggtgtgcgccctgcagaacgagttcctgggcaaggacatgctgatcgcctgcaaccagaccgccgagatgagctgcaacaaggtggaggagagcgagagactgttccaggtggagaaccagagcgcccaggagaaggtgaaggtgagagtgagcgacggcgagcaggccaagaagagcagagagatcagcctgaaggagttcggctgcaaggaccagagaaagcccagaatgagcagcgacgccaaggagttcatcagcatcatcaacccccacaacctgaagggcaagagcctgggccaggtgagcctgacccacccctacagcgagtgcgacttcaagctgaaggaggtggccagaaacaacatgggcaacgacaccaacgaggagcaggagaaggccgtgaccaagatcgagatcatcagccacatgaagcagagcaccagctgcctggacagcgaggagatcagagagaaccagggcgaggtgatcctggaggtgcaggagacctactgcgagaccagcggcaagctgcccagcgagcaggtgctgcagcagcccatgaacgccagagtgaagagcaagagagagaagagagaggtgatcgtggaggagagcatcagaacctgcaagcccgccttcctgagcgaggagaagctgtaccaggagaccgccatcagagacgagcacgacagccacatcaagagccagcccagagagatgaccagcagcgagaagggcaaggaggccgacaccgagatgggcttcagcatcaccttcaagatcgaggagagcagcagccaggtggtgccccagggcatcagcgtgaagcacctggacgccctgaccctgttcagcagcaagcaggccaacgagggcaaggtgaacaacctgagcctgtgcctgaccctgaagcccgaggagaacctgagcagagagatcgcctgcggcgcccagagcgagcccttcccctgcatgacccccagacccgagggcctgcactaccaggagagcgacggcaaggcccaggtgaccggccccagccagatcagcaagaccgacaagagcttccagggcaccaccagacaggagaccaactaccaggacagctgggtgaccagcaagaccaaggagaccaagcaccagatcagcagcagcaacgagtgcaaggagaagagctaccaggaggtgagcttcgaccccgccagaggcctgaagctggaggagatcaccgtgagcagacccgacagcaaggaggtgagatacctggagttcagcgacagaaaggacctgcaccaccagggcagcaagagcgacgacaagctgtgcggcaccctgaagagcgagatcgccacccaggagctgaccggcgagaagttcctggagatggccaaccccaacgtggccggcctggaggccggcagcatcgaggacatcgtgacccagagaggcagcagagtgctgggcagcttcctgcccgagaagctgttcaagggcgtgagccagaaggagaacaccggccagcagaacgccatcatcagccccaccgtgctggagaccagcgaggagaagaccgtgagcctgaccgtgtgcagcgccgtgaagaccgagaagaccccccaggagaagctgagagagagccccggcagcgagcagacccccttcatgaccgcccccgagggcaagggcaacggcggcgtgaaccccgagcccttcagagccacccagaacgtgttcaccagacagctgtgcctggagcacgacgagaagctggtgagctacctgagcctgctgagaaacatcgagatgagaaccaagcagatccagcccctggagctgaacctggccgagctgcaggacctgctgtgccaggccaaggtgctggagagagagctgaaggacctgaccaccctggtgagccaggagctggagtgcgtgaaccagatcatcatcagccagccccaggaggtgcccgcccagctgctgaaggccctggagaaggacgccaagaacctgcagaagagcctgagcagcgtgagcgacacctggaacagcagactgctgcacttccagaacgccgtggagatcgagaagaccaaggtgctgaaccagcacacccagctggagggcagactgcaggacctgagagcctgggtgggcaacaagaacctgatcctgaacagcaagggcagcaacagcgagatcgacgtggacagcctgaacctgtgcctgcagcagtacgaggacctgaagcagcccatggccgagagaaaggcccagctggacgccctggccttcgacatccagttcttcatcagcgagcacgcccaggacctgagcccccagcagaacagacagatgctgagactgctgaacgagctgcagagaagcttccaggacatcctggagcagaccgccgcccaggtggacgccctgcagggccacctgcagcagatggagcaggaggccctggtgaagaccctgcagaagcagcagaacacctgccaccagcagctggaggacctgtgcagctgggtgggccaggccgagagagccctggccggccaccagggcagaaccacccagcaggacctgagcgccctgcagaagaaccagagcgacctgaaggacctgcaggacgacatccagaacagagccaccagcttcgccaccgtggtgaaggacatcgagggcttcatggaggagaaccagaccaagctgagccccagagagctgaccgccctgagagagaagctgcaccaggccaaggagcagtacgaggccctgcaggaggagaccagagtggcccagaaggagctggaggaggccgtgaccagcgccctgcagcaggagaccgagaagagcaaggccgccaaggagctggccgagaacaagaagaagatcgacgccctgctggactgggtgaccagcgtgggcagcagcggcggccagctgctgaccaacctgcccggcatggagcagctgagcggcgccagcctggagaagggcgccctggacaccaccgacggctacatgggcgtgaaccaggcccccgagaagctggacaagcagtgcgagatgatgaaggccagacaccaggagctgctgagccagcagcagaacttcatcctggccacccagagcgcccaggccttcctggaccagcacggccacaacctgacccccgaggagcagcagatgctgcagcagaagctgggcgagctgaaggagcagtacagcaccagcctggcccagagcgaggccgagctgaagcaggtgcagaccctgcaggacgagctgcagaagttcctgcaggaccacaaggagttcgagagctggctggagagaagcgagaaggagctggagaacatgcacaagggcggcagcagccccgagaccctgcccagcctgctgaagagacagggcagcttcagcgaggacgtgatcagccacaagggcgacctgagattcgtgaccatcagcggccagaaggtgctggacatggagaacagcttcaaggagggcaaggagcccagcgagatcggcaacctggtgaaggacaagctgaaggacgccaccgagagatacaccgccctgcacagcaagtgcaccagactgggcagccacctgaacatgctgctgggccagtaccaccagttccagaacagcgccgacagcctgcaggcctggatgcaggcctgcgaggccaacgtggagaagctgctgagcgacaccgtggccagcgaccccggcgtgctgcaggagcagctggccaccaccaagcagctgcaggaggagctggccgagcaccaggtgcccgtggagaagctgcagaaggtggccagagacatcatggagatcgagggcgagcccgcccccgaccacagacacgtgcaggagaccaccgacagcatcctgagccacttccagagcctgagctacagcctggccgagagaagcagcctgctgcagaaggccatcgcccagagccagagcgtgcaggagagcctggagagcctgctgcagagcatcggcgaggtggagcagaacctggagggcaagcaggtgagcagcctgagcagcggcgtgatccaggaggccctggccaccaacatgaagctgaagcaggacatcgccagacagaagagcagcctggaggccaccagagagatggtgaccagattcatggagaccgccgacagcaccaccgccgccgtgctgcagggcaagctggccgaggtgagccagagattcgagcagctgtgcctgcagcagcaggagaaggagagcagcctgaagaagctgctgccccaggccgagatgttcgagcacctgagcggcaagctgcagcagttcatggagaacaagagcagaatgctggccagcggcaaccagcccgaccaggacatcacccacttcttccagcagatccaggagctgaacctggagatggaggaccagcaggagaacctggacaccctggagcacctggtgaccgagctgagcagctgcggcttcgccctggacctgtgccagcaccaggacagagtgcagaacctgagaaaggacttcaccgagctgcagaagaccgtgaaggagagagagaaggacgccagcagctgccaggagcagctggacgagttcagaaagctggtgagaaccttccagaagtggctgaaggagaccgagggcagcatcccccccaccgagaccagcatgagcgccaaggagctggagaagcagatcgagcacctgaagagcctgctggacgactgggccagcaagggcaccctggtggaggagatcaactgcaagggcaccagcctggagaacctgatcatggagatcaccgcccccgacagccagggcaagaccggcagcatcctgcccagcgtgggcagcagcgtgggcagcgtgaacggctaccacacctgcaaggacctgaccgagatccagtgcgacatgagcgacgtgaacctgaagtacgagaagctgggcggcgtgctgcacgagagacaggagagcctgcaggccatcctgaacagaatggaggaggtgcacaaggaggccaacagcgtgctgcagtggctggagagcaaggaggaggtgctgaagagcatggacgccatgagcagccccaccaagaccgagaccgtgaaggcccaggccgagagcaacaaggccttcctggccgagctggagcagaacagccccaagatccagaaggtgaaggaggccctggccggcctgctggtgacctaccccaacagccaggaggccgagaactggaagaagatccaggaggagctgaacagcagatgggagagagccaccgaggtgaccgtggccagacagagacagctggaggagagcgccagccacctggcctgcttccaggccgccgagagccagctgagaccctggctgatggagaaggagctgatgatgggcgtgctgggccccctgagcatcgaccccaacatgctgaacgcccagaagcagcaggtgcagttcatgctgaaggagttcgaggccagaagacagcagcacgagcagctgaacgaggccgcccagggcatcctgaccggccccggcgacgtgagcctgagcaccagccaggtgcagaaggagctgcagagcatcaaccagaagtgggtggagctgaccgacaagctgaacagcagaagcagccagatcgaccaggccatcgtgaagagcacccagtaccaggagctgctgcaggacctgagcgagaaggtgagagccgtgggccagagactgagcgtgcagagcgccatcagcacccagcccgaggccgtgaagcagcagctggaggagaccagcgagatcagaagcgacctggagcagctggaccacgaggtgaaggaggcccagaccctgtgcgacgagctgagcgtgctgatcggcgagcagtacctgaaggacgagctgaagaagagactggagaccgtggccctgcccctgcagggcctggaggacctggccgccgacagaatcaacagactgcaggccgccctggccagcacccagcagttccagcagatgttcgacgagctgagaacctggctggacgacaagcagagccagcaggccaagaactgccccatcagcgccaagctggagagactgcagagccagctgcaggagaacgaggagttccagaagagcctgaaccagcacagcggcagctacgaggtgatcgtggccgagggcgagagcctgctgctgagcgtgccccccggcgaggagaagagaaccctgcagaaccagctggtggagctgaagaaccactgggaggagctgagcaagaagaccgccgacagacagagcagactgaaggactgcatgcagaaggcccagaagtaccagtggcacgtggaggacctggtgccctggatcgaggactgcaaggccaagatgagcgagctgagagtgaccctggaccccgtgcagctggagagcagcctgctgagaagcaaggccatgctgaacgaggtggagaagagaagaagcctgctggagatcctgaacagcgccgccgacatcctgatcaacagcagcgaggccgacgaggacggcatcagagacgagaaggccggcatcaaccagaacatggacgccgtgaccgaggagctgcaggccaagaccggcagcctggaggagatgacccagagactgagagagttccaggagagcttcaagaacatcgagaagaaggtggagggcgccaagcaccagctggagatcttcgacgccctgggcagccaggcctgcagcaacaagaacctggagaagctgagagcccagcaggaggtgctgcaggccctggagccccaggtggactacctgagaaacttcacccagggcctggtggaggacgcccccgacggcagcgacgccagccagctgctgcaccaggccgaggtggcccagcaggagttcctggaggtgaagcagagagtgaacagcggctgcgtgatgatggagaacaagctggagggcatcggccagttccactgcagagtgagagagatgttcagccagctggccgacctggacgacgagctggacggcatgggcgccatcggcagagacaccgacagcctgcagagccagatcgaggacgtgagactgttcctgaacaagatccacgtgctgaagctggacatcgaggccagcgaggccgagtgcagacacatgctggaggaggagggcaccctggacctgctgggcctgaagagagagctggaggccctgaacaagcagtgcggcaagctgaccgagagaggcaaggccagacaggagcagctggagctgaccctgggcagagtggaggacttctacagaaagctgaagggcctgaacgacgccaccaccgccgccgaggaggccgaggccctgcagtgggtggtgggcaccgaggtggagatcatcaaccagcagctggccgacttcaagatgttccagaaggagcaggtggaccccctgcagatgaagctgcagcaggtgaacggcctgggccagggcctgatccagagcgccggcaaggactgcgacgtgcagggcctggagcacgacatggaggagatcaacgccagatggaacaccctgaacaagaaggtggcccagagaatcgcccagctgcaggaggccctgctgcactgcggcaagttccaggacgccctggagcccctgctgagctggctggccgacaccgaggagctgatcgccaaccagaagccccccagcgccgagtacaaggtggtgaaggcccagatccaggagcagaagctgctgcagagactgctggacgacagaaaggccaccgtggacatgctgcaggccgagggcggcagaatcgcccagagcgccgagctggccgacagagagaagatcaccggccagctggagagcctggagagcagatggaccgagctgctgagcaaggccgccgccagacagaagcagctggaggacatcctggtgctggccaagcagttccacgagaccgccgagcccatcagcgacttcctgagcgtgaccgagaagaagctggccaacagcgagcccgtgggcacccagaccgccaagatccagcagcagatcatcagacacaaggccctgaacgaggagatcgtgaacagaaagaagaacgtggaccaggccatcaagaacggccaggccctgctgaagcagaccaccggcgaggaggtgctgctgatccaggagaagctggacggcatcaagaccagatacgccgacatcaccgtgaccagcagcaaggccctgagaaccctggagcaggccagacagctggccaccaagttccagagcacctacgaggagctgaccggctggctgagagaggtggaggaggagctggccaccagcggcggccagagccccaccggcgagcagatcccccagttccagcagagacagaaggagctgaagaaggaggtgatggagcacagactggtgctggacaccgtgaacgaggtgagcagagccctgctggagctggtgccctggagagccagagagggcctggacaagctggtgagcgacgccaacgagcagtacaagctggtgagcgacaccatcggccagagagtggacgagatcgacgccgccatccagagaagccagcagtacgagcaggccgccgacgccgagctggcctgggtggccgagaccaagagaaagctgatggccctgggccccatcagactggagcaggaccagaccaccgcccagctgcaggtgcagaaggccttcagcatcgacatcatcagacacaaggacagcatggacgagctgttcagccacagaagcgagatcttcggcacctgcggcgaggagcagaagaccgtgctgcaggagaagaccgagagcctgatccagcagtacgaggccatcagcctgctgaacagcgagagatacgccagactggagagagcccaggtgctggtgaaccagttctgggagacctacgaggagctgagcccctggatcgaggagaccagagccctgatcgcccagctgcccagccccgccatcgaccacgagcagctgagacagcagcaggaggagatgagacagctgagagagagcatcgccgagcacaagccccacatcgacaagctgctgaagatcggcccccagctgaaggagctgaaccccgaggagggcgagatggtggaggagaagtaccagaaggccgagaacatgtacgcccagatcaaggaggaggtgagacagagagccctggccctggacgaggccgtgagccagagcacccagatcaccgagttccacgacaagatcgagcccatgctggagaccctggagaacctgagcagcagactgagaatgccccccctgatccccgccgaggtggacaagatcagagagtgcatcagcgacaacaagagcgccaccgtggagctggagaagctgcagcccagcttcgaggccctgaagagaagaggcgaggagctgatcggcagaagccagggcgccgacaaggacctggccgccaaggagatccaggacaagctggaccagatggtgttcttctgggaggacatcaaggccagagccgaggagagagagatcaagttcctggacgtgctggagctggccgagaagttctggtacgacatggccgccctgctgaccaccatcaaggacacccaggacatcgtgcacgacctggagagccccggcatcgaccccagcatcatcaagcagcaggtggaggccgccgagaccatcaaggaggagaccgacggcctgcacgaggagctggagttcatcagaatcctgggcgccgacctgatcttcgcctgcggcgagaccgagaagcccgaggtgagaaagagcatcgacgagatgaacaacgcctgggagaacctgaacaagacctggaaggagagactggagaagctggaggacgccatgcaggccgccgtgcagtaccaggacaccctgcaggccatgttcgactggctggacaacaccgtgatcaagctgtgcaccatgccccccgtgggcaccgacctgaacaccgtgaaggaccagctgaacgagatgaaggagttcaaggtggaggtgtaccagcagcagatcgagatggagaagctgaaccaccagggcgagctgatgctgaagaaggccaccgacgagaccgacagagacatcatcagagagcccctgaccgagctgaagcacctgtgggagaacctgggcgagaagatcgcccacagacagcacaagctggagggcgccctgctggccctgggccagttccagcacgccctggaggagctgatgagctggctgacccacaccgaggagctgctggacgcccagagacccatcagcggcgaccccaaggtgatcgaggtggagctggccaagcaccacgtgctgaagaacgacgtgctggcccaccaggccaccgtggagaccgtgaacaaggccggcaacgagctgctggagagcagcgccggcgacgacgccagcagcctgagaagcagactggaggccatgaaccagtgctgggagagcgtgctgcagaagaccgaggagagagagcagcagctgcagagcaccctgcagcaggcccagggcttccacagcgagatcgaggacttcctgctggagctgaccagaatggagagccagctgagcgccagcaagcccaccggcggcctgcccgagaccgccagagagcagctggacacccacatggagctgtacagccagctgaaggccaaggaggagacctacaaccagctgctggacaagggcagactgatgctgctgagcagagacgacagcggcagcggcagcaagaccgagcagagcgtggccctgctggagcagaagtggcacgtggtgagcagcaagatggaggagagaaagagcaagctggaggaggccctgaacctggccaccgagttccagaacagcctgcaggagttcatcaactggctgaccctggccgagcagagcctgaacatcgccagcccccccagcctgatcctgaacaccgtgctgagccagatcgaggagcacaaggtgttcgccaacgaggtgaacgcccacagagaccagatcatcgagctggaccagaccggcaaccagctgaagttcctgagccagaagcaggacgtggtgctgatcaagaacctgctggtgagcgtgcagagcagatgggagaaggtggtgcagagaagcatcgagagaggcagaagcctggacgacgccagaaagagagccaagcagttccacgaggcctggaagaagctgatcgactggctggaggacgccgagagccacctggacagcgagctggagatcagcaacgaccccgacaagatcaagctgcagctgagcaagcacaaggagttccagaagaccctgggcggcaagcagcccgtgtacgacaccaccatcagaaccggcagagccctgaaggagaagaccctgctgcccgaggacagccagaagctggacaacttcctgggcgaggtgagagacaagtgggacaccgtgtgcggcaagagcgtggagagacagcacaagctggaggaggccctgctgttcagcggccagttcatggacgccctgcaggccctggtggactggctgtacaaggtggagccccagctggccgaggaccagcccgtgcacggcgacctggacctggtgatgaacctgatggacgcccacaaggtgttccagaaggagctgggcaagagaaccggcaccgtgcaggtgctgaagagaagcggcagagagctgatcgagaacagcagagacgacaccacctgggtgaagggccagctgcaggagctgagcaccagatgggacaccgtgtgcaagctgagcgtgagcaagcagagcagactggagcaggccctgaagcaggccgaggtgttcagagacaccgtgcacatgctgctggagtggctgagcgaggccgagcagaccctgagattcagaggcgccctgcccgacgacaccgaggccctgcagagcctgatcgacacccacaaggagttcatgaagaaggtggaggagaagagagtggacgtgaacagcgccgtggccatgggcgaggtgatcctggccgtgtgccaccccgactgcatcaccaccatcaagcactggatcaccatcatcagagccagattcgaggaggtgctgacctgggccaagcagcaccagcagagactggagaccgccctgagcgagctggtggccaacgccgagctgctggaggagctgctggcctggatccagtgggccgagaccaccctgatccagagagaccaggagcccatcccccagaacatcgacagagtgaaggccctgatcgccgagcaccagaccttcatggaggagatgaccagaaagcagcccgacgtggacagagtgaccaagacctacaagagaaagaacatcgagcccacccacgcccccttcatcgagaagagcagaagcggcggcagaaagagcctgagccagcccacccccccccccatgcccatcctgagccagagcgaggccaagaaccccagaatcaaccagctgagcgccagatggcagcaggtgtggctgctggccctggagagacagagaaagctgaacgacgccctggacagactggaggagctgaaggagttcgccaacttcgacttcgacgtgtggagaaagaagtacatgagatggatgaaccacaagaagagcagagtgatggacttcttcagaagaatcgacaaggaccaggacggcaagatcaccagacaggagttcatcgacggcatcctggccagcaagttccccaccaccaagctggagatgaccgccgtggccgacatcttcgacagagacggcgacggctacatcgactactacgagttcgtggccgccctgcaccccaacaaggacgcctacagacccaccaccgacgccgacaagatcgaggacgaggtgaccagacaggtggcccagtgcaagtgcgccaagagattccaggtggagcagatcggcgagaacaagtacagattcggcgacagccagcagctgagactggtgagaatcctgagaagcaccgtgatggtgagagtgggcggcggctggatggccctggacgagttcctggtgaagaacgacccctgcagagccagaggcagaaccaacatcgagctgagagagaagttcatcctgcccgagggcgccagccagggcatgacccccttcagaagcagaggcagaagaagcaagcccagcagcagagccgccagccccaccagaagcagcagcagcgccagccagagcaaccacagctgcaccagcatgcccagcagccccgccacccccgccagcggcaccaaggtgatccccagcagcggcagcaagctgaagagacccacccccaccttccacagcagcagaaccagcctggccggcgacaccagcaacagcagcagccccgccagcaccggcgccaagaccaacagagccgaccccaagaagagcgccagcagacccggcagcagagccggcagcagagccggcagcagagccagcagcagaagaggcagcgacgccagcgacttcgacctgctggagacccagagcgcctgcagcgacaccagcgagagcagcgccgccggcggccagggcaacagcagaagaggcctgaacaagcccagcaagatccccaccatgagcaagaagaccaccaccgccagccccagaacccccggccccaagagatag

SEQ ID NO: 88952 - DNA, 1155 bp, synthetic construct
  misc_feature 1..1155: note = Description of Artificial Sequence: Synthetic coding sequence
  source 1..1155: mol_type = other DNA
atcaccagcccctgggcccccagacccagctgcagcagcccctgggccatgagcagcagcgacgaggagaccctgagcgagagaagctgcagaagcgagagaagctgcagaagcgagagaagctacagaagcgagagaagcggcagcctgagcccctgcccccccggcgacaccctgccctggaacctgcccctgcacgagcagaagaagagaaagagccaggacagcgtgctggaccccgccgagagagccgtggtgagagtggccgacgagagagacagagtgcagaagaagaccttcaccaagtgggtgaacaagcacctgatgaaggtgagaaagcacatcaacgacctgtacgaggacctgagagacggccacaacctgatcagcctgctggaggtgctgagcggcatcaagctgcccagagagaagggcagaatgagattccacagactgcagaacgtgcagatcgccctggacttcctgaagcagagacaggtgaagctggtgaacatcagaaacgacgacatcaccgacggcaaccccaagctgaccctgggcctgatctggaccatcatcctgcacttccagatcagcgacatctacatcagcggcgagagcggcgacatgagcgccaaggagaagctgctgctgtggacccagaaggtgaccgccggctacaccggcatcaagtgcaccaacttcagcagctgctggagcgacggcaagatgttcaacgccctgatccacagatacagacccgacctggtggacatggagagagtgcagatccagagcaacagagagaacctggagcaggccttcgaggtggccgagagactgggcgtgaccagactgctggacgccgaggacgtggacgtgcccagccccgacgagaagagcgtgatcacctacgtgagcagcatctacgacgccttccccaaggtgcccgagggcggcgagggcatcagcgccaccgaggtggacagcagatggcaggagtaccagagcagagtggacagcctgatcccctggatcaagcagcacaccatcctgatgagcgacaagaccttcccccagaaccccgtggagctgaaggccctgtacaaccagtacatccacttcaaggagaccgagatcctggccaaggagtag

SEQ ID NO: 88953 - DNA, 603 bp, synthetic construct
  misc_feature 1..603: note = Description of Artificial Sequence: Synthetic coding sequence
  source 1..603: mol_type = other DNA
atgcccctgctggacagcagctacctgccccccaccatcttcatcctgacccacgtgctgggcgtggccggcgtgctgtactggaagagacacgccagaggcagagccgacgagagagacagagtgcagaagaagaccttcaccaagtgggtgaacaagcacctgatgaaggtgagaaagcacatcaacgacctgtacgaggacctgagagacggccacaacctgatcagcctgctggaggtgctgagcggcatcaagctgcccagagagaagggcagaatgagattccacagactgcagaacgtgcagatcgccctggacttcctgaagcagagacaggtgaagctggtgaacatcagaaacgacgacatcaccgacggcaaccccaagctgaccctgggcctgatctggaccatcatcctgcacttccagatcagcgacatctacatcagcggcgagagcggcgacatgagcgccaaggagaagctgctgctgtggacccagaaggtgaccgccggctacaccggcatcaagtgcaccaacttcagcagctgctggagcgacggcaagatgttcaacgccctgatccacagatacagatag

SEQ ID NO: 88954 - DNA, 15903 bp, synthetic construct
  misc_feature 1..15903: note = Description of Artificial Sequence: Synthetic coding sequence
  source 1..15903: mol_type = other DNA
atgagcagcagcgacgaggagaccctgagcgagagaagctgcagaagcgagagaagctgcagaagcgagagaagctacagaagcgagagaagcggcagcctgagcccctgcccccccggcgacaccctgccctggaacctgcccctgcacgagcagaagaagagaaagagccaggacagcgtgctggaccccgccgagagagccgtggtgagagtggccgacgagagagacagagtgcagaagaagaccttcaccaagtgggtgaacaagcacctgatgaaggtgagaaagcacatcaacgacctgtacgaggacctgagagacggccacaacctgatcagcctgctggaggtgctgagcggcatcaagctgcccagagagaagggcagaatgagattccacagactgcagaacgtgcagatcgccctggacttcctgaagcagagacaggtgaagctggtgaacatcagaaacgacgacatcaccgacggcaaccccaagctgaccctgggcctgatctggaccatcatcctgcacttccagatcagcgacatctacatcagcggcgagagcggcgacatgagcgccaaggagaagctgctgctgtggacccagaaggtgaccgccggctacaccggcatcaagtgcaccaacttcagcagctgctggagcgacggcaagatgttcaacgccctgatccacagatacagacccgacctggtggacatggagagagtgcagatccagagcaacagagagaacctggagcaggccttcgaggtggccgagagactgggcgtgaccagactgctggacgccgaggacgtggacgtgcccagccccgacgagaagagcgtgatcacctacgtgagcagcatctacgacgccttccccaaggtgcccgagggcggcgagggcatcagcgccaccgaggtggacagcagatggcaggagtaccagagcagagtggacagcctgatcccctggatcaagcagcacaccatcctgatgagcgacaagaccttcccccagaaccccgtggagctgaaggccctgtacaaccagtacatccacttcaaggagaccgagatcctggccaaggagagagagaagggcagaatcgaggagctgtacaagctgctggaggtgtggatcgagttcggcagaatcaagctgccccagggctaccaccccaacgacgtggaggaggagtggggcaagctgatcatcgagatgctggagagagagaagagcctgagacccgccgtggagagactggagctgctgctgcagatcgccaacaagatccagaacggcgccctgaactgcgaggagaagctgaccctggccaagaacaccctgcaggccgacgccgcccacctggagagcggccagcccgtgcagtgcgagagcgacgtgatcatgtacatccaggagtgcgagggcctgatcagacagctgcaggtggacctgcagatcctgagagacgagaactactaccagctggaggagctggccttcagagtgatgagactgcaggacgagctggtgaccctgagactggagtgcaccaacctgtacagaaagggccacttcaccagcctggagctggtgccccccagcaccctgaccaccacccacctgaaggccgagcccctgaccaaggccacccacagcagcagcaccagctggttcagaaagcccatgaccagagccgagctggtggccatcagcagcagcgaggacgagggcaacctgagattcgtgtacgagctgctgagctgggtggaggagatgcagatgaagctggagagagccgagtggggcaacgacctgcccagcgtggagctgcagctggagacccagcagcacatccacaccagcgtggaggagctgggcagcagcgtgaaggaggccagactgtacgagggcaagatgagccagaacttccacaccagctacgccgagaccctgggcaagctggagacccagtactgcaagctgaaggagaccagcagcttcagaatgagacacctgcagagcctgcacaagttcgtgagcagagccaccgccgagctgatctggctgaacgagaaggaggaggaggagctggcctacgactggagcgacaacaacagcaacatcagcgccaagagaaactacttcagcgagctgaccatggagctggaggagaagcaggacgtgttcagaagcctgcaggacaccgccgagctgctgagcctggagaaccaccccgccaagcagaccgtggaggcctacagcgccgccgtgcagagccagctgcagtggatgaagcagctgtgcctgtgcgtggagcagcacgtgaaggagaacaccgcctacttccagttcttcagcgacgccagagagctggagagcttcctgagaaacctgcaggacagcatcaagagaaagtacagctgcgaccacaacaccagcctgagcagactggaggacctgctgcaggacagcatggacgagaaggagcagctgatccagagcaagagcagcgtggccagcctggtgggcagaagcaagaccatcgtgcagctgaagcccagaagccccgaccacgtgctgaagaacaccatcagcgtgaaggccgtgtgcgactacagacagatcgagatcaccatctgcaagaacgacgagtgcgtgctggaggacaacagccagagaaccaagtggaaggtgatcagccccaccggcaacgaggccatggtgcccagcgtgtgcttcctgatccccccccccaacaaggacgccatcgagatggccagcagagtggagcagagctaccagaaggtgatggccctgtggcaccagctgcacgtgaacaccaagagcctgatcagctggaactacctgagaaaggacctggacctggtgcagacctggaacctggagaagctgagaagcagcgcccccggcgagtgccaccagatcatgaagaacctgcaggcccactacgaggacttcctgcaggacagcagagacagcgtgctgttcagcgtggccgacagactgagactggaggaggaggtggaggcctgcaaggccagattccagcacctgatgaagagcatggagaacgaggacaaggaggagaccgtggccaagatgtacatcagcgagctgaagaacatcagactgagactggaggagtacgagcagagagtggtgaagagaatccagagcctggccagcagcagaaccgacagagacgcctggcaggacaacgccctgagaatcgccgagcaggagcacacccaggaggacctgcagcagctgagaagcgacctggacgccgtgagcatgaagtgcgacagcttcctgcaccagagccccagcagcagcagcgtgcccaccctgagaagcgagctgaacctgctggtggagaagatggaccacgtgtacggcctgagcaccgtgtacctgaacaagctgaagaccgtggacgtgatcgtgagaagcatccaggacgccgagctgctggtgaagggctacgagatcaagctgagccaggaggaggtggtgctggccgacctgagcgccctggaggcccactggagcaccctgagacactggctgagcgacgtgaaggacaagaacagcgtgttcagcgtgctggacgaggagatcgccaaggccaaggtggtggccgagcagatgagcagactgacccccgagagaaacctggacctggagagataccaggagaagggcagccagctgcaggagagatggcacagagtgatcgcccagctggagatcagacagagcgagctggagagcatccaggaggtgctgggcgactacagagcctgccacggcaccctgatcaagtggatcgaggagaccaccgcccagcaggagatgatgaagcccggccaggccgaggacagcagagtgctgagcgagcagctgagccagcagaccgccctgttcgccgagatcgagagaaaccagaccaagctggaccagtgccagaagttcagccagcagtacagcaccatcgtgaaggactacgagctgcagctgatgacctacaaggccttcgtggagagccagcagaagagccccggcaagagaagaagaatgctgagcagcagcgacgccatcacccaggagttcatggacctgagaaccagatacaccgccctggtgaccctgaccacccagcacgtgaagtacatcagcgacgccctgagaagactggaggaggaggagaaggtggtggaggaggagaagcaggagcacgtggagaaggtgaaggagctgctgggctgggtgagcaccctggccagaaacacccagggcaaggccaccagcagcgagaccaaggagagcaccgacatcgagaaggccatcctggagcagcaggtgctgagcgaggagctgaccaccaagaaggagcaggtgagcgaggccatcaagaccagccagatcttcctggccaagcacggccacaagctgagcgagaaggagaagaagcagatcagcgagcagctgaacgccctgaacaaggcctaccacgacctgtgcgacggcagcgccaaccagctgcagcagctgcagagccagctggcccaccagaccgagcagaagaccctgcagaagcagcagaacacctgccaccagcagctggaggacctgtgcagctgggtgggccaggccgagagagccctggccggccaccagggcagaaccacccagcaggacctgagcgccctgcagaagaaccagagcgacctgaaggacctgcaggacgacatccagaacagagccaccagcttcgccaccgtggtgaaggacatcgagggcttcatggaggagaaccagaccaagctgagccccagagagctgaccgccctgagagagaagctgcaccaggccaaggagcagtacgaggccctgcaggaggagaccagagtggcccagaaggagctggaggaggccgtgaccagcgccctgcagcaggagaccgagaagagcaaggccgccaaggagctggccgagaacaagaagaagatcgacgccctgctggactgggtgaccagcgtgggcagcagcggcggccagctgctgaccaacctgcccggcatggagcagctgagcggcgccagcctggagaagggcgccctggacaccaccgacggctacatgggcgtgaaccaggcccccgagaagctggacaagcagtgcgagatgatgaaggccagacaccaggagctgctgagccagcagcagaacttcatcctggccacccagagcgcccaggccttcctggaccagcacggccacaacctgacccccgaggagcagcagatgctgcagcagaagctgggcgagctgaaggagcagtacagcaccagcctggcccagagcgaggccgagctgaagcaggtgcagaccctgcaggacgagctgcagaagttcctgcaggaccacaaggagttcgagagctggctggagagaagcgagaaggagctggagaacatgcacaagggcggcagcagccccgagaccctgcccagcctgctgaagagacagggcagcttcagcgaggacgtgatcagccacaagggcgacctgagattcgtgaccatcagcggccagaaggtgctggacatggagaacagcttcaaggagggcaaggagcccagcgagatcggcaacctggtgaaggacaagctgaaggacgccaccgagagatacaccgccctgcacagcaagtgcaccagactgggcagccacctgaacatgctgctgggccagtaccaccagttccagaacagcgccgacagcctgcaggcctggatgcaggcctgcgaggccaacgtggagaagctgctgagcgacaccgtggccagcgaccccggcgtgctgcaggagcagctggccaccaccaagcagctgcaggaggagctggccgagcaccaggtgcccgtggagaagctgcagaaggtggccagagacatcatggagatcgagggcgagcccgcccccgaccacagacacgtgcaggagaccaccgacagcatcctgagccacttccagagcctgagctacagcctggccgagagaagcagcctgctgcagaaggccatcgcccagagccagagcgtgcaggagagcctggagagcctgctgcagagcatcggcgaggtggagcagaacctggagggcaagcaggtgagcagcctgagcagcggcgtgatccaggaggccctggccaccaacatgaagctgaagcaggacatcgccagacagaagagcagcctggaggccaccagagagatggtgaccagattcatggagaccgccgacagcaccaccgccgccgtgctgcagggcaagctggccgaggtgagccagagattcgagcagctgtgcctgcagcagcaggagaaggagagcagcctgaagaagctgctgccccaggccgagatgttcgagcacctgagcggcaagctgcagcagttcatggagaacaagagcagaatgctggccagcggcaaccagcccgaccaggacatcacccacttcttccagcagatccaggagctgaacctggagatggaggaccagcaggagaacctggacaccctggagcacctggtgaccgagctgagcagctgcggcttcgccctggacctgtgccagcaccaggacagagtgcagaacctgagaaaggacttcaccgagctgcagaagaccgtgaaggagagagagaaggacgccagcagctgccaggagcagctggacgagttcagaaagctggtgagaaccttccagaagtggctgaaggagaccgagggcagcatcccccccaccgagaccagcatgagcgccaaggagctggagaagcagatcgagcacctgaagagcctgctggacgactgggccagcaagggcaccctggtggaggagatcaactgcaagggcaccagcctggagaacctgatcatggagatcaccgcccccgacagccagggcaagaccgacctgaccgagatccagtgcgacatgagcgacgtgaacctgaagtacgagaagctgggcggcgtgctgcacgagagacaggagagcctgcaggccatcctgaacagaatggaggaggtgcacaaggaggccaacagcgtgctgcagtggctggagagcaaggaggaggtgctgaagagcatggacgccatgagcagccccaccaagaccgagaccgtgaaggcccaggccgagagcaacaaggccttcctggccgagctggagcagaacagccccaagatccagaaggtgaaggaggccctggccggcctgctggtgacctaccccaacagccaggaggccgagaactggaagaagatccaggaggagctgaacagcagatgggagagagccaccgaggtgaccgtggccagacagagacagctggaggagagcgccagccacctggcctgcttccaggccgccgagagccagctgagaccctggctgatggagaaggagctgatgatgggcgtgctgggccccctgagcatcgaccccaacatgctgaacgcccagaagcagcaggtgcagttcatgctgaaggagttcgaggccagaagacagcagcacgagcagctgaacgaggccgcccagggcatcctgaccggccccggcgacgtgagcctgagcaccagccaggtgcagaaggagctgcagagcatcaaccagaagtgggtggagctgaccgacaagctgaacagcagaagcagccagatcgaccaggccatcgtgaagagcacccagtaccaggagctgctgcaggacctgagcgagaaggtgagagccgtgggccagagactgagcgtgcagagcgccatcagcacccagcccgaggccgtgaagcagcagctggaggagaccagcgagatcagaagcgacctggagcagctggaccacgaggtgaaggaggcccagaccctgtgcgacgagctgagcgtgctgatcggcgagcagtacctgaaggacgagctgaagaagagactggagaccgtggccctgcccctgcagggcctggaggacctggccgccgacagaatcaacagactgcaggccgccctggccagcacccagcagttccagcagatgttcgacgagctgagaacctggctggacgacaagcagagccagcaggccaagaactgccccatcagcgccaagctggagagactgcagagccagctgcaggagaacgaggagttccagaagagcctgaaccagcacagcggcagctacgaggtgatcgtggccgagggcgagagcctgctgctgagcgtgccccccggcgaggagaagagaaccctgcagaaccagctggtggagctgaagaaccactgggaggagctgagcaagaagaccgccgacagacagagcagactgaaggactgcatgcagaaggcccagaagtaccagtggcacgtggaggacctggtgccctggatcgaggactgcaaggccaagatgagcgagctgagagtgaccctggaccccgtgcagctggagagcagcctgctgagaagcaaggccatgctgaacgaggtggagaagagaagaagcctgctggagatcctgaacagcgccgccgacatcctgatcaacagcagcgaggccgacgaggacggcatcagagacgagaaggccggcatcaaccagaacatggacgccgtgaccgaggagctgcaggccaagaccggcagcctggaggagatgacccagagactgagagagttccaggagagcttcaagaacatcgagaagaaggtggagggcgccaagcaccagctggagatcttcgacgccctgggcagccaggcctgcagcaacaagaacctggagaagctgagagcccagcaggaggtgctgcaggccctggagccccaggtggactacctgagaaacttcacccagggcctggtggaggacgcccccgacggcagcgacgccagccagctgctgcaccaggccgaggtggcccagcaggagttcctggaggtgaagcagagagtgaacagcggctgcgtgatgatggagaacaagctggagggcatcggccagttccactgcagagtgagagagatgttcagccagctggccgacctggacgacgagctggacggcatgggcgccatcggcagagacaccgacagcctgcagagccagatcgaggacgtgagactgttcctgaacaagatccacgtgctgaagctggacatcgaggccagcgaggccgagtgcagacacatgctggaggaggagggcaccctggacctgctgggcctgaagagagagctggaggccctgaacaagcagtgcggcaagctgaccgagagaggcaaggccagacaggagcagctggagctgaccctgggcagagtggaggacttctacagaaagctgaagggcctgaacgacgccaccaccgccgccgaggaggccgaggccctgcagtgggtggtgggcaccgaggtggagatcatcaaccagcagctggccgacttcaagatgttccagaaggagcaggtggaccccctgcagatgaagctgcagcaggtgaacggcctgggccagggcctgatccagagcgccggcaaggactgcgacgtgcagggcctggagcacgacatggaggagatcaacgccagatggaacaccctgaacaagaaggtggcccagagaatcgcccagctgcaggaggccctgctgcactgcggcaagttccaggacgccctggagcccctgctgagctggctggccgacaccgaggagctgatcgccaaccagaagccccccagcgccgagtacaaggtggtgaaggcccagatccaggagcagaagctgctgcagagactgctggacgacagaaaggccaccgtggacatgctgcaggccgagggcggcagaatcgcccagagcgccgagctggccgacagagagaagatcaccggccagctggagagcctggagagcagatggaccgagctgctgagcaaggccgccgccagacagaagcagctggaggacatcctggtgctggccaagcagttccacgagaccgccgagcccatcagcgacttcctgagcgtgaccgagaagaagctggccaacagcgagcccgtgggcacccagaccgccaagatccagcagcagatcatcagacacaaggccctgaacgaggagatcgtgaacagaaagaagaacgtggaccaggccatcaagaacggccaggccctgctgaagcagaccaccggcgaggaggtgctgctgatccaggagaagctggacggcatcaagaccagatacgccgacatcaccgtgaccagcagcaaggccctgagaaccctggagcaggccagacagctggccaccaagttccagagcacctacgaggagctgaccggctggctgagagaggtggaggaggagctggccaccagcggcggccagagccccaccggcgagcagatcccccagttccagcagagacagaaggagctgaagaaggaggtgatggagcacagactggtgctggacaccgtgaacgaggtgagcagagccctgctggagctggtgccctggagagccagagagggcctggacaagctggtgagcgacgccaacgagcagtacaagctggtgagcgacaccatcggccagagagtggacgagatcgacgccgccatccagagaagccagcagtacgagcaggccgccgacgccgagctggcctgggtggccgagaccaagagaaagctgatggccctgggccccatcagactggagcaggaccagaccaccgcccagctgcaggtgcagaaggccttcagcatcgacatcatcagacacaaggacagcatggacgagctgttcagccacagaagcgagatcttcggcacctgcggcgaggagcagaagaccgtgctgcaggagaagaccgagagcctgatccagcagtacgaggccatcagcctgctgaacagcgagagatacgccagactggagagagcccaggtgctggtgaaccagttctgggagacctacgaggagctgagcccctggatcgaggagaccagagccctgatcgcccagctgcccagccccgccatcgaccacgagcagctgagacagcagcaggaggagatgagacagctgagagagagcatcgccgagcacaagccccacatcgacaagctgctgaagatcggcccccagctgaaggagctgaaccccgaggagggcgagatggtggaggagaagtaccagaaggccgagaacatgtacgcccagatcaaggaggaggtgagacagagagccctggccctggacgaggccgtgagccagagcacccaggtgagccagttccacgacaagatcgagcccatgctggagaccctggagaacctgagcagcagactgagaatgccccccctgatccccgccgaggtggacaagatcagagagtgcatcagcgacaacaagagcgccaccgtggagctggagaagctgcagcccagcttcgaggccctgaagagaagaggcgaggagctgatcggcagaagccagggcgccgacaaggacctggccgccaaggagatccaggacaagctggaccagatggtgttcttctgggaggacatcaaggccagagccgaggagagagagatcaagttcctggacgtgctggagctggccgagaagttctggtacgacatggccgccctgctgaccaccatcaaggacacccaggacatcgtgcacgacctggagagccccggcatcgaccccagcatcatcaagcagcaggtggaggccgccgagaccatcaaggaggagaccgacggcctgcacgaggagctggagttcatcagaatcctgggcgccgacctgatcttcgcctgcggcgagaccgagaagcccgaggtgagaaagagcatcgacgagatgaacaacgcctgggagaacctgaacaagacctggaaggagagactggagaagctggaggacgccatgcaggccgccgtgcagtaccaggacaccctgcaggccatgttcgactggctggacaacaccgtgatcaagctgtgcaccatgccccccgtgggcaccgacctgaacaccgtgaaggaccagctgaacgagatgaaggagttcaaggtggaggtgtaccagcagcagatcgagatggagaagctgaaccaccagggcgagctgatgctgaagaaggccaccgacgagaccgacagagacatcatcagagagcccctgaccgagctgaagcacctgtgggagaacctgggcgagaagatcgcccacagacagcacaagctggagggcgccctgctggccctgggccagttccagcacgccctggaggagctgatgagctggctgacccacaccgaggagctgctggacgcccagagacccatcagcggcgaccccaaggtgatcgaggtggagctggccaagcaccacgtgctgaagaacgacgtgctggcccaccaggccaccgtggagaccgtgaacaaggccggcaacgagctgctggagagcagcgccggcgacgacgccagcagcctgagaagcagactggaggccatgaaccagtgctgggagagcgtgctgcagaagaccgaggagagagagcagcagctgcagagcaccctgcagcaggcccagggcttccacagcgagatcgaggacttcctgctggagctgaccagaatggagagccagctgagcgccagcaagcccaccggcggcctgcccgagaccgccagagagcagctggacacccacatggagctgtacagccagctgaaggccaaggaggagacctacaaccagctgctggacaagggcagactgatgctgctgagcagagacgacagcggcagcggcagcaagaccgagcagagcgtggccctgctggagcagaagtggcacgtggtgagcagcaagatggaggagagaaagagcaagctggaggaggccctgaacctggccaccgagttccagaacagcctgcaggagttcatcaactggctgaccctggccgagcagagcctgaacatcgccagcccccccagcctgatcctgaacaccgtgctgagccagatcgaggagcacaaggtgttcgccaacgaggtgaacgcccacagagaccagatcatcgagctggaccagaccggcaaccagctgaagttcctgagccagaagcaggacgtggtgctgatcaagaacctgctggtgagcgtgcagagcagatgggagaaggtggtgcagagaagcatcgagagaggcagaagcctggacgacgccagaaagagagccaagcagttccacgaggcctggaagaagctgatcgactggctggaggacgccgagagccacctggacagcgagctggagatcagcaacgaccccgacaagatcaagctgcagctgagcaagcacaaggagttccagaagaccctgggcggcaagcagcccgtgtacgacaccaccatcagaaccggcagagccctgaaggagaagaccctgctgcccgaggacagccagaagctggacaacttcctgggcgaggtgagagacaagtgggacaccgtgtgcggcaagagcgtggagagacagcacaagctggaggaggccctgctgttcagcggccagttcatggacgccctgcaggccctggtggactggctgtacaaggtggagccccagctggccgaggaccagcccgtgcacggcgacctggacctggtgatgaacctgatggacgcccacaaggtgttccagaaggagctgggcaagagaaccggcaccgtgcaggtgctgaagagaagcggcagagagctgatcgagaacagcagagacgacaccacctgggtgaagggccagctgcaggagctgagcaccagatgggacaccgtgtgcaagctgagcgtgagcaagcagagcagactggagcaggccctgaagcaggccgaggtgttcagagacaccgtgcacatgctgctggagtggctgagcgaggccgagcagaccctgagattcagaggcgccctgcccgacgacaccgaggccctgcagagcctgatcgacacccacaaggagttcatgaagaaggtggaggagaagagagtggacgtgaacagcgccgtggccatgggcgaggtgatcctggccgtgtgccaccccgactgcatcaccaccatcaagcactggatcaccatcatcagagccagattcgaggaggtgctgacctgggccaagcagcaccagcagagactggagaccgccctgagcgagctggtggccaacgccgagctgctggaggagctgctggcctggatccagtgggccgagaccaccctgatccagagagaccaggagcccatcccccagaacatcgacagagtgaaggccctgatcgccgagcaccagaccttcatggaggagatgaccagaaagcagcccgacgtggacagagtgaccaagacctacaagagaaagaacatcgagcccacccacgcccccttcatcgagaagagcagaagcggcggcagaaagagcctgagccagcccacccccccccccatgcccatcctgagccagagcgaggccaagaaccccagaatcaaccagctgagcgccagatggcagcaggtgtggctgctggccctggagagacagagaaagctgaacgacgccctggacagactggaggagctgaaggagttcgccaacttcgacttcgacgtgtggagaaagaagtacatgagatggatgaaccacaagaagagcagagtgatggacttcttcagaagaatcgacaaggaccaggacggcaagatcaccagacaggagttcatcgacggcatcctggccagcaagttccccaccaccaagctggagatgaccgccgtggccgacatcttcgacagagacggcgacggctacatcgactactacgagttcgtggccgccctgcaccccaacaaggacgcctacagacccaccaccgacgccgacaagatcgaggacgaggtgaccagacaggtggcccagtgcaagtgcgccaagagattccaggtggagcagatcggcgagaacaagtacagattcggcgacagccagcagctgagactggtgagaatcctgagaagcaccgtgatggtgagagtgggcggcggctggatggccctggacgagttcctggtgaagaacgacccctgcagagccagaggcagaaccaacatcgagctgagagagaagttcatcctgcccgagggcgccagccagggcatgacccccttcagaagcagaggcagaagaagcaagcccagcagcagagccgccagccccaccagaagcagcagcagcgccagccagagcaaccacagctgcaccagcatgcccagcagccccgccacccccgccagcggcaccaaggtgatccccagcagcggcagcaagctgaagagacccacccccaccttccacagcagcagaaccagcctggccggcgacaccagcaacagcagcagccccgccagcaccggcgccaagaccaacagagccgaccccaagaagagcgccagcagacccggcagcagagccggcagcagagccggcagcagagccagcagcagaagaggcagcgacgccagcgacttcgacctgctggagacccagagcgcctgcagcgacaccagcgagagcagcgccgccggcggccagggcaacagcagaagaggcctgaacaagcccagcaagatccccaccatgagcaagaagaccaccaccgccagccccagaacccccggccccaagagatag

SEQ ID NO: 88955 - DNA, 1035 bp, synthetic construct
  misc_feature 1..1035: note = Description of Artificial Sequence: Synthetic coding sequence
  source 1..1035: mol_type = other DNA
atgaccgccgtggccgacatcttcgacagagacggcgacggctacatcgactactacgagttcgtggccgccctgcaccccaacaaggacgcctacagacccaccaccgacgccgacaagatcgaggacgaggtgaccagacaggtggcccagtgcaagtgcgccaagagattccaggtggagcagatcggcgagaacaagtacagattcggcgacagccagcagctgagactggtgagaatcctgagaagcaccgtgatggtgagagtgggcggcggctggatggccctggacgagttcctggtgaagaacgacccctgcagagccagaggcagaaccaacatcgagctgagagagaagttcatcctgcccgagggcgccagccagggcatgacccccttcagaagcagaggcagaagaagcaagcccagcagcagagccgccagccccaccagaagcagcagcagcgccagccagagcaaccacagctgcaccagcatgcccagcagccccgccacccccgccagcggcaccaagaccagcctgcagttcagcagatgctacgacaagccctggctggtgaacagcaaggccggcacccccatcagagacagccacagccccgacctgcagctgcccacccccgaggtgatccccagcagcggcagcaagctgaagagacccacccccaccttccacagcagcagaaccagcctggccggcgacaccagcaacagcagcagccccgccagcaccggcgccaagaccaacagagccgaccccaagaagagcgccagcagacccggcagcagagccggcagcagagccggcagcagagccagcagcagaagaggcagcgacgccagcgacttcgacctgctggagacccagagcgcctgcagcgacaccagcgagagcagcgccgccggcggccagggcaacagcagaagaggcctgaacaagcccagcaagatccccaccatgagcaagaagaccaccaccgccagccccagaacccccggccccaagagatag

SEQ ID NO: 88956 - DNA, 16293 bp, synthetic construct; identical to SEQ ID NO: 88949
  misc_feature 1..16293: note = Description of Artificial Sequence: Synthetic coding sequence
  source 1..16293: mol_type = other DNA

SEQ ID NO: 88957 - DNA, 8412 bp, synthetic construct
  misc_feature 1..8412: note = Description of Artificial Sequence: Synthetic coding sequence
  source 1..8412: mol_type = other DNA
atggacggcgtggccgagttcagcgagtacgtgagcgagaccgtggacgtgcccagccccttcgacctgctggagccccccaccagcggcggcttcctgaagctgagcaagccctgctgctacatcttccccggcggcagaggcgacagcgccctgttcgccgtgaacggcttcaacatcctggtggacggcggcagcgacagaaagagctgcttctggaagctggtgagacacctggacagaatcgacagcgtgctgctgacccacatcggcgccgacaacctgcccggcatcaacggcctgctgcagagaaaggtggccgagctggaggaggagcagagccagggcagcagcagctacagcgactgggtgaagaacctgatcagccccgagctgggcgtggtgttcttcaacgtgcccgagaagctgagactgcccgacgccagcagaaaggccaagagaagcatcgaggaggcctgcctgaccctgcagcacctgaacagactgggcatccaggccgagcccctgtacagagtggtgagcaacaccatcgagcccctgaccctgttccacaagatgggcgtgggcagactggacatgtacgtgctgaaccccgtgaaggacagcaaggagatgcagttcctgatgcagaagtgggccggcaacagcaaggccaagaccggcatcgtgctgcccaacggcaaggaggccgagatcagcgtgccctacctgaccagcatcaccgccctggtggtgtggctgcccgccaaccccaccgagaagatcgtgagagtgctgttccccggcaacgccccccagaacaagatcctggagggcctggagaagctgagacacctggacttcctgagataccccgtggccacccagaaggacctggccagcggcgccgtgcccaccaacctgaagcccagcaagatcaagcagagagccgacagcaaggagagcctgaaggccaccaccaagaccgccgtgagcaagctggccaagagagaggaggtggtggaggagggcgccaaggaggccagaagcgagctggccaaggagctggccaagaccgagaagaaggccaaggagagcagcgagaagccccccgagaagcccgccaagcccgagagagtgaagaccgagagcagcgaggccctgaaggccgagaagagaaagctgatcaaggacaaggtgggcaagaagcacctgaaggagaagatcagcaagctggaggagaagaaggacaaggagaagaaggagatcaagaaggagagaaaggagctgaagaaggacgagggcagaaaggaggagaagaaggacgccaagaaggaggagaagagaaaggacaccaagcccgagctgaagaagatcagcaagcccgacctgaagcccttcacccccgaggtgagaaagaccctgtacaaggccaaggtgcccggcagagtgaagatcgacagaagcagagccatcagaggcgagaaggagctgagcagcgagccccagaccccccccgcccagaagggcaccgtgcccctgcccaccatcagcggccacagagagctggtgctgagcagccccgaggacctgacccaggacttcgaggagatgaagagagaggagagagccctgctggccgagcagagagacaccggcctgggcgacaagcccttccccctggacaccgccgaggagggcccccccagcaccgccatccagggcaccccccccagcgtgcccggcctgggccaggaggagcacgtgatgaaggagaaggagctggtgcccgaggtgcccgaggagcagggcagcaaggacagaggcctggacagcggcgccgagaccgaggaggagaaggacacctgggaggagaagaagcagagagaggccgagagactgcccgacagaaccgaggccagagaggagagcgagcccgaggtgaaggaggacgtgatcgagaaggccgagctggaggagatggaggaggtgcaccccagcgacgaggaggaggaggacgccaccaaggccgagggcttctaccagaagcacatgcaggagcccctgaaggtgacccccagaagcagagaggccttcggcggcagagagctgggcctgcagggcaaggcccccgagaaggagaccagcctgttcctgagcagcctgaccacccccgccggcgccaccgagcacgtgagctacatccaggacgagaccatccccggctacagcgagaccgagcagaccatcagcgacgaggagatccacgacgagcccgaggagagacccgccccccccagattccacaccagcacctacgacctgcccggccccgagggcgccggccccttcgaggccagccagcccgccgacagcgccgtgcccgccaccagcggcaaggtgtacggcacccccgagaccgagctgacctaccccaccaacatcgtggccgcccccctggccgaggaggagcacgtgagcagcgccaccagcatcaccgagtgcgacaagctgagcagcttcgccaccagcgtggccgaggaccagagcgtggccagcctgaccgccccccagaccgaggagaccggcaagagcagcctgctgctggacaccgtgaccagcatccccagcagcagaaccgaggccacccagggcctggactacgtgcccagcgccggcaccatcagccccaccagcagcctggaggaggacaagggcttcaagagccccccctgcgaggacttcagcgtgaccggcgagagcgagaagagaggcgagatcatcggcaagggcctgagcggcgagagagccgtggaggaggaggaggaggagaccgccaacgtggagatgagcgagaagctgtgcagccagtacggcacccccgtgttcagcgcccccggccacgccctgcaccccggcgagcccgccctgggcgaggccgaggagagatgcctgagccccgacgacagcaccgtgaagatggccagccccccccccagcggcccccccagcgccacccacacccccttccaccagagccccgtggaggagaagagcgagccccaggacttccaggaggccgacagctggggcgacaccaagagaacccccggcgtgggcaaggaggacgccgccgaggagaccgtgaagcccggccccgaggagggcaccctggagaaggaggagaaggtgcccccccccagaagcccccaggcccaggaggcccccgtgaacatcgacgagggcctgaccggctgcaccatccagctgctgcccgcccaggacaaggccatcgtgttcgagatcatggaggccggcgagcccaccggccccatcctgggcgccgaggccctgcccggcggcctgagaaccctgccccaggagcccggcaagccccagaaggacgaggtgctgagataccccgacagaagcctgagccccgaggacgccgagagcctgagcgtgctgagcgtgcccagccccgacaccgccaaccaggagcccacccccaagagcccctgcggcctgaccgagcagtacctgcacaaggacagatggcccgaggtgagccccgaggacacccagagcctgagcctgagcgaggagagccccagcaaggagaccagcctggacgtgagcagcaagcagctgagccccgagagcctgggcaccctgcagttcggcgagctgaacctgggcaaggaggagatgggccacctgatgcaggccgaggacaccagccaccacaccgcccccatgagcgtgcccgagccccacgccgccaccgccagcccccccaccgacggcaccaccagatacagcgcccagaccgacatcaccgacgacagcctggacagaaagagccccgccagcagcttcagccacagcacccccagcggcaacggcaagtacctgcccggcgccatcaccagccccgacgagcacatcctgacccccgacagcagcttcagcaagagccccgagagcctgcccggccccgccctggaggacatcgccatcaagtgggaggacaaggtgcccggcctgaaggacagaaccagcgagcagaagaaggagcccgagcccaaggacgaggtgctgcagcagaaggacaagaccctggagcacaaggaggtggtggagcccaaggacaccgccatctaccagaaggacgaggccctgcacgtgaagaacgaggccgtgaagcagcaggacaaggccctggagcagaagggcagagacctggagcagaaggacaccgccctggagcagaaggacaaggccctggagcccaaggacaaggacctggaggagaaggacaaggccctggagcagaaggacaagatccccgaggagaaggacaaggccctggagcagaaggacaccgccctggagcagaaggacaaggccctggagcccaaggacaaggacctggagcagaaggacagagtgctggagcagaaggagaagatccccgaggagaaggacaaggccctggaccagaaggtgagaagcgtggagcacaaggcccccgaggacaccgtggccgagatgaaggacagagacctggagcagaccgacaaggcccccgagcagaagcaccaggcccaggagcagaaggacaaggtgagcgagaagaaggaccaggccctggagcagaagtactgggccctgggccagaaggacgaggccctggagcagaacatccaggccctggaggagaaccaccagacccaggagcaggagagcctggtgcaggaggacaagaccagaaagcccaagatgctggaggagaagagccccgagaaggtgaaggccatggaggagaagctggaggccctgctggagaagaccaaggccctgggcctggaggagagcctggtgcaggagggcagagccagagagcaggaggagaagtactggagaggccaggacgtggtgcaggagtggcaggagaccagccccaccagagaggagcccgccggcgagcagaaggagctggcccccgcctgggaggacaccagccccgagcaggacaacagatactggagaggcagagaggacgtggccctggagcaggacacctactggagagagctgagctgcgagagaaaggtgtggttcccccacgagctggacggccagggcgccagaccccactacaccgaggagagagagagcaccttcctggacgagggccccgacgacgagcaggaggtgcccctgagagagcacgccaccagaagcccctgggccagcgacttcaaggacttccaggagagcagcccccagaagggcctggaggtggagagatggctggccgagagccccgtgggcctgccccccgaggaggaggacaagctgaccagaagccccttcgagatcatcagcccccccgccagcccccccgagatggtgggccagagagtgcccagcgcccccggccaggagagccccatccccgaccccaagctgatgccccacatgaagaacgagcccaccacccccagctggctggccgacatccccccctgggtgcccaaggacagacccctgccccccgcccccctgagccccgcccccggcccccccacccccgcccccgagagccacacccccgcccccttcagctggggcaccgccgagtacgacagcgtggtggccgccgtgcaggagggcgccgccgagctggagggcggcccctacagccccctgggcaaggactacagaaaggccgagggcgagagagaggaggagggcagagccgaggcccccgacaagagcagccacagcagcaaggtgcccgaggccagcaagagccacgccaccaccgagcccgagcagaccgagcccgagcagagagagcccaccccctaccccgacgagagaagcttccagtacgccgacatctacgagcagatgatgctgaccggcctgggccccgcctgccccaccagagagccccccctgggcgccgccggcgactggcccccctgcctgagcaccaaggaggccgccgccggcagaaacaccagcgccgagaaggagctgagcagccccatcagccccaagagcctgcagagcgacacccccaccttcagctacgccgccctggccggccccaccgtgccccccagacccgagcccggccccagcatggagcccagcctgaccccccccgccgtgccccccagagcccccatcctgagcaagggccccagcccccccctgaacggcaacatcctgagctgcagccccgacagaagaagccccagccccaaggagagcggcagaagccactgggacgacagcaccagcgacagcgagctggagaagggcgccagagagcagcccgagaaggaggcccagagccccagccccccccaccccatccccatgggcagccccaccctgtggcccgagaccgaggcccacgtgagcccccccctggacagccacctgggccccgccagacccagcctggacttccccgccagcgccttcggcttcagcagcctgcagcccgcccccccccagctgcccagccccgccgagcccagaagcgccccctgcggcagcctggccttcagcggcgacagagccctggccctggcccccggcccccccaccagaaccagacacgacgagtacctggaggtgaccaaggcccccagcctggacagcagcctgccccagctgcccagccccagcagccccggcgcccccctgctgagcaacctgcccagacccgccagccccgccctgagcgagggcagcagcagcgaggccaccacccccgtgatcagcagcgtggccgagagattcagccccagcctggaggccgccgagcaggagagcggcgagctggaccccggcatggagcccgccgcccacagcctgtgggacctgacccccctgagccccgccccccccgccagcctggacctggccctggcccccgcccccagcctgcccggcgacatgggcgacggcatcctgccctgccacctggagtgcagcgaggccgccaccgagaagcccagccccttccaggtgcccagcgaggactgcgccgccaacggccccaccgagaccagccccaacccccccggccccgcccccgccaaggccgagaacgaggaggccgccgcctgccccgcctgggagagaggcgcctggcccgagggcgccgagagaagcagcagacccgacaccctgctgagccccgagcagcccgtgtgccccgccggcggcagcggcggcccccccagcagcgccagccccgaggtggaggccggcccccagggctgcgccaccgagcccagaccccacagaggcgagctgagccccagcttcctgaacccccccctgccccccagcatcgacgacagagacctgagcaccgaggaggtgagactggtgggcagaggcggcagaagaagagtgggcggccccggcaccaccggcggcccctgccccgtgaccgacgagaccccccccaccagcgccagcgacagcggcagcagccagagcgacagcgacgtgccccccgagaccgaggagtgccccagcatcaccgccgaggccgccctggacagcgacgaggacggcgacttcctgcccgtggacaaggccggcggcgtgagcggcacccaccaccccagacccggccacgaccccccccccctgccccagcccgaccccagacccagcccccccagacccgacgtgtgcatggccgaccccgagggcctgagcagcgagagcggcagagtggagagactgagagagaaggagaaggtgcagggcagagtgggcagaagagcccccggcaaggccaagcccgccagccccgccagaagactggacctgagaggcaagagaagccccacccccggcaagggccccgccgacagagccagcagagccccccccagacccagaagcaccaccagccaggtgacccccgccgaggagaaggacggccacagccccatgagcaagggcctggtgaacggcctgaaggccggccccatggccctgagcagcaagggcagcagcggcgcccccgtgtacgtggacctggcctacatccccaaccactgcagcggcaagaccgccgacctggacttcttcagaagagtgagagccagctactacgtggtgagcggcaacgaccccgccaacggcgagcccagcagagccgtgctggacgccctgctggagggcaaggcccagtggggcgagaacctgcaggtgaccctgatccccacccacgacaccgaggtgaccagagagtggtaccagcagacccacgagcagcagcagcagctgaacgtgctggtgctggccagcagcagcaccgtggtgatgcaggacgagagcttccccgcctgcaagatcgagttctag

SEQ ID NO: 88958 - DNA, 9126 bp, synthetic construct
  misc_feature 1..9126: note = Description of Artificial Sequence: Synthetic coding sequence
  source 1..9126: mol_type = other DNA
atggagaccgaggccgagcccgccagaccccacggcgtggccatggagaccacccccggcctgggcctgagaagccccggcgcccccctggcccagaaccccgccgagctgctgtgcgaggccggcgccgccgtggccgccgccagatgggacctgcagaagcacagcctgctgatcgtgatcggcgacatcggcaccgagagccagctgagagccgtgagagcccacctggagcagggcatcctgagctggaacatcgacctgagcagcttcgacctgaaccagcagctgagactgttcatcaccagacacctggcccacttcagcagcgaggtgaagggccagagaaccctgtgccaccagagcgagatcctggagaccatcatcctggtgaaccccagcgccgacagcatcagcagcgaggtgcaccacctgctgagcagcagcagcgcctacaagctgctgatcctgagcggccagagcctggagcccggcggcgacctgatcctgcagagcggcacctacagctacgagaacttcgcccaggtgctgcacaaccccgagatcagccagctgctgagcaacagagaccccggcatccaggccttcctgaccgtgagctgcctgggcgagggcgactggagccacctgggcctgagcagcagccaggagaccctgcacctgagactgaaccccgagcccaccctgcccaccatggacggcgtggccgagttcagcgagtacgtgagcgagaccgtggacgtgcccagccccttcgacctgctggagccccccaccagcggcggcttcctgaagctgagcaagccctgctgctacatcttccccggcggcagaggcgacagcgccctgttcgccgtgaacggcttcaacatcctggtggacggcggcagcgacagaaagagctgcttctggaagctggtgagacacctggacagaatcgacagcgtgctgctgacccacatcggcgccgacaacctgcccggcatcaacggcctgctgcagagaaaggtggccgagctggaggaggagcagagccagggcagcagcagctacagcgactgggtgaagaacctgatcagccccgagctgggcgtggtgttcttcaacgtgcccgagaagctgagactgcccgacgccagcagaaaggccaagagaagcatcgaggaggcctgcctgaccctgcagcacctgaacagactgggcatccaggccgagcccctgtacagagtggtgagcaacaccatcgagcccctgaccctgttccacaagatgggcgtgggcagactggacatgtacgtgctgaaccccgtgaaggacagcaaggagatgcagttcctgatgcagaagtgggccggcaacagcaaggccaagaccggcatcgtgctgcccaacggcaaggaggccgagatcagcgtgccctacctgaccagcatcaccgccctggtggtgtggctgcccgccaaccccaccgagaagatcgtgagagtgctgttccccggcaacgccccccagaacaagatcctggagggcctggagaagctgagacacctggacttcctgagataccccgtggccacccagaaggacctggccagcggcgccgtgcccaccaacctgaagcccagcaagatcaagcagagagccgacagcaaggagagcctgaaggccaccaccaagaccgccgtgagcaagctggccaagagagaggaggtggtggaggagggcgccaaggaggccagaagcgagctggccaaggagctggccaagaccgagaagaaggccaaggagagcagcgagaagccccccgagaagcccgccaagcccgagagagtgaagaccgagagcagcgaggccctgaaggccgagaagagaaagctgatcaaggacaaggtgggcaagaagcacctgaaggagaagatcagcaagctggaggagaagaaggacaaggagaagaaggagatcaagaaggagagaaaggagctgaagaaggacgagggcagaaaggaggagaagaaggacgccaagaaggaggagaagagaaaggacaccaagcccgagctgaagaagatcagcaagcccgacctgaagcccttcacccccgaggtgagaaagaccctgtacaaggccaaggtgcccggcagagtgaagatcgacagaagcagagccatcagaggcgagaaggagctgagcagcgagccccagaccccccccgcccagaagggcaccgtgcccctgcccaccatcagcggccacagagagctggtgctgagcagccccgaggacctgacccaggacttcgaggagatgaagagagaggagagagccctgctggccgagcagagagacaccggcctgggcgacaagcccttccccctggacaccgccgaggagggcccccccagcaccgccatccagggcaccccccccagcgtgcccggcctgggccaggaggagcacgtgatgaaggagaaggagctggtgcccgaggtgcccgaggagcagggcagcaaggacagaggcctggacagcggcgccgagaccgaggaggagaaggacacctgggaggagaagaagcagagagaggccgagagactgcccgacagaaccgaggccagagaggagagcgagcccgaggtgaaggaggacgtgatcgagaaggccgagctggaggagatggaggaggtgcaccccagcgacgaggaggaggaggacgccaccaaggccgagggcttctaccagaagcacatgcaggagcccctgaaggtgacccccagaagcagagaggccttcggcggcagagagctgggcctgcagggcaaggcccccgagaaggagaccagcctgttcctgagcagcctgaccacccccgccggcgccaccgagcacgtgagctacatccaggacgagaccatccccggctacagcgagaccgagcagaccatcagcgacgaggagatccacgacgagcccgaggagagacccgccccccccagattccacaccagcacctacgacctgcccggccccgagggcgccggccccttcgaggccagccagcccgccgacagcgccgtgcccgccaccagcggcaaggtgtacggcacccccgagaccgagctgacctaccccaccaacatcgtggccgcccccctggccgaggaggagcacgtgagcagcgccaccagcatcaccgagtgcgacaagctgagcagcttcgccaccagcgtggccgaggaccagagcgtggccagcctgaccgccccccagaccgaggagaccggcaagagcagcctgctgctggacaccgtgaccagcatccccagcagcagaaccgaggccacccagggcctggactacgtgcccagcgccggcaccatcagccccaccagcagcctggaggaggacaagggcttcaagagccccccctgcgaggacttcagcgtgaccggcgagagcgagaagagaggcgagatcatcggcaagggcctgagcggcgagagagccgtggaggaggaggaggaggagaccgccaacgtggagatgagcgagaagctgtgcagccagtacggcacccccgtgttcagcgcccccggccacgccctgcaccccggcgagcccgccctgggcgaggccgaggagagatgcctgagccccgacgacagcaccgtgaagatggccagccccccccccagcggcccccccagcgccacccacacccccttccaccagagccccgtggaggagaagagcgagccccaggacttccaggaggccgacagctggggcgacaccaagagaacccccggcgtgggcaaggaggacgccgccgaggagaccgtgaagcccggccccgaggagggcaccctggagaaggaggagaaggtgcccccccccagaagcccccaggcccaggaggcccccgtgaacatcgacgagggcctgaccggctgcaccatccagctgctgcccgcccaggacaaggccatcgtgttcgagatcatggaggccggcgagcccaccggccccatcctgggcgccgaggccctgcccggcggcctgagaaccctgccccaggagcccggcaagccccagaaggacgaggtgctgagataccccgacagaagcctgagccccgaggacgccgagagcctgagcgtgctgagcgtgcccagccccgacaccgccaaccaggagcccacccccaagagcccctgcggcctgaccgagcagtacctgcacaaggacagatggcccgaggtgagccccgaggacacccagagcctgagcctgagcgaggagagccccagcaaggagaccagcctggacgtgagcagcaagcagctgagccccgagagcctgggcaccctgcagttcggcgagctgaacctgggcaaggaggagatgggccacctgatgcaggccgaggacaccagccaccacaccgcccccatgagcgtgcccgagccccacgccgccaccgccagcccccccaccgacggcaccaccagatacagcgcccagaccgacatcaccgacgacagcctggacagaaagagccccgccagcagcttcagccacagcacccccagcggcaacggcaagtacctgcccggcgccatcaccagccccgacgagcacatcctgacccccgacagcagcttcagcaagagccccgagagcctgcccggccccgccctggaggacatcgccatcaagtgggaggacaaggtgcccggcctgaaggacagaaccagcgagcagaagaaggagcccgagcccaaggacgaggtgctgcagcagaaggacaagaccctggagcacaaggaggtggtggagcccaaggacaccgccatctaccagaaggacgaggccctgcacgtgaagaacgaggccgtgaagcagcaggacaaggccctggagcagaagggcagagacctggagcagaaggacaccgccctggagcagaaggacaaggccctggagcccaaggacaaggacctggaggagaaggacaaggccctggagcagaaggacaagatccccgaggagaaggacaaggccctggagcagaaggacaccgccctggagcagaaggacaaggccctggagcccaaggacaaggacctggagcagaaggacagagtgctggagcagaaggagaagatccccgaggagaaggacaaggccctggaccagaaggtgagaagcgtggagcacaaggcccccgaggacaccgtggccgagatgaaggacagagacctggagcagaccgacaaggcccccgagcagaagcaccaggcccaggagcagaaggacaaggtgagcgagaagaaggaccaggccctggagcagaagtactgggccctgggccagaaggacgaggccctggagcagaacatccaggccctggaggagaaccaccagacccaggagcaggagagcctggtgcaggaggacaagaccagaaagcccaagatgctggaggagaagagccccgagaaggtgaaggccatggaggagaagctggaggccctgctggagaagaccaaggccctgggcctggaggagagcctggtgcaggagggcagagccagagagcaggaggagaagtactggagaggccaggacgtggtgcaggagtggcaggagaccagccccaccagagaggagcccgccggcgagcagaaggagctggcccccgcctgggaggacaccagccccgagcaggacaacagatactggagaggcagagaggacgtggccctggagcaggacacctactggagagagctgagctgcgagagaaaggtgtggttcccccacgagctggacggccagggcgccagaccccactacaccgaggagagagagagcaccttcctggacgagggccccgacgacgagcaggaggtgcccctgagagagcacgccaccagaagcccctgggccagcgacttcaaggacttccaggagagcagcccccagaagggcctggaggtggagagatggctggccgagagccccgtgggcctgccccccgaggaggaggacaagctgaccagaagccccttcgagatcatcagcccccccgccagcccccccgagatggtgggccagagagtgcccagcgcccccggccaggagagccccatccccgaccccaagctgatgccccacatgaagaacgagcccaccacccccagctggctggccgacatccccccctgggtgcccaaggacagacccctgccccccgcccccctgagccccgcccccggcccccccacccccgcccccgagagccacacccccgcccccttcagctggggcaccgccgagtacgacagcgtggtggccgccgtgcaggagggcgccgccgagctggagggcggcccctacagccccctgggcaaggactacagaaaggccgagggcgagagagaggaggagggcagagccgaggcccccgacaagagcagccacagcagcaaggtgcccgaggccagcaagagccacgccaccaccgagcccgagcagaccgagcccgagcagagagagcccaccccctaccccgacgagagaagcttccagtacgccgacatctacgagcagatgatgctgaccggcctgggccccgcctgccccaccagagagccccccctgggcgccgccggcgactggcccccctgcctgagcaccaaggaggccgccgccggcagaaacaccagcgccgagaaggagctgagcagccccatcagccccaagagcctgcagagcgacacccccaccttcagctacgccgccctggccggccccaccgtgccccccagacccgagcccggccccagcatggagcccagcctgaccccccccgccgtgccccccagagcccccatcctgagcaagggccccagcccccccctgaacggcaacatcctgagctgcagccccgacagaagaagccccagccccaaggagagcggcagaagccactgggacgacagcaccagcgacagcgagctggagaagggcgccagagagcagcccgagaaggaggcccagagccccagccccccccaccccatccccatgggcagccccaccctgtggcccgagaccgaggcccacgtgagcccccccctggacagccacctgggccccgccagacccagcctggacttccccgccagcgccttcggcttcagcagcctgcagcccgcccccccccagctgcccagccccgccgagcccagaagcgccccctgcggcagcctggccttcagcggcgacagagccctggccctggcccccggcccccccaccagaaccagacacgacgagtacctggaggtgaccaaggcccccagcctggacagcagcctgccccagctgcccagccccagcagccccggcgcccccctgctgagcaacctgcccagacccgccagccccgccctgagcgagggcagcagcagcgaggccaccacccccgtgatcagcagcgtggccgagagattcagccccagcctggaggccgccgagcaggagagcggcgagctggaccccggcatggagcccgccgcccacagcctgtgggacctgacccccctgagccccgccccccccgccagcctggacctggccctggcccccgcccccagcctgcccggcgacatgggcgacggcatcctgccctgccacctggagtgcagcgaggccgccaccgagaagcccagccccttccaggtgcccagcgaggactgcgccgccaacggccccaccgagaccagccccaacccccccggccccgcccccgccaaggccgagaacgaggaggccgccgcctgccccgcctgggagagaggcgcctggcccgagggcgccgagagaagcagcagacccgacaccctgctgagccccgagcagcccgtgtgccccgccggcggcagcggcggcccccccagcagcgccagccccgaggtggaggccggcccccagggctgcgccaccgagcccagaccccacagaggcgagctgagccccagcttcctgaacccccccctgccccccagcatcgacgacagagacctgagcaccgaggaggtgagactggtgggcagaggcggcagaagaagagtgggcggccccggcaccaccggcggcccctgccccgtgaccgacgagaccccccccaccagcgccagcgacagcggcagcagccagagcgacagcgacgtgccccccgagaccgaggagtgccccagcatcaccgccgaggccgccctggacagcgacgaggacggcgacttcctgcccgtggacaaggccggcggcgtgagcggcacccaccaccccagacccggccacgaccccccccccctgccccagcccgaccccagacccagcccccccagacccgacgtgtgcatggccgaccccgagggcctgagcagcgagagcggcagagtggagagactgagagagaaggagaaggtgcagggcagagtgggcagaagagcccccggcaaggccaagcccgccagccccgccagaagactggacctgagaggcaagagaagccccacccccggcaagggccccgccgacagagccagcagagccccccccagacccagaagcaccaccagccaggtgacccccgccgaggagaaggacggccacagccccatgagcaagggcctggtgaacggcctgaaggccggccccatggccctgagcagcaagggcagcagcggcgcccccgtgtacgtggacctggcctacatccccaaccactgcagcggcaagaccgccgacctggacttcttcagaagagtgagagccagctactacgtggtgagcggcaacgaccccgccaacggcgagcccagcagagccgtgctggacgccctgctggagggcaaggcccagtggggcgagaacctgcaggtgaccctgatccccacccacgacaccgaggtgaccagagagtggtaccagcagacccacgagcagcagcagcagctgaacgtgctggtgctggccagcagcagcaccgtggtgatgcaggacgagagcttccccgcctgcaagatcgagttctag

SEQ ID NO: 88959 - DNA, 8418 bp, synthetic construct
  misc_feature 1..8418: note = Description of Artificial Sequence: Synthetic coding sequence
  source 1..8418: mol_type = other DNA
atggacggcgtggccgagttcagcgagtacgtgagcgagaccgtggacgtgcccagccccttcgacctgctggagccccccaccagcggcggcttcctgaagctgagcaagccctgctgctacatcttccccggcggcagaggcgacagcgccctgttcgccgtgaacggcttcaacatcctggtggacggcggcagcgacagaaagagctgcttctggaagctggtgagacacctggacagaatcgacagcgtgctgctgacccacatcggcgccgacaacctgcccggcatcaacggcctgctgcagagaaaggtggccgagctggaggaggagcagagccagggcagcagcagctacagcgactgggtgaagaacctgatcagccccgagctgggcgtggtgttcttcaacgtgcccgagaagctgagactgcccgacgccagcagaaaggccaagagaagcatcgaggaggcctgcctgaccctgcagcacctgaacagactgggcatccaggccgagcccctgtacagagtggtgagcaacaccatcgagcccctgaccctgttccacaagatgggcgtgggcagactggacatgtacgtgctgaaccccgtgaaggacagcaaggagatgcagttcctgatgcagaagtgggccggcaacagcaaggccaagaccggcatcgtgctgcccaacggcaaggaggccgagatcagcgtgccctacctgaccagcatcaccgccctggtggtgtggctgcccgccaaccccaccgagaagatcgtgagagtgctgttccccggcaacgccccccagaacaagatcctggagggcctggagaagctgagacacctggacttcctgagataccccgtggccacccagaaggacctggccagcggcgccgtgcccaccaacctgaagcccagcaagatcaagcagagagccgacagcaaggagagcctgaaggccaccaccaagaccgccgtgagcaagctggccaagagagaggaggtggtggaggagggcgccaaggaggccagaagcgagctggccaaggagctggccaagaccgagaagaaggccaaggagagcagcgagaagccccccgagaagcccgccaagcccgagagagtgaagaccgagagcagcgaggccctgaaggccgagaagagaaagctgatcaaggacaaggtgggcaagaagcacctgaaggagaagatcagcaagctggaggagaagaaggacaaggagaagaaggagatcaagaaggagagaaaggagctgaagaaggacgagggcagaaaggaggagaagaaggacgccaagaaggaggagaagagaaaggacaccaagcccgagctgaagaagatcagcaagcccgacctgaagcccttcacccccgaggtgagaaagaccctgtacaaggccaaggtgcccggcagagtgaagatcgacagaagcagagccatcagaggcgagaaggagctgagcagcgagccccagaccccccccgcccagaagggcaccgtgcccctgcccaccatcagcggccacagagagctggtgctgagcagccccgaggacctgacccaggacttcgaggagatgaagagagaggagagagccctgctggccgagcagagagacaccggcctgggcgacaagcccttccccctggacaccgccgaggagggcccccccagcaccgccatccagggcaccccccccagcgtgcccggcctgggccaggaggagcacgtgatgaaggagaaggagctggtgcccgaggtgcccgaggagcagggcagcaaggacagaggcctggacagcggcgccgagaccgaggaggagaaggacacctgggaggagaagaagcagagagaggccgagagactgcccgacagaaccgaggccagagaggagagcgagcccgaggtgaaggaggacgtgatcgagaaggccgagctggaggagatggaggaggtgcaccccagcgacgaggaggaggaggacgccaccaaggccgagggcttctaccagaagcacatgcaggagcccctgaaggtgacccccagaagcagagaggccttcggcggcagagagctgggcctgcagggcaaggcccccgagaaggagaccagcctgttcctgagcagcctgaccacccccgccggcgccaccgagcacgtgagctacatccaggacgagaccatccccggctacagcgagaccgagcagaccatcagcgacgaggagatccacgacgagcccgaggagagacccgccccccccagattccacaccagcacctacgacctgcccggccccgagggcgccggccccttcgaggccagccagcccgccgacagcgccgtgcccgccaccagcggcaaggtgtacggcacccccgagaccgagctgacctaccccaccaacatcgtggccgcccccctggccgaggaggagcacgtgagcagcgccaccagcatcaccgagtgcgacaagctgagcagcttcgccaccagcgtggccgaggaccagagcgtggccagcctgaccgccccccagaccgaggagaccggcaagagcagcctgctgctggacaccgtgaccagcatccccagcagcagaaccgaggccacccagggcctggactacgtgcccagcgccggcaccatcagccccaccagcagcctggaggaggacaagggcttcaagagccccccctgcgaggacttcagcgtgaccggcgagagcgagaagagaggcgagatcatcggcaagggcctgagcggcgagagagccgtggaggaggaggaggaggagaccgccaacgtggagatgagcgagaagctgtgcagccagtacggcacccccgtgttcagcgcccccggccacgccctgcaccccggcgagcccgccctgggcgaggccgaggagagatgcctgagccccgacgacagcaccgtgaagatggccagccccccccccagcggcccccccagcgccacccacacccccttccaccagagccccgtggaggagaagagcgagccccaggacttccaggaggccgacagctggggcgacaccaagagaacccccggcgtgggcaaggaggacgccgccgaggagaccgtgaagcccggccccgaggagggcaccctggagaaggaggagaaggtgcccccccccagaagcccccaggcccaggaggcccccgtgaacatcgacgagggcctgaccggctgcaccatccagctgctgcccgcccaggacaaggccatcgtgttcgagatcatggaggccggcgagcccaccggccccatcctgggcgccgaggccctgcccggcggcctgagaaccctgccccaggagcccggcaagccccagaaggacgaggtgctgagataccccgacagaagcctgagccccgaggacgccgagagcctgagcgtgctgagcgtgcccagccccgacaccgccaaccaggagcccacccccaagagcccctgcggcctgaccgagcagtacctgcacaaggacagatggcccgaggtgagccccgaggacacccagagcctgagcctgagcgaggagagccccagcaaggagaccagcctggacgtgagcagcaagcagctgagccccgagagcctgggcaccctgcagttcggcgagctgaacctgggcaaggaggagatgggccacctgatgcaggccgaggacaccagccaccacaccgcccccatgagcgtgcccgagccccacgccgccaccgccagcccccccaccgacggcaccaccagatacagcgcccagaccgacatcaccgacgacagcctggacagaaagagccccgccagcagcttcagccacagcacccccagcggcaacggcaagtacctgcccggcgccatcaccagccccgacgagcacatcctgacccccgacagcagcttcagcaagagccccgagagcctgcccggccccgccctggaggacatcgccatcaagtgggaggacaaggtgcccggcctgaaggacagaaccagcgagcagaagaaggagcccgagcccaaggacgaggtgctgcagcagaaggacaagaccctggagcacaaggaggtggtggagcccaaggacaccgccatctaccagaaggacgaggccctgcacgtgaagaacgaggccgtgaagcagcaggacaaggccctggagcagaagggcagagacctggagcagaaggacaccgccctggagcagaaggacaaggccctggagcccaaggacaaggacctggaggagaaggacaaggccctggagcagaaggacaagatccccgaggagaaggacaaggccctggagcagaaggacaccgccctggagcagaaggacaaggccctggagcccaaggacaaggacctggagcagaaggacagagtgctggagcagaaggagaagatccccgaggagaaggacaaggccctggaccagaaggtgagaagcgtggagcacaaggcccccgaggacaccgtggccgagatgaaggacagagacctggagcagaccgacaaggcccccgagcagaagcaccaggcccaggagcagaaggacaaggtgagcgagaagaaggaccaggccctggagcagaagtactgggccctgggccagaaggacgaggccctggagcagaacatccaggccctggaggagaaccaccagacccaggagcaggagagcctggtgcaggaggacaagaccagaaagcccaagatgctggaggagaagagccccgagaaggtgaaggccatggaggagaagctggaggccctgctggagaagaccaaggccctgggcctggaggagagcctggtgcaggagggcagagccagagagcaggaggagaagtactggagaggccaggacgtggtgcaggagtggcaggagaccagccccaccagagaggagcccgccggcgagcagaaggagctggcccccgcctgggaggacaccagccccgagcaggacaacagatactggagaggcagagaggacgtggccctggagcaggacacctactggagagagctgagctgcgagagaaaggtgtggttcccccacgagctggacggccagggcgccagaccccactacaccgaggagagagagagcaccttcctggacgagggccccgacgacgagcaggaggtgcccctgagagagcacgccaccagaagcccctgggccagcgacttcaaggacttccaggagagcagcccccagaagggcctggaggtggagagatggctggccgagagccccgtgggcctgccccccgaggaggaggacaagctgaccagaagccccttcgagatcatcagcccccccgccagcccccccgagatggtgggccagagagtgcccagcgcccccggccaggagagccccatccccgaccccaagctgatgccccacatgaagaacgagcccaccacccccagctggctggccgacatccccccctgggtgcccaaggacagacccctgccccccgcccccctgagccccgcccccggcccccccacccccgcccccgagagccacacccccgcccccttcagctggggcaccgccgagtacgacagcgtggtggccgccgtgcaggagggcgccgccgagctggagggcggcccctacagccccctgggcaaggactacagaaaggccgagggcgagagagaggaggagggcagagccgaggcccccgacaagagcagccacagcagcaaggtgcccgaggccagcaagagccacgccaccaccgagcccgagcagaccgagcccgagcagagagagcccaccccctaccccgacgagagaagcttccagtacgccgacatctacgagcagatgatgctgaccggcctgggccccgcctgccccaccagagagccccccctgggcgccgccggcgactggcccccctgcctgagcaccaaggaggccgccgccggcagaaacaccagcgccgagaaggagctgagcagccccatcagccccaagagcctgcagagcgacacccccaccttcagctacgccgccctggccggccccaccgtgccccccagacccgagcccggccccagcatggagcccagcctgaccccccccgccgtgccccccagagcccccatcctgagcaagggccccagcccccccctgaacggcaacatcctgagctgcagccccgacagaagaagccccagccccaaggagagcggcagaagccactgggacgacagcaccagcgacagcgagctggagaagggcgccagagagcagcccgagaaggaggcccagagccccagccccccccaccccatccccatgggcagccccaccctgtggcccgagaccgaggcccacgtgagcccccccctggacagccacctgggccccgccagacccagcctggacttccccgccagcgccttcggcttcagcagcctgcagcccgcccccccccagctgcccagccccgccgagcccagaagcgccccctgcggcagcctggccttcagcggcgacagagccctggccctggcccccggcccccccaccagaaccagacacgacgagtacctggaggtgaccaaggcccccagcctggacagcagcctgccccagctgcccagccccagcagccccggcgcccccctgctgagcaacctgcccagacccgccagccccgccctgagcgagggcagcagcagcgaggccaccacccccgtgatcagcagcgtggccgagagattcagccccagcctggaggccgccgagcaggagagcggcgagctggaccccggcatggagcccgccgcccacagcctgtgggacctgacccccctgagccccgccccccccgccagcctggacctggccctggcccccgcccccagcctgcccggcgacatgggcgacggcatcctgccctgccacctggagtgcagcgaggccgccaccgagaagcccagccccttccaggtgcccagcgaggactgcgccgccaacggccccaccgagaccagccccaacccccccggccccgcccccgccaaggccgagaacgaggaggccgccgcctgccccgcctgggagagaggcgcctggcccgagggcgccgagagaagcagcagacccgacaccctgctgagccccgagcagcccgtgtgccccgccggcggcagcggcggcccccccagcagcgccagccccgaggtggaggccggcccccagggctgcgccaccgagcccagaccccacagaggcgagctgagccccagcttcctgaacccccccctgccccccagcatcgacgacagagacctgagcaccgaggaggtgagactggtgggcagaggcggcagaagaagagtgggcggccccggcaccaccggcggcccctgccccgtgaccgacgagaccccccccaccagcgccagcgacagcggcagcagccagagcgacagcgacgtgccccccgagaccgaggagtgccccagcatcaccgccgaggccgccctggacagcgacgaggacggcgacttcctgcccgtggacaaggccggcggcgtgagcggcacccaccaccccagacccggccacgaccccccccccctgccccagcccgaccccagacccagcccccccagacccgacgtgtgcatggccgaccccgagggcctgagcagcgagagcggcagagtggagagactgagagagaaggagaaggtgcagggcagagtgggcagaagagcccccggcaaggccaagcccgccagccccgccagaagactggacctgagaggcaagagaagccccacccccggcaagggccccgccgacagagccagcagagccccccccagacccagaagcaccaccagccaggtgacccccgccgaggagaaggacggccacagccccatgagcaagggcctggtgaacggcctgaaggccggccccatggccctgagcagcaagggcagcagcggcgcccccgtgtacgtggacctggcctacatccccaaccactgcagcggcaagaccgccgacctggacttcttcagaagagtgagagccagctactacgtggtgagcggcaacgaccccgccaacggcgagcccagcagagccgtgctggacgccctgctggagggcaaggcccagtggggcgagaacctgcaggtgagcgtgaccctgatccccacccacgacaccgaggtgaccagagagtggtaccagcagacccacgagcagcagcagcagctgaacgtgctggtgctggccagcagcagcaccgtggtgatgcaggacgagagcttccccgcctgcaagatcgagttctag

SEQ ID NO: 88960 - DNA, 1884 bp, synthetic construct
  misc_feature 1..1884: note = Description of Artificial Sequence: Synthetic coding sequence
  source 1..1884: mol_type = other DNA
atggacggcgtggccgagttcagcgagtacgtgagcgagaccgtggacgtgcccagccccttcgacctgctggagccccccaccagcggcggcttcctgaagctgagcaagccctgctgctacatcttccccggcggcagaggcgacagcgccctgttcgccgtgaacggcttcaacatcctggtggacggcggcagcgacagaaagagctgcttctggaagctggtgagacacctggacagaatcgacagcgtgctgctgacccacatcggcgccgacaacctgcccggcatcaacggcctgctgcagagaaaggtggccgagctggaggaggagcagagccagggcagcagcagctacagcgactgggtgaagaacctgatcagccccgagctgggcgtggtgttcttcaacgtgcccgagaagctgagactgcccgacgccagcagaaaggccaagagaagcatcgaggaggcctgcctgaccctgcagcacctgaacagactgggcatccaggccgagcccctgtacagagtggtgagcaacaccatcgagcccctgaccctgttccacaagatgggcgtgggcagactggacatgtacgtgctgaaccccgtgaaggacagcaaggagatgcagttcctgatgcagaagtgggccggcaacagcaaggccaagaccggcatcgtgctgcccaacggcaaggaggccgagatcagcgtgccctacctgaccagcatcaccgccctggtggtgtggctgcccgccaaccccaccgagaagatcgtgagagtgctgttccccggcaacgccccccagaacaagatcctggagggcctggagaagctgagacacctggacttcctgagataccccgtggccacccagaaggacctggccagcggcgccgtgcccaccaacctgaagcccagcaagatcaagcagagagccgacagcaaggagagcctgaaggccaccaccaagaccgccgtgagcaagctggccaagagagaggaggtggtggaggagggcgccaaggaggccagaagcgagctggccaaggagctggccaagaccgagaagaaggccaaggagagcagcgagaagccccccgagaagcccgccaagcccgagagagtgaagaccgagagcagcgaggccctgaaggccgagaagagaaagctgatcaaggacaaggtgggcaagaagcacctgaaggagaagatcagcaagctggaggagaagaaggacaaggagaagaaggagatcaagaaggagagaaaggagctgaagaaggacgagggcagaaaggaggagaagaaggacgccaagaaggaggagaagagaaaggacaccaagcccgagctgaagaagatcagcaagcccgacctgaagcccttcacccccgaggtgagaaagaccctgtacaaggccaaggtgcccggcagagtgaagatcgacagaagcagagccatcagaggcgagaaggagctgagcagcgagccccagaccccccccgcccagaagggcaccgtgcccctgcccaccatcagcggccacagagagctggtgctgagcagccccgaggacctgacccaggacttcgaggagatgaagagagaggagagagccctgctggccgagcagagagacaccggcctgggcgacaagcccttccccctggacaccgccgaggagggcccccccagcaccgccatccagggcaccccccccagcgtgcccggcctgggccaggaggagcacgtgatgaaggagaaggagctggtgcccgaggtgcccgaggagcagggcagcaaggacagaggcctggacagcggcgccgagaccgaggagaagaagaagaagaagaagaagaagaagtag

SEQ ID NO: 88961 - DNA, 1680 bp, synthetic construct
  misc_feature 1..1680: note = Description of Artificial Sequence: Synthetic coding sequence
  source 1..1680: mol_type = other DNA
atggccgacgagagaaaggacgaggccaaggccccccactggaccagcgcccccctgaccgaggccagcgcccacagccacccccccgagatcaaggaccagggcggcgccggcgagggcctggtgagaagcgccaacggcttcccctacagagaggacgaggagggcgccttcggcgagcacggcagccagggcacctacagcaacaccaaggagaacggcatcaacggcgagctgaccagcgccgacagagagaccgccgaggaggtgagcgccagaatcgtgcaggtggtgaccgccgaggccgtggccgtgctgaagggcgagcaggagaaggaggcccagcacaaggaccagaccgccgccctgcccctggccgccgaggagaccgccaacctgccccccagccccccccccagccccgccagcgagcagaccgtgaccgtggaggaggccgccggcggcgagagcgccctggcccccagcgtgttcaagcaggccaaggacaaggtgagcaacagcaccctgagcaagatccccgccctgcagggcagcaccaagagccccagatacagcagcgcctgccccagcaccaccaagagagccaccttcagcgacagcctgctgatccagcccaccagcgccggcagcaccgacagactgccctacagcaagagcggcaacaaggacggcgtgaccaagagccccgagaagagaagcagcctgcccagacccagcagcatcctgccccccagaagaggcgtgagcggcgacagagacgagaacagcttcagcctgaacagcagcatcagcagcagcgccagaagaaccaccagaagcgagcccatcagaagagccggcaagagcggcaccagcacccccaccacccccggcagcaccgccatcacccccggcaccccccccagctacagcagcagaacccccggcacccccggcacccccagctaccccagaaccccccacacccccggcacccccaagagcgccatcctggtgcccagcgagaagaaggtggccatcatcagaaccccccccaagagccccgccacccccaagcagctgagactgatcaaccagcccctgcccgacctgaagaacgtgaagagcaagatcggcagcaccgacaacatcaagtaccagcccaagggcggccaggtgagaatcctgaacaagaagatcgacttcagcaaggtgcagagcagatgcggcagcaaggacaacatcaagcacagcgccggcggcggcaacgtgcagatcgtgaccaagaagatcgacctgagccacgtgaccagcaagtgcggcagcctgaagaacatcagacacagacccggcggcggcagagtgaagatcgagagcgtgaagctggacttcaaggagaaggcccaggccaaggtgggcagcctggacaacgcccaccacgtgcccggcggcggcaacgtgaagatcgacagccagaagctgaacttcagagagcacgccaaggccagagtggaccacggcgccgagatcatcacccagagccccggcagaagcagcgtggccagccccagaagactgagcaacgtgagcagcagcggcagcatcaacctgctggagagcccccagctggccaccctggccgaggacgtgaccgccgccctggccaagcagggcctgtag

SEQ ID NO: 88962 - DNA, 5484 bp, synthetic construct
  misc_feature 1..5484: note = Description of Artificial Sequence: Synthetic coding sequence
  source 1..5484: mol_type = other DNA
atggccgacgagagaaaggacgaggccaaggccccccactggaccagcgcccccctgaccgaggccagcgcccacagccacccccccgagatcaaggaccagggcggcgccggcgagggcctggtgagaagcgccaacggcttcccctacagagaggacgaggagggcgccttcggcgagcacggcagccagggcacctacagcaacaccaaggagaacggcatcaacggcgagctgaccagcgccgacagagagaccgccgaggaggtgagcgccagaatcgtgcaggtggtgaccgccgaggccgtggccgtgctgaagggcgagcaggagaaggaggcccagcacaaggaccagaccgccgccctgcccctggccgccgaggagaccgccaacctgccccccagccccccccccagccccgccagcgagcagaccgtgaccgtggaggaggacctgctgaccgccagcaagatggagttccacgaccagcaggagctgacccccagcaccgccgagcccagcgaccagaaggagaaggagagcgagaagcagagcaagcccggcgaggacctgaagcacgccgccctggtgagccagcccgagaccaccaagacctaccccgacaagaaggacatgcagggcaccgaggaggagaaggcccccctggccctgttcggccacaccctggtggccagcctggaggacatgaagcagaagaccgagcccagcctggtggtgcccggcatcgacctgcccaaggagccccccacccccaaggagcagaaggactggttcatcgagatgcccaccgaggccaagaaggacgagtggggcctggtggcccccatcagccccggccccctgacccccatgagagagaaggacgtgttcgacgacatccccaagtgggagggcaagcagttcgacagccccatgcccagccccttccagggcggcagcttcaccctgcccctggacgtgatgaagaacgagatcgtgaccgagaccagccccttcgcccccgccttcctgcagcccgacgacaagaagagcctgcagcagaccagcggccccgccaccgccaaggacagcttcaagatcgaggagccccacgaggccaagcccgacaagatggccgaggccccccccagcgaggccatgaccctgcccaaggacgcccacatccccgtggtggaggagcacgtgatgggcaaggtgctggaggaggagaaggaggccatcaaccaggagaccgtgcagcagagagacaccttcacccccagcggccaggagcccatcctgaccgagaaggagaccgagctgaagctggaggagaagaccaccatcagcgacaaggaggccgtgcccaaggagagcaagccccccaagcccgccgacgaggagatcggcatcatccagaccagcaccgagcacaccttcagcgagcagaaggaccaggagcccaccaccgacatgctgaagcaggacagcttccccgtgagcctggagcaggccgtgaccgacagcgccatgaccagcaagaccctggagaaggccatgaccgagcccagcgccctgatcgagaagagcagcatccaggagctgttcgagatgagagtggacgacaaggacaagatcgagggcgtgggcgccgccaccagcgccgagctggacatgcccttctacgaggacaagagcggcatgagcaagtacttcgagaccagcgccctgaaggaggaggccaccaagagcatcgagcccggcagcgactactacgagctgagcgacaccagagagagcgtgcacgagagcatcgacaccatgagccccatgcacaagaacggcgacaaggagttccagaccggcaaggagagccagcccagcccccccgcccaggaggccggctacagcaccctggcccagagctaccccagcgacctgcccgaggagcccagcagcccccaggagagaatgttcaccatcgaccccaaggtgtacggcgagaagagagacctgcacagcaagaacaaggacgacctgaccctgagcagaagcctgggcctgggcggcagaagcgccatcgagcagagaagcatgagcatcaacctgcccatgagctgcctggacagcatcgccctgggcttcaacttcggcagaggccacgacctgagccccctggccagcgacatcctgaccaacaccagcggcagcatggacgagggcgacgactacctgcccgccaccacccccgccctggagaaggccccctgcttccccgtggagagcaaggaggaggagcagatcgagaaggtgaaggccaccggcgaggagagcacccaggccgagatcagctgcgagagccccttcctggccaaggacttctacaagaacggcaccgtgatggcccccgacctgcccgagatgctggacctggccggcaccagaagcagactggccagcgtgagcgccgacgccgaggtggccagaagaaagagcgtgcccagcgagaccgtggtggaggacagcagaaccggcctgccccccgtgaccgacgagaaccacgtgatcgtgaagaccgacagccagctggaggacctgggctactgcgtgttcaacaagtacaccgtgcccctgcccagccccgtgcaggacagcgagaacctgagcggcgagagcggcaccttctacgagggcaccgacgacaaggtgagaagagacctggccaccgacctgagcctgatcgaggtgaagctggccgccgccggcagagtgaaggacgagttcagcgtggacaaggaggccagcgcccacatcagcggcgacaagagcggcctgagcaaggagttcgaccaggagaagaaggccaacgacagactggacaccgtgctggagaagagcgaggagcacgccgacagcaaggagcacgccaagaagaccgaggaggccggcgacgagatcgagaccttcggcctgggcgtgacctacgagcaggccctggccaaggacctgagcatccccaccgacgccagcagcgagaaggccgagaagggcctgagcagcgtgcccgagatcgccgaggtggagcccagcaagaaggtggagcagggcctggacttcgccgtgcagggccagctggacgtgaagatcagcgacttcggccagatggccagcggcctgaacatcgacgacagaagagccaccgagctgaagctggaggccacccaggacatgacccccagcagcaaggccccccaggaggccgacgccttcatgggcgtggagagcggccacatgaaggagggcaccaaggtgagcgagaccgaggtgaaggagaaggtggccaagcccgacctggtgcaccaggaggccgtggacaaggaggagagctacgagagcagcggcgagcacgagagcctgaccatggagagcctgaaggccgacgagggcaagaaggagaccagccccgagagcagcctgatccaggacgagatcgccgtgaagctgagcgtggagatcccctgcccccccgccgtgagcgaggccgacctggccaccgacgagagagccgacgtgcagatggagttcatccagggccccaaggaggagagcaaggagacccccgacatcagcatcacccccagcgacgtggccgagcccctgcacgagaccatcgtgagcgagcccgccgagatccagagcgaggaggaggagatcgaggcccagggcgagtacgacaagctgctgttcagaagcgacaccctgcagatcaccgacctgggcgtgagcggcgccagagaggagttcgtggagacctgccccagcgagcacaagggcgtgatcgagagcgtggtgaccatcgaggacgacttcatcaccgtggtgcagaccaccaccgacgagggcgagagcggcagccacagcgtgagattcgccgccctggagcagcccgaggtggagagaagacccagcccccacgacgaggaggagttcgaggtggaggaggccgccgaggcccaggccgagcccaaggacggcagccccgaggcccccgccagccccgagagagaggaggtggccctgagcgagtacaagaccgagacctacgacgactacaaggacgagaccaccatcgacgacagcatcatggacgccgacagcctgtgggtggacacccaggacgacgacagaagcatcatgaccgagcagctggagaccatccccaaggaggagaaggccgagaaggaggccagaagaagcagcctggagaagcacagaaaggagaagcccttcaagaccggcagaggcagaatcagcacccccgagagaaaggtggccaagaaggagcccagcaccgtgagcagagacgaggtgagaagaaagaaggccgtgtacaagaaggccgagctggccaagaagaccgaggtgcaggcccacagccccagcagaaagttcatcctgaagcccgccatcaagtacaccagacccacccacctgagctgcgtgaagagaaagaccaccgccgccggcggcgagagcgccctggcccccagcgtgttcaagcaggccaaggacaaggtgagcgacggcgtgaccaagagccccgagaagagaagcagcctgcccagacccagcagcatcctgccccccagaagaggcgtgagcggcgacagagacgagaacagcttcagcctgaacagcagcatcagcagcagcgccagaagaaccaccagaagcgagcccatcagaagagccggcaagagcggcaccagcacccccaccacccccggcagcaccgccatcacccccggcaccccccccagctacagcagcagaacccccggcacccccggcacccccagctaccccagaaccccccacacccccggcacccccaagagcgccatcctggtgcccagcgagaagaaggtggccatcatcagaaccccccccaagagccccgccacccccaagcagctgagactgatcaaccagcccctgcccgacctgaagaacgtgaagagcaagatcggcagcaccgacaacatcaagtaccagcccaagggcggccaggtgcagatcgtgaccaagaagatcgacctgagccacgtgaccagcaagtgcggcagcctgaagaacatcagacacagacccggcggcggcagagtgaagatcgagagcgtgaagctggacttcaaggagaaggcccaggccaaggtgggcagcctggacaacgcccaccacgtgcccggcggcggcaacgtgaagatcgacagccagaagctgaacttcagagagcacgccaaggccagagtggaccacggcgccgagatcatcacccagagccccggcagaagcagcgtggccagccccagaagactgagcaacgtgagcagcagcggcagcatcaacctgctggagagcccccagctggccaccctggccgaggacgtgaccgccgccctggccaagcagggcctgtag

SEQ ID NO: 88963 - DNA, 1416 bp, synthetic construct
  misc_feature 1..1416: note = Description of Artificial Sequence: Synthetic coding sequence
  source 1..1416: mol_type = other DNA
atggccgacgagagaaaggacgaggccaaggccccccactggaccagcgcccccctgaccgaggccagcgcccacagccacccccccgagatcaaggaccagggcggcgccggcgagggcctggtgagaagcgccaacggcttcccctacagagaggacgaggagggcgccttcggcgagcacggcagccagggcacctacagcaacaccaaggagaacggcatcaacggcgagctgaccagcgccgacagagagaccgccgaggaggtgagcgccagaatcgtgcaggtggtgaccgccgaggccgtggccgtgctgaagggcgagcaggagaaggaggcccagcacaaggaccagaccgccgccctgcccctggccgccgaggagaccgccaacctgccccccagccccccccccagccccgccagcgagcagaccgtgaccgtggaggaggccgccggcggcgagagcgccctggcccccagcgtgttcaagcaggccaaggacaaggtgagcgacggcgtgaccaagagccccgagaagagaagcagcctgcccagacccagcagcatcctgccccccagaagaggcgtgagcggcgacagagacgagaacagcttcagcctgaacagcagcatcagcagcagcgccagaagaaccaccagaagcgagcccatcagaagagccggcaagagcggcaccagcacccccaccacccccggcagcaccgccatcacccccggcaccccccccagctacagcagcagaacccccggcacccccggcacccccagctaccccagaaccccccacacccccggcacccccaagagcgccatcctggtgcccagcgagaagaaggtggccatcatcagaaccccccccaagagccccgccacccccaagcagctgagactgatcaaccagcccctgcccgacctgaagaacgtgaagagcaagatcggcagcaccgacaacatcaagtaccagcccaagggcggccaggtgcagatcgtgaccaagaagatcgacctgagccacgtgaccagcaagtgcggcagcctgaagaacatcagacacagacccggcggcggcagagtgaagatcgagagcgtgaagctggacttcaaggagaaggcccaggccaaggtgggcagcctggacaacgcccaccacgtgcccggcggcggcaacgtgaagatcgacagccagaagctgaacttcagagagcacgccaaggccagagtggaccacggcgccgagatcatcacccagagccccggcagaagcagcgtggccagccccagaagactgagcaacgtgagcagcagcggcagcatcaacctgctggagagcccccagctggccaccctggccgaggacgtgaccgccgccctggccaagcagggcctgtag

SEQ ID NO: 88964 - DNA, 321 bp, synthetic construct
  misc_feature 1..321: note = Description of Artificial Sequence: Synthetic coding sequence
  source 1..321: mol_type = other DNA
atggccgacgagagaaaggacgaggccaaggccccccactggaccagcgcccccctgaccgaggccagcgcccacagccacccccccgagatcaaggaccagggcggcgccggcgagggcctggtgagaagcgccaacggcttcccctacagagaggacgaggagggcgccttcggcgagcacggcagccagggcacctacagcaacaccaaggagaacggcatcaacggcgagctgaccagcgccgacagagagaccgccgaggaggtgagcgccagaatcgtgcaggtggtgaccgccgaggccgtggccgtgctgtag

SEQ ID NO: 88965 - DNA, 1416 bp, synthetic construct; identical to SEQ ID NO: 88963
  misc_feature 1..1416: note = Description of Artificial Sequence: Synthetic coding sequence
  source 1..1416: mol_type = other DNA

SEQ ID NO: 88966 - DNA, 5472 bp, synthetic construct
  misc_feature 1..5472: note = Description of Artificial Sequence: Synthetic coding sequence
  source 1..5472: mol_type = other DNA
atggccgacgagagaaaggacgaggccaaggccccccactggaccagcgcccccctgaccgaggccagcgcccacagccacccccccgagatcaaggaccagggcggcgccggcgagggcctggtgagaagcgccaacggcttcccctacagagaggacgaggagggcgccttcggcgagcacggcagccagggcacctacagcaacaccaaggagaacggcatcaacggcgagctgaccagcgccgacagagagaccgccgaggaggtgagcgccagaatcgtgcaggtggtgaccgccgaggccgtggccgtgctgaagggcgagcaggagaaggaggcccagcacaaggaccagaccgccgccctgcccctggccgccgaggagaccgccaacctgccccccagccccccccccagccccgccagcgagcagaccgtgaccgtggaggaggccagcaagatggagttccacgaccagcaggagctgacccccagcaccgccgagcccagcgaccagaaggagaaggagagcgagaagcagagcaagcccggcgaggacctgaagcacgccgccctggtgagccagcccgagaccaccaagacctaccccgacaagaaggacatgcagggcaccgaggaggagaaggcccccctggccctgttcggccacaccctggtggccagcctggaggacatgaagcagaagaccgagcccagcctggtggtgcccggcatcgacctgcccaaggagccccccacccccaaggagcagaaggactggttcatcgagatgcccaccgaggccaagaaggacgagtggggcctggtggcccccatcagccccggccccctgacccccatgagagagaaggacgtgttcgacgacatccccaagtgggagggcaagcagttcgacagccccatgcccagccccttccagggcggcagcttcaccctgcccctggacgtgatgaagaacgagatcgtgaccgagaccagccccttcgcccccgccttcctgcagcccgacgacaagaagagcctgcagcagaccagcggccccgccaccgccaaggacagcttcaagatcgaggagccccacgaggccaagcccgacaagatggccgaggccccccccagcgaggccatgaccctgcccaaggacgcccacatccccgtggtggaggagcacgtgatgggcaaggtgctggaggaggagaaggaggccatcaaccaggagaccgtgcagcagagagacaccttcacccccagcggccaggagcccatcctgaccgagaaggagaccgagctgaagctggaggagaagaccaccatcagcgacaaggaggccgtgcccaaggagagcaagccccccaagcccgccgacgaggagatcggcatcatccagaccagcaccgagcacaccttcagcgagcagaaggaccaggagcccaccaccgacatgctgaagcaggacagcttccccgtgagcctggagcaggccgtgaccgacagcgccatgaccagcaagaccctggagaaggccatgaccgagcccagcgccctgatcgagaagagcagcatccaggagctgttcgagatgagagtggacgacaaggacaagatcgagggcgtgggcgccgccaccagcgccgagctggacatgcccttctacgaggacaagagcggcatgagcaagtacttcgagaccagcgccctgaaggaggaggccaccaagagcatcgagcccggcagcgactactacgagctgagcgacaccagagagagcgtgcacgagagcatcgacaccatgagccccatgcacaagaacggcgacaaggagttccagaccggcaaggagagccagcccagcccccccgcccaggaggccggctacagcaccctggcccagagctaccccagcgacctgcccgaggagcccagcagcccccaggagagaatgttcaccatcgaccccaaggtgtacggcgagaagagagacctgcacagcaagaacaaggacgacctgaccctgagcagaagcctgggcctgggcggcagaagcgccatcgagcagagaagcatgagcatcaacctgcccatgagctgcctggacagcatcgccctgggcttcaacttcggcagaggccacgacctgagccccctggccagcgacatcctgaccaacaccagcggcagcatggacgagggcgacgactacctgcccgccaccacccccgccctggagaaggccccctgcttccccgtggagagcaaggaggaggagcagatcgagaaggtgaaggccaccggcgaggagagcacccaggccgagatcagctgcgagagccccttcctggccaaggacttctacaagaacggcaccgtgatggcccccgacctgcccgagatgctggacctggccggcaccagaagcagactggccagcgtgagcgccgacgccgaggtggccagaagaaagagcgtgcccagcgagaccgtggtggaggacagcagaaccggcctgccccccgtgaccgacgagaaccacgtgatcgtgaagaccgacagccagctggaggacctgggctactgcgtgttcaacaagtacaccgtgcccctgcccagccccgtgcaggacagcgagaacctgagcggcgagagcggcaccttctacgagggcaccgacgacaaggtgagaagagacctggccaccgacctgagcctgatcgaggtgaagctggccgccgccggcagagtgaaggacgagttcagcgtggacaaggaggccagcgcccacatcagcggcgacaagagcggcctgagcaaggagttcgaccaggagaagaaggccaacgacagactggacaccgtgctggagaagagcgaggagcacgccgacagcaaggagcacgccaagaagaccgaggaggccggcgacgagatcgagaccttcggcctgggcgtgacctacgagcaggccctggccaaggacctgagcatccccaccgacgccagcagcgagaaggccgagaagggcctgagcagcgtgcccgagatcgccgaggtggagcccagcaagaaggtggagcagggcctggacttcgccgtgcagggccagctggacgtgaagatcagcgacttcggccagatggccagcggcctgaacatcgacgacagaagagccaccgagctgaagctggaggccacccaggacatgacccccagcagcaaggccccccaggaggccgacgccttcatgggcgtggagagcggccacatgaaggagggcaccaaggtgagcgagaccgaggtgaaggagaaggtggccaagcccgacctggtgcaccaggaggccgtggacaaggaggagagctacgagagcagcggcgagcacgagagcctgaccatggagagcctgaaggccgacgagggcaagaaggagaccagccccgagagcagcctgatccaggacgagatcgccgtgaagctgagcgtggagatcccctgcccccccgccgtgagcgaggccgacctggccaccgacgagagagccgacgtgcagatggagttcatccagggccccaaggaggagagcaaggagacccccgacatcagcatcacccccagcgacgtggccgagcccctgcacgagaccatcgtgagcgagcccgccgagatccagagcgaggaggaggagatcgaggcccagggcgagtacgacaagctgctgttcagaagcgacaccctgcagatcaccgacctgggcgtgagcggcgccagagaggagttcgtggagacctgccccagcgagcacaagggcgtgatcgagagcgtggtgaccatcgaggacgacttcatcaccgtggtgcagaccaccaccgacgagggcgagagcggcagccacagcgtgagattcgccgccctggagcagcccgaggtggagagaagacccagcccccacgacgaggaggagttcgaggtggaggaggccgccgaggcccaggccgagcccaaggacggcagccccgaggcccccgccagccccgagagagaggaggtggccctgagcgagtacaagaccgagacctacgacgactacaaggacgagaccaccatcgacgacagcatcatggacgccgacagcctgtgggtggacacccaggacgacgacagaagcatcatgaccgagcagctggagaccatccccaaggaggagaaggccgagaaggaggccagaagaagcagcctggagaagcacagaaaggagaagcccttcaagaccggcagaggcagaatcagcacccccgagagaaaggtggccaagaaggagcccagcaccgtgagcagagacgaggtgagaagaaagaaggccgtgtacaagaaggccgagctggccaagaagaccgaggtgcaggcccacagccccagcagaaagttcatcctgaagcccgccatcaagtacaccagacccacccacctgagctgcgtgaagagaaagaccaccgccgccggcggcgagagcgccctggcccccagcgtgttcaagcaggccaaggacaaggtgagcgacggcgtgaccaagagccccgagaagagaagcagcctgcccagacccagcagcatcctgccccccagaagaggcgtgagcggcgacagagacgagaacagcttcagcctgaacagcagcatcagcagcagcgccagaagaaccaccagaagcgagcccatcagaagagccggcaagagcggcaccagcacccccaccacccccggcagcaccgccatcacccccggcaccccccccagctacagcagcagaacccccggcacccccggcacccccagctaccccagaaccccccacacccccggcacccccaagagcgccatcctggtgcccagcgagaagaaggtggccatcatcagaaccccccccaagagccccgccacccccaagcagctgagactgatcaaccagcccctgcccgacctgaagaacgtgaagagcaagatcggcagcaccgacaacatcaagtaccagcccaagggcggccaggtgcagatcgtgaccaagaagatcgacctgagccacgtgaccagcaagtgcggcagcctgaagaacatcagacacagacccggcggcggcagagtgaagatcgagagcgtgaagctggacttcaaggagaaggcccaggccaaggtgggcagcctggacaacgcccaccacgtgcccggcggcggcaacgtgaagatcgacagccagaagctgaacttcagagagcacgccaaggccagagtggaccacggcgccgagatcatcacccagagccccggcagaagcagcgtggccagccccagaagactgagcaacgtgagcagcagcggcagcatcaacctgctggagagcccccagctggccaccctggccgaggacgtgaccgccgccctggccaagcagggcctgtag

SEQ ID NO: 88967 - DNA, 2664 bp, synthetic construct
  misc_feature 1..2664: note = Description of Artificial Sequence: Synthetic coding sequence
  source 1..2664: mol_type = other DNA
atggagaccaccggcgaccagggcatcgagggcatggcctacatggacgagaacagaaacatcaccttcacctgccccagaacccccagcgagctgatcaacaagagcagccccctggaggtgctggagagcgccgcctgcgagaagctgcccacccccaccccccaggtggtgaaggagggcgacagcttccccgacaccctggccaagaacggccaggagatcgcccccgcccagatcagcaagagcctgatggtggacaactacaccaaggacggcgtgcccggccaggagagacccaagggccccagcgccgtggtgcccagcaccagcaccggcggcgtggccctgcccatcaccaccgccatcgagaccgtgaacatccacggcgaccacagcctgaagaacaaggccgagctggccgacagcatgaagaacgaggccggcatcgacgagggccacgtgatcggcgagagcgagagcgtgcacagcggcgccagcaagcacagcgtggagaaggtgaccgagctggccaagggccacctgctgcccggcgtgcccgtggaggaccagagcctgcccggcgaggccagagccctggagggctacgccgacagaggcaacttccccgcccaccccgtgaacgaggagaaggagaccaaggagggcagcgtggccgtgcagatccccgacctgctggaggacaaggcccagaagctgagcttctgcgaggaccagaacgcccaggacagaaacagcaagggcagcgacagcctgaacaagaaggtggacctgaccctgctgagccccaagagcgagaacgacaagctgaaggagatcagcctggcctgcaagatcaccgagctggagagcgtgagcctgcccacccccgagatccagagcgacttcctgcacagcaaggtggaggccccccccagcgaggtggccgacaccctggtgatcatgaccgccagcaagggcgtgagactgcccgagcccaaggacaagatcctggagaccccccagaagatgaccgagaagagcgagagcaagacccccggcgagggcaagaaggaggacaagagcagaatggccgagcccatgaagggctacatgagacccaccaagagcagaggcctgacccccctgctgcccaagagcaccatccaggagcaggagagacacaagcagctgaagagcgccggcatcgccagacccgaggagggcagacccgtggtgagcggcaccggcaacgacatcaccaccccccccaacaaggagctgccccccagccccgagaagaagaccaagcccctggccaccacccagcccgccaagaccagcaccagcaaggccaagacccagcccaccagcctgcccaagcagcccgcccccaccaccatcggcggcctgaacaagaagcccatgagcctggccagcggcctggtgcccgccgccccccccaagagacccgccgtggccagcgccagacccagcatcctgcccagcaaggacgtgaagcccaagcccatcgccgacgccaaggcccccgagaagagagccagccccagcaagcccgccagcgcccccgccagcagaagcggcagcaagagcacccagaccgtggccaagaccaccaccgccgccgccgtggccagcaccggccccagcagcagaagccccagcaccctgctgcccaagaagcccaccgccatcaagaccgagggcaagcccgccgaggtgaagaagatgaccgccaagagcgtgcccgccgacctgagcagacccaagagcaccagcaccagcagcatgaagaagaccaccaccctgagcggcaccgcccccgccgccggcgtggtgcccagcagagtgaaggccacccccatgcccagcagacccagcaccacccccttcatcgacaagaagcccaccagcgccaagcccagcagcaccacccccagactgagcagactggccaccaacaccagcgcccccgacctgaagaacgtgagaagcaaggtgggcagcaccgagaacatcaagcaccagcccggcggcggcagagccaaggtggagaagaagaccgaggccgccgccaccaccagaaagcccgagagcaacgccgtgaccaagaccgccggccccatcgccagcgcccagaagcagcccgccggcaaggtgcagatcgtgagcaagaaggtgagctacagccacatccagagcaagtgcggcagcaaggacaacatcaagcacgtgcccggcggcggcaacgtgcagatccagaacaagaaggtggacatcagcaaggtgagcagcaagtgcggcagcaaggccaacatcaagcacaagcccggcggcggcgacgtgaagatcgagagccagaagctgaacttcaaggagaaggcccaggccaaggtgggcagcctggacaacgtgggccacctgcccgccggcggcgccgtgaagaccgagggcggcggcagcgaggcccccctgtgccccggcccccccgccggcgaggagcccgccatcagcgaggccgcccccgaggccggcgcccccaccagcgccagcggcctgaacggccaccccaccctgagcggcggcggcgaccagagagaggcccagaccctggacagccagatccaggagaccagcatctag

SEQ ID NO: 88968 - DNA, 1392 bp, synthetic construct
  misc_feature 1..1392: note = Description of Artificial Sequence: Synthetic coding sequence
  source 1..1392: mol_type = other DNA
atctgcgaggagcccgtggccaagaagagagaggagctggcccacttcagcaacagcagcagcaacagcggcaagaaggagctgggcaccgccggcctgtacctgcacagcaagctggagcagatccccgagggcagcagcaaggagaagggccaggaggacttcagcgagaccagaatcgacagctgcagccaggtgtgccagagaggcgagaagcagcccggccagaccgccctggccggcaagaaggagatcgaggtgaccgccacccagagcacccccagcttcctgttcgagaagccccccagagacggcatcgccagacccgaggagggcagacccgtggtgagcggcaccggcaacgacatcaccaccccccccaacaaggagctgccccccagccccgagaagaagaccaagcccatcgccgacgccaaggcccccgagaagagagccagccccagcaagcccgccagcgcccccgccagcagaagcggcagcaagagcacccagaccgtggccaagaccaccaccgccgccgccgtggccagcaccggccccagcagcagaagccccagcaccctgctgcccaagaagcccaccgccatcaagaccgagggcaagcccgccgaggtgaagaagatgaccgccaagagcgtgcccgccgacctgagcagacccaagagcaccagcaccagcagcatgaagaagaccaccaccctgagcggcaccgcccccgccgccggcgtggtgcccagcagagtgaaggccacccccatgcccagcagacccagcaccacccccttcatcgacaagaagcccaccagcgccaagcccagcagcaccacccccagactgagcagactggccaccaacaccagcgcccccgacctgaagaacgtgagaagcaaggtgggcagcaccgagaacatcaagcaccagcccggcggcggcagagtgcagatcgtgagcaagaaggtgagctacagccacatccagagcaagtgcggcagcaaggacaacatcaagcacgtgcccggcggcggcaacgtgcagatccagaacaagaaggtggacatcagcaaggtgagcagcaagtgcggcagcaaggccaacatcaagcacaagcccggcggcggcgacgtgaagatcgagagccagaagctgaacttcaaggagaaggcccaggccaaggtgggcagcctggacaacgtgggccacctgcccgccggcggcgccgtgaagatcgagacctacagactgaccttcagagccaacgccagagccagaaccgaccacggcgccgacatcgtgagcagacccccccacttccccggcggccccaacagcggcagcagagtgctgggccccctgagcagagccgtgcactag

SEQ ID NO: 88969 - DNA, 3459 bp, synthetic construct
  misc_feature 1..3459: note = Description of Artificial Sequence: Synthetic coding sequence
  source 1..3459: mol_type = other DNA
atggccgacctgagcctggccgacgccctgaccgagcccagccccgacatcgagggcgagatcaagagagacttcatcgccaccctggaggccgaggccttcgacgacgtggtgggcgagaccgtgggcaagaccgactacatccccctgctggacgtggacgagaagaccggcaacagcgagagcaagaagaagccctgcagcgagaccagccagatcgaggacacccccagcagcaagcccaccctgctggccaacggcggccacggcgtggagggcagcgacaccaccggcagccccaccgagttcctggaggagaagatggcctaccaggagtaccccaacagccagaactggcccgaggacaccaacttctgcttccagcccgagcaggtggtggaccccatccagaccgaccccttcaagatgtaccacgacgacgacctggccgacctggtgttccccagcagcgccaccgccgacaccagcatcttcgccggccagaacgaccccctgaaggacagctacggcatgagcccctgcaacaccgccgtggtgccccagggctggagcgtggaggccctgaacagcccccacagcgagagcttcgtgagccccgaggccgtggccgagcccccccagcccaccgccgtgcccctggagctggccaaggagatcgagatggccagcgaggagagaccccccgcccaggccctggagatcatgatgggcctgaagaccaccgacatggcccccagcaaggagaccgagatggccctggccaaggacatggccctggccaccaagaccgaggtggccctggccaaggacatggagagccccaccaagctggacgtgaccctggccaaggacatgcagcccagcatggagagcgacatggccctggtgaaggacatggagctgcccaccgagaaggaggtggccctggtgaaggacgtgagatggcccaccgagaccgacgtgagcagcgccaagaacgtggtgctgcccaccgagaccgaggtggcccccgccaaggacgtgaccctgctgaaggagaccgagagagccagccccatcaagatggacctggcccccagcaaggacatgggcccccccaaggagaacaagaaggagaccgagagagccagccccatcaagatggacctggcccccagcaaggacatgggcccccccaaggagaacaagatcgtgcccgccaaggacctggtgctgctgagcgagatcgaggtggcccaggccaacgacatcatcagcagcaccgagatcagcagcgccgagaaggtggccctgagcagcgagaccgaggtggccctggccagagacatgaccctgccccccgagaccaacgtgatcctgaccaaggacaaggccctgcccctggaggccgaggtggcccccgtgaaggacatggcccagctgcccgagaccgagatcgcccccgccaaggacgtggcccccagcaccgtgaaggaggtgggcctgctgaaggacatgagccccctgagcgagaccgagatggccctgggcaaggacgtgacccccccccccgagaccgaggtggtgctgatcaagaacgtgtgcctgccccccgagatggaggtggccctgaccgaggaccaggtgcccgccctgaagaccgaggcccccctggccaaggacggcgtgctgaccctggccaacaacgtgacccccgccaaggacgtgccccccctgagcgagaccgaggccacccccgtgcccatcaaggacatggagatcgcccagacccagaagggcatcagcgaggacagccacctggagagcctgcaggacgtgggccagagcgccgcccccaccttcatgatcagccccgagaccgtgaccggcaccggcaagaagtgcagcctgcccgccgaggaggacagcgtgctggagaagctgggcgagagaaagccctgcaacagccagcccagcgagctgagcagcgagaccagcggcatcgccagacccgaggagggcagacccgtggtgagcggcaccggcaacgacatcaccaccccccccaacaaggagctgccccccagccccgagaagaagaccaagcccctggccaccacccagcccgccaagaccagcaccagcaaggccaagacccagcccaccagcctgcccaagcagcccgcccccaccaccatcggcggcctgaacaagaagcccatgagcctggccagcggcctggtgcccgccgccccccccaagagacccgccgtggccagcgccagacccagcatcctgcccagcaaggacgtgaagcccaagcccatcgccgacgccaaggcccccgagaagagagccagccccagcaagcccgccagcgcccccgccagcagaagcggcagcaagagcacccagaccgtggccaagaccaccaccgccgccgccgtggccagcaccggccccagcagcagaagccccagcaccctgctgcccaagaagcccaccgccatcaagaccgagggcaagcccgccgaggtgaagaagatgaccgccaagagcgtgcccgccgacctgagcagacccaagagcaccagcaccagcagcatgaagaagaccaccaccctgagcggcaccgcccccgccgccggcgtggtgcccagcagagtgaaggccacccccatgcccagcagacccagcaccacccccttcatcgacaagaagcccaccagcgccaagcccagcagcaccacccccagactgagcagactggccaccaacaccagcgcccccgacctgaagaacgtgagaagcaaggtgggcagcaccgagaacatcaagcaccagcccggcggcggcagagccaaggtggagaagaagaccgaggccgccgccaccaccagaaagcccgagagcaacgccgtgaccaagaccgccggccccatcgccagcgcccagaagcagcccgccggcaaggtgcagatcgtgagcaagaaggtgagctacagccacatccagagcaagtgcggcagcaaggacaacatcaagcacgtgcccggcggcggcaacgtgcagatccagaacaagaaggtggacatcagcaaggtgagcagcaagtgcggcagcaaggccaacatcaagcacaagcccggcggcggcgacgtgaagatcgagagccagaagctgaacttcaaggagaaggcccaggccaaggtgggcagcctggacaacgtgggccacctgcccgccggcggcgccgtgaagaccgagggcggcggcagcgaggcccccctgtgccccggcccccccgccggcgaggagcccgccatcagcgaggccgcccccgaggccggcgcccccaccagcgccagcggcctgaacggccaccccaccctgagcggcggcggcgaccagagagaggcccagaccctggacagccagatccaggagaccagcatctag

SEQ ID NO: 88970 - DNA, 2139 bp, synthetic construct
  misc_feature 1..2139: note = Description of Artificial Sequence: Synthetic coding sequence
  source 1..2139: mol_type = other DNA
atggagaccaccggcgaccagggcatcgagggcatggcctacatggacgagaacagaaacatcaccttcacctgccccagaacccccagcgagctgatcaacaagagcagccccctggaggtgctggagagcgccgcctgcgagaagctgcccacccccaccccccaggtggtgaaggagggcgacagcttccccgacaccctggccaagaacggccaggagatcgcccccgcccagatcagcaagagcctgatggtggacaactacaccaaggacggcgtgcccggccaggagagacccaagggccccagcgccgtggtgcccagcaccagcaccggcggcgtggccctgcccatcaccaccgccatcgagaccgtgaacatccacggcgaccacagcctgaagaacaaggccgagctggccgacagcatgaagaacgaggccggcatcgacgagggccacgtgatcggcgagagcgagagcgtgcacagcggcgccagcaagcacagcgtggagaaggtgaccgagctggccaagggccacctgctgcccggcgtgcccgtggaggaccagagcctgcccggcgaggccagagccctggagggctacgccgacagaggcaacttccccgcccaccccgtgaacgaggagaaggagaccaaggagggcagcgtggccgtgcagatccccgacctgctggaggacaaggcccagaagctgagcttctgcgaggaccagaacgcccaggacagaaacagcaagggcagcgacagcctgaacaagaaggtggacctgaccctgctgagccccaagagcgagaacgacaagctgaaggagatcagcctggcctgcaagatcaccgagctggagagcgtgagcctgcccacccccgagatccagagcgacttcctgcacagcaaggtggaggccccccccagcgaggtggccgacaccctggtgatcatgaccgccagcaagggcgtgagactgcccgagcccaaggacaagatcctggagaccccccagaagatgaccgagaagagcgagagcaagacccccggcgagggcaagaaggaggacaagagcagaatggccgagcccatgaagggctacatgagacccaccaagagcagaggcctgacccccctgctgcccaagagcaccatccaggagcaggagagacacaagcagctgaagagcgccggcatcgccagacccgaggagggcagacccgtggtgagcggcaccggcaacgacatcaccaccccccccaacaaggagctgccccccagccccgagaagaagaccaagcccctggccaccacccagcccgccaagaccagcaccagcaaggccaagacccagcccaccagcctgcccaagcagcccgcccccaccaccatcggcggcctgaacaagaagcccatgagcctggccagcggcctggtgcccgccgccccccccaagagacccgccgtggccagcgccagacccagcatcctgcccagcaaggacgtgaagcccaagcccatcgccgacgccaaggcccccgagaagagagccagccccagcaagcccgccagcgcccccgccagcagaagcggcagcaagagcacccagaccgtggccaagaccaccaccgccgccgccgtggccagcaccggccccagcagcagaagccccagcaccctgctgcccaagaagcccaccgccatcaagaccgagggcaagcccgccgaggtgaagaagatgaccgccaagagcgtgcccgccgacctgagcagacccaagagcaccagcaccagcagcatgaagaagaccaccaccctgagcggcaccgcccccgccgccggcgtggtgcccagcagagtgaaggccacccccatgcccagcagacccagcaccacccccttcatcgacaagaagcccaccagcgccaagcccagcagcaccacccccagactgagcagactggccaccaacaccagcgcccccgacctgaagaacgtgagaagcaaggccaaggtggagaagaagaccgaggccgccgccaccaccagaaagcccgagagcaacgccgtgaccaagaccgccggccccatcgccagcgcccagaagcagcccgccggcaaggtgtag

SEQ ID NO: 88971 - DNA, 2436 bp, synthetic construct
  misc_feature 1..2436: note = Description of Artificial Sequence: Synthetic coding sequence
  source 1..2436: mol_type = other DNA
atggccgacctgagcctggccgacgccctgaccgagcccagccccgacatcgagggcgagatcaagagagacttcatcgccaccctggaggccgaggccttcgacgacgtggtgggcgagaccgtgggcaagaccgactacatccccctgctggacgtggacgagaagaccggcaacagcgagagcaagaagaagccctgcagcgagaccagccagatcgaggacacccccagcagcaagcccaccctgctggccaacggcggccacggcgtggagggcagcgacaccaccggcagccccaccgagttcctggaggagaagatggcctaccaggagtaccccaacagccagaactggcccgaggacaccaacttctgcttccagcccgagcaggtggtggaccccatccagaccgaccccttcaagatgtaccacgacgacgacctggccgacctggtgttccccagcagcgccaccgccgacaccagcatcttcgccggccagaacgaccccctgaaggacagctacggcatgagcccctgcaacaccgccgtggtgccccagggctggagcgtggaggccctgaacagcccccacagcgagagcttcgtgagccccgaggccgtggccgagcccccccagcccaccgccgtgcccctggagctggccaaggagatcgagatggccagcgaggagagaccccccgcccaggccctggagatcatgatgggcctgaagaccaccgacatggcccccagcaaggagaccgagatggccctggccaaggacatggccctggccaccaagaccgaggtggccctggccaaggacatggagagccccaccaagctggacgtgaccctggccaaggacatgcagcccagcatggagagcgacatggccctggtgaaggacatggagctgcccaccgagaaggaggtggccctggtgaaggacggcgtgagactgcccgagcccaaggacaagatcctggagaccccccagaagatgaccgagaagagcgagagcaagacccccggcgagggcaagaaggaggacaagagcagaatggccgagcccatgaagggctacatgagacccaccaagagcagaggcctgacccccctgctgcccaagagcaccatccaggagcaggagagacacaagcagctgaagagcgccggcatcgccagacccgaggagggcagacccgtggtgagcggcaccggcaacgacatcaccaccccccccaacaaggagctgccccccagccccgagaagaagaccaagcccctggccaccacccagcccgccaagaccagcaccagcaaggccaagacccagcccaccagcctgcccaagcagcccgcccccaccaccatcggcggcctgaacaagaagcccatgagcctggccagcggcctggtgcccgccgccccccccaagagacccgccgtggccagcgccagacccagcatcctgcccagcaaggacgtgaagcccaagcccatcgccgacgccaaggcccccgagaagagagccagccccagcaagcccgccagcgcccccgccagcagaagcggcagcaagagcacccagaccgtggccaagaccaccaccgccgccgccgtggccagcaccggccccagcagcagaagccccagcaccctgctgcccaagaagcccaccgccatcaagaccgagggcaagcccgccgaggtgaagaagatgaccgccaagagcgtgcccgccgacctgagcagacccaagagcaccagcaccagcagcatgaagaagaccaccaccctgagcggcaccgcccccgccgccggcgtggtgcccagcagagtgaaggccacccccatgcccagcagacccagcaccacccccttcatcgacaagaagcccaccagcgccaagcccagcagcaccacccccagactgagcagactggccaccaacaccagcgcccccgacctgaagaacgtgagaagcaaggtgggcagcaccgagaacatcaagcaccagcccggcggcggcagagtgcagatccagaacaagaaggtggacatcagcaaggtgagcagcaagtgcggcagcaaggccaacatcaagcacaagcccggcggcggcgacgtgaagatcgagagccagaagctgaacttcaaggagaaggcccaggccaaggtgggcagcctggacaacgtgggccacctgcccgccggcggcgccgtgaagaccgagggcggcggcagcgaggcccccctgtgccccggcccccccgccggcgaggagcccgccatcagcgaggccgcccccgaggccggcgcccccaccagcgccagcggcctgaacggccaccccaccctgagcggcggcggcgaccagagagaggcccagaccctggacagccagatccaggagaccagcatctag

SEQ ID NO: 88972 - DNA, 3408 bp, synthetic construct
  misc_feature 1..3408: note = Description of Artificial Sequence: Synthetic coding sequence
  source 1..3408: mol_type = other DNA
atggccgacctgagcctggccgacgccctgaccgagcccagccccgacatcgagggcgagatcaagagagacttcatcgccaccctggaggccgaggccttcgacgacgtggtgggcgagaccgtgggcaagaccgactacatccccctgctggacgtggacgagaagaccggcaacagcgagagcaagaagaagccctgcagcgagaccagccagatcgaggacacccccagcagcaagcccaccctgctggccaacggcggccacggcgtggagggcagcgacaccaccggcagccccaccgagttcctggaggagaagatggcctaccaggagtaccccaacagccagaactggcccgaggacaccaacttctgcttccagcccgagcaggtggtggaccccatccagaccgaccccttcaagatgtaccacgacgacgacctggccgacctggtgttccccagcagcgccaccgccgacaccagcatcttcgccggccagaacgaccccctgaaggacagctacggcatgagcccctgcaacaccgccgtggtgccccagggctggagcgtggaggccctgaacagcccccacagcgagagcttcgtgagccccgaggccgtggccgagcccccccagcccaccgccgtgcccctggagctggccaaggagatcgagatggccagcgaggagagaccccccgcccaggccctggagatcatgatgggcctgaagaccaccgacatggcccccagcaaggagaccgagatggccctggccaaggacatggccctggccaccaagaccgaggtggccctggccaaggacatggagagccccaccaagctggacgtgaccctggccaaggacatgcagcccagcatggagagcgacatggccctggtgaaggacatggagctgcccaccgagaaggaggtggccctggtgaaggacgtgagatggcccaccgagaccgacgtgagcagcgccaagaacgtggtgctgcccaccgagaccgaggtggcccccgccaaggacgtgaccctgctgaaggagaccgagagagccagccccatcaagatggacctggcccccagcaaggacatgggcccccccaaggagaacaagaaggagaccgagagagccagccccatcaagatggacctggcccccagcaaggacatgggcccccccaaggagaacaagatcgtgcccgccaaggacctggtgctgctgagcgagatcgaggtggcccaggccaacgacatcatcagcagcaccgagatcagcagcgccgagaaggtggccctgagcagcgagaccgaggtggccctggccagagacatgaccctgccccccgagaccaacgtgatcctgaccaaggacaaggccctgcccctggaggccgaggtggcccccgtgaaggacatggcccagctgcccgagaccgagatcgcccccgccaaggacgtggcccccagcaccgtgaaggaggtgggcctgctgaaggacatgagccccctgagcgagaccgagatggccctgggcaaggacgtgacccccccccccgagaccgaggtggtgctgatcaagaacgtgtgcctgccccccgagatggaggtggccctgaccgaggaccaggtgcccgccctgaagaccgaggcccccctggccaaggacggcgtgctgaccctggccaacaacgtgacccccgccaaggacgtgccccccctgagcgagaccgaggccacccccgtgcccatcaaggacatggagatcgcccagacccagaagggcatcagcgaggacagccacctggagagcctgcaggacgtgggccagagcgccgcccccaccttcatgatcagccccgagaccgtgaccggcaccggcaagaagtgcagcctgcccgccgaggaggacagcgtgctggagaagctgggcgagagaaagccctgcaacagccagcccagcgagctgagcagcgagaccagcggcatcgccagacccgaggagggcagacccgtggtgagcggcaccggcaacgacatcaccaccccccccaacaaggagctgccccccagccccgagaagaagaccaagcccctggccaccacccagcccgccaagaccagcaccagcaaggccaagacccagcccaccagcctgcccaagcagcccgcccccaccaccatcggcggcctgaacaagaagcccatgagcctggccagcggcctggtgcccgccgccccccccaagagacccgccgtggccagcgccagacccagcatcctgcccagcaaggacgtgaagcccaagcccatcgccgacgccaaggcccccgagaagagagccagccccagcaagcccgccagcgcccccgccagcagaagcggcagcaagagcacccagaccgtggccaagaccaccaccgccgccgccgtggccagcaccggccccagcagcagaagccccagcaccctgctgcccaagaagcccaccgccatcaagaccgagggcaagcccgccgaggtgaagaagatgaccgccaagagcgtgcccgccgacctgagcagacccaagagcaccagcaccagcagcatgaagaagaccaccaccctgagcggcaccgcccccgccgccggcgtggtgcccagcagagtgaaggccacccccatgcccagcagacccagcaccacccccttcatcgacaagaagcccaccagcgccaagcccagcagcaccacccccagactgagcagactggccaccaacaccagcgcccccgacctgaagaacgtgagaagcaaggtgggcagcaccgagaacatcaagcaccagcccggcggcggcagagccaaggtggagaagaagaccgaggccgccgccaccaccagaaagcccgagagcaacgccgtgaccaagaccgccggccccatcgccagcgcccagaagcagcccgccggcaaggtgcagatcgtgagcaagaaggtgagctacagccacatccagagcaagtgcggcagcaaggacaacatcaagcacgtgcccggcggcggcaacgtgcagatccagaacaagaaggtggacatcagcaaggtgagcagcaagtgcggcagcaaggccaacatcaagcacaagcccggcggcggcgacgtgaagatcgagagccagaagctgaacttcaaggagaaggcccaggccaaggtgggcagcctggacaacgtgggccacctgcccgccggcggcgccgtgaagatcgagacctacagactgaccttcagagccaacgccagagccagaaccgaccacggcgccgacatcgtgagcagacccccccacttccccggcggccccaacagcggcagcagagtgctgggccccctgagcagagccgtgcactag

SEQ ID NO: 88973 - DNA, 2487 bp, synthetic construct
  misc_feature 1..2487: note = Description of Artificial Sequence: Synthetic coding sequence
  source 1..2487: mol_type = other DNA
atgagcctgagcgacaagcagaccgccagcctgaccgccgcctacggccagctgagcaagggcaagcccgccgagtgcagaatggacagccccaaggagatcagccaggccggcttcgagtggcagagaaccgagggcaagctgaacgagatcggcctgaacgtgagcatggacggccagcccaaggacggcctggtgaagaacgccagcttcctggagcagaacaagctgtgcttcttcgagggcaagctggacaaggagctgagcatcgagatgcaggacaaggactgccaggaggccagcggccacctggagagcagatacgtgatcagcgagacctgccaccccctggagggcaacagcgtgcaccagaagaccagcgagttccacctgggcctgatcgagggccccgacaagaacaagaccatccccgtgcagggcaaggtggccggcaagaacggcctggagaccaagagccagagcgacctggacttccccggcgccgccgacatccccaccagatacgtgaaggagcaggagaccagcgtgtggaaccccagcttccaccccgtggcccagggcagcctgggcagcagagaggccacccccggcgagatggagaacagcatcacccccggctgccccgtgatcggcgtggtgaacgacaacagcgagcagctgaagtgcgagagccccctgctggtgagcctggcccaccccgcccccatcatcgagcacagccccaccaccatcccccccatcaccatggtgttcacccaggagcacctgaacgccagctgccacatcagagaccacgacaaggagctggagaagctgagcagcaccgaggaggccgtgctgaaccaggccccccagcagaagaaggccgtgagaagagccctgagcgagtgcagccacctgagcgtgccccccgccgtgaacctggccgacaagtaccccgagctgcccgccagagaggagcccagcagcggcctgctgcccccccccagcagccccatgcccagccccacccccggcaagctgggcgcccccgccatgaagagaagcatgaccgtgggcgaggagcagaccgccagctacaagctgagccccggcaagctgcccatcctgagcaccaaggagatcccccccttcatctgcgaggagcccgtggccaagaagagagaggagctggcccacttcagcaacagcagcagcaacagcggcaagaaggagctgggcaccgccggcctgtacctgcacagcaagctggagcagatccccgagggcagcagcaaggagaagggccaggaggacttcagcgagaccagaatcgacagctgcagccaggtgtgccagagaggcgagaagcagcccggccagaccgccctggccggcaagaaggagatcgaggtgaccgccacccagagcacccccagcttcctgttcgagaagccccccagagacggcatcgccagacccgaggagggcagacccgtggtgagcggcaccggcaacgacatcaccaccccccccaacaaggagctgccccccagccccgagaagaagaccaagcccatcgccgacgccaaggcccccgagaagagagccagccccagcaagcccgccagcgcccccgccagcagaagcggcagcaagagcacccagaccgtggccaagaccaccaccgccgccgccgtggccagcaccggccccagcagcagaagccccagcaccctgctgcccaagaagcccaccgccgacctgagcagacccaagagcaccagcaccagcagcatgaagaagaccaccaccctgagcggcaccgcccccgccgccggcgtggtgcccagcagagtgaaggccacccccatgcccagcagacccagcaccacccccttcatcgacaagaagcccaccagcgccaagcccagcagcaccacccccagactgagcagactggccaccaacaccagcgcccccgacctgaagaacgtgagaagcaaggtgggcagcaccgagaacatcaagcaccagcccggcggcggcagagtgcagatcgtgagcaagaaggtgagctacagccacatccagagcaagtgcggcagcaaggacaacatcaagcacgtgcccggcggcggcaacgtgcagatccagaacaagaaggtggacatcagcaaggtgagcagcaagtgcggcagcaaggccaacatcaagcacaagcccggcggcggcgacgtgaagatcgagagccagaagctgaacttcaaggagaaggcccaggccaaggtgggcagcctggacaacgtgggccacctgcccgccggcggcgccgtgaagatcgagacctacagactgaccttcagagccaacgccagagccagaaccgaccacggcgccgacatcgtgagcagacccccccacttccccggcggccccaacagcggcagcagagtgctgggccccctgagcagagccgtgcactag

SEQ ID NO: 88974 - DNA, 6894 bp, synthetic construct
  misc_feature 1..6894: note = Description of Artificial Sequence: Synthetic coding sequence
  source 1..6894: mol_type = other DNA
atggccgacctgagcctggccgacgccctgaccgagcccagccccgacatcgagggcgagatcaagagagacttcatcgccaccctggaggccgaggccttcgacgacgtggtgggcgagaccgtgggcaagaccgactacatccccctgctggacgtggacgagaagaccggcaacagcgagagcaagaagaagccctgcagcgagaccagccagatcgaggacctgcccctgcccccccaccccgccagcctgagcttccacctgcccctggacacccccagcagcaagcccaccctgctggccaacggcggccacggcgtggagggcagcgacaccaccggcagccccaccgagttcctggaggagaagatggcctaccaggagtaccccaacagccagaactggcccgaggacaccaacttctgcttccagcccgagcaggtggtggaccccatccagaccgaccccttcaagatgtaccacgacgacgacctggccgacctggtgttccccagcagcgccaccgccgacaccagcatcttcgccggccagaacgaccccctgaaggacagctacggcatgagcccctgcaacaccgccgtggtgccccagggctggagcgtggaggccctgaacagcccccacagcgagagcttcgtgagccccgaggccgtggccgagcccccccagcccaccgccgtgcccctggagctggccaaggagatcgagatggccagcgaggagagaccccccgcccaggccctggagatcatgatgggcctgaagaccaccgacatggcccccagcaaggagaccgagatggccctggccaaggacatggccctggccaccaagaccgaggtggccctggccaaggacatggagagccccaccaagctggacgtgaccctggccaaggacatgcagcccagcatggagagcgacatggccctggtgaaggacatggagctgcccaccgagaaggaggtggccctggtgaaggacgtgagatggcccaccgagaccgacgtgagcagcgccaagaacgtggtgctgcccaccgagaccgaggtggcccccgccaaggacgtgaccctgctgaaggagaccgagagagccagccccatcaagatggacctggcccccagcaaggacatgggcccccccaaggagaacaagaaggagaccgagagagccagccccatcaagatggacctggcccccagcaaggacatgggcccccccaaggagaacaagatcgtgcccgccaaggacctggtgctgctgagcgagatcgaggtggcccaggccaacgacatcatcagcagcaccgagatcagcagcgccgagaaggtggccctgagcagcgagaccgaggtggccctggccagagacatgaccctgccccccgagaccaacgtgatcctgaccaaggacaaggccctgcccctggaggccgaggtggcccccgtgaaggacatggcccagctgcccgagaccgagatcgcccccgccaaggacgtggcccccagcaccgtgaaggaggtgggcctgctgaaggacatgagccccctgagcgagaccgagatggccctgggcaaggacgtgacccccccccccgagaccgaggtggtgctgatcaagaacgtgtgcctgccccccgagatggaggtggccctgaccgaggaccaggtgcccgccctgaagaccgaggcccccctggccaaggacggcgtgctgaccctggccaacaacgtgacccccgccaaggacgtgccccccctgagcgagaccgaggccacccccgtgcccatcaaggacatggagatcgcccagacccagaagggcatcagcgaggacagccacctggagagcctgcaggacgtgggccagagcgccgcccccaccttcatgatcagccccgagaccgtgaccggcaccggcaagaagtgcagcctgcccgccgaggaggacagcgtgctggagaagctgggcgagagaaagccctgcaacagccagcccagcgagctgagcagcgagaccagcgccaacttcatgtactgcggcaccccccccacccaggccaagcaggtgtgcagacccagcgacagaagaagcaccagacccaagcccgccagagtgccccccgagctgctgggcggcagccccccctggaagaccctggaccacagactgggccactgcagcctgagcgagagcggctgggtgagcggcagcagcagctgcggcggccccggcaaccagagaaagagcatccacgtggacagcctggagccccagagagacctgggcagagaggcctgggacatcgagagcacccccatcatgatgaagaagaagaagaagaagcccaagcagaagagatacagccagcccagagccggcggccccagcgacgacgacaacgccgacaagcccaagggccaccccttcgccgccgacacccagaagagcggcgtgctgcccagccagcccaccaccatgggcaccgagtacggcctggtgagcggcgagaacctgaagagagagtgcctggtgaacagcagcgccgccagactggtggccgagaacttcgtgagcgagagcctgagaatccccctgtaccccagcgaggaggcccccaagaccgccatcagcagccagagcaagctgagagtggaggaggagagcaagagcaacaagagcgtgctgcagaaccaggacaagaagctgctgaagcagcacgagtacaagccccagcccgccccccacctgaagacccccgtggacaagagccagagcgtgggccccctgaacctgaagggccccctggccgaggtgagcgcctacaacgtggagacccccctggacatcagactgaaggagggctgcagccccttcctggaccaggaggtgatgggcgtggtgagcaagcccaccgccgccaaggagatccccaacctggtgcccaccctgatcgccagcaaccccctggagtgcaacctgaaggagggcaacaacgagagcaagatgaccaagctgcagaacgtgaagctgaaggagttccccgagggcgccgaggaggacaaggagctgaagaaggaggccttccccaacgagagacaggagatcagcatcttcaccagcgagcagctgcagggccaggtgctggtgcaggtgcccggcgtggagaacgagcccttcaagagaatggccggcgacggcaagagcagaaagggcagaggcagcagcggcaagatgagaaccgacagcggcaaggtgaaggccaagagcgagctgcccttcctgctggacagccagaaggacggcagagccgtgctgatccccagcgagcccgtgagcaagaccgagggcatgaccacccaggacaagagcgaggagctgggcctgaacagcagcaagcagcccggcaccaaggccgacctgaccgaggccgtggtgatgggcgagcccaaggagatgacccagcccaaggtggccggcaccatgcaggccctgatccccctggagagcggcagcggcatgacccagaccagcggcgtgagcaccgagaccggcgacgtggtgaaggacatgggcgtgaacaaccagagcaaggagggcagatgcccctggaaggaccacgaggccgccccctggatcagcgagaagcccaagaagagaggcaacgagggcaagagcaagaagttcaagaacaactacagcacccagcccgccagaatggagagaaaggaggagatcctgaacccccccttcgagggcaaggacggcgacaccggcagcatcccccacaagagcaaggagatcggcttcaccttccccaagatgcacgacagcagcttcagccacacccccgacacccccaccgtggaggccgtggacagaaagggcggcaacttccaggtgaacttcgtggagctgggcaccctgggcgagaacaagatcagcaccgtgaaggccagcaccgtgaccgagccccccgccaaggtgaccgacgtgagctgccaggagcagatccagggcgccggcttcgtgcccagcgtggtgagcgaggagaacaagaccgacgccgccaacagatacaccgccgtggccgacaagcccagcaagagaagcaacgacggcaagagcaagaaggtgaagaacagcagccccgagaagcacatcctggagaacaagatcgacgccaccaagatccacgtgcccatggagaccaccggcgaccagggcatcgagggcatggcctacatggacgagaacagaaacatcaccttcacctgccccagaacccccagcgagctgatcaacaagagcagccccctggaggtgctggagagcgccgcctgcgagaagctgcccacccccaccccccaggtggtgaaggagggcgacagcttccccgacaccctggccaagaacggccaggagatcgcccccgcccagatcagcaagagcctgatggtggacaactacaccaaggacggcgtgcccggccaggagagacccaagggccccagcgccgtggtgcccagcaccagcaccggcggcgtggccctgcccatcaccaccgccatcgagaccgtgaacatccacggcgaccacagcctgaagaacaaggccgagctggccgacagcatgaagaacgaggccggcatcgacgagggccacgtgatcggcgagagcgagagcgtgcacagcggcgccagcaagcacagcgtggagaaggtgaccgagctggccaagggccacctgctgcccggcgtgcccgtggaggaccagagcctgcccggcgaggccagagccctggagggctacgccgacagaggcaacttccccgcccaccccgtgaacgaggagaaggagaccaaggagggcagcgtggccgtgcagatccccgacctgctggaggacaaggcccagaagctgagcttctgcgaggaccagaacgcccaggacagaaacagcaagggcagcgacagcctgaacaagaaggtggacctgaccctgctgagccccaagagcgagaacgacaagctgaaggagatcagcctggcctgcaagatcaccgagctggagagcgtgagcctgcccacccccgagatccagagcgacttcctgcacagcaaggtggaggccccccccagcgaggtggccgacaccctggtgatcatgaccgccagcaagggcgtgagactgcccgagcccaaggacaagatcctggagaccccccagaagatgaccgagaagagcgagagcaagacccccggcgagggcaagaaggaggacaagagcagaatggccgagcccatgaagggctacatgagacccaccaagagcagaggcctgacccccctgctgcccaagagcaccatccaggagcaggagagacacaagcagctgaagagcgccggcatcgccagacccgaggagggcagacccgtggtgagcggcaccggcaacgacatcaccaccccccccaacaaggagctgccccccagccccgagaagaagaccaagcccctggccaccacccagcccgccaagaccagcaccagcaaggccaagacccagcccaccagcctgcccaagcagcccgcccccaccaccatcggcggcctgaacaagaagcccatgagcctggccagcggcctggtgcccgccgccccccccaagagacccgccgtggccagcgccagacccagcatcctgcccagcaaggacgtgaagcccaagcccatcgccgacgccaaggcccccgagaagagagccagccccagcaagcccgccagcgcccccgccagcagaagcggcagcaagagcacccagaccgtggccaagaccaccaccgccgccgccgtggccagcaccggccccagcagcagaagccccagcaccctgctgcccaagaagcccaccgccatcaagaccgagggcaagcccgccgaggtgaagaagatgaccgccaagagcgtgcccgccgacctgagcagacccaagagcaccagcaccagcagcatgaagaagaccaccaccctgagcggcaccgcccccgccgccggcgtggtgcccagcagagtgaaggccacccccatgcccagcagacccagcaccacccccttcatcgacaagaagcccaccagcgccaagcccagcagcaccacccccagactgagcagactggccaccaacaccagcgcccccgacctgaagaacgtgagaagcaaggtgggcagcaccgagaacatcaagcaccagcccggcggcggcagagccaaggtggagaagaagaccgaggccgccgccaccaccagaaagcccgagagcaacgccgtgaccaagaccgccggccccatcgccagcgcccagaagcagcccgccggcaaggtgcagatcgtgagcaagaaggtgagctacagccacatccagagcaagtgcggcagcaaggacaacatcaagcacgtgcccggcggcggcaacgtgcagatccagaacaagaaggtggacatcagcaaggtgagcagcaagtgcggcagcaaggccaacatcaagcacaagcccggcggcggcgacgtgaagatcgagagccagaagctgaacttcaaggagaaggcccaggccaaggtgggcagcctggacaacgtgggccacctgcccgccggcggcgccgtgaagaccgagggcggcggcagcgaggcccccctgtgccccggcccccccgccggcgaggagcccgccatcagcgaggccgcccccgaggccggcgcccccaccagcgccagcggcctgaacggccaccccaccctgagcggcggcggcgaccagagagaggcccagaccctggacagccagatccaggagaccagcatctag

SEQ ID NO: 88975 - DNA, 750 bp, synthetic construct
  misc_feature 1..750: note = Description of Artificial Sequence: Synthetic coding sequence
  source 1..750: mol_type = other DNA
atgaccgccaagagcgtgcccgccgacctgagcagacccaagagcaccagcaccagcagcatgaagaagaccaccaccctgagcggcaccgcccccgccgccggcgtggtgcccagcagagtgaaggccacccccatgcccagcagacccagcaccacccccttcatcgacaagaagcccaccagcgccaagcccagcagcaccacccccagactgagcagactggccaccaacaccagcgcccccgacctgaagaacgtgagaagcaaggtgggcagcaccgagaacatcaagcaccagcccggcggcggcagagtgcagatcgtgagcaagaaggtgagctacagccacatccagagcaagtgcggcagcaaggacaacatcaagcacgtgcccggcggcggcaacgtgcagatccagaacaagaaggtggacatcagcaaggtgagcagcaagtgcggcagcaaggccaacatcaagcacaagcccggcggcggcgacgtgaagatcgagagccagaagctgaacttcaaggagaaggcccaggccaaggtgggcagcctggacaacgtgggccacctgcccgccggcggcgccgtgaagatcgagacctacagactgaccttcagagccaacgccagagccagaaccgaccacggcgccgacatcgtgagcagacccccccacttccccggcggccccaacagcggcagcagagtgctgggccccctgagcagagccgtgcactag

SEQ ID NO: 88976 - DNA, 300 bp, synthetic construct
  misc_feature 1..300: note = Description of Artificial Sequence: Synthetic coding sequence
  source 1..300: mol_type = other DNA
atggccgacctgagcctggccgacgccctgaccgagcccagccccgacatcgagggcgagatcaagagagacttcatcgccaccctggaggccgaggccttcgacgacgtggtgggcgagaccgtgggcaagaccgactacatccccctgctggacgtggacgagaagaccggcaacagcgagagcaagaagaagccctgcagcgagaccagccagatcgaggacacccccagcagcaagcccaccctgctggccaacggcggccacggcgtggagggcagcgacaccaccgaggcctag

SEQ ID NO: 88977 - DNA, 2277 bp, synthetic construct
  misc_feature 1..2277: note = Description of Artificial Sequence: Synthetic coding sequence
  source 1..2277: mol_type = other DNA
atggccgagcccagacaggagttcgaggtgatggaggaccacgccggcacctacggcctgggcgacagaaaggaccagggcggctacaccatgcaccaggaccaggagggcgacaccgacgccggcctgaaggagagccccctgcagacccccaccgaggacggcagcgaggagcccggcagcgagaccagcgacgccaagagcacccccaccgccgaggacgtgaccgcccccctggtggacgagggcgcccccggcaagcaggccgccgcccagccccacaccgagatccccgagggcaccaccgccgaggaggccggcatcggcgacacccccagcctggaggacgaggccgccggccacgtgacccaggagcccgagagcggcaaggtggtgcaggagggcttcctgagagagcccggcccccccggcctgagccaccagctgatgagcggcatgcccggcgcccccctgctgcccgagggccccagagaggccaccagacagcccagcggcaccggccccgaggacaccgagggcggcagacacgcccccgagctgctgaagcaccagctgctgggcgacctgcaccaggagggcccccccctgaagggcgccggcggcaaggagagacccggcagcaaggaggaggtggacgaggacagagacgtggacgagagcagcccccaggacagcccccccagcaaggccagccccgcccaggacggcagacccccccagaccgccgccagagaggccaccagcatccccggcttccccgccgagggcgccatccccctgcccgtggacttcctgagcaaggtgagcaccgagatccccgccagcgagcccgacggccccagcgtgggcagagccaagggccaggacgcccccctggagttcaccttccacgtggagatcacccccaacgtgcagaaggagcaggcccacagcgaggagcacctgggcagagccgccttccccggcgcccccggcgagggccccgaggccagaggccccagcctgggcgaggacaccaaggaggccgacctgcccgagcccagcgagaagcagcccgccgccgcccccagaggcaagcccgtgagcagagtgccccagctgaaggccagaatggtgagcaagagcaaggacggcaccggcagcgacgacaagaaggccaagaccagcaccagaagcagcgccaagaccctgaagaacagaccctgcctgagccccaagcaccccacccccggcagcagcgaccccctgatccagcccagcagccccgccgtgtgccccgagccccccagcagccccaagtacgtgagcagcgtgaccagcagaaccggcagcagcggcgccaaggagatgaagctgaagggcgccgacggcaagaccaagatcgccacccccagaggcgccgccccccccggccagaagggccaggccaacgccaccagaatccccgccaagaccccccccgcccccaagaccccccccagcagcggcgagccccccaagagcggcgacagaagcggctacagcagccccggcagccccggcacccccggcagcagaagcagaacccccagcctgcccaccccccccaccagagagcccaagaaggtggccgtggtgagaaccccccccaagagccccagcagcgccaagagcagactgcagaccgcccccgtgcccatgcccgacctgaagaacgtgaagagcaagatcggcagcaccgagaacctgaagcaccagcccggcggcggcaaggtgcagatcatcaacaagaagctggacctgagcaacgtgcagagcaagtgcggcagcaaggacaacatcaagcacgtgcccggcggcggcagcgtgcagatcgtgtacaagcccgtggacctgagcaaggtgaccagcaagtgcggcagcctgggcaacatccaccacaagcccggcggcggccaggtggaggtgaagagcgagaagctggacttcaaggacagagtgcagagcaagatcggcagcctggacaacatcacccacgtgcccggcggcggcaacaagaagatcgagacccacaagctgaccttcagagagaacgccaaggccaagaccgaccacggcgccgagatcgtgtacaagagccccgtggtgagcggcgacaccagccccagacacctgagcaacgtgagcagcaccggcagcatcgacatggtggacagcccccagctggccaccctggccgacgaggtgagcgccagcctggccaagcagggcctgtag

SEQ ID NO: 88978 - DNA, 1152 bp, synthetic construct
  misc_feature 1..1152: note = Description of Artificial Sequence: Synthetic coding sequence
  source 1..1152: mol_type = other DNA
atggccgagcccagacaggagttcgaggtgatggaggaccacgccggcacctacggcctgggcgacagaaaggaccagggcggctacaccatgcaccaggaccaggagggcgacaccgacgccggcctgaaggccgaggaggccggcatcggcgacacccccagcctggaggacgaggccgccggccacgtgacccaggccagaatggtgagcaagagcaaggacggcaccggcagcgacgacaagaaggccaagggcgccgacggcaagaccaagatcgccacccccagaggcgccgccccccccggccagaagggccaggccaacgccaccagaatccccgccaagaccccccccgcccccaagaccccccccagcagcggcgagccccccaagagcggcgacagaagcggctacagcagccccggcagccccggcacccccggcagcagaagcagaacccccagcctgcccaccccccccaccagagagcccaagaaggtggccgtggtgagaaccccccccaagagccccagcagcgccaagagcagactgcagaccgcccccgtgcccatgcccgacctgaagaacgtgaagagcaagatcggcagcaccgagaacctgaagcaccagcccggcggcggcaaggtgcagatcatcaacaagaagctggacctgagcaacgtgcagagcaagtgcggcagcaaggacaacatcaagcacgtgcccggcggcggcagcgtgcagatcgtgtacaagcccgtggacctgagcaaggtgaccagcaagtgcggcagcctgggcaacatccaccacaagcccggcggcggccaggtggaggtgaagagcgagaagctggacttcaaggacagagtgcagagcaagatcggcagcctggacaacatcacccacgtgcccggcggcggcaacaagaagatcgagacccacaagctgaccttcagagagaacgccaaggccaagaccgaccacggcgccgagatcgtgtacaagagccccgtggtgagcggcgacaccagccccagacacctgagcaacgtgagcagcaccggcagcatcgacatggtggacagcccccagctggccaccctggccgacgaggtgagcgccagcctggccaagcagggcctgtag

SEQ ID NO: 88979 - DNA, 1239 bp, synthetic construct
  misc_feature 1..1239: note = Description of Artificial Sequence: Synthetic coding sequence
  source 1..1239: mol_type = other DNA
atggccgagcccagacaggagttcgaggtgatggaggaccacgccggcacctacggcctgggcgacagaaaggaccagggcggctacaccatgcaccaggaccaggagggcgacaccgacgccggcctgaaggagagccccctgcagacccccaccgaggacggcagcgaggagcccggcagcgagaccagcgacgccaagagcacccccaccgccgaggccgaggaggccggcatcggcgacacccccagcctggaggacgaggccgccggccacgtgacccaggccagaatggtgagcaagagcaaggacggcaccggcagcgacgacaagaaggccaagggcgccgacggcaagaccaagatcgccacccccagaggcgccgccccccccggccagaagggccaggccaacgccaccagaatccccgccaagaccccccccgcccccaagaccccccccagcagcggcgagccccccaagagcggcgacagaagcggctacagcagccccggcagccccggcacccccggcagcagaagcagaacccccagcctgcccaccccccccaccagagagcccaagaaggtggccgtggtgagaaccccccccaagagccccagcagcgccaagagcagactgcagaccgcccccgtgcccatgcccgacctgaagaacgtgaagagcaagatcggcagcaccgagaacctgaagcaccagcccggcggcggcaaggtgcagatcatcaacaagaagctggacctgagcaacgtgcagagcaagtgcggcagcaaggacaacatcaagcacgtgcccggcggcggcagcgtgcagatcgtgtacaagcccgtggacctgagcaaggtgaccagcaagtgcggcagcctgggcaacatccaccacaagcccggcggcggccaggtggaggtgaagagcgagaagctggacttcaaggacagagtgcagagcaagatcggcagcctggacaacatcacccacgtgcccggcggcggcaacaagaagatcgagacccacaagctgaccttcagagagaacgccaaggccaagaccgaccacggcgccgagatcgtgtacaagagccccgtggtgagcggcgacaccagccccagacacctgagcaacgtgagcagcaccggcagcatcgacatggtggacagcccccagctggccaccctggccgacgaggtgagcgccagcctggccaagcagggcctgtag

SEQ ID NO: 88980 - DNA, 2331 bp, synthetic construct
  misc_feature 1..2331: note = Description of Artificial Sequence: Synthetic coding sequence
  source 1..2331: mol_type = other DNA
atggccgagcccagacaggagttcgaggtgatggaggaccacgccggcacctacggcctgggcgacagaaaggaccagggcggctacaccatgcaccaggaccaggagggcgacaccgacgccggcctgaaggagagccccctgcagacccccaccgaggacggcagcgaggagcccggcagcgagaccagcgacgccaagagcacccccaccgccgaggacgtgaccgcccccctggtggacgagggcgcccccggcaagcaggccgccgcccagccccacaccgagatccccgagggcaccaccgccgaggaggccggcatcggcgacacccccagcctggaggacgaggccgccggccacgtgacccaggagcccgagagcggcaaggtggtgcaggagggcttcctgagagagcccggcccccccggcctgagccaccagctgatgagcggcatgcccggcgcccccctgctgcccgagggccccagagaggccaccagacagcccagcggcaccggccccgaggacaccgagggcggcagacacgcccccgagctgctgaagcaccagctgctgggcgacctgcaccaggagggcccccccctgaagggcgccggcggcaaggagagacccggcagcaaggaggaggtggacgaggacagagacgtggacgagagcagcccccaggacagcccccccagcaaggccagccccgcccaggacggcagacccccccagaccgccgccagagaggccaccagcatccccggcttccccgccgagggcgccatccccctgcccgtggacttcctgagcaaggtgagcaccgagatccccgccagcgagcccgacggccccagcgtgggcagagccaagggccaggacgcccccctggagttcaccttccacgtggagatcacccccaacgtgcagaaggagcaggcccacagcgaggagcacctgggcagagccgccttccccggcgcccccggcgagggccccgaggccagaggccccagcctgggcgaggacaccaaggaggccgacctgcccgagcccagcgagaagcagcccgccgccgcccccagaggcaagcccgtgagcagagtgccccagctgaaggccagaatggtgagcaagagcaaggacggcaccggcagcgacgacaagaaggccaagaccagcaccagaagcagcgccaagaccctgaagaacagaccctgcctgagccccaagcaccccacccccggcagcagcgaccccctgatccagcccagcagccccgccgtgtgccccgagccccccagcagccccaagtacgtgagcagcgtgaccagcagaaccggcagcagcggcgccaaggagatgaagctgaagggcgccgacggcaagaccaagatcgccacccccagaggcgccgccccccccggccagaagggccaggccaacgccaccagaatccccgccaagaccccccccgcccccaagaccccccccagcagcgccaccaagcaggtgcagagaagacccccccccgccggccccagaagcgagagaggcgagccccccaagagcggcgacagaagcggctacagcagccccggcagccccggcacccccggcagcagaagcagaacccccagcctgcccaccccccccaccagagagcccaagaaggtggccgtggtgagaaccccccccaagagccccagcagcgccaagagcagactgcagaccgcccccgtgcccatgcccgacctgaagaacgtgaagagcaagatcggcagcaccgagaacctgaagcaccagcccggcggcggcaaggtgcagatcatcaacaagaagctggacctgagcaacgtgcagagcaagtgcggcagcaaggacaacatcaagcacgtgcccggcggcggcagcgtgcagatcgtgtacaagcccgtggacctgagcaaggtgaccagcaagtgcggcagcctgggcaacatccaccacaagcccggcggcggccaggtggaggtgaagagcgagaagctggacttcaaggacagagtgcagagcaagatcggcagcctggacaacatcacccacgtgcccggcggcggcaacaagaagatcgagacccacaagctgaccttcagagagaacgccaaggccaagaccgaccacggcgccgagatcgtgtacaagagccccgtggtgagcggcgacaccagccccagacacctgagcaacgtgagcagcaccggcagcatcgacatggtggacagcccccagctggccaccctggccgacgaggtgagcgccagcctggccaagcagggcctgtag

SEQ ID NO: 88981 - DNA, 951 bp, synthetic construct
  misc_feature 1..951: note = Description of Artificial Sequence: Synthetic coding sequence
  source 1..951: mol_type = other DNA
atgctgagagccctgcagcagagaaagagagaggccggcatcggcgacacccccagcctggaggacgaggccgccggccacgtgacccaggccagaatggtgagcaagagcaaggacggcaccggcagcgacgacaagaaggccaagggcgccgacggcaagaccaagatcgccacccccagaggcgccgccccccccggccagaagggccaggccaacgccaccagaatccccgccaagaccccccccgcccccaagaccccccccagcagcggcgagccccccaagagcggcgacagaagcggctacagcagccccggcagccccggcacccccggcagcagaagcagaacccccagcctgcccaccccccccaccagagagcccaagaaggtggccgtggtgagaaccccccccaagagccccagcagcgccaagagcagactgcagaccgcccccgtgcccatgcccgacctgaagaacgtgaagagcaagatcggcagcaccgagaacctgaagcaccagcccggcggcggcaaggtgcagatcgtgtacaagcccgtggacctgagcaaggtgaccagcaagtgcggcagcctgggcaacatccaccacaagcccggcggcggccaggtggaggtgaagagcgagaagctggacttcaaggacagagtgcagagcaagatcggcagcctggacaacatcacccacgtgcccggcggcggcaacaagaagatcgagacccacaagctgaccttcagagagaacgccaaggccaagaccgaccacggcgccgagatcgtgtacaagagccccgtggtgagcggcgacaccagccccagacacctgagcaacgtgagcagcaccggcagcatcgacatggtggacagcccccagctggccaccctggccgacgaggtgagcgccagcctggccaagcagggcctgtag

SEQ ID NO: 88982 - DNA, 1326 bp, synthetic construct
  misc_feature 1..1326: note = Description of Artificial Sequence: Synthetic coding sequence
  source 1..1326: mol_type = other DNA
atggccgagcccagacaggagttcgaggtgatggaggaccacgccggcacctacggcctgggcgacagaaaggaccagggcggctacaccatgcaccaggaccaggagggcgacaccgacgccggcctgaaggagagccccctgcagacccccaccgaggacggcagcgaggagcccggcagcgagaccagcgacgccaagagcacccccaccgccgaggacgtgaccgcccccctggtggacgagggcgcccccggcaagcaggccgccgcccagccccacaccgagatccccgagggcaccaccgccgaggaggccggcatcggcgacacccccagcctggaggacgaggccgccggccacgtgacccaggccagaatggtgagcaagagcaaggacggcaccggcagcgacgacaagaaggccaagggcgccgacggcaagaccaagatcgccacccccagaggcgccgccccccccggccagaagggccaggccaacgccaccagaatccccgccaagaccccccccgcccccaagaccccccccagcagcggcgagccccccaagagcggcgacagaagcggctacagcagccccggcagccccggcacccccggcagcagaagcagaacccccagcctgcccaccccccccaccagagagcccaagaaggtggccgtggtgagaaccccccccaagagccccagcagcgccaagagcagactgcagaccgcccccgtgcccatgcccgacctgaagaacgtgaagagcaagatcggcagcaccgagaacctgaagcaccagcccggcggcggcaaggtgcagatcatcaacaagaagctggacctgagcaacgtgcagagcaagtgcggcagcaaggacaacatcaagcacgtgcccggcggcggcagcgtgcagatcgtgtacaagcccgtggacctgagcaaggtgaccagcaagtgcggcagcctgggcaacatccaccacaagcccggcggcggccaggtggaggtgaagagcgagaagctggacttcaaggacagagtgcagagcaagatcggcagcctggacaacatcacccacgtgcccggcggcggcaacaagaagatcgagacccacaagctgaccttcagagagaacgccaaggccaagaccgaccacggcgccgagatcgtgtacaagagccccgtggtgagcggcgacaccagccccagacacctgagcaacgtgagcagcaccggcagcatcgacatggtggacagcccccagctggccaccctggccgacgaggtgagcgccagcctggccaagcagggcctgtag

SEQ ID NO: 88983 - DNA, 1080 bp, synthetic construct
  misc_feature 1..1080: note = Description of Artificial Sequence: Synthetic coding sequence
  source 1..1080: mol_type = other DNA
atggccgagcccagacaggagttcgaggtgatggaggaccacgccggcacctacggcctgggcgacagaaaggaccagggcggctacaccatgcaccaggaccaggagggcgacaccgacgccggcctgaaggagagccccctgcagacccccaccgaggacggcagcgaggagcccggcagcgagaccagcgacgccaagagcacccccaccgccgaggccagaatggtgagcaagagcaaggacggcaccggcagcgacgacaagaaggccaagggcgccgacggcaagaccaagatcgccacccccagaggcgccgccccccccggccagaagggccaggccaacgccaccagaatccccgccaagaccccccccgcccccaagaccccccccagcagcggcgagccccccaagagcggcgacagaagcggctacagcagccccggcagccccggcacccccggcagcagaagcagaacccccagcctgcccaccccccccaccagagagcccaagaaggtggccgtggtgagaaccccccccaagagccccagcagcgccaagagcagactgcagaccgcccccgtgcccatgcccgacctgaagaacgtgaagagcaagatcggcagcaccgagaacctgaagcaccagcccggcggcggcaaggtgcagatcgtgtacaagcccgtggacctgagcaaggtgaccagcaagtgcggcagcctgggcaacatccaccacaagcccggcggcggccaggtggaggtgaagagcgagaagctggacttcaaggacagagtgcagagcaagatcggcagcctggacaacatcacccacgtgcccggcggcggcaacaagaagatcgagacccacaagctgaccttcagagagaacgccaaggccaagaccgaccacggcgccgagatcgtgtacaagagccccgtggtgagcggcgacaccagccccagacacctgagcaacgtgagcagcaccggcagcatcgacatggtggacagcccccagctggccaccctggccgacgaggtgagcgccagcctggccaagcagggcctgtag

SEQ ID NO: 88984 - DNA, 2331 bp, synthetic construct; identical to SEQ ID NO: 88980
  misc_feature 1..2331: note = Description of Artificial Sequence: Synthetic coding sequence
  source 1..2331: mol_type = other DNA

SEQ ID NO: 88985 - DNA, 1239 bp, synthetic construct; identical to SEQ ID NO: 88979
  misc_feature 1..1239: note = Description of Artificial Sequence: Synthetic coding sequence
  source 1..1239: mol_type = other DNA

SEQ ID NO: 88986 - DNA, 795 bp, synthetic construct
  misc_feature 1..795: note = Description of Artificial Sequence: Synthetic coding sequence
  source 1..795: mol_type = other DNA
accagagaggccgagggcgccgacggcaagaccaagatcgccacccccaagggccaggccaacgccaccagaatccccgccaagaccccccccgcccccaagaccccccccagcagcggcgagccccccaagagcggcgacagaagcggctacagcagccccggcagccccggcacccccggcagcagaagcagaacccccagcctgcccaccccccccaccagagagcccaagaaggtggccgtggtgagaaccccccccaagagccccagcagcgccaagagcagactgcagaccgcccccgtgcccatgcccgacctgaagaacgtgaagagcaagatcggcagcaccgagaacctgaagcaccagcccggcggcggcaaggtgcagatcgtgtacaagcccgtggacctgagcaaggtgaccagcaagtgcggcagcctgggcaacatccaccacaagcccggcggcggccaggtggaggtgaagagcgagaagctggacttcaaggacagagtgcagagcaagatcggcagcctggacaacatcacccacgtgcccggcggcggcaacaagaagatcgagacccacaagctgaccttcagagagaacgccaaggccaagaccgaccacggcgccgagatcgtgtacaagagccccgtggtgagcggcgacaccagccccagacacctgagcaacgtgagcagcaccggcagcatcgacatggtggacagcccccagctggccaccctggccgacgaggtgagcgccagcctggccaagcagggcctgtag

SEQ ID NO: 88987 - DNA, 1059 bp, synthetic construct
  misc_feature 1..1059: note = Description of Artificial Sequence: Synthetic coding sequence
  source 1..1059: mol_type = other DNA
atggccgagcccagacaggagttcgaggtgatggaggaccacgccggcacctacggcctgggcgacagaaaggaccagggcggctacaccatgcaccaggaccaggagggcgacaccgacgccggcctgaaggccgaggaggccggcatcggcgacacccccagcctggaggacgaggccgccggccacgtgacccaggccagaatggtgagcaagagcaaggacggcaccggcagcgacgacaagaaggccaagggcgccgacggcaagaccaagatcgccacccccagaggcgccgccccccccggccagaagggccaggccaacgccaccagaatccccgccaagaccccccccgcccccaagaccccccccagcagcggcgagccccccaagagcggcgacagaagcggctacagcagccccggcagccccggcacccccggcagcagaagcagaacccccagcctgcccaccccccccaccagagagcccaagaaggtggccgtggtgagaaccccccccaagagccccagcagcgccaagagcagactgcagaccgcccccgtgcccatgcccgacctgaagaacgtgaagagcaagatcggcagcaccgagaacctgaagcaccagcccggcggcggcaaggtgcagatcgtgtacaagcccgtggacctgagcaaggtgaccagcaagtgcggcagcctgggcaacatccaccacaagcccggcggcggccaggtggaggtgaagagcgagaagctggacttcaaggacagagtgcagagcaagatcggcagcctggacaacatcacccacgtgcccggcggcggcaacaagaagatcgagacccacaagctgaccttcagagagaacgccaaggccaagaccgaccacggcgccgagatcgtgtacaagagccccgtggtgagcggcgacaccagccccagacacctgagcaacgtgagcagcaccggcagcatcgacatggtggacagcccccagctggccaccctggccgacgaggtgagcgccagcctggccaagcagggcctgtag

SEQ ID NO: 88988 - DNA, 1233 bp, synthetic construct
  misc_feature 1..1233: note = Description of Artificial Sequence: Synthetic coding sequence
  source 1..1233: mol_type = other DNA
atggccgagcccagacaggagttcgaggtgatggaggaccacgccggcacctacggcctgggcgacagaaaggaccagggcggctacaccatgcaccaggaccaggagggcgacaccgacgccggcctgaaggagagccccctgcagacccccaccgaggacggcagcgaggagcccggcagcgagaccagcgacgccaagagcacccccaccgccgaggacgtgaccgcccccctggtggacgagggcgcccccggcaagcaggccgccgcccagccccacaccgagatccccgagggcaccaccgccgaggaggccggcatcggcgacacccccagcctggaggacgaggccgccggccacgtgacccaggccagaatggtgagcaagagcaaggacggcaccggcagcgacgacaagaaggccaagggcgccgacggcaagaccaagatcgccacccccagaggcgccgccccccccggccagaagggccaggccaacgccaccagaatccccgccaagaccccccccgcccccaagaccccccccagcagcggcgagccccccaagagcggcgacagaagcggctacagcagccccggcagccccggcacccccggcagcagaagcagaacccccagcctgcccaccccccccaccagagagcccaagaaggtggccgtggtgagaaccccccccaagagccccagcagcgccaagagcagactgcagaccgcccccgtgcccatgcccgacctgaagaacgtgaagagcaagatcggcagcaccgagaacctgaagcaccagcccggcggcggcaaggtgcagatcgtgtacaagcccgtggacctgagcaaggtgaccagcaagtgcggcagcctgggcaacatccaccacaagcccggcggcggccaggtggaggtgaagagcgagaagctggacttcaaggacagagtgcagagcaagatcggcagcctggacaacatcacccacgtgcccggcggcggcaacaagaagatcgagacccacaagctgaccttcagagagaacgccaaggccaagaccgaccacggcgccgagatcgtgtacaagagccccgtggtgagcggcgacaccagccccagacacctgagcaacgtgagcagcaccggcagcatcgacatggtggacagcccccagctggccaccctggccgacgaggtgagcgccagcctggccaagcagggcctgtag

SEQ ID NO: 88989 - DNA, 807 bp, synthetic construct
  misc_feature 1..807: note = Description of Artificial Sequence: Synthetic coding sequence
  source 1..807: mol_type = other DNA
atggccgtgaacgtgtacagcaccagcgtgaccagcgacaacctgagcagacacgacatgctggcctggatcaacgagagcctgcagctgaacctgaccaagatcgagcagctgtgcagcggcgccgcctactgccagttcatggacatgctgttccccggcagcatcgccctgaagaaggtgaagttccaggccaagctggagcacgagtacatccagaacttcaagatcctgcaggccggcttcaagagaatgggcgtggacaagatcatccccgtggacaagctggtgaagggcaagttccaggacaacttcgagttcgtgcagtggttcaagaagttcttcgacgccaactacgacggcaaggactacgaccccgtggccgccagacagggccaggagaccgccgtggcccccagcctggtggcccccgccctgaacaagcccaagaagcccctgaccagcagcagcgccgccccccagagacccatcagcacccagagaaccgccgccgcccccaaggccggccccggcgtggtgagaaagaaccccggcgtgggcaacggcgacgacgaggccgccgagctgatgcagcaggtgaacgtgctgaagctgaccgtggaggacctggagaaggagagagacttctacttcggcaagctgagaaacatcgagctgatctgccaggagaacgagggcgagaacgaccccgtgctgcagagaatcgtggacatcctgtacgccaccgacgagggcttcgtgatccccgacgagggcggcccccaggaggagcaggaggagtactag

SEQ ID NO: 88990 - DNA, 984 bp, synthetic construct
  misc_feature 1..984: note = Description of Artificial Sequence: Synthetic coding sequence
  source 1..984: mol_type = other DNA
atgcccggccccacccagaccctgagccccaacggcgagaacaacaacgacatcatccaggacaacaacggcaccatcatccccttcagaaagcacaccgtgagaggcgagagaagctacagctggggcatggccgtgaacgtgtacagcaccagcatcacccaggagaccatgagcagacacgacatcatcgcctgggtgaacgacatcgtgagcctgaactacaccaaggtggagcagctgtgcagcggcgccgcctactgccagttcatggacatgctgttccccggctgcatcagcctgaagaaggtgaagttccaggccaagctggagcacgagtacatccacaacttcaagctgctgcaggccagcttcaagagaatgaacgtggacaaggtgatccccgtggagaagctggtgaagggcagattccaggacaacctggacttcatccagtggttcaagaagttctacgacgccaactacgacggcaaggagtacgaccccgtggaggccagacagggccaggacgccatccccccccccgaccccggcgagcagatcttcaacctgcccaagaagagccaccacgccaacagccccaccgccggcgccgccaagagcagccccgccgccaagcccggcagcacccccagcagacccagcagcgccaagagagccagcagcagcggcagcgccagcaagagcgacaaggacctggagacccaggtgatccagctgaacgagcaggtgcacagcctgaagctggccctggagggcgtggagaaggagagagacttctacttcggcaagctgagagagatcgagctgctgtgccaggagcacggccaggagaacgacgacctggtgcagagactgatggacatcctgtacgccagcgaggagcacgagggccacaccgaggagcccgaggccgaggagcaggcccacgagcagcagcccccccagcaggaggagtactag

SEQ ID NO: 88991 - DNA, 855 bp, synthetic construct
  misc_feature 1..855: note = Description of Artificial Sequence: Synthetic coding sequence
  source 1..855: mol_type = other DNA
atggccgtgaacgtgtacagcaccagcatcacccaggagaccatgagcagacacgacatcatcgcctgggtgaacgacatcgtgagcctgaactacaccaaggtggagcagctgtgcagcggcgccgcctactgccagttcatggacatgctgttccccggctgcatcagcctgaagaaggtgaagttccaggccaagctggagcacgagtacatccacaacttcaagctgctgcaggccagcttcaagagaatgaacgtggacaaggtgatccccgtggagaagctggtgaagggcagattccaggacaacctggacttcatccagtggttcaagaagttctacgacgccaactacgacggcaaggagtacgaccccgtggaggccagacagggccaggacgccatccccccccccgaccccggcgagcagatcttcaacctgcccaagaagagccaccacgccaacagccccaccgccggcgccgccaagagcagccccgccgccaagcccggcagcacccccagcagacccagcagcgccaagagagccagcagcagcggcagcgccagcaagagcgacaaggacctggagacccaggtgatccagctgaacgagcaggtgcacagcctgaagctggccctggagggcgtggagaaggagagagacttctacttcggcaagctgagagagatcgagctgctgtgccaggagcacggccaggagaacgacgacctggtgcagagactgatggacatcctgtacgccagcgaggagcacgagggccacaccgaggagcccgaggccgaggagcaggcccacgagcagcagcccccccagcaggaggagtactag

SEQ ID NO: 88992 - DNA, 948 bp, synthetic construct
  misc_feature 1..948: note = Description of Artificial Sequence: Synthetic coding sequence
  source 1..948: mol_type = other DNA
atgaagcagaacagagaccagaagtgccccgtgagccagagaaacagcagcttccagcagcccggcagaaagcccggctgcagcagctggggcatggccgtgaacgtgtacagcaccagcatcacccaggagaccatgagcagacacgacatcatcgcctgggtgaacgacatcgtgagcctgaactacaccaaggtggagcagctgtgcagcggcgccgcctactgccagttcatggacatgctgttccccggctgcatcagcctgaagaaggtgaagttccaggccaagctggagcacgagtacatccacaacttcaagctgctgcaggccagcttcaagagaatgaacgtggacaaggtgatccccgtggagaagctggtgaagggcagattccaggacaacctggacttcatccagtggttcaagaagttctacgacgccaactacgacggcaaggagtacgaccccgtggaggccagacagggccaggacgccatccccccccccgaccccggcgagcagatcttcaacctgcccaagaagagccaccacgccaacagccccaccgccggcgccgccaagagcagccccgccgccaagcccggcagcacccccagcagacccagcagcgccaagagagccagcagcagcggcagcgccagcaagagcgacaaggacctggagacccaggtgatccagctgaacgagcaggtgcacagcctgaagctggccctggagggcgtggagaaggagagagacttctacttcggcaagctgagagagatcgagctgctgtgccaggagcacggccaggagaacgacgacctggtgcagagactgatggacatcctgtacgccagcgaggagcacgagggccacaccgaggagcccgaggccgaggagcaggcccacgagcagcagcccccccagcaggaggagtactag

SEQ ID NO: 88993 - DNA, 825 bp, synthetic construct
  misc_feature 1..825: note = Description of Artificial Sequence: Synthetic coding sequence
  source 1..825: mol_type = other DNA
atggccagaaccaccaccaccagcagcagaatcatcaccggccccagcttcctgagcggcagcacccagtgcgccggcagcgtgcccaccggcgccgcctactgccagttcatggacatgctgttccccggctgcatcagcctgaagaaggtgaagttccaggccaagctggagcacgagtacatccacaacttcaagctgctgcaggccagcttcaagagaatgaacgtggacaaggtgatccccgtggagaagctggtgaagggcagattccaggacaacctggacttcatccagtggttcaagaagttctacgacgccaactacgacggcaaggagtacgaccccgtggaggccagacagggccaggacgccatccccccccccgaccccggcgagcagatcttcaacctgcccaagaagagccaccacgccaacagccccaccgccggcgccgccaagagcagccccgccgccaagcccggcagcacccccagcagacccagcagcgccaagagagccagcagcagcggcagcgccagcaagagcgacaaggacctggagacccaggtgatccagctgaacgagcaggtgcacagcctgaagctggccctggagggcgtggagaaggagagagacttctacttcggcaagctgagagagatcgagctgctgtgccaggagcacggccaggagaacgacgacctggtgcagagactgatggacatcctgtacgccagcgaggagcacgagggccacaccgaggagcccgaggccgaggagcaggcccacgagcagcagcccccccagcaggaggagtactag

SEQ ID NO: 88994 - DNA, 1005 bp, synthetic construct; identical to SEQ ID NO: 87863
  misc_feature 1..1005: note = Description of Artificial Sequence: Synthetic coding sequence
  source 1..1005: mol_type = other DNA

SEQ ID NO: 88995 - DNA, 801 bp, synthetic construct
  misc_feature 1..801: note = Description of Artificial Sequence: Synthetic coding sequence
  source 1..801: mol_type = other DNA
atggccgtgaacgtgtacagcaccagcgtgaccagcgagaacctgagcagacacgacatgctggcctgggtgaacgacagcctgcacctgaactacaccaagatcgagcagctgtgcagcggcgccgcctactgccagttcatggacatgctgttccccggctgcgtgcacctgagaaaggtgaagttccaggccaagctggagcacgagtacatccacaacttcaaggtgctgcaggccgccttcaagaagatgggcgtggacaagatcatccccgtggagaagctggtgaagggcaagttccaggacaacttcgagttcatccagtggttcaagaagttcttcgacgccaactacgacggcaaggactacaaccccctgctggccagacagggccaggacgtggcccccccccccaaccccgtgccccagagaaccagccccaccggccccaagaacatgcagaccagcggcagactgagcaacgtggcccccccctgcatcctgagaaagaacccccccagcgccagaaacggcggccacgagaccgacgcccagatcctggagctgaaccagcagctggtggacctgaagctgaccgtggacggcctggagaaggagagagacttctacttcagcaagctgagagacatcgagctgatctgccaggagcacgagagcgagaacagccccgtgatcagcggcatcatcggcatcctgtacgccaccgaggagggcttcgccccccccgaggacgacgagatcgaggagcaccagcaggaggaccaggacgagtactag

SEQ ID NO: 88996 - DNA, 801 bp, synthetic construct; identical to SEQ ID NO: 88995
  misc_feature 1..801: note = Description of Artificial Sequence: Synthetic coding sequence
  source 1..801: mol_type = other DNA

SEQ ID NO: 88997 - DNA, 657 bp, synthetic construct
  misc_feature 1..657: note = Description of Artificial Sequence: Synthetic coding sequence
  source 1..657: mol_type = other DNA
atggccgtgaacgtgtacagcaccagcgtgaccagcgagaacctgagcagacacgacatgctggcctgggtgaacgacagcctgcacctgaactacaccaagatcgagcagctgtgcagcggcgccgcctactgccagttcatggacatgctgttccccggctgcgtgcacctgagaaaggtgaagttccaggccaagctggagcacgagtacatccacaacttcaaggtgctgcaggccgccttcaagaagatgggcgtggacaagatcatccccgtggagaagctggtgaagggcaagttccaggacaacttcgagttcatccagtggttcaagaagttcttcgacgccaactacgacggcaaggactacaaccccctgctggccagacagggccaggacgtggcccccccccccaaccccggcgaccagatcttcaacaagagcaagaagctgatcggcaccgccgtgccccagagaaccagccccaccggccccaagaacatgcagaccagcggcagactgagcaacgtggcccccccctgcatcctgagaaagaacccccccagcgccagaaacggcggccacgagaccgacgcccagatcctggagctgaaccagcagctggtggacctgaagctgaccgtggacggctag

SEQ ID NO: 88998 - DNA, 2004 bp, synthetic construct
  misc_feature 1..2004: note = Description of Artificial Sequence: Synthetic coding sequence
  source 1..2004: mol_type = other DNA
atggagaccctggagagcgagctgacctgccccatctgcctggagctgttcgaggaccccctgctgctgccctgcgcccacagcctgtgcttcaactgcgcccacagaatcctggtgagccactgcgccaccaacgagagcgtggagagcatcaccgccttccagtgccccacctgcagacacgtgatcaccctgagccagagaggcctggacggcctgaagagaaacgtgaccctgcagaacatcatcgacagattccagaaggccagcgtgagcggccccaacagccccagcgagaccagaagagagagagccttcgacgccaacaccatgaccagcgccgagaaggtgctgtgccagttctgcgaccaggaccccgcccaggacgccgtgaagacctgcgtgacctgcgaggtgagctactgcgacgagtgcctgaaggccacccaccccaacaagaagcccttcaccggccacagactgatcgagcccatccccgacagccacatcagaggcctgatgtgcctggagcacgaggacgagaaggtgaacatgtactgcgtgaccgacgaccagctgatctgcgccctgtgcaagctggtgggcagacacagagaccaccaggtggccgccctgagcgagagatacgacaagctgaagcagaacctggagagcaacctgaccaacctgatcaagagaaacaccgagctggagaccctgctggccaagctgatccagacctgccagcacgtggaggtgaacgccagcagacaggaggccaagctgaccgaggagtgcgacctgctgatcgagatcatccagcagagaagacagatcatcggcaccaagatcaaggagggcaaggtgatgagactgagaaagctggcccagcagatcgccaactgcaagcagtgcatcgagagaagcgccagcctgatcagccaggccgagcacagcctgaaggagaacgaccacgccagattcctgcagaccgccaagaacatcaccgagagagtgagcatggccaccgccagcagccaggtgctgatccccgagatcaacctgaacgacaccttcgacaccttcgccctggacttcagcagagagaagaagctgctggagtgcctggactacctgaccgcccccaacccccccaccatcagagaggagctgtgcaccgccagctacgacaccatcaccgtgcactggaccagcgacgacgagttcagcgtggtgagctacgagctgcagtacaccatcttcaccggccaggccaacgtggtgagcctgtgcaacagcgccgacagctggatgatcgtgcccaacatcaagcagaaccactacaccgtgcacggcctgcagagcggcaccaagtacatcttcatggtgaaggccatcaaccaggccggcagcagaagcagcgagcccggcaagctgaagaccaacagccagcccttcaagctggaccccaagagcgcccacagaaagctgaaggtgagccacgacaacctgaccgtggagagagacgagagcagcagcaagaagagccacacccccgagagattcaccagccagggcagctacggcgtggccggcaacgtgttcatcgacagcggcagacactactgggaggtggtgatcagcggcagcacctggtacgccatcggcctggcctacaagagcgcccccaagcacgagtggatcggcaagaacagcgccagctgggccctgtgcagatgcaacaacaactgggtggtgagacacaacagcaaggagatccccatcgagcccgccccccacctgagaagagtgggcatcctgctggactacgacaacggcagcatcgccttctacgacgccctgaacagcatccacctgtacaccttcgacgtggccttcgcccagcccgtgtgccccaccttcaccgtgtggaacaagtgcctgaccatcatcaccggcctgcccatccccgaccacctggactgcaccgagcagctgccctag

SEQ ID NO: 88999 - DNA, 2004 bp, synthetic construct; identical to SEQ ID NO: 88998
  misc_feature 1..2004: note = Description of Artificial Sequence: Synthetic coding sequence
  source 1..2004: mol_type = other DNA

SEQ ID NO: 89000 - DNA, 2004 bp, synthetic construct; identical to SEQ ID NO: 88998
  misc_feature 1..2004: note = Description of Artificial Sequence: Synthetic coding sequence
  source 1..2004: mol_type = other DNA

SEQ ID NO: 89001 - DNA, 1659 bp, synthetic construct
  misc_feature 1..1659: note = Description of Artificial Sequence: Synthetic coding sequence
  source 1..1659: mol_type = other DNA
atggagaccctggagagcgagctgacctgccccatctgcctggagctgttcgaggaccccctgctgctgccctgcgcccacagcctgtgcttcaactgcgcccacagaatcctggtgagccactgcgccaccaacgagagcgtggagagcatcaccgccttccagtgccccacctgcagacacgtgatcaccctgagccagagaggcctggacggcctgaagagaaacgtgaccctgcagaacatcatcgacagattccagaaggccagcgtgagcggccccaacagccccagcgagaccagaagagagagagccttcgacgccaacaccatgaccagcgccgagaaggtgctgtgccagttctgcgaccaggaccccgcccaggacgccgtgaagacctgcgtgacctgcgaggtgagctactgcgacgagtgcctgaaggccacccaccccaacaagaagcccttcaccggccacagactgatcgagcccatccccgacagccacatcagaggcctgatgtgcctggagcacgaggacgagaaggtgaacatgtactgcgtgaccgacgaccagctgatctgcgccctgtgcaagctggtgggcagacacagagaccaccaggtggccgccctgagcgagagatacgacaagctgaagcagaacctggagagcaacctgaccaacctgatcaagagaaacaccgagctggagaccctgctggccaagctgatccagacctgccagcacgtggaggtgaacgccagcagacaggaggccaagctgaccgaggagtgcgacctgctgatcgagatcatccagcagagaagacagatcatcggcaccaagatcaaggagggcaaggtgatgagactgagaaagctggcccagcagatcgccaactgcaagcagtgcatcgagagaagcgccagcctgatcagccaggccgagcacagcctgaaggagaacgaccacgccagattcctgcagaccgccaagaacatcaccgagagagtgagcatggccaccgccagcagccaggtgctgatccccgagatcaacctgaacgacaccttcgacaccttcgccctggacttcagcagagagaagaagctgctggagtgcctggactacctgaccgcccccaacccccccaccatcagagaggagctgtgcaccgccagctacgacaccatcaccgtgcactggaccagcgacgacgagttcagcgtggtgagctacgagctgcagtacaccatcttcaccggccaggccaacgtggtgagcctgtgcaacagcgccgacagctggatgatcgtgcccaacatcaagcagaaccactacaccgtgcacggcctgcagagcggcaccaagtacatcttcatggtgaaggccatcaaccaggccggcagcagaagcagcgagcccggcaagctgaagaccaacagccagcccttcaagctggaccccaagagcgcccacagaaagctgaaggtgagccacgacaacctgaccgtggagagagacgagagcagcagcaagaagagccacacccccgagagattcaccagccagggcagctacggcgtggccggcaacgtgttcatcgacagcggcagacactactgggaggtggtgatcagcggcagcacctggtag

SEQ ID NO: 89002 - DNA, 2004 bp, synthetic construct; identical to SEQ ID NO: 88998
  misc_feature 1..2004: note = Description of Artificial Sequence: Synthetic coding sequence
  source 1..2004: mol_type = other DNA

SEQ ID NO: 89003 - DNA, 2004 bp, synthetic construct; identical to SEQ ID NO: 88998
  misc_feature 1..2004: note = Description of Artificial Sequence: Synthetic coding sequence
  source 1..2004: mol_type = other DNA

SEQ ID NO: 89004 - DNA, 1452 bp, synthetic construct
  misc_feature 1..1452: note = Description of Artificial Sequence: Synthetic coding sequence
  source 1..1452: mol_type = other DNA
atggagaccctggagagcgagctgacctgccccatctgcctggagctgttcgaggaccccctgctgctgccctgcgcccacagcctgtgcttcaactgcgcccacagaatcctggtgagccactgcgccaccaacgagagcgtggagagcatcaccgccttccagtgccccacctgcagacacgtgatcaccctgagccagagaggcctggacggcctgaagagaaacgtgaccctgcagaacatcatcgacagattccagaaggccagcgtgagcggccccaacagccccagcgagaccagaagagagagagccttcgacgccaacaccatgaccagcgccgagaaggtgctgtgccagttctgcgaccaggaccccgcccaggacgccgtgaagacctgcgtgacctgcgaggtgagctactgcgacgagtgcctgaaggccacccaccccaacaagaagcccttcaccggccacagactgatcgagcccatccccgacagccacatcagaggcctgatgtgcctggagcacgaggacgagaaggtgaacatgtactgcgtgaccgacgaccagctgatctgcgccctgtgcaagctggtgggcagacacagagaccaccaggtggccgccctgagcgagagatacgacaagctgaagcagaacctggagagcaacctgaccaacctgatcaagagaaacaccgagctggagaccctgctggccaagctgatccagacctgccagcacgtggaggtgaacgccagcagacaggaggccaagctgaccgaggagtgcgacctgctgatcgagatcatccagcagagaagacagatcatcggcaccaagatcaaggagggcaaggtgatgagactgagaaagctggcccagcagatcgccaactgcaagcagtgcatcgagagaagcgccagcctgatcagccaggccgagcacagcctgaaggagaacgaccacgccagattcctgcagaccgccaagaacatcaccgagagagtgagcatggccaccgccagcagccaggtgctgatccccgagatcaacctgaacgacaccttcgacaccttcgccctggacttcagcagagagaagaagctgctggagtgcctggactacctgaccgcccccaacccccccaccatcagagaggagctgtgcaccgccagctacgacaccatcaccgtgcactggaccagcgacgacgagttcagcgtggtgagctacgagctgcagtacaccatcttcaccggccaggccaacgtggtgagcctgtgcaacagcgccgacagctggatgatcgtgcccaacatcaagcagaaccactacaccgtgcacggcctgcagagcggcaccaagtacatcttcatggtgaaggccatcaaccaggccggcagcagaagcagcgagcccggcaagctgaagaccaacagctag

SEQ ID NO: 89005 - DNA, 594 bp, synthetic construct
  misc_feature 1..594: note = Description of Artificial Sequence: Synthetic coding sequence
  source 1..594: mol_type = other DNA
atggagaccctggagagcgagctgacctgccccatctgcctggagctgttcgaggaccccctgctgctgccctgcgcccacagcctgtgcttcaactgcgcccacagaatcctggtgagccactgcgccaccaacgagagcgtggagagcatcaccgccttccagtgccccacctgcagacacgtgatcaccctgagccagagaggcctggacggcctgaagagaaacgtgaccctgcagaacatcatcgacagattccagaaggccagcgtgagcggccccaacagccccagcgagaccagaagagagagagccttcgacgccaacaccatgaccagcgccgagaaggtgctgtgccagttctgcgaccaggaccccgcccaggacgccgtgaagacctgcgtgacctgcgaggtgagctactgcgacgagtgcctgaaggccacccaccccaacaagaagcccttcaccggccacagactgatcgagcccatccccgacagccacatcagaggcctgatgtgcctggagcacgaggacgagaaggtgaacatgtactgcgtgaccgacgaccagctgatctgcgccctgtag

SEQ ID NO: 89006 - DNA, 2004 bp, synthetic construct; identical to SEQ ID NO: 88998
  misc_feature 1..2004: note = Description of Artificial Sequence: Synthetic coding sequence
  source 1..2004: mol_type = other DNA

SEQ ID NO: 89007 - DNA, 1854 bp, synthetic construct
  misc_feature 1..1854: note = Description of Artificial Sequence: Synthetic coding sequence
  source 1..1854: mol_type = other DNA
atggagaccctggagagcgagctgacctgccccatctgcctggagctgttcgaggaccccctgctgctgccctgcgcccacagcctgtgcttcaactgcgcccacagaatcctggtgagccactgcgccaccaacgagagcgtggagagcatcaccgccttccagtgccccacctgcagacacgtgatcaccctgagccagagaggcctggacggcctgaagagaaacgtgaccctgcagaacatcatcgacagattccagaaggccagcgtgagcggccccaacagccccagcgagaccagcgccgagaaggtgctgtgccagttctgcgaccaggaccccgcccaggacgccgtgaagacctgcgtgacctgcgaggtgagctactgcgacgagtgcctgaaggccacccaccccaacaagaagcccttcaccggccacagactgatcgagcccatccccgacagccacatcagaggcctgatgtgcctggagcacgaggacgagaagcagaacctggagagcaacctgaccaacctgatcaagagaaacaccgagctggagaccctgctggccaagctgatccagacctgccagcacgtggaggtgaacgccagcagacaggaggccaagctgaccgaggagtgcgacctgctgatcgagatcatccagcagagaagacagatcatcggcaccaagatcaaggagggcaaggtgatgagactgagaaagctggcccagcagatcgccaactgcaagcagtgcatcgagagaagcgccagcctgatcagccaggccgagcacagcctgaaggagaacgaccacgccagattcctgcagaccgccaagaacatcaccgagagagtgagcatggccaccgccagcagccaggtgctgatccccgagatcaacctgaacgacaccttcgacaccttcgccctggacttcagcagagagaagaagctgctggagtgcctggactacctgaccgcccccaacccccccaccatcagagaggagctgtgcaccgccagctacgacaccatcaccgtgcactggaccagcgacgacgagttcagcgtggtgagctacgagctgcagtacaccatcttcaccggccaggccaacgtggtgagcctgtgcaacagcgccgacagctggatgatcgtgcccaacatcaagcagaaccactacaccgtgcacggcctgcagagcggcaccaagtacatcttcatggtgaaggccatcaaccaggccggcagcagaagcagcgagcccggcaagctgaagaccaacagccagcccttcaagctggaccccaagagcgcccacagaaagctgaaggtgagccacgacaacctgaccgtggagagagacgagagcagcagcaagaagagccacacccccgagagattcaccagccagggcagctacggcgtggccggcaacgtgttcatcgacagcggcagacactactgggaggtggtgatcagcggcagcacctggtacgccatcggcctggcctacaagagcgcccccaagcacgagtggatcggcaagaacagcgccagctgggccctgtgcagatgcaacaacaactgggtggtgagacacaacagcaaggagatccccatcgagcccgccccccacctgagaagagtgggcatcctgctggactacgacaacggcagcatcgccttctacgacgccctgaacagcatccacctgtacaccttcgacgtggccttcgcccagcccgtgtgccccaccttcaccgtgtggaacaagtgcctgaccatcatcaccggcctgcccatccccgaccacctggactgcaccgagcagctgccctag

SEQ ID NO: 89008 - DNA, 2208 bp, synthetic construct
  misc_feature 1..2208: note = Description of Artificial Sequence: Synthetic coding sequence
  source 1..2208: mol_type = other DNA
atgggcgagagccccgccagcgtggtgctgaacgccagcggcggcctgttcagcctgaagatggagaccctggagagcgagctgacctgccccatctgcctggagctgttcgaggaccccctgctgctgccctgcgcccacagcctgtgcttcagctgcgcccacagaatcctggtgagcagctgcagcagcggcgagagcatcgagcccatcaccgccttccagtgccccacctgcagatacgtgatcagcctgaaccacagaggcctggacggcctgaagagaaacgtgaccctgcagaacatcatcgacagattccagaaggccagcgtgagcggccccaacagccccagcgagagcagaagagagagaacctacagacccaccaccgccatgagcagcgagagaatcgcctgccagttctgcgagcaggacccccccagagacgccgtgaagacctgcatcacctgcgaggtgagctactgcgacagatgcctgagagccacccaccccaacaagaagcccttcaccagccacagactggtggagcccgtgcccgacacccacctgagaggcatcacctgcctggaccacgagaacgagaaggtgaacatgtactgcgtgagcgacgaccagctgatctgcgccctgtgcaagctggtgggcagacacagagaccaccaggtggccagcctgaacgacagattcgagaagctgaagcagaccctggagatgaacctgaccaacctggtgaagagaaacagcgagctggagaaccagatggccaagctgatccagatctgccagcaggtggaggtgaacaccgccatgcacgaggccaagctgatggaggagtgcgacgagctggtggagatcatccagcagagaaagcagatgatcgccgtgaagatcaaggagaccaaggtgatgaagctgagaaagctggcccagcaggtggccaactgcagacagtgcctggagagaagcaccgtgctgatcaaccaggccgagcacatcctgaaggagaacgaccaggccagattcctgcagagcgccaagaacatcgccgagagagtggccatggccaccgccagcagccaggtgctgatccccgacatcaacttcaacgacgccttcgagaacttcgccctggacttcagcagagagaagaagctgctggagggcctggactacctgaccgcccccaacccccccagcatcagagaggagctgtgcaccgccagccacgacaccatcaccgtgcactggatcagcgacgacgagttcagcatcagcagctacgagctgcagtacaccatcttcaccggccaggccaacttcatcagcaagagctggtgcagctggggcctgtggcccgagatcagaaagtgcaaggaggccgtgagctgcagcagactggccggcgcccccagaggcctgtacaacagcgtggacagctggatgatcgtgcccaacatcaagcagaaccactacaccgtgcacggcctgcagagcggcaccagatacatcttcatcgtgaaggccatcaaccaggccggcagcagaaacagcgagcccaccagactgaagaccaacagccagcccttcaagctggaccccaagatgacccacaagaagctgaagatcagcaacgacggcctgcagatggagaaggacgagagcagcctgaagaagagccacacccccgagagattcagcggcaccggctgctacggcgccgccggcaacatcttcatcgacagcggctgccactactgggaggtggtgatgggcagcagcacctggtacgccatcggcatcgcctacaagagcgcccccaagaacgagtggatcggcaagaacgccagcagctgggtgttcagcagatgcaacagcaacttcgtggtgagacacaacaacaaggagatgctggtggacgtgcccccccacctgaagagactgggcgtgctgctggactacgacaacaacatgctgagcttctacgaccccgccaacagcctgcacctgcacaccttcgacgtgaccttcatcctgcccgtgtgccccaccttcaccatctggaacaagagcctgatgatcctgagcggcctgcccgcccccgacttcatcgactaccccgagagacaggagtgcaactgcagaccccaggagagcccctacgtgagcggcatgaagacctgccactag

SEQ ID NO: 89009 - DNA, 2118 bp, synthetic construct
  misc_feature 1..2118: note = Description of Artificial Sequence: Synthetic coding sequence
  source 1..2118: mol_type = other DNA
atgggcgagagccccgccagcgtggtgctgaacgccagcggcggcctgttcagcctgaagatggagaccctggagagcgagctgacctgccccatctgcctggagctgttcgaggaccccctgctgctgccctgcgcccacagcctgtgcttcagctgcgcccacagaatcctggtgagcagctgcagcagcggcgagagcatcgagcccatcaccgccttccagtgccccacctgcagatacgtgatcagcctgaaccacagaggcctggacggcctgaagagaaacgtgaccctgcagaacatcatcgacagattccagaaggccagcgtgagcggccccaacagccccagcgagagcagaagagagagaacctacagacccaccaccgccatgagcagcgagagaatcgcctgccagttctgcgagcaggacccccccagagacgccgtgaagacctgcatcacctgcgaggtgagctactgcgacagatgcctgagagccacccaccccaacaagaagcccttcaccagccacagactggtggagcccgtgcccgacacccacctgagaggcatcacctgcctggaccacgagaacgagaaggtgaacatgtactgcgtgagcgacgaccagctgatctgcgccctgtgcaagctggtgggcagacacagagaccaccaggtggccagcctgaacgacagattcgagaagctgaagcagaccctggagatgaacctgaccaacctggtgaagagaaacagcgagctggagaaccagatggccaagctgatccagatctgccagcaggtggaggtgaacaccgccatgcacgaggccaagctgatggaggagtgcgacgagctggtggagatcatccagcagagaaagcagatgatcgccgtgaagatcaaggagaccaaggtgatgaagctgagaaagctggcccagcaggtggccaactgcagacagtgcctggagagaagcaccgtgctgatcaaccaggccgagcacatcctgaaggagaacgaccaggccagattcctgcagagcgccaagaacatcgccgagagagtggccatggccaccgccagcagccaggtgctgatccccgacatcaacttcaacgacgccttcgagaacttcgccctggacttcagcagagagaagaagctgctggagggcctggactacctgaccgcccccaacccccccagcatcagagaggagctgtgcaccgccagccacgacaccatcaccgtgcactggatcagcgacgacgagttcagcatcagcagctacgagctgcagtacaccatcttcaccggccaggccaacttcatcagcctgtacaacagcgtggacagctggatgatcgtgcccaacatcaagcagaaccactacaccgtgcacggcctgcagagcggcaccagatacatcttcatcgtgaaggccatcaaccaggccggcagcagaaacagcgagcccaccagactgaagaccaacagccagcccttcaagctggaccccaagatgacccacaagaagctgaagatcagcaacgacggcctgcagatggagaaggacgagagcagcctgaagaagagccacacccccgagagattcagcggcaccggctgctacggcgccgccggcaacatcttcatcgacagcggctgccactactgggaggtggtgatgggcagcagcacctggtacgccatcggcatcgcctacaagagcgcccccaagaacgagtggatcggcaagaacgccagcagctgggtgttcagcagatgcaacagcaacttcgtggtgagacacaacaacaaggagatgctggtggacgtgcccccccacctgaagagactgggcgtgctgctggactacgacaacaacatgctgagcttctacgaccccgccaacagcctgcacctgcacaccttcgacgtgaccttcatcctgcccgtgtgccccaccttcaccatctggaacaagagcctgatgatcctgagcggcctgcccgcccccgacttcatcgactaccccgagagacaggagtgcaactgcagaccccaggagagcccctacgtgagcggcatgaagacctgccactag

SEQ ID NO: 89010 - DNA, 660 bp, synthetic construct
  misc_feature 1..660: note = Description of Artificial Sequence: Synthetic coding sequence
  source 1..660: mol_type = other DNA
atggagaccctggagagcgagctgacctgccccatctgcctggagctgttcgaggaccccctgctgctgccctgcgcccacagcctgtgcttcagctgcgcccacagaatcctggtgagcagctgcagcagcggcgagagcatcgagcccatcaccgccttccagtgccccacctgcagatacgtgatcagcctgaaccacagaggcctggacggcctgaagagaaacgtgaccctgcagaacatcatcgacagattccagaaggccagcgtgagcggccccaacagccccagcgagagcagaagagagagaacctacagacccaccaccgccatgagcagcgagagaatcgcctgccagttctgcgagcaggacccccccagagacgccgtgaagacctgcatcacctgcgaggtgagctactgcgacagatgcctgagagccacccaccccaacaagaagcccttcaccagccacagactggtggagcccgtgcccgacacccacctgagaggcatcacctgcctggaccacgagaacgagaaggtgaacatgtactgcgtgagcgacgaccagctgatctgcgccctgtgcaagctggtgggcagacacagagaccaccaggtggccagcctgaacgacagattcgagaagctgtag

SEQ ID NO: 89011 - DNA, 1407 bp, synthetic construct
  misc_feature 1..1407: note = Description of Artificial Sequence: Synthetic coding sequence
  source 1..1407: mol_type = other DNA
atggagccccagcccggcggcgccagaagctgcagaagaggcgcccccggcggcgcctgcgagctgggccccgccgccgaggccgcccccatgagcctggccatccacagcaccaccggcaccagatacgacctggccgtgccccccgacgagaccgtggagggcctgagaaagagactgagccagagactgaaggtgcccaaggagagactggccctgctgcacaaggacaccagactgagcagcggcaagctgcaggagttcggcgtgggcgacggcagcaagctgaccctggtgcccaccgtggaggccggcctgatgagccaggccagcagacccgagcagagcgtgatgcaggccctggagagcctgaccgagacccaggtgagcgacttcctgagcggcagaagccccctgaccctggccctgagagtgggcgaccacatgatgttcgtgcagctgcagctggccgcccagcacgcccccctgcagcacagacacgtgctggccgccgccgccgccgccgccgccgccagaggcgaccccagcatcgccagccccgtgagcagcccctgcagacccgtgagcagcgccgccagagtgccccccgtgcccaccagccccagccccgccagccccagccccatcaccgccggcagcttcagaagccacgccgccagcaccacctgccccgagcagatggactgcagccccaccgccagcagcagcgccagccccggcgccagcaccaccagcacccccggcgccagccccgcccccagaagcagaaagcccggcgccgtgatcgagagcttcgtgaaccacgcccccggcgtgttcagcggcaccttcagcggcaccctgcaccccaactgccaggacagcagcggcagacccagaagagacatcggcaccatcctgcagatcctgaacgacctgctgagcgccaccagacactaccagggcatgccccccagcctggcccagctgagatgccacgcccagtgcagccccgccagccccgcccccgacctggcccccagaaccaccagctgcgagaagctgaccgccgcccccagcgccagcctgctgcagggccagagccagatcagaatgtgcaagccccccggcgacagactgagacagaccgagaacagagccaccagatgcaaggtggagagactgcagctgctgctgcagcagaagagactgagaagaaaggccagaagagacgccagaggcccctaccactggagccccagcagaaaggccggcagaagcgacagcagcagcagcggcggcggcggcagccccagcgaggccagcggcctgggcctggacttcgaggacagcgtgtggaagcccgaggtgaaccccgacatcaagagcgagttcgtggtggcctag

SEQ ID NO: 89012 - DNA, 771 bp, synthetic construct
  misc_feature 1..771: note = Description of Artificial Sequence: Synthetic coding sequence
  source 1..771: mol_type = other DNA
atgggcgagcccagcagagaggagtacaagatccagagcttcgacgccgagacccagcagctgctgaagaccgccctgaaggtggcctgcttcgagaccgaggacggcgagtacagcgtgtgccagagaagctacagcaactgcagcagactgatgcccagcagatgcaacacccagtacagagaccccggcgccgtggacctggagaaggtggccaacgtgatcgtggaccacagcctgcaggactgcgtgttcagcaaggaggccggcagaatgtgctacgccatcatccaggccgagagcaagcaggccggccagagcgtgttcagaagaggcctgctgaacagactgcagcaggagtaccaggccagagagcagctgagagccagaagcctgcagggctgggtgtgctacgtgaccttcatctgcaacatcttcgactacctgagagtgaacaacatgcccatgatggccctggtgaaccccgtgtacgactgcctgttcagactggcccagcccgacagcctgagcaaggaggaggaggtggactgcctggtgctgcagctgcacagagtgggcgagcagctggagaagatgaacggccagagaatggacgagctgttcgtgctgatcagagacggcttcctgctgcccaccggcctgagcagcctggcccagctgctgctgctggagatcatcgagttcagagccgccggctggaagaccacccccgccgcccacaagtactactacagcgaggtgagcgactag

SEQ ID NO: 89013 - DNA, 669 bp, synthetic construct
  misc_feature 1..669: note = Description of Artificial Sequence: Synthetic coding sequence
  source 1..669: mol_type = other DNA
atgggcgagcccagcagagaggagtacaagatccagagcttcgacgccgagacccagcagctgctgaagaccgccctgaaggaccccggcgccgtggacctggagaaggtggccaacgtgatcgtggaccacagcctgcaggactgcgtgttcagcaaggaggccggcagaatgtgctacgccatcatccaggccgagagcaagcaggccggccagagcgtgttcagaagaggcctgctgaacagactgcagcaggagtaccaggccagagagcagctgagagccagaagcctgcagggctgggtgtgctacgtgaccttcatctgcaacatcttcgactacctgagagtgaacaacatgcccatgatggccctggtgaaccccgtgtacgactgcctgttcagactggcccagcccgacagcctgagcaaggaggaggaggtggactgcctggtgctgcagctgcacagagtgggcgagcagctggagaagatgaacggccagagaatggacgagctgttcgtgctgatcagagacggcttcctgctgcccaccggcctgagcagcctggcccagctgctgctgctggagatcatcgagttcagagccgccggctggaagaccacccccgccgcccacaagtactactacagcgaggtgagcgactag

SEQ ID NO: 89014 - DNA, 792 bp, synthetic construct
  misc_feature 1..792: note = Description of Artificial Sequence: Synthetic coding sequence
  source 1..792: mol_type = other DNA
atgggcgagcccagcagagaggagtacaagatccagagcttcgacgccgagacccagcagctgctgaagaccgccctgaaggcccccagcctggagtgcaccgtggcctgcttcgagaccgaggacggcgagtacagcgtgtgccagagaagctacagcaactgcagcagactgatgcccagcagatgcaacacccagtacagagaccccggcgccgtggacctggagaaggtggccaacgtgatcgtggaccacagcctgcaggactgcgtgttcagcaaggaggccggcagaatgtgctacgccatcatccaggccgagagcaagcaggccggccagagcgtgttcagaagaggcctgctgaacagactgcagcaggagtaccaggccagagagcagctgagagccagaagcctgcagggctgggtgtgctacgtgaccttcatctgcaacatcttcgactacctgagagtgaacaacatgcccatgatggccctggtgaaccccgtgtacgactgcctgttcagactggcccagcccgacagcctgagcaaggaggaggaggtggactgcctggtgctgcagctgcacagagtgggcgagcagctggagaagatgaacggccagagaatggacgagctgttcgtgctgatcagagacggcttcctgctgcccaccggcctgagcagcctggcccagctgctgctgctggagatcatcgagttcagagccgccggctggaagaccacccccgccgcccacaagtactactacagcgaggtgagcgactag

SEQ ID NO: 89015 - DNA, 1164 bp, synthetic construct
  misc_feature 1..1164: note = Description of Artificial Sequence: Synthetic coding sequence
  source 1..1164: mol_type = other DNA
atgcccagacccagactgctggccgccctgtgcggcgccctgctgtgcgcccccagcctgctggtggccctggacatctgcagcaagaacccctgccacaacggcggcctgtgcgaggagatcagccaggaggtgagaggcgacgtgttccccagctacacctgcacctgcctgaagggctacgccggcaaccactgcgagaccaagtgcgtggagcccctgggcctggagaacggcaacatcgccaacagccagatcgccgccagcagcgtgagagtgaccttcctgggcctgcagcactgggtgcccgagctggccagactgaacagagccggcatggtgaacgcctggacccccagcagcaacgacgacaacccctggatccaggtgaacctgctgagaagaatgtgggtgaccggcgtggtgacccagggcgccagcagactggccagccacgagtacctgaaggccttcaaggtggcctacagcctgaacggccacgagttcgacttcatccacgacgtgaacaagaagcacaaggagttcgtgggcaactggaacaagaacgccgtgcacgtgaacctgttcgagacccccgtggaggcccagtacgtgagactgtaccccaccagctgccacaccgcctgcaccctgagattcgagctgctgggctgcgagctgaacggctgcgccaaccccctgggcctgaagaacaacagcatccccgacaagcagatcaccgccagcagcagctacaagacctggggcctgcacctgttcagctggaaccccagctacgccagactggacaagcagggcaacttcaacgcctgggtggccggcagctacggcaacgaccagtggctgcaggtggacctgggcagcagcaaggaggtgaccggcatcatcacccagggcgccagaaacttcggcagcgtgcagttcgtggccagctacaaggtggcctacagcaacgacagcgccaactggaccgagtaccaggaccccagaaccggcagcagcaagatcttccccggcaactgggacaaccacagccacaagaagaacctgttcgagacccccatcctggccagatacgtgagaatcctgcccgtggcctggcacaacagaatcgccctgagactggagctgctgggctgctag

SEQ ID NO: 89016 - DNA, 1140 bp, synthetic construct
  misc_feature 1..1140: note = Description of Artificial Sequence: Synthetic coding sequence
  source 1..1140: mol_type = other DNA
atgtggcccttccccgagggcggcaacaccatccccatcctgcacaccgacatctgcagcaagaacccctgccacaacggcggcctgtgcgaggagatcagccaggaggtgagaggcgacgtgttccccagctacacctgcacctgcctgaagggctacgccggcaaccactgcgagaccaagtgcgtggagcccctgggcctggagaacggcaacatcgccaacagccagatcgccgccagcagcgtgagagtgaccttcctgggcctgcagcactgggtgcccgagctggccagactgaacagagccggcatggtgaacgcctggacccccagcagcaacgacgacaacccctggatccaggtgaacctgctgagaagaatgtgggtgaccggcgtggtgacccagggcgccagcagactggccagccacgagtacctgaaggccttcaaggtggcctacagcctgaacggccacgagttcgacttcatccacgacgtgaacaagaagcacaaggagttcgtgggcaactggaacaagaacgccgtgcacgtgaacctgttcgagacccccgtggaggcccagtacgtgagactgtaccccaccagctgccacaccgcctgcaccctgagattcgagctgctgggctgcgagctgaacggctgcgccaaccccctgggcctgaagaacaacagcatccccgacaagcagatcaccgccagcagcagctacaagacctggggcctgcacctgttcagctggaaccccagctacgccagactggacaagcagggcaacttcaacgcctgggtggccggcagctacggcaacgaccagtggctgcaggtggacctgggcagcagcaaggaggtgaccggcatcatcacccagggcgccagaaacttcggcagcgtgcagttcgtggccagctacaaggtggcctacagcaacgacagcgccaactggaccgagtaccaggaccccagaaccggcagcagcaagatcttccccggcaactgggacaaccacagccacaagaagaacctgttcgagacccccatcctggccagatacgtgagaatcctgcccgtggcctggcacaacagaatcgccctgagactggagctgctgggctgctag

SEQ ID NO: 89017 - DNA, 1008 bp, synthetic construct
  misc_feature 1..1008: note = Description of Artificial Sequence: Synthetic coding sequence
  source 1..1008: mol_type = other DNA
atgcccagacccagactgctggccgccctgtgcggcgccctgctgtgcgcccccagcctgctggtggccctggacatctgcagcaagaacccctgccacaacggcggcctgtgcgaggagatcagccaggaggtgagaggcgacgtgttccccagctacacctgcacctgcctgaagggctacgccggcaaccactgcgagaccaagtgcgtggagcccctgggcctggagaacggcaacatcgccaacagccagatcgccgccagcagcgtgagagtgaccttcctgggcctgcagcactgggtgcccgagctggccagactgaacagagccggcatggtgaacgcctggacccccagcagcaacgacgacaacccctggatccaggtgaacctgctgagaagaatgtgggtgaccggcgtggtgacccagggcgccagcagactggccagccacgagtacctgaaggccttcaaggtggcctacagcctgaacggccacgagttcgacttcatccacgacgtgaacaagaagcacaaggagttcgtgggcaactggaacaagaacgccgtgcacgtgaacctgttcgagacccccgtggaggcccagtacgtgagactgtaccccaccagctgccacaccgcctgcaccctgagattcgagctgctgggctgcgagctgaacggctgcgccaaccccctgggcctgaagaacaacagcatccccgacaagcagatcaccgccagcagcagctacaagacctggggcctgcacctgttcagctggaaccccagctacgccagactggacaagcagggcaacttcaacgcctgggtggccggcagctacggcaacgaccagtggctgcagatcttccccggcaactgggacaaccacagccacaagaagaacctgttcgagacccccatcctggccagatacgtgagaatcctgcccgtggcctggcacaacagaatcgccctgagactggagctgctgggctgctag

SEQ ID NO: 89018 - DNA, 1929 bp, synthetic construct
  misc_feature 1..1929: note = Description of Artificial Sequence: Synthetic coding sequence
  source 1..1929: mol_type = other DNA
atgccctgcggcgaggactggctgagccaccccctgggcatcgtgcagggcttcttcgcccagaacggcgtgaaccccgactgggagaagaaggtgatcgagtacttcaaggagaagctgaaggagaacaacgcccccaagtgggtgcccagcctgaacgaggtgcccctgcactacctgaagcccaacagcttcgtgaagttcagatgcatgatccaggacatgttcgaccccgagttctacatgggcgtgtacgagaccgtgaaccagaacaccaaggcccacgtgctgcacttcggcaagtacagagacgtggccgagtgcggcccccagcaggagctggacctgaacagccccagaaacaccaccctggagagacagaccttctactgcgtgcccgtgcccggcgagagcacctgggtgaaggaggcctacgtgaacgccaaccaggccagagtgagccccagcaccagctacacccccagcagacacaagagaagctacgaggacgacgacgacatggacctgcagcccaacaagcagaaggaccagcacgccggcgccagacaggccggcagcgtgggcggcctgcagtggtgcggcgagcccaagagactggagaccgaggccagcaccggccagcagctgaacagcctgaacctgagcagccccttcgacctgaacttccccctgcccggcgagaagggccccgcctgcctggtgaaggtgtacgaggactgggactgcttcaaggtgaacgacatcctggagctgtacggcatcctgagcgtggaccccgtgctgagcatcctgaacaacgacgagagagacgccagcgccctgctggaccccatggagtgcaccgacaccgccgaggagcagagagtgcacagcccccccgccagcctggtgcccagaatccacgtgatcctggcccagaagctgcagcacatcaaccccctgctgcccgcctgcctgaacaaggaggagagcaagacctgcaagttcgtgagcagcttcatgagcgagctgagccccgtgagagccgagctgctgggcttcctgacccacgccctgctgggcgacagcctggccgccgagtacctgatcctgcacctgatcagcaccgtgtacaccagaagagacgtgctgcccctgggcaagttcaccgtgaacctgagcggctgccccagaaacagcaccttcaccgagcacctgtacagaatcatccagcacctggtgcccgccagcttcagactgcagatgaccatcgagaacatgaaccacctgaagttcatcccccacaaggactacaccgccaacagactggtgagcggcctgctgcagctgcccagcaacaccagcctggtgatcgacgagaccctgctggagcagggccagctggacacccccggcgtgcacaacgtgaccgccctgagcaacctgatcacctggcagaaggtggactacgacttcagctaccaccagatggagttcccctgcaacatcaacgtgttcatcaccagcgagggcagaagcctgctgcccgccgactgccagatccacctgcagccccagctgatcccccccaacatggaggagtacatgaacagcctgctgagcgccgtgctgcccagcgtgctgaacaagttcagaatctacctgaccctgctgagattcctggagtacagcatcagcgacgagatcaccaaggccgtggaggacgacttcgtggagatgagaaagaacgacccccagagcatcaccgccgacgacctgcaccagctgctggtggtggccagatgcctgagcctgagcgccggccagaccaccctgagcagagagagatggctgagagccaagcagctggagagcctgagaagaaccagactgcagcagcagaagtgcgtgaacggcaacgagctgtag

SEQ ID NO: 89019 - DNA, 1923 bp, synthetic construct
  misc_feature 1..1923: note = Description of Artificial Sequence: Synthetic coding sequence
  source 1..1923: mol_type = other DNA
atgccctgcggcgaggactggctgagccaccccctgggcatcgtgcagggcttcttcgcccagaacggcgtgaaccccgactgggagaagaaggtgatcgagtacttcaaggagaagctgaaggagaacaacgcccccaagtgggtgcccagcctgaacgaggtgcccctgcactacctgaagcccaacagcttcgtgaagttcagatgcatgatccaggacatgttcgaccccgagttctacatgggcgtgtacgagaccgtgaaccagaacaccaaggcccacgtgctgcacttcggcaagtacagagacgtggccgagtgcggcccccagcaggagctggacctgaacagccccagaaacaccaccctggagagacagaccttctactgcgtgcccgtgcccggcgagagcacctgggtgaaggaggcctacgtgaacgccaaccaggccagagtgagccccagcaccagctacacccccagcagacacaagagaagctacgaggacgacgacgacatggacctgcagcccaacaagcagaaggaccagcacgccggcgccagacaggccggcagcgtgggcggcctgcagtggtgcggcgagcccaagagactggagaccgaggccagcaccggccagcagctgaacagcctgaacctgagcagccccttcgacctgaacttccccctgcccggcgagaagggccccgcctgcctggtgaaggtgtacgaggactgggactgcttcaaggtgaacgacatcctggagctgtacggcatcctgagcgtggaccccgtgctgagcatcctgaacaacgacgagagagacgccagcgccctgctggaccccatggagtgcaccgacaccgccgaggagcagagagtgcacagcccccccgccagcctggtgcccagaatccacgtgatcctggcccagaagctgcagcacatcaaccccctgctgcccgcctgcctgaacaaggaggagagcaagaccttcgtgagcagcttcatgagcgagctgagccccgtgagagccgagctgctgggcttcctgacccacgccctgctgggcgacagcctggccgccgagtacctgatcctgcacctgatcagcaccgtgtacaccagaagagacgtgctgcccctgggcaagttcaccgtgaacctgagcggctgccccagaaacagcaccttcaccgagcacctgtacagaatcatccagcacctggtgcccgccagcttcagactgcagatgaccatcgagaacatgaaccacctgaagttcatcccccacaaggactacaccgccaacagactggtgagcggcctgctgcagctgcccagcaacaccagcctggtgatcgacgagaccctgctggagcagggccagctggacacccccggcgtgcacaacgtgaccgccctgagcaacctgatcacctggcagaaggtggactacgacttcagctaccaccagatggagttcccctgcaacatcaacgtgttcatcaccagcgagggcagaagcctgctgcccgccgactgccagatccacctgcagccccagctgatcccccccaacatggaggagtacatgaacagcctgctgagcgccgtgctgcccagcgtgctgaacaagttcagaatctacctgaccctgctgagattcctggagtacagcatcagcgacgagatcaccaaggccgtggaggacgacttcgtggagatgagaaagaacgacccccagagcatcaccgccgacgacctgcaccagctgctggtggtggccagatgcctgagcctgagcgccggccagaccaccctgagcagagagagatggctgagagccaagcagctggagagcctgagaagaaccagactgcagcagcagaagtgcgtgaacggcaacgagctgtag

SEQ ID NO: 89020 - DNA, 2628 bp, synthetic construct
  misc_feature 1..2628: note = Description of Artificial Sequence: Synthetic coding sequence
  source 1..2628: mol_type = other DNA
atggacgaggaggaggacaacctgagcctgctgaccgccctgctggaggagaacgagagcgccctggactgcaacagcgaggagaacaacttcctgaccagagagaacggcgagcccgacgccttcgacgagctgttcgacgccgacggcgacggcgagagctacaccgaggaggccgacgacggcgagaccggcgagaccagagacgagaaggagaacctggccaccctgttcggcgacatggaggacctgaccgacgaggaggaggtgcccgccagccagagcaccgagaacagagtgctgcccgcccccgcccccagaagagagaagaccaacgaggagctgcaggaggagctgagaaacctgcaggagcagatgaaggccctgcaggagcagctgaaggtgaccaccatcaagcagaccgccagccccgccagactgcagaagagccccgtggagaagagccccagaccccccctgaaggagagaagagtgcagagaatccaggagagcacctgcttcagcgccgagctggacgtgcccgccctgcccagaaccaagagagtggccagaacccccaaggccagcccccccgaccccaagagcagcagcagcagaatgaccagcgcccccagccagcccctgcagaccatcagcagaaacaagcccagcggcatcaccagaggccagatcgtgggcacccccggcagcagcggcgagaccacccagcccatctgcgtggaggccttcagcggcctgagactgagaagacccagagtgagcagcaccgagatgaacaagaagatgaccggcagaaagctgatcagactgagccagatcaaggagaagatggccagagagaagctggaggagatcgactgggtgaccttcggcgtgatcctgaagaaggtgaccccccagagcgtgaacagcggcaagaccttcagcatctggaagctgaacgacctgagagacctgacccagtgcgtgagcctgttcctgttcggcgaggtgcacaaggccctgtggaagaccgagcagggcaccgtggtgggcatcctgaacgccaaccccatgaagcccaaggacggcagcgaggaggtgtgcctgagcatcgaccacccccagaaggtgctgatcatgggcgaggccctggacctgggcacctgcaaggccaagaagaagaacggcgagccctgcacccagaccgtgaacctgagagactgcgagtactgccagtaccacgtgcaggcccagtacaagaagctgagcgccaagagagccgacctgcagagcaccttcagcggcggcagaatccccaagaagttcgccagaagaggcaccagcctgaaggagagactgtgccaggacggcttctactacggcggcgtgagcagcgccagctacgccgccagcatcgccgccgccgtggcccccaagaagaagatccagaccaccctgagcaacctggtggtgaagggcaccaacctgatcatccaggagaccagacagaagctgggcatcccccagaagagcctgagctgcagcgaggagttcaaggagctgatggacctgcccacctgcggcgccagaaacctgaagcagcacctggccaaggccaccgccagcggcatcatgggcagccccaagcccgccatcaagagcatcagcgccagcgccctgctgaagcagcagaagcagagaatgctggagatgagaagaagaaagagcgaggagatccagaagagattcctgcagagcagcagcgaggtggagagccccgccgtgcccagcagcagcagacagccccccgcccagccccccagaaccggcagcgagttccccagactggagggcgcccccgccaccatgacccccaagctgggcagaggcgtgctggagggcgacgacgtgctgttctacgacgagagccccccccccagacccaagctgagcgccctggccgaggccaagaagctggccgccatcaccaagctgagagccaagggccaggtgctgaccaagaccaaccccaacagcatcaagaagaagcagaaggacccccaggacatcctggaggtgaaggagagagtggagaagaacaccatgttcagcagccaggccgaggacgagctggagcccgccagaaagaagagaagagagcagctggcctacctggagagcgaggagttccagaagatcctgaaggccaagagcaagcacaccggcatcctgaaggaggccgaggccgagatgcaggagagatacttcgagcccctggtgaagaaggagcagatggaggagaagatgagaaacatcagagaggtgaagtgcagagtggtgacctgcaagacctgcgcctacacccacttcaagctgctggagacctgcgtgagcgagcagcacgagtaccactggcacgacggcgtgaagagattcttcaagtgcccctgcggcaacagaagcatcagcctggacagactgcccaacaagcactgcagcaactgcggcctgtacaagtgggagagagacggcatgctgaaggagaagaccggccccaagatcggcggcgagaccctgctgcccagaggcgaggagcacgccaagttcctgaacagcctgaagtag

SEQ ID NO: 89021 - DNA, 2568 bp, synthetic construct
  misc_feature 1..2568: note = Description of Artificial Sequence: Synthetic coding sequence
  source 1..2568: mol_type = other DNA
atggacgaggaggaggacaacctgagcctgctgaccgccctgctggaggagaacgagagcgccctggactgcaacagcgaggagaacaacttcctgaccagagagaacggcgagcccgacgccttcgacgagctgttcgacgccgacggcgacggcgagagctacaccgaggaggccgacgacggcgagaccggcgagaccagagacgagaaggagaacctggccaccctgttcggcgacatggaggacctgaccgacgaggaggaggtgcccgccagccagagcaccgagaacagagtgctgcccgcccccgcccccagaagagagaagaccaacgaggagctgcaggaggagctgagaaacctgcaggagcagatgaaggccctgcaggagcagctgaaggtgaccaccatcaagcagaccgccagccccgccagactgcagaagagccccgagaagagccccagaccccccctgaaggagagaagagtgcagagaatccaggagagcacctgcttcagcgccgagctggacgtgcccgccctgcccagaaccaagagagtggccagaacccccaaggccagcccccccgaccccaagagcagcagcagcagaatgaccagcgcccccagccagcccctgcagaccatcagcagaaacaagcccagcggcatcaccagaggccagatcgtgggcacccccggcagcagcggcgagaccacccagcccatctgcgtggaggccttcagcggcctgagactgagaagacccagagtgagcagcaccgagatgaacaagaagatgaccggcagaaagctgatcagactgagccagatcaaggagaagatggccagagagaagctggaggagatcgactgggtgaccttcggcgtgatcctgaagaaggtgaccccccagagcgtgaacagcggcaagaccttcagcatctggaagctgaacgacctgagagacctgacccagtgcgtgagcctgttcctgttcggcgaggtgcacaaggccctgtggaagaccgagcagggcaccgtggtgggcatcctgaacgccaaccccatgaagcccaaggacggcagcgaggaggtgtgcctgagcatcgaccacccccagaaggtgctgatcatgggcgaggccctggacctgggcacctgcaaggccaagaagaagaacggcgagccctgcacccagaccgtgaacctgagagactgcgagtactgccagtaccacgtgcaggcccagtacaagaagctgagcgccaagagagccgacctgcagagcaccttcagcggcggcagaatccccaagaagttcgccagaagaggcaccagcctgaaggagagactgtgccaggacggcttctactacggcggcgtgagcagcgccagctacgccgccagcatcgccgccgccgtggcccccaagaagaagatccagaccaccctgagcaacctggtggtgaagggcaccaacctgatcatccaggagaccagacagaagctgggcatcccccagaagagcctgagctgcagcgaggagttcaaggagctgatggacctgcccacctgcggcgccagaaacctgaagcagcacctggccaaggccaccgccagcggcatcatgggcagccccaagcccgccatcaagagcatcagcgccagcgccctgctgaagcagcagaagcagagaatgctggagatgagaagaagaaagagcgaggagatccagaagagattcctgcagagcagcagcgaggtggagagccccgccgtgcccagcagcagcagacagccccccgcccagccccccagaaccggcagcgagttccccagactggagggcgcccccgccaccatgacccccaagctgggcagaggcgtgctggagggcgacgacgtgctgttctacgacgagagccccccccccagacccaagctgagcgccctggccgaggccaagaagctggccgccatcaccaagctgagagccaagggccaggtgctgaccaagaccaaccccaacagcatcaagaagaagcagaaggacccccaggacatcctggaggtgaaggagagagtggagaagaacaccatgttcagcagccaggccgaggacgagctggagcccgccagaaagaagagaagagagcagctggcctacctggagagcgaggagttccagaagatcctgaaggccaagagcaagcacaccggcatcctgaaggaggccgaggccgagatgcaggagagatacttcgagcccctggtgaagaaggagcagatggaggagaagatgagaaacatcagagaggtgaagtgcagagtggtgacctgcaagacctgcgcctacacccacttcaagctgctggagacctgcgtgagcgagcagcacgagtaccactggcacgacggcgtgaagagattcttcaagtgcccctgcggcaacagaagcatcagcctggacagactgcccaacaagcactgcagcaactgcggcctgtacaagtgggagagagacggcatgctgaaggtgtgccacctgagaaccaacttctag

SEQ ID NO: 89022 - DNA, 2625 bp, synthetic construct
  misc_feature 1..2625: note = Description of Artificial Sequence: Synthetic coding sequence
  source 1..2625: mol_type = other DNA
atggacgaggaggaggacaacctgagcctgctgaccgccctgctggaggagaacgagagcgccctggactgcaacagcgaggagaacaacttcctgaccagagagaacggcgagcccgacgccttcgacgagctgttcgacgccgacggcgacggcgagagctacaccgaggaggccgacgacggcgagaccggcgagaccagagacgagaaggagaacctggccaccctgttcggcgacatggaggacctgaccgacgaggaggaggtgcccgccagccagagcaccgagaacagagtgctgcccgcccccgcccccagaagagagaagaccaacgaggagctgcaggaggagctgagaaacctgcaggagcagatgaaggccctgcaggagcagctgaaggtgaccaccatcaagcagaccgccagccccgccagactgcagaagagccccgagaagagccccagaccccccctgaaggagagaagagtgcagagaatccaggagagcacctgcttcagcgccgagctggacgtgcccgccctgcccagaaccaagagagtggccagaacccccaaggccagcccccccgaccccaagagcagcagcagcagaatgaccagcgcccccagccagcccctgcagaccatcagcagaaacaagcccagcggcatcaccagaggccagatcgtgggcacccccggcagcagcggcgagaccacccagcccatctgcgtggaggccttcagcggcctgagactgagaagacccagagtgagcagcaccgagatgaacaagaagatgaccggcagaaagctgatcagactgagccagatcaaggagaagatggccagagagaagctggaggagatcgactgggtgaccttcggcgtgatcctgaagaaggtgaccccccagagcgtgaacagcggcaagaccttcagcatctggaagctgaacgacctgagagacctgacccagtgcgtgagcctgttcctgttcggcgaggtgcacaaggccctgtggaagaccgagcagggcaccgtggtgggcatcctgaacgccaaccccatgaagcccaaggacggcagcgaggaggtgtgcctgagcatcgaccacccccagaaggtgctgatcatgggcgaggccctggacctgggcacctgcaaggccaagaagaagaacggcgagccctgcacccagaccgtgaacctgagagactgcgagtactgccagtaccacgtgcaggcccagtacaagaagctgagcgccaagagagccgacctgcagagcaccttcagcggcggcagaatccccaagaagttcgccagaagaggcaccagcctgaaggagagactgtgccaggacggcttctactacggcggcgtgagcagcgccagctacgccgccagcatcgccgccgccgtggcccccaagaagaagatccagaccaccctgagcaacctggtggtgaagggcaccaacctgatcatccaggagaccagacagaagctgggcatcccccagaagagcctgagctgcagcgaggagttcaaggagctgatggacctgcccacctgcggcgccagaaacctgaagcagcacctggccaaggccaccgccagcggcatcatgggcagccccaagcccgccatcaagagcatcagcgccagcgccctgctgaagcagcagaagcagagaatgctggagatgagaagaagaaagagcgaggagatccagaagagattcctgcagagcagcagcgaggtggagagccccgccgtgcccagcagcagcagacagccccccgcccagccccccagaaccggcagcgagttccccagactggagggcgcccccgccaccatgacccccaagctgggcagaggcgtgctggagggcgacgacgtgctgttctacgacgagagccccccccccagacccaagctgagcgccctggccgaggccaagaagctggccgccatcaccaagctgagagccaagggccaggtgctgaccaagaccaaccccaacagcatcaagaagaagcagaaggacccccaggacatcctggaggtgaaggagagagtggagaagaacaccatgttcagcagccaggccgaggacgagctggagcccgccagaaagaagagaagagagcagctggcctacctggagagcgaggagttccagaagatcctgaaggccaagagcaagcacaccggcatcctgaaggaggccgaggccgagatgcaggagagatacttcgagcccctggtgaagaaggagcagatggaggagaagatgagaaacatcagagaggtgaagtgcagagtggtgacctgcaagacctgcgcctacacccacttcaagctgctggagacctgcgtgagcgagcagcacgagtaccactggcacgacggcgtgaagagattcttcaagtgcccctgcggcaacagaagcatcagcctggacagactgcccaacaagcactgcagcaactgcggcctgtacaagtgggagagagacggcatgctgaaggagaagaccggccccaagatcggcggcgagaccctgctgcccagaggcgaggagcacgccaagttcctgaacagcctgaagtag

SEQ ID NO: 89023 - DNA, 2628 bp, synthetic construct; identical to SEQ ID NO: 89020
  misc_feature 1..2628: note = Description of Artificial Sequence: Synthetic coding sequence
  source 1..2628: mol_type = other DNA

SEQ ID NO: 89024 - DNA, 2466 bp, synthetic construct
  misc_feature 1..2466: note = Description of Artificial Sequence: Synthetic coding sequence
  source 1..2466: mol_type = other DNA
atggacctggccgccgccgccgagcccggcgccggcagccagcacctggaggtgagagacgaggtggccgagaagtgccagaagctgttcctggacttcctggaggagttccagagcagcgacggcgagatcaagtacctgcagctggccgaggagctgatcagacccgagagaaacaccctggtggtgagcttcgtggacctggagcagttcaaccagcagctgagcaccaccatccaggaggagttctacagagtgtacccctacctgtgcagagccctgaagaccttcgtgaaggacagaaaggagatccccctggccaaggacttctacgtggccttccaggacctgcccaccagacacaagatcagagagctgaccagcagcagaatcggcctgctgaccagaatcagcggccaggtggtgagaacccaccccgtgcaccccgagctggtgagcggcaccttcctgtgcctggactgccagaccgtgatcagagacgtggagcagcagttcaagtacacccagcccaacatctgcagaaaccccgtgtgcgccaacagaagaagattcctgctggacaccaacaagagcagattcgtggacttccagaaggtgagaatccaggagacccaggccgagctgcccagaggcagcatccccagaagcctggaggtgatcctgagagccgaggccgtggagagcgcccaggccggcgacaagtgcgacttcaccggcaccctgatcgtggtgcccgacgtgagcaagctgagcacccccggcgccagagccgagaccaacagcagagtgagcggcgtggacggctacgagaccgagggcatcagaggcctgagagccctgggcgtgagagacctgagctacagactggtgttcctggcctgctgcgtggcccccaccaaccccagattcggcggcaaggagctgagagacgaggagcagaccgccgagagcatcaagaaccagatgaccgtgaaggagtgggagaaggtgttcgagatgagccaggacaagaacctgtaccacaacctgtgcaccagcctgttccccaccatccacggcaacgacgaggtgaagagaggcgtgctgctgatgctgttcggcggcgtgcccaagaccaccggcgagggcaccagcctgagaggcgacatcaacgtgtgcatcgtgggcgaccccagcaccgccaagagccagttcctgaagcacgtggaggagttcagccccagagccgtgtacaccagcggcaaggccagcagcgccgccggcctgaccgccgccgtggtgagagacgaggagagccacgagttcgtgatcgaggccggcgccctgatgctggccgacaacggcgtgtgctgcatcgacgagttcgacaagatggacgtgagagaccaggtggccatccacgaggccatggagcagcagaccatcagcatcaccaaggccggcgtgaaggccaccctgaacgccagaaccagcatcctggccgccgccaaccccatcagcggccactacgacagaagcaagagcctgaagcagaacatcaacctgagcgcccccatcatgagcagattcgacctgttcttcatcctggtggacgagtgcaacgaggtgaccgactacgccatcgccagaagaatcgtggacctgcacagcagaatcgaggagagcatcgacagagtgtacagcctggacgacatcagaagatacctgctgttcgccagacagttcaagcccaagatcagcaaggagagcgaggacttcatcgtggagcagtacaagcacctgagacagagagacggcagcggcgtgaccaagagcagctggagaatcaccgtgagacagctggagagcatgatcagactgagcgaggccatggccagaatgcactgctgcgacgaggtgcagcccaagcacgtgaaggaggccttcagactgctgaacaagagcatcatcagagtggagacccccgacgtgaacctggaccaggaggaggagatccagatggaggtggacgagggcgccggcggcatcaacggccacgccgacagccccgcccccgtgaacggcatcaacggctacaacgaggacatcaaccaggagagcgcccccaaggccagcctgagactgggcttcagcgagtactgcagaatcagcaacctgatcgtgctgcacctgagaaaggtggaggaggaggaggacgagagcgccctgaagagaagcgagctggtgaactggtacctgaaggagatcgagagcgagatcgacagcgaggaggagctgatcaacaagaagagaatcatcgagaaggtgatccacagactgacccactacgaccacgtgctgatcgagctgacccaggccggcctgaagggcagcaccgagggcagcgagagctacgaggaggacccctacctggtggtgaaccccaactacctgctggaggactag

SEQ ID NO: 89025 - DNA, 2160 bp, synthetic construct
  misc_feature 1..2160: note = Description of Artificial Sequence: Synthetic coding sequence
  source 1..2160: mol_type = other DNA
atggccctgaaggactacgccctggagaaggagaaggtgaagaagttcctgcaggagttctaccaggacgacgagctgggcaagaagcagttcaagtacggcaaccagctggtgagactggcccacagagagcaggtggccctgtacgtggacctggacgacgtggccgaggacgaccccgagctggtggacagcatctgcgagaacgccagaagatacgccaagctgttcgccgacgccgtgcaggagctgctgccccagtacaaggagagagaggtggtgaacaaggacgtgctggacgtgtacatcgagcacagactgatgatggagcagagaagcagagaccccggcatggtgagaagcccccagaaccagtaccccgccgagctgatgagaagattcgagctgtacttccagggccccagcagcaacaagcccagagtgatcagagaggtgagagccgacagcgtgggcaagctggtgaccgtgagaggcatcgtgaccagagtgagcgaggtgaagcccaagatggtggtggccacctacacctgcgaccagtgcggcgccgagacctaccagcccatccagagccccaccttcatgcccctgatcatgtgccccagccaggagtgccagaccaacagaagcggcggcagactgtacctgcagaccagaggcagcagattcatcaagttccaggagatgaagatgcaggagcacagcgaccaggtgcccgtgggcaacatccccagaagcatcaccgtgctggtggagggcgagaacaccagaatcgcccagcccggcgaccacgtgagcgtgaccggcatcttcctgcccatcctgagaaccggcttcagacaggtggtgcagggcctgctgagcgagacctacctggaggcccacagaatcgtgaagatgaacaagagcgaggacgacgagagcggcgccggcgagctgaccagagaggagctgagacagatcgccgaggaggacttctacgagaagctggccgccagcatcgcccccgagatctacggccacgaggacgtgaagaaggccctgctgctgctgctggtgggcggcgtggaccagagccccagaggcatgaagatcagaggcaacatcaacatctgcctgatgggcgaccccggcgtggccaagagccagctgctgagctacatcgacagactggcccccagaagccagtacaccaccggcagaggcagcagcggcgtgggcctgaccgccgccgtgctgagagacagcgtgagcggcgagctgaccctggagggcggcgccctggtgctggccgaccagggcgtgtgctgcatcgacgagttcgacaagatggccgaggccgacagaaccgccatccacgaggtgatggagcagcagaccatcagcatcgccaaggccggcatcctgaccaccctgaacgccagatgcagcatcctggccgccgccaaccccgcctacggcagatacaaccccagaagaagcctggagcagaacatccagctgcccgccgccctgctgagcagattcgacctgctgtggctgatccaggacagacccgacagagacaacgacctgagactggcccagcacatcacctacgtgcaccagcacagcagacagccccccagccagttcgagcccctggacatgaagctgatgagaagatacatcgccatgtgcagagagaagcagcccatggtgcccgagagcctggccgactacatcaccgccgcctacgtggagatgagaagagaggcctgggccagcaaggacgccacctacaccagcgccagaaccctgctggccatcctgagactgagcaccgccctggccagactgagaatggtggacgtggtggagaaggaggacgtgaacgaggccatcagactgatggagatgagcaaggacagcctgctgggcgacaagggccagaccgccagaacccagagacccgccgacgtgatcttcgccaccgtgagagagctggtgagcggcggcagaagcgtgagattcagcgaggccgagcagagatgcgtgagcagaggcttcacccccgcccagttccaggccgccctggacgagtacgaggagctgaacgtgtggcaggtgaacgccagcagaaccagaatcaccttcgtgtag

SEQ ID NO: 89026 - DNA, 1170 bp, synthetic construct
  misc_feature 1..1170: note = Description of Artificial Sequence: Synthetic coding sequence
  source 1..1170: mol_type = other DNA
atggccctgaaggactacgccctggagaaggagaaggtgaagaagttcctgcaggagttctaccaggacgacgagctgggcaagaagcagttcaagtacggcaaccagctggtgagactggcccacagagagcaggtggccctgtacgtggacctggacgacgtggccgaggacgaccccgagctggtggacagcatctgcgagaacgccagaagatacgccaagctgttcgccgacgccgtgcaggagctgctgccccagtacaaggagagagaggtggtgaacaaggacgtgctggacgtgtacatcgagcacagactgatgatggagcagagaagcagagaccccggcatggtgagaagcccccagaaccagtaccccgccgagctgatgagaagattcgagctgtacttccagggccccagcagcaacaagcccagagtgatcagagaggtgagagccgacagcgtgggcaagctggtgaccgtgagaggcatcgtgaccagagtgagcgaggtgaagcccaagatggtggtggccacctacacctgcgaccagtgcggcgccgagacctaccagcccatccagagccccaccttcatgcccctgatcatgtgccccagccaggagtgccagaccaacagaagcggcggcagactgtacctgcagaccagaggcagcagattcatcaagttccaggagatgaagatgcaggagcacagcgaccaggtgcccgtgggcaacatccccagaagcatcaccgtgctggtggagggcgagaacaccagaatcgcccagcccggcgaccacgtgagcgtgaccggcatcttcctgcccatcctgagaaccggcttcagacaggtggtgcagggcctgctgagcgagacctacctggaggcccacagaatcgtgaagatgaacaagagcgaggacgacgagagcggcgccggcgagctgaccagagaggagctgagacagatcgccgacgtgatcttcgccaccgtgagagagctggtgagcggcggcagaagcgtgagattcagcgaggccgagcagagatgcgtgagcagaggcttcacccccgcccagttccaggccgccctggacgagtacgaggagctgaacgtgtggcaggtgaacgccagcagaaccagaatcaccttcgtgtag

SEQ ID NO: 89027 - DNA, 1632 bp, synthetic construct
  misc_feature 1..1632: note = Description of Artificial Sequence: Synthetic coding sequence
  source 1..1632: mol_type = other DNA
atggtggtggccacctacacctgcgaccagtgcggcgccgagacctaccagcccatccagagccccaccttcatgcccctgatcatgtgccccagccaggagtgccagaccaacagaagcggcggcagactgtacctgcagaccagaggcagcagattcatcaagttccaggagatgaagatgcaggagcacagcgaccaggtgcccgtgggcaacatccccagaagcatcaccgtgctggtggagggcgagaacaccagaatcgcccagcccggcgaccacgtgagcgtgaccggcatcttcctgcccatcctgagaaccggcttcagacaggtggtgcagggcctgctgagcgagacctacctggaggcccacagaatcgtgaagatgaacaagagcgaggacgacgagagcggcgccggcgagctgaccagagaggagctgagacagatcgccgaggaggacttctacgagaagctggccgccagcatcgcccccgagatctacggccacgaggacgtgaagaaggccctgctgctgctgctggtgggcggcgtggaccagagccccagaggcatgaagatcagaggcaacatcaacatctgcctgatgggcgaccccggcgtggccaagagccagctgctgagctacatcgacagactggcccccagaagccagtacaccaccggcagaggcagcagcggcgtgggcctgaccgccgccgtgctgagagacagcgtgagcggcgagctgaccctggagggcggcgccctggtgctggccgaccagggcgtgtgctgcatcgacgagttcgacaagatggccgaggccgacagaaccgccatccacgaggtgatggagcagcagaccatcagcatcgccaaggccggcatcctgaccaccctgaacgccagatgcagcatcctggccgccgccaaccccgcctacggcagatacaaccccagaagaagcctggagcagaacatccagctgcccgccgccctgctgagcagattcgacctgctgtggctgatccaggacagacccgacagagacaacgacctgagactggcccagcacatcacctacgtgcaccagcacagcagacagccccccagccagttcgagcccctggacatgaagctgatgagaagatacatcgccatgtgcagagagaagcagcccatggtgcccgagagcctggccgactacatcaccgccgcctacgtggagatgagaagagaggcctgggccagcaaggacgccacctacaccagcgccagaaccctgctggccatcctgagactgagcaccgccctggccagactgagaatggtggacgtggtggagaaggaggacgtgaacgaggccatcagactgatggagatgagcaaggacagcctgctgggcgacaagggccagaccgccagaacccagagacccgccgacgtgatcttcgccaccgtgagagagctggtgagcggcggcagaagcgtgagattcagcgaggccgagcagagatgcgtgagcagaggcttcacccccgcccagttccaggccgccctggacgagtacgaggagctgaacgtgtggcaggtgaacgccagcagaaccagaatcaccttcgtgtag

SEQ ID NO: 89028 - DNA, 1839 bp, synthetic construct
  misc_feature 1..1839: note = Description of Artificial Sequence: Synthetic coding sequence
  source 1..1839: mol_type = other DNA
atgatggagcagagaagcagagaccccggcatggtgagaagcccccagaaccagtaccccgccgagctgatgagaagattcgagctgtacttccagggccccagcagcaacaagcccagagtgatcagagaggtgagagccgacagcgtgggcaagctggtgaccgtgagaggcatcgtgaccagagtgagcgaggtgaagcccaagatggtggtggccacctacacctgcgaccagtgcggcgccgagacctaccagcccatccagagccccaccttcatgcccctgatcatgtgccccagccaggagtgccagaccaacagaagcggcggcagactgtacctgcagaccagaggcagcagattcatcaagttccaggagatgaagatgcaggagcacagcgaccaggtgcccgtgggcaacatccccagaagcatcaccgtgctggtggagggcgagaacaccagaatcgcccagcccggcgaccacgtgagcgtgaccggcatcttcctgcccatcctgagaaccggcttcagacaggtggtgcagggcctgctgagcgagacctacctggaggcccacagaatcgtgaagatgaacaagagcgaggacgacgagagcggcgccggcgagctgaccagagaggagctgagacagatcgccgaggaggacttctacgagaagctggccgccagcatcgcccccgagatctacggccacgaggacgtgaagaaggccctgctgctgctgctggtgggcggcgtggaccagagccccagaggcatgaagatcagaggcaacatcaacatctgcctgatgggcgaccccggcgtggccaagagccagctgctgagctacatcgacagactggcccccagaagccagtacaccaccggcagaggcagcagcggcgtgggcctgaccgccgccgtgctgagagacagcgtgagcggcgagctgaccctggagggcggcgccctggtgctggccgaccagggcgtgtgctgcatcgacgagttcgacaagatggccgaggccgacagaaccgccatccacgaggtgatggagcagcagaccatcagcatcgccaaggccggcatcctgaccaccctgaacgccagatgcagcatcctggccgccgccaaccccgcctacggcagatacaaccccagaagaagcctggagcagaacatccagctgcccgccgccctgctgagcagattcgacctgctgtggctgatccaggacagacccgacagagacaacgacctgagactggcccagcacatcacctacgtgcaccagcacagcagacagccccccagccagttcgagcccctggacatgaagctgatgagaagatacatcgccatgtgcagagagaagcagcccatggtgcccgagagcctggccgactacatcaccgccgcctacgtggagatgagaagagaggcctgggccagcaaggacgccacctacaccagcgccagaaccctgctggccatcctgagactgagcaccgccctggccagactgagaatggtggacgtggtggagaaggaggacgtgaacgaggccatcagactgatggagatgagcaaggacagcctgctgggcgacaagggccagaccgccagaacccagagacccgccgacgtgatcttcgccaccgtgagagagctggtgagcggcggcagaagcgtgagattcagcgaggccgagcagagatgcgtgagcagaggcttcacccccgcccagttccaggccgccctggacgagtacgaggagctgaacgtgtggcaggtgaacgccagcagaaccagaatcaccttcgtgtag

SEQ ID NO: 89029 - DNA, 1971 bp, synthetic construct
  misc_feature 1..1971: note = Description of Artificial Sequence: Synthetic coding sequence
  source 1..1971: mol_type = other DNA
atgacccccagctggtggacccagttcgtgagaatgcccggcgccaccagaagcagcctgctgatgccctactacaaggagagagaggtggtgaacaaggacgtgctggacgtgtacatcgagcacagactgatgatggagcagagaagcagagaccccggcatggtgagaagcccccagaaccagtaccccgccgagctgatgagaagattcgagctgtacttccagggccccagcagcaacaagcccagagtgatcagagaggtgagagccgacagcgtgggcaagctggtgaccgtgagaggcatcgtgaccagagtgagcgaggtgaagcccaagatggtggtggccacctacacctgcgaccagtgcggcgccgagacctaccagcccatccagagccccaccttcatgcccctgatcatgtgccccagccaggagtgccagaccaacagaagcggcggcagactgtacctgcagaccagaggcagcagattcatcaagttccaggagatgaagatgcaggagcacagcgaccaggtgcccgtgggcaacatccccagaagcatcaccgtgctggtggagggcgagaacaccagaatcgcccagcccggcgaccacgtgagcgtgaccggcatcttcctgcccatcctgagaaccggcttcagacaggtggtgcagggcctgctgagcgagacctacctggaggcccacagaatcgtgaagatgaacaagagcgaggacgacgagagcggcgccggcgagctgaccagagaggagctgagacagatcgccgaggaggacttctacgagaagctggccgccagcatcgcccccgagatctacggccacgaggacgtgaagaaggccctgctgctgctgctggtgggcggcgtggaccagagccccagaggcatgaagatcagaggcaacatcaacatctgcctgatgggcgaccccggcgtggccaagagccagctgctgagctacatcgacagactggcccccagaagccagtacaccaccggcagaggcagcagcggcgtgggcctgaccgccgccgtgctgagagacagcgtgagcggcgagctgaccctggagggcggcgccctggtgctggccgaccagggcgtgtgctgcatcgacgagttcgacaagatggccgaggccgacagaaccgccatccacgaggtgatggagcagcagaccatcagcatcgccaaggccggcatcctgaccaccctgaacgccagatgcagcatcctggccgccgccaaccccgcctacggcagatacaaccccagaagaagcctggagcagaacatccagctgcccgccgccctgctgagcagattcgacctgctgtggctgatccaggacagacccgacagagacaacgacctgagactggcccagcacatcacctacgtgcaccagcacagcagacagccccccagccagttcgagcccctggacatgaagctgatgagaagatacatcgccatgtgcagagagaagcagcccatggtgcccgagagcctggccgactacatcaccgccgcctacgtggagatgagaagagaggcctgggccagcaaggacgccacctacaccagcgccagaaccctgctggccatcctgagactgagcaccgccctggccagactgagaatggtggacgtggtggagaaggaggacgtgaacgaggccatcagactgatggagatgagcaaggacagcctgctgggcgacaagggccagaccgccagaacccagagacccgccgacgtgatcttcgccaccgtgagagagctggtgagcggcggcagaagcgtgagattcagcgaggccgagcagagatgcgtgagcagaggcttcacccccgcccagttccaggccgccctggacgagtacgaggagctgaacgtgtggcaggtgaacgccagcagaaccagaatcaccttcgtgtag

SEQ ID NO: 89030 - DNA, 2475 bp, synthetic construct
  misc_feature 1..2475: note = Description of Artificial Sequence: Synthetic coding sequence
  source 1..2475: mol_type = other DNA
atgaacggcgagtacagaggcagaggcttcggcagaggcagattccagagctggaagagaggcagaggcggcggcaacttcagcggcaagtggagagagagagagcacagacccgacctgagcaagaccaccggcaagagaaccagcgagcagaccccccagttcctgctgagcaccaagaccccccagagcatgcagagcaccctggacagattcatcccctacaagggctggaagctgtacttcagcgaggtgtacagcgacagcagccccctgatcgagaagatccaggccttcgagaagttcttcaccagacacatcgacctgtacgacaaggacgagatcgagagaaagggcagcatcctggtggacttcaaggagctgaccgagggcggcgaggtgaccaacctgatccccgacatcgccaccgagctgagagacgcccccgagaagaccctggcctgcatgggcctggccatccaccaggtgctgaccaaggacctggagagacacgccgccgagctgcaggcccaggagggcctgagcaacgacggcgagaccatggtgaacgtgccccacatccacgccagagtgtacaactacgagcccctgacccagctgaagaacgtgagagccaactactacggcaagtacatcgccctgagaggcaccgtggtgagagtgagcaacatcaagcccctgtgcaccaagatggccttcctgtgcgccgcctgcggcgagatccagagcttccccctgcccgacggcaagtacagcctgcccaccaagtgccccgtgcccgtgtgcagaggcagaagcttcaccgccctgagaagcagccccctgaccgtgaccatggactggcagagcatcaagatccaggagctgatgagcgacgaccagagagaggccggcagaatccccagaaccatcgagtgcgagctggtgcacgacctggtggacagctgcgtgcccggcgacaccgtgaccatcaccggcatcgtgaaggtgagcaacgccgaggaggccaacagcatcagcaacagcaagggccagaagaccaagagcagcgaggacggctgcaagcacggcatgctgatggagttcagcctgaaggacctgtacgccatccaggagatccaggccgaggagaacctgttcaagctgatcgtgaacagcctgtgccccgtgatcttcggccacgagctggtgaaggccggcctggccctggccctgttcggcggcagccagaagtacgccgacgacaagaacagaatccccatcagaggcgacccccacatcctggtggtgggcgaccccggcctgggcaagagccagatgctgcaggccgcctgcaacgtggcccccagaggcgtgtacgtgtgcggcaacaccaccaccaccagcggcctgaccgtgaccctgagcaaggacagcagcagcggcgacttcgccctggaggccggcgccctggtgctgggcgaccagggcatctgcggcatcgacgagttcgacaagatgggcaaccagcaccaggccctgctggaggccatggagcagcagagcatcagcctggccaaggccggcgtggtgtgcagcctgcccgccagaaccagcatcatcgccgccgccaaccccgtgggcggccactacaacaaggccaagaccgtgagcgagaacctgaagatgggcagcgccctgctgagcagattcgacctggtgttcatcctgctggacacccccaacgagcaccacgaccacctgctgagcgagcacgtgatcgccatcagagccggcaagcagagaaccatcagcagcgccaccgtggccagaatgaacagccaggacagcaacaccagcgtgctggaggtggtgagcgagaagcccctgagcgagagactgaaggtggtgcccggcgagaccatcgaccccatcccccaccagctgctgagaaagtacatcggctacgccagacagtacgtgtaccccagactgagcaccgaggccgccagagtgctgcaggacttctacctggagctgagaaagcagagccagagactgaacagcagccccatcaccaccagacagctggagagcctgatcagactgaccgaggccagagccagactggagctgagagaggaggccaccaaggaggacgccgaggacatcgtggagatcatgaagtacagcatgctgggcacctacagcgacgagttcggcaacctggacttcgagagaagccagcacggcagcggcatgagcaacagaagcaccgccaagagattcatcagcgccctgaacaacgtggccgagagaacctacaacaacatcttccagttccaccagctgagacagatcgccaaggagctgaacatccaggtggccgacttcgagaacttcatcggcagcctgaacgaccagggctacctgctgaagaagggccccaaggtgtaccagctgcagaccatgtag

SEQ ID NO: 89031 - DNA, 2382 bp, synthetic construct
  misc_feature 1..2382: note = Description of Artificial Sequence: Synthetic coding sequence
  source 1..2382: mol_type = other DNA
atgaacggcgagtacagaggcagaggcttcggcagaggcagattccagagctggaagagaggcagaggcggcggcaacttcagcggcaagtggagagagagagagcacagacccgacctgagcaagaccaccggcaagagaaccagcgagcagaccccccagttcctgctgagcaccaagaccccccagagcatgcagagcaccctggacagattcatcccctacaagggctggaagctgtacttcagcgaggtgtacagcgacagcagccccctgatcgagaagatccaggccttcgagaagttcttcaccagacacatcgacctgtacgacaaggacgagatcgagagaaagggcagcatcctggtggacttcaaggagctgaccgagggcggcgaggtgaccaacctgatccccgacatcgccaccgagctgagagacgcccccgagaagaccctggcctgcatgggcctggccatccaccaggtgctgaccaaggacctggagagacacgccgccgagctgcaggcccaggagggcctgagcaacgacggcgagaccatggtgaacgtgccccacatccacgccagagtgtacaactacgagcccctgacccagctgaagaacgtgagagccaactactacggcaagtacatcgccctgagaggcaccgtggtgagagtgagcaacatcaagcccctgtgcaccaagatggccttcctgtgcgccgcctgcggcgagatccagagcttccccctgcccgacggcaagtacagcctgcccaccaagtgccccgtgcccgtgtgcagaggcagaagcttcaccgccctgagaagcagccccctgaccgtgaccatggactggcagagcatcaagatccaggagctgatgagcgacgaccagagagaggccggcagaatccccagaaccatcgagtgcgagctggtgcacgacctggtggacagctgcgtgcccggcgacaccgtgaccatcaccggcatcgtgaaggtgagcaacgccgaggagggcagcagaaacaagaacgacaagtgcatgttcctgctgtacatcgaggccaacagcatcagcaacagcaagggccagaagaccaagagcagcgaggacggctgcaagcacggcatgctgatggagttcagcctgaaggacctgtacgccatccaggagatccaggccgaggagaacctgttcaagctgatcgtgaacagcctgtgccccgtgatcttcggccacgaggccgcctgcaacgtggcccccagaggcgtgtacgtgtgcggcaacaccaccaccaccagcggcctgaccgtgaccctgagcaaggacagcagcagcggcgacttcgccctggaggccggcgccctggtgctgggcgaccagggcatctgcggcatcgacgagttcgacaagatgggcaaccagcaccaggccctgctggaggccatggagcagcagagcatcagcctggccaaggccggcgtggtgtgcagcctgcccgccagaaccagcatcatcgccgccgccaaccccgtgggcggccactacaacaaggccaagaccgtgagcgagaacctgaagatgggcagcgccctgctgagcagattcgacctggtgttcatcctgctggacacccccaacgagcaccacgaccacctgctgagcgagcacgtgatcgccatcagagccggcaagcagagaaccatcagcagcgccaccgtggccagaatgaacagccaggacagcaacaccagcgtgctggaggtggtgagcgagaagcccctgagcgagagactgaaggtggtgcccggcgagaccatcgaccccatcccccaccagctgctgagaaagtacatcggctacgccagacagtacgtgtaccccagactgagcaccgaggccgccagagtgctgcaggacttctacctggagctgagaaagcagagccagagactgaacagcagccccatcaccaccagacagctggagagcctgatcagactgaccgaggccagagccagactggagctgagagaggaggccaccaaggaggacgccgaggacatcgtggagatcatgaagtacagcatgctgggcacctacagcgacgagttcggcaacctggacttcgagagaagccagcacggcagcggcatgagcaacagaagcaccgccaagagattcatcagcgccctgaacaacgtggccgagagaacctacaacaacatcttccagttccaccagctgagacagatcgccaaggagctgaacatccaggtggccgacttcgagaacttcatcggcagcctgaacgaccagggctacctgctgaagaagggccccaaggtgtaccagctgcagaccatgtag

SEQ ID NO: 89032 - DNA, 2643 bp, synthetic construct
  misc_feature 1..2643: note = Description of Artificial Sequence: Synthetic coding sequence
  source 1..2643: mol_type = other DNA
atgaacggcgagtacagaggcagaggcttcggcagaggcagattccagagctggaagagaggcagaggcggcggcaacttcagcggcaagtggagagagagagagcacagacccgacctgagcaagaccaccggcaagagaaccagcgagcagaccccccagttcctgctgagcaccaagaccccccagagcatgcagagcaccctggacagattcatcccctacaagggctggaagctgtacttcagcgaggtgtacagcgacagcagccccctgatcgagaagatccaggccttcgagaagttcttcaccagacacatcgacctgtacgacaaggacgagatcgagagaaagggcagcatcctggtggacttcaaggagctgaccgagggcggcgaggtgaccaacctgatccccgacatcgccaccgagctgagagacgcccccgagaagaccctggcctgcatgggcctggccatccaccaggtgctgaccaaggacctggagagacacgccgccgagctgcaggcccaggagggcctgagcaacgacggcgagaccatggtgaacgtgccccacatccacgccagagtgtacaactacgagcccctgacccagctgaagaacgtgagagccaactactacggcaagtacatcgccctgagaggcaccgtggtgagagtgagcaacatcaagcccctgtgcaccaagatggccttcctgtgcgccgcctgcggcgagatccagagcttccccctgcccgacggcaagtacagcctgcccaccaagtgccccgtgcccgtgtgcagaggcagaagcttcaccgccctgagaagcagccccctgaccgtgaccatggactggcagagcatcaagatccaggagctgatgagcgacgaccagagagaggccggcagaatccccagaaccatcgagtgcgagctggtgcacgacctggtggacagctgcgtgcccggcgacaccgtgaccatcaccggcatcgtgaaggtgagcaacgccgaggagggcagcagaaacaagaacgacaagtgcatgttcctgctgtacatcgaggccaacagcatcagcaacagcaagggccagaagaccaagagcagcgaggacggctgcaagcacggcatgctgatggagttcagcctgaaggacctgtacgccatccaggagatccaggccgaggagaacctgttcaagctgatcgtgaagtggagcctggccctgagccccagactggagtacagcggcgccatcagcgcccactgcaacctgcacctgcccagcagcaacagcagccccaccagcgcctgcagagtggccggcaccaccggcatgagacaccagacccagctgctgctgctggtgaaggccggcctggccctggccctgttcggcggcagccagaagtacgccgacgacaagaacagaatccccatcagaggcgacccccacatcctggtggtgggcgaccccggcctgggcaagagccagatgctgcaggccgcctgcaacgtggcccccagaggcgtgtacgtgtgcggcaacaccaccaccaccagcggcctgaccgtgaccctgagcaaggacagcagcagcggcgacttcgccctggaggccggcgccctggtgctgggcgaccagggcatctgcggcatcgacgagttcgacaagatgggcaaccagcaccaggccctgctggaggccatggagcagcagagcatcagcctggccaaggccggcgtggtgtgcagcctgcccgccagaaccagcatcatcgccgccgccaaccccgtgggcggccactacaacaaggccaagaccgtgagcgagaacctgaagatgggcagcgccctgctgagcagattcgacctggtgttcatcctgctggacacccccaacgagcaccacgaccacctgctgagcgagcacgtgatcgccatcagagccggcaagcagagaaccatcagcagcgccaccgtggccagaatgaacagccaggacagcaacaccagcgtgctggaggtggtgagcgagaagcccctgagcgagagactgaaggtggtgcccggcgagaccatcgaccccatcccccaccagctgctgagaaagtacatcggctacgccagacagtacgtgtaccccagactgagcaccgaggccgccagagtgctgcaggacttctacctggagctgagaaagcagagccagagactgaacagcagccccatcaccaccagacagctggagagcctgatcagactgaccgaggccagagccagactggagctgagagaggaggccaccaaggaggacgccgaggacatcgtggagatcatgaagtacagcatgctgggcacctacagcgacgagttcggcaacctggacttcgagagaagccagcacggcagcggcatgagcaacagaagcaccgccaagagattcatcagcgccctgaacaacgtggccgagagaacctacaacaacatcttccagttccaccagctgagacagatcgccaaggagctgaacatccaggtggccgacttcgagaacttcatcggcagcctgaacgaccagggctacctgctgaagaagggccccaaggtgtaccagctgcagaccatgtag

SEQ ID NO: 89033 - DNA, 2523 bp, synthetic construct
  misc_feature 1..2523: note = Description of Artificial Sequence: Synthetic coding sequence
  source 1..2523: mol_type = other DNA
atgaacggcgagtacagaggcagaggcttcggcagaggcagattccagagctggaagagaggcagaggcggcggcaacttcagcggcaagtggagagagagagagcacagacccgacctgagcaagaccaccggcaagagaaccagcgagcagaccccccagttcctgctgagcaccaagaccccccagagcatgcagagcaccctggacagattcatcccctacaagggctggaagctgtacttcagcgaggtgtacagcgacagcagccccctgatcgagaagatccaggccttcgagaagttcttcaccagacacatcgacctgtacgacaaggacgagatcgagagaaagggcagcatcctggtggacttcaaggagctgaccgagggcggcgaggtgaccaacctgatccccgacatcgccaccgagctgagagacgcccccgagaagaccctggcctgcatgggcctggccatccaccaggtgctgaccaaggacctggagagacacgccgccgagctgcaggcccaggagggcctgagcaacgacggcgagaccatggtgaacgtgccccacatccacgccagagtgtacaactacgagcccctgacccagctgaagaacgtgagagccaactactacggcaagtacatcgccctgagaggcaccgtggtgagagtgagcaacatcaagcccctgtgcaccaagatggccttcctgtgcgccgcctgcggcgagatccagagcttccccctgcccgacggcaagtacagcctgcccaccaagtgccccgtgcccgtgtgcagaggcagaagcttcaccgccctgagaagcagccccctgaccgtgaccatggactggcagagcatcaagatccaggagctgatgagcgacgaccagagagaggccggcagaatccccagaaccatcgagtgcgagctggtgcacgacctggtggacagctgcgtgcccggcgacaccgtgaccatcaccggcatcgtgaaggtgagcaacgccgaggagggcagcagaaacaagaacgacaagtgcatgttcctgctgtacatcgaggccaacagcatcagcaacagcaagggccagaagaccaagagcagcgaggacggctgcaagcacggcatgctgatggagttcagcctgaaggacctgtacgccatccaggagatccaggccgaggagaacctgttcaagctgatcgtgaacagcctgtgccccgtgatcttcggccacgagctggtgaaggccggcctggccctggccctgttcggcggcagccagaagtacgccgacgacaagaacagaatccccatcagaggcgacccccacatcctggtggtgggcgaccccggcctgggcaagagccagatgctgcaggccgcctgcaacgtggcccccagaggcgtgtacgtgtgcggcaacaccaccaccaccagcggcctgaccgtgaccctgagcaaggacagcagcagcggcgacttcgccctggaggccggcgccctggtgctgggcgaccagggcatctgcggcatcgacgagttcgacaagatgggcaaccagcaccaggccctgctggaggccatggagcagcagagcatcagcctggccaaggccggcgtggtgtgcagcctgcccgccagaaccagcatcatcgccgccgccaaccccgtgggcggccactacaacaaggccaagaccgtgagcgagaacctgaagatgggcagcgccctgctgagcagattcgacctggtgttcatcctgctggacacccccaacgagcaccacgaccacctgctgagcgagcacgtgatcgccatcagagccggcaagcagagaaccatcagcagcgccaccgtggccagaatgaacagccaggacagcaacaccagcgtgctggaggtggtgagcgagaagcccctgagcgagagactgaaggtggtgcccggcgagaccatcgaccccatcccccaccagctgctgagaaagtacatcggctacgccagacagtacgtgtaccccagactgagcaccgaggccgccagagtgctgcaggacttctacctggagctgagaaagcagagccagagactgaacagcagccccatcaccaccagacagctggagagcctgatcagactgaccgaggccagagccagactggagctgagagaggaggccaccaaggaggacgccgaggacatcgtggagatcatgaagtacagcatgctgggcacctacagcgacgagttcggcaacctggacttcgagagaagccagcacggcagcggcatgagcaacagaagcaccgccaagagattcatcagcgccctgaacaacgtggccgagagaacctacaacaacatcttccagttccaccagctgagacagatcgccaaggagctgaacatccaggtggccgacttcgagaacttcatcggcagcctgaacgaccagggctacctgctgaagaagggccccaaggtgtaccagctgcagaccatgtag

SEQ ID NO: 89034 - DNA, 612 bp, synthetic construct
  misc_feature 1..612: note = Description of Artificial Sequence: Synthetic coding sequence
  source 1..612: mol_type = other DNA
atgaacggcgagtacagaggcagaggcttcggcagaggcagattccagagctggaagagaggcagaggcggcggcaacttcagcggcaagtggagagagagagagcacagacccgacctgagcaagaccaccggcaagagaaccagcgagcagaccccccagttcctgctgagcaccaagaccccccagagcatgcagagcaccctggacagattcatcccctacaagggctggaagctgtacttcagcgaggtgtacagcgacagcagccccctgatcgagaagatccaggccttcgagaagttcttcaccagacacatcgacctgtacgacaaggacgagatcgagagaaagggcagcatcctggtggacttcaaggagctgaccgagggcggcgaggtgaccaacctgatccccgacatcgccaccgagctgagagacgcccccgagaagaccctggcctgcatgggcctggccatccaccaggtgctgaccaaggacctggagagacacgccgccgagctgcaggcccaggagggcctgagcaacgacggcgagaccatggtgaacgtgccccacatccacttcctgaagaagaagaagaagatctag

SEQ ID NO: 89035 - DNA, 1329 bp, synthetic construct
  misc_feature 1..1329: note = Description of Artificial Sequence: Synthetic coding sequence
  source 1..1329: mol_type = other DNA
atggagaactggagcaaggacatcacccacagctacctggagcaggagaccaccggcatcaacaagagcacccagcccgacgagcagctgaccatgaacagcgagaagagcatgcacagaaagagcaccgagctggtgaacgagatcacctgcgagaacaccgagtggcccggccagagaagcaccaacttccagatcatcagcagctaccccgacgacgagagcgtgtactgcaccaccgagaagtacaacgtgatggagcacagacacaacgacatgcactacgagtgcatgaccccctgccaggtgaccagcgacagcgacaaggagaagaccatcgccttcctgctgaaggagctggacatcctgagaaccagcaacaagaagctgcagcagaagctggccaaggaggacaaggagcagagaaagctgaagttcaagctggagctgcaggagaaggagaccgaggccaagatcgccgagaagaccgccgccctggtggaggaggtgtacttcgcccagaaggagagagacgaggccgtgatgagcagactgcagctggccatcgaggagagagacgaggccatcgccagagccaagcacatggagatgagcctgaaggtgctggagaacatcaaccccgaggagaacgacatgaccctgcaggagctgctgaacagaatcaacaacgccgacaccggcatcgccatccagaagaacggcgccatcatcgtggacagaatctacaagaccaaggagtgcaagatgagaatcaccgccgaggagatgagcgccctgatcgaggagagagacgccgccctgagcaagtgcaagagactggagcaggagctgcaccacgtgaaggagcagaaccagaccagcgccaacaacatgagacacctgaccgccgagaacaaccaggagagagccctgaaggccaagctgctgagcatgcagcaggccagagagaccgccgtgcagcagtacaagaagctggaggaggagatccagaccctgagagtgtactacagcctgcacaagagcctgagccaggaggagaacctgaaggaccagttcaactacaccctgagcacctacgaggaggccctgaagaacagagagaacatcgtgagcatcacccagcagcagaacgaggagctggccacccagctgcagcaggccctgaccgagagagccaacatggagctgcagctgcagcacgccagagaggccagccaggtggccaacgagaaggtgcagaagctggagagactggtggacgtgctgagaaagaaggtgggcaccggcaccatgagaaccgtgatctag

SEQ ID NO: 89036 - DNA, 1329 bp, synthetic construct; identical to SEQ ID NO: 89035
  misc_feature 1..1329: note = Description of Artificial Sequence: Synthetic coding sequence
  source 1..1329: mol_type = other DNA

SEQ ID NO: 89037 - DNA, 786 bp, synthetic construct
  misc_feature 1..786: note = Description of Artificial Sequence: Synthetic coding sequence
  source 1..786: mol_type = other DNA
atgagcagactgcagctggccatcgaggagagagacgaggccatcgccagagccaagcacatggagatgagcctgaaggtgctggagaacatcaaccccgaggagaacgacatgaccctgcaggagctgctgaacagaatcaacaacgccgacaccggcatcgccatccagaagaacggcgccatcatcgtggacagaatctacaagaccaaggagtgcaagatgagaatcaccgccgaggagatgagcgccctgatcgaggagagagacgccgccctgagcaagtgcaagagactggagcaggagctgcaccacgtgaaggagcagaaccagaccagcgccaacaacatgagacacctgaccgccgagaacaaccaggagagagccctgaaggccaagctgctgagcatgcagcaggccagagagaccgccgtgcagcagtacaagaagctggaggaggagatccagaccctgagagtgtactacagcctgcacaagagcctgagccaggaggagaacctgaaggaccagttcaactacaccctgagcacctacgaggaggccctgaagaacagagagaacatcgtgagcatcacccagcagcagaacgaggagctggccacccagctgcagcaggccctgaccgagagagccaacatggagctgcagctgcagcacgccagagaggccagccaggtggccaacgagaaggtgcagaagctggagagactggtggacgtgctgagaaagaaggtgggcaccggcaccatgagaaccgtgatctag

SEQ ID NO: 89038 - DNA, 1329 bp, synthetic construct; identical to SEQ ID NO: 89035
  misc_feature 1..1329: note = Description of Artificial Sequence: Synthetic coding sequence
  source 1..1329: mol_type = other DNA

SEQ ID NO: 89039 - DNA, 1275 bp, synthetic construct
  misc_feature 1..1275: note = Description of Artificial Sequence: Synthetic coding sequence
  source 1..1275: mol_type = other DNA
atgaacagcgagaagagcatgcacagaaagagcaccgagctggtgaacgagatcacctgcgagaacaccgagtggcccggccagagaagcaccaacttccagatcatcagcagctaccccgacgacgagagcgtgtactgcaccaccgagaagtacaacgtgatggagcacagacacaacgacatgcactacgagtgcatgaccccctgccaggtgaccagcgacagcgacaaggagaagaccatcgccttcctgctgaaggagctggacatcctgagaaccagcaacaagaagctgcagcagaagctggccaaggaggacaaggagcagagaaagctgaagttcaagctggagctgcaggagaaggagaccgaggccaagatcgccgagaagaccgccgccctggtggaggaggtgtacttcgcccagaaggagagagacgaggccgtgatgagcagactgcagctggccatcgaggagagagacgaggccatcgccagagccaagcacatggagatgagcctgaaggtgctggagaacatcaaccccgaggagaacgacatgaccctgcaggagctgctgaacagaatcaacaacgccgacaccggcatcgccatccagaagaacggcgccatcatcgtggacagaatctacaagaccaaggagtgcaagatgagaatcaccgccgaggagatgagcgccctgatcgaggagagagacgccgccctgagcaagtgcaagagactggagcaggagctgcaccacgtgaaggagcagaaccagaccagcgccaacaacatgagacacctgaccgccgagaacaaccaggagagagccctgaaggccaagctgctgagcatgcagcaggccagagagaccgccgtgcagcagtacaagaagctggaggaggagatccagaccctgagagtgtactacagcctgcacaagagcctgagccaggaggagaacctgaaggaccagttcaactacaccctgagcacctacgaggaggccctgaagaacagagagaacatcgtgagcatcacccagcagcagaacgaggagctggccacccagctgcagcaggccctgaccgagagagccaacatggagctgcagctgcagcacgccagagaggccagccaggtggccaacgagaaggtgcagaagagccagatccagatctacttcatccccaacaagaaggacgagagagagaagttcctgatggacaagagaagaaagatcgtggcccacagcaagcagaacagctag

SEQ ID NO: 89040 - DNA, 315 bp, synthetic construct
  misc_feature 1..315: note = Description of Artificial Sequence: Synthetic coding sequence
  source 1..315: mol_type = other DNA
atggagaactggagcaaggacatcacccacagctacctggagcaggagaccaccggcatcaacaagagcacccagcccgacgagcagctgaccatgaacagcgagaagagcatgcacagaaagagcaccgagctggtgaacgagatcacctgcgagaacaccgagtggcccggccagagaagcaccaacttccagatcatcagcagctaccccgacgacgagagcgtgtactgcaccaccgagaagtacaacgtgatggagcacagacacaacgacatgcactacgagtgcatgaccccctgccaggtgacctag

SEQ ID NO: 89041 - DNA, 387 bp, synthetic construct
  misc_feature 1..387: note = Description of Artificial Sequence: Synthetic coding sequence
  source 1..387: mol_type = other DNA
atggagaactggagcaaggacatcacccacagctacctggagcaggagaccaccggcatcaacaagagcacccagcccgacgagcagctgaccatgaacagcgagaagagcatgcacagaaagagcaccgagctggtgaacgagatcacctgcgagaacaccgagtggcccggccagagaagcaccaacttccagatcatcagcagctaccccgacgacgagagcgtgtactgcaccaccgagaagtacaacgtgatggagcacagacacaacgacatgcactacgagtgcatgaccccctgccaggtgaccagcgacagcgacaaggagaagaccatcgccttcctgctgaaggagctggacatcctgagaaccagcaacaagtag

SEQ ID NO: 89042 - DNA, 3912 bp, synthetic construct
  misc_feature 1..3912: note = Description of Artificial Sequence: Synthetic coding sequence
  source 1..3912: mol_type = other DNA
atgggcgaccccgcccccgccagaagcctggacgacatcgacctgagcgccctgagagaccccgccggcatcttcgagctggtggaggtggtgggcaacggcacctacggccaggtgtacaagggcagacacgtgaagaccggccagctggccgccatcaaggtgatggacgtgaccgaggacgaggaggaggagatcaagcaggagatcaacatgctgaagaagtacagccaccacagaaacatcgccacctactacggcgccttcatcaagaagagcccccccggcaacgacgaccagctgtggctggtgatggagttctgcggcgccggcagcgtgaccgacctggtgaagaacaccaagggcaacgccctgaaggaggactgcatcgcctacatctgcagagagatcctgagaggcctggcccacctgcacgcccacaaggtgatccacagagacatcaagggccagaacgtgctgctgaccgagaacgccgaggtgaagctggtggacttcggcgtgagcgcccagctggacagaaccgtgggcagaagaaacaccttcatcggcaccccctactggatggcccccgaggtgatcgcctgcgacgagaaccccgacgccacctacgactacagaagcgacatctggagcctgggcatcaccgccatcgagatggccgagggcgccccccccctgtgcgacatgcaccccatgagagccctgttcctgatccccagaaaccccccccccagactgaagagcaagaagtggagcaagaagttcatcgacttcatcgacacctgcctgatcaagacctacctgagcagaccccccaccgagcagctgctgaagttccccttcatcagagaccagcccaccgagagacaggtgagaatccagctgaaggaccacatcgacagaagcagaaagaagagaggcgagaaggaggagaccgagtacgagtacagcggcagcgaggaggaggacgacagccacggcgaggagggcgagcccagcagcatcatgaacgtgcccggcgagagcaccctgagaagagagttcctgagactgcagcaggagaacaagagcaacagcgaggccctgaagcagcagcagcagctgcagcagcagcagcagagagaccccgaggcccacatcaagcacctgctgcaccagagacagagaagaatcgaggagcagaaggaggagagaagaagagtggaggagcagcagagaagagagagagagcagagaaagctgcaggagaaggagcagcagagaagactggaggacatgcaggccctgagaagagaggaggagagaagacaggccgagagagagcaggagtacaagagaaagcagctggaggagcagagacagagcgagagactgcagagacagctgcagcaggagcacgcctacctgaagagcctgcagcagcagcagcagcagcagcagctgcagaagcagcagcagcagcagctgctgcccggcgacagaaagcccctgtaccactacggcagaggcatgaaccccgccgacaagcccgcctgggccagagaggtggaggagagaaccagaatgaacaagcagcagaacagccccctggccaagagcaagcccggcagcaccggccccgagccccccatcccccaggccagccccggcccccccggccccctgagccagaccccccccatgcagagacccgtggagccccaggagggcccccacaagagcctggtggcccacagagtgcccctgaagccctacgccgcccccgtgcccagaagccagagcctgcaggaccagcccaccagaaacctggccgccttccccgccagccacgaccccgaccccgccatccccgcccccaccgccacccccagcgccagaggcgccgtgatcagacagaacagcgaccccaccagcgagggccccggccccagccccaacccccccgcctgggtgagacccgacaacgaggccccccccaaggtgccccagagaaccagcagcatcgccaccgccctgaacaccagcggcgccggcggcagcagacccgcccaggccgtgagagccagcaaccccgacctgagaagaagcgaccccggctgggagagaagcgacagcgtgctgcccgccagccacggccacctgccccaggccggcagcctggagagaaacagagtgggcgtgagcagcaagcccgacagcagccccgtgctgagccccggcaacaaggccaagcccgacgaccacagaagcagacccggcagacccgccagctacaagagagccatcggcgaggacttcgtgctgctgaaggagagaaccctggacgaggcccccagaccccccaagaaggccatggactacagcagcagcagcgaggaggtggagagcagcgaggacgacgaggaggagggcgagggcggccccgccgagggcagcagagacacccccggcggcagaagcgacggcgacaccgacagcgtgagcaccatggtggtgcacgacgtggaggagatcaccggcacccagcccccctacggcggcggcaccatggtggtgcagagaacccccgaggaggagagaaacctgctgcacgccgacagcaacggctacaccaacctgcccgacgtggtgcagcccagccacagccccaccgagaacagcaagggccagagcccccccagcaaggacggcagcggcgactaccagagcagaggcctggtgaaggcccccggcaagagcagcttcaccatgttcgtggacctgggcatctaccagcccggcggcagcggcgacagcatccccatcaccgccctggtgggcggcgagggcaccagactggaccagctgcagtacgacgtgagaaagggcagcgtggtgaacgtgaaccccaccaacaccagagcccacagcgagacccccgagatcagaaagtacaagaagagattcaacagcgagatcctgtgcgccgccctgtggggcgtgaacctgctggtgggcaccgagaacggcctgatgctgctggacagaagcggccagggcaaggtgtacggcctgatcggcagaagaagattccagcagatggacgtgctggagggcctgaacctgctgatcaccatcagcggcaagagaaacaagctgagagtgtactacctgagctggctgagaaacaagatcctgcacaacgaccccgaggtggagaagaagcagggctggaccaccgtgggcgacatggagggctgcggccactacagagtggtgaagtacgagagaatcaagttcctggtgatcgccctgaagagcagcgtggaggtgtacgcctgggcccccaagccctaccacaagttcatggccttcaagagcttcgccgacctgccccacagacccctgctggtggacctgaccgtggaggagggccagagactgaaggtgatctacggcagcagcgccggcttccacgccgtggacgtggacagcggcaacagctacgacatctacatccccgtgcacatccagagccagatcaccccccacgccatcatcttcctgcccaacaccgacggcatggagatgctgctgtgctacgaggacgagggcgtgtacgtgaacacctacggcagaatcatcaaggacgtggtgctgcagtggggcgagatgcccaccagcgtggcctacatctgcagcaaccagatcatgggctggggcgagaaggccatcgagatcagaagcgtggagaccggccacctggacggcgtgttcatgcacaagagagcccagagactgaagttcctgtgcgagagaaacgacaaggtgttcttcgccagcgtgagaagcggcggcagcagccaggtgtacttcatgaccctgaacagaaactgcatcatgaactggtag

SEQ ID NO: 89043 - DNA, 3999 bp, synthetic construct
  misc_feature 1..3999: note = Description of Artificial Sequence: Synthetic coding sequence
  source 1..3999: mol_type = other DNA
atgggcgaccccgcccccgccagaagcctggacgacatcgacctgagcgccctgagagaccccgccggcatcttcgagctggtggaggtggtgggcaacggcacctacggccaggtgtacaagggcagacacgtgaagaccggccagctggccgccatcaaggtgatggacgtgaccgaggacgaggaggaggagatcaagcaggagatcaacatgctgaagaagtacagccaccacagaaacatcgccacctactacggcgccttcatcaagaagagcccccccggcaacgacgaccagctgtggctggtgatggagttctgcggcgccggcagcgtgaccgacctggtgaagaacaccaagggcaacgccctgaaggaggactgcatcgcctacatctgcagagagatcctgagaggcctggcccacctgcacgcccacaaggtgatccacagagacatcaagggccagaacgtgctgctgaccgagaacgccgaggtgaagctggtggacttcggcgtgagcgcccagctggacagaaccgtgggcagaagaaacaccttcatcggcaccccctactggatggcccccgaggtgatcgcctgcgacgagaaccccgacgccacctacgactacagaagcgacatctggagcctgggcatcaccgccatcgagatggccgagggcgccccccccctgtgcgacatgcaccccatgagagccctgttcctgatccccagaaaccccccccccagactgaagagcaagaagtggagcaagaagttcatcgacttcatcgacacctgcctgatcaagacctacctgagcagaccccccaccgagcagctgctgaagttccccttcatcagagaccagcccaccgagagacaggtgagaatccagctgaaggaccacatcgacagaagcagaaagaagagaggcgagaaggaggagaccgagtacgagtacagcggcagcgaggaggaggacgacagccacggcgaggagggcgagcccagcagcatcatgaacgtgcccggcgagagcaccctgagaagagagttcctgagactgcagcaggagaacaagagcaacagcgaggccctgaagcagcagcagcagctgcagcagcagcagcagagagaccccgaggcccacatcaagcacctgctgcaccagagacagagaagaatcgaggagcagaaggaggagagaagaagagtggaggagcagcagagaagagagagagagcagagaaagctgcaggagaaggagcagcagagaagactggaggacatgcaggccctgagaagagaggaggagagaagacaggccgagagagagcaggagtacaagagaaagcagctggaggagcagagacagagcgagagactgcagagacagctgcagcaggagcacgcctacctgaagagcctgcagcagcagcagcagcagcagcagctgcagaagcagcagcagcagcagctgctgcccggcgacagaaagcccctgtaccactacggcagaggcatgaaccccgccgacaagcccgcctgggccagagaggtggaggagagaaccagaatgaacaagcagcagaacagccccctggccaagagcaagcccggcagcaccggccccgagccccccatcccccaggccagccccggcccccccggccccctgagccagaccccccccatgcagagacccgtggagccccaggagggcccccacaagagcctggtggcccacagagtgcccctgaagccctacgccgcccccgtgcccagaagccagagcctgcaggaccagcccaccagaaacctggccgccttccccgccagccacgaccccgaccccgccatccccgcccccaccgccacccccagcgccagaggcgccgtgatcagacagaacagcgaccccaccagcgagggccccggccccagccccaacccccccgcctgggtgagacccgacaacgaggccccccccaaggtgccccagagaaccagcagcatcgccaccgccctgaacaccagcggcgccggcggcagcagacccgcccaggccgtgagagccagacccagaagcaacagcgcctggcagatctacctgcagagaagagccgagagaggcacccccaagccccccggcccccccgcccagccccccggcccccccaacgccagcagcaaccccgacctgagaagaagcgaccccggctgggagagaagcgacagcgtgctgcccgccagccacggccacctgccccaggccggcagcctggagagaaacagagtgggcgtgagcagcaagcccgacagcagccccgtgctgagccccggcaacaaggccaagcccgacgaccacagaagcagacccggcagacccgccgacttcgtgctgctgaaggagagaaccctggacgaggcccccagaccccccaagaaggccatggactacagcagcagcagcgaggaggtggagagcagcgaggacgacgaggaggagggcgagggcggccccgccgagggcagcagagacacccccggcggcagaagcgacggcgacaccgacagcgtgagcaccatggtggtgcacgacgtggaggagatcaccggcacccagcccccctacggcggcggcaccatggtggtgcagagaacccccgaggaggagagaaacctgctgcacgccgacagcaacggctacaccaacctgcccgacgtggtgcagcccagccacagccccaccgagaacagcaagggccagagcccccccagcaaggacggcagcggcgactaccagagcagaggcctggtgaaggcccccggcaagagcagcttcaccatgttcgtggacctgggcatctaccagcccggcggcagcggcgacagcatccccatcaccgccctggtgggcggcgagggcaccagactggaccagctgcagtacgacgtgagaaagggcagcgtggtgaacgtgaaccccaccaacaccagagcccacagcgagacccccgagatcagaaagtacaagaagagattcaacagcgagatcctgtgcgccgccctgtggggcgtgaacctgctggtgggcaccgagaacggcctgatgctgctggacagaagcggccagggcaaggtgtacggcctgatcggcagaagaagattccagcagatggacgtgctggagggcctgaacctgctgatcaccatcagcggcaagagaaacaagctgagagtgtactacctgagctggctgagaaacaagatcctgcacaacgaccccgaggtggagaagaagcagggctggaccaccgtgggcgacatggagggctgcggccactacagagtggtgaagtacgagagaatcaagttcctggtgatcgccctgaagagcagcgtggaggtgtacgcctgggcccccaagccctaccacaagttcatggccttcaagagcttcgccgacctgccccacagacccctgctggtggacctgaccgtggaggagggccagagactgaaggtgatctacggcagcagcgccggcttccacgccgtggacgtggacagcggcaacagctacgacatctacatccccgtgcacatccagagccagatcaccccccacgccatcatcttcctgcccaacaccgacggcatggagatgctgctgtgctacgaggacgagggcgtgtacgtgaacacctacggcagaatcatcaaggacgtggtgctgcagtggggcgagatgcccaccagcgtggcctacatctgcagcaaccagatcatgggctggggcgagaaggccatcgagatcagaagcgtggagaccggccacctggacggcgtgttcatgcacaagagagcccagagactgaagttcctgtgcgagagaaacgacaaggtgttcttcgccagcgtgagaagcggcggcagcagccaggtgtacttcatgaccctgaacagaaactgcatcatgaactggtag

SEQ ID NO: 89044 - DNA, 3939 bp, synthetic construct
  misc_feature 1..3939: note = Description of Artificial Sequence: Synthetic coding sequence
  source 1..3939: mol_type = other DNA
atgggcgaccccgcccccgccagaagcctggacgacatcgacctgagcgccctgagagaccccgccggcatcttcgagctggtggaggtggtgggcaacggcacctacggccaggtgtacaagggcagacacgtgaagaccggccagctggccgccatcaaggtgatggacgtgaccgaggacgaggaggaggagatcaagcaggagatcaacatgctgaagaagtacagccaccacagaaacatcgccacctactacggcgccttcatcaagaagagcccccccggcaacgacgaccagctgtggctggtgatggagttctgcggcgccggcagcgtgaccgacctggtgaagaacaccaagggcaacgccctgaaggaggactgcatcgcctacatctgcagagagatcctgagaggcctggcccacctgcacgcccacaaggtgatccacagagacatcaagggccagaacgtgctgctgaccgagaacgccgaggtgaagctggtggacttcggcgtgagcgcccagctggacagaaccgtgggcagaagaaacaccttcatcggcaccccctactggatggcccccgaggtgatcgcctgcgacgagaaccccgacgccacctacgactacagaagcgacatctggagcctgggcatcaccgccatcgagatggccgagggcgccccccccctgtgcgacatgcaccccatgagagccctgttcctgatccccagaaaccccccccccagactgaagagcaagaagtggagcaagaagttcatcgacttcatcgacacctgcctgatcaagacctacctgagcagaccccccaccgagcagctgctgaagttccccttcatcagagaccagcccaccgagagacaggtgagaatccagctgaaggaccacatcgacagaagcagaaagaagagaggcgagaaggaggagaccgagtacgagtacagcggcagcgaggaggaggacgacagccacggcgaggagggcgagcccagcagcatcatgaacgtgcccggcgagagcaccctgagaagagagttcctgagactgcagcaggagaacaagagcaacagcgaggccctgaagcagcagcagcagctgcagcagcagcagcagagagaccccgaggcccacatcaagcacctgctgcaccagagacagagaagaatcgaggagcagaaggaggagagaagaagagtggaggagcagcagagaagagagagagagcagagaaagctgcaggagaaggagcagcagagaagactggaggacatgcaggccctgagaagagaggaggagagaagacaggccgagagagagcaggagtacaagagaaagcagctggaggagcagagacagagcgagagactgcagagacagctgcagcaggagcacgcctacctgaagagcctgcagcagcagcagcagcagcagcagctgcagaagcagcagcagcagcagctgctgcccggcgacagaaagcccctgtaccactacggcagaggcatgaaccccgccgacaagcccgcctgggccagagaggtggaggagagaaccagaatgaacaagcagcagaacagccccctggccaagagcaagcccggcagcaccggccccgagccccccatcccccaggccagccccggcccccccggccccctgagccagaccccccccatgcagagacccgtggagccccaggagggcccccacaagagcctgcaggaccagcccaccagaaacctggccgccttccccgccagccacgaccccgaccccgccatccccgcccccaccgccacccccagcgccagaggcgccgtgatcagacagaacagcgaccccaccagcgagggccccggccccagccccaacccccccgcctgggtgagacccgacaacgaggccccccccaaggtgccccagagaaccagcagcatcgccaccgccctgaacaccagcggcgccggcggcagcagacccgcccaggccgtgagagccagacccagaagcaacagcgcctggcagatctacctgcagagaagagccgagagaggcacccccaagccccccggcccccccgcccagccccccggcccccccaacgccagcagcaaccccgacctgagaagaagcgaccccggctgggagagaagcgacagcgtgctgcccgccagccacggccacctgccccaggccggcagcctggagagaaacagagtgggcgtgagcagcaagcccgacagcagccccgtgctgagccccggcaacaaggccaagcccgacgaccacagaagcagacccggcagacccgccgacttcgtgctgctgaaggagagaaccctggacgaggcccccagaccccccaagaaggccatggactacagcagcagcagcgaggaggtggagagcagcgaggacgacgaggaggagggcgagggcggccccgccgagggcagcagagacacccccggcggcagaagcgacggcgacaccgacagcgtgagcaccatggtggtgcacgacgtggaggagatcaccggcacccagcccccctacggcggcggcaccatggtggtgcagagaacccccgaggaggagagaaacctgctgcacgccgacagcaacggctacaccaacctgcccgacgtggtgcagcccagccacagccccaccgagaacagcaagggccagagcccccccagcaaggacggcagcggcgactaccagagcagaggcctggtgaaggcccccggcaagagcagcttcaccatgttcgtggacctgggcatctaccagcccggcggcagcggcgacagcatccccatcaccgccctggtgggcggcgagggcaccagactggaccagctgcagtacgacgtgagaaagggcagcgtggtgaacgtgaaccccaccaacaccagagcccacagcgagacccccgagatcagaaagtacaagaagagattcaacagcgagatcctgtgcgccgccctgtggggcgtgaacctgctggtgggcaccgagaacggcctgatgctgctggacagaagcggccagggcaaggtgtacggcctgatcggcagaagaagattccagcagatggacgtgctggagggcctgaacctgctgatcaccatcagcggcaagagaaacaagctgagagtgtactacctgagctggctgagaaacaagatcctgcacaacgaccccgaggtggagaagaagcagggctggaccaccgtgggcgacatggagggctgcggccactacagagtggtgaagtacgagagaatcaagttcctggtgatcgccctgaagagcagcgtggaggtgtacgcctgggcccccaagccctaccacaagttcatggccttcaagagcttcgccgacctgccccacagacccctgctggtggacctgaccgtggaggagggccagagactgaaggtgatctacggcagcagcgccggcttccacgccgtggacgtggacagcggcaacagctacgacatctacatccccgtgcacatccagagccagatcaccccccacgccatcatcttcctgcccaacaccgacggcatggagatgctgctgtgctacgaggacgagggcgtgtacgtgaacacctacggcagaatcatcaaggacgtggtgctgcagtggggcgagatgcccaccagcgtggcctacatctgcagcaaccagatcatgggctggggcgagaaggccatcgagatcagaagcgtggagaccggccacctggacggcgtgttcatgcacaagagagcccagagactgaagttcctgtgcgagagaaacgacaaggtgttcttcgccagcgtgagaagcggcggcagcagccaggtgtacttcatgaccctgaacagaaactgcatcatgaactggtag

SEQ ID NO: 89045 - DNA, 879 bp, synthetic construct
  misc_feature 1..879: note = Description of Artificial Sequence: Synthetic coding sequence
  source 1..879: mol_type = other DNA
atgctgctggacagaagcggccagggcaaggtgtacggcctgatcggcagaagaagattccagcagatggacgtgctggagggcctgaacctgctgatcaccatcagcggcaagagaaacaagctgagagtgtactacctgagctggctgagaaacaagatcctgcacaacgaccccgaggtggagaagaagcagggctggaccaccgtgggcgacatggagggctgcggccactacagagtggtgaagtacgagagaatcaagttcctggtgatcgccctgaagagcagcgtggaggtgtacgcctgggcccccaagccctaccacaagttcatggccttcaagagcttcgccgacctgccccacagacccctgctggtggacctgaccgtggaggagggccagagactgaaggtgatctacggcagcagcgccggcttccacgccgtggacgtggacagcggcaacagctacgacatctacatccccgtgcacatccagagccagatcaccccccacgccatcatcttcctgcccaacaccgacggcatggagatgctgctgtgctacgaggacgagggcgtgtacgtgaacacctacggcagaatcatcaaggacgtggtgctgcagtggggcgagatgcccaccagcgtggcctacatctgcagcaaccagatcatgggctggggcgagaaggccatcgagatcagaagcgtggagaccggccacctggacggcgtgttcatgcacaagagagcccagagactgaagttcctgtgcgagagaaacgacaaggtgttcttcgccagcgtgagaagcggcggcagcagccaggtgtacttcatgaccctgaacagaaactgcatcatgaactggtag

SEQ ID NO: 89046 - DNA, 336 bp, synthetic construct
  misc_feature 1..336: note = Description of Artificial Sequence: Synthetic coding sequence
  source 1..336: mol_type = other DNA
atgggcgaccccgcccccgccagaagcctggacgacatcgacctgagcgccctgagagccctgtggttccagttcttctaccacagcggcagcagcctggagagccccggcatgctgaacggccccttccagcacagaaacagcagaatcatgacccacagaagcgccgagaagaccctgctgggcagcctgagcctgtggagatggagcgccatggagcccaccgacagatgcaccagagtgggcatgagcagaagaggcagctggctgcccagcagaagctggatgagcagaagaaccagaagaaagagaagcaacagaagaagcacctgctag

SEQ ID NO: 89047 - DNA, 1014 bp, synthetic construct
  misc_feature 1..1014: note = Description of Artificial Sequence: Synthetic coding sequence
  source 1..1014: mol_type = other DNA
atgggcgccgccggcagcagcgccctggccagattcgtgctgctggcccagagcagacccggctggctgggcgtggccgccctgggcctgaccgccgtggccctgggcgccgtggcctggagaagagcctggcccaccagaagaagaagactgctgcagcaggtgggcaccgtggcccagctgtggatctaccccgtgaagagctgcaagggcgtgcccgtgagcgaggccgagtgcaccgccatgggcctgagaagcggcaacctgagagacagattctggctggtgatcaaccaggagggcaacatggtgaccgccagacaggagcccagactggtgctgatcagcctgacctgcgacggcgacaccctgaccctgagcgccgcctacaccaaggacctgctgctgcccatcaagacccccaccaccaacgccgtgcacaagtgcagagtgcacggcctggagatcgagggcagagactgcggcgaggccaccgcccagtggatcaccagcttcctgaagagccagccctacagactggtgcacttcgagccccacatgagacccagaagaccccaccagatcgccgacctgttcagacccaaggaccagatcgcctacagcgacaccagccccttcctgatcctgagcgaggccagcctggccgacctgaacagcagactggagaagaaggtgaaggccaccaacttcagacccaacatcgtgatcagcggctgcgacgtgtacgccgaggacagctgggacgagctgctgatcggcgacgtggagctgaagagagtgatggcctgcagcagatgcatcctgaccaccgtggaccccgacaccggcgtgatgagcagaaaggagcccctggagaccctgaagagctacagacagtgcgaccccagcgagagaaagctgtacggcaagagccccctgttcggccagtacttcgtgctggagaaccccggcaccatcaaggtgggcgaccccgtgtacctgctgggccagtag

SEQ ID NO: 89048 - DNA, 774 bp, synthetic construct
  misc_feature 1..774: note = Description of Artificial Sequence: Synthetic coding sequence
  source 1..774: mol_type = other DNA
atgggcgccagcagcagcagcgccctggccagactgggcctgcccgccagaccctggcccagatggctgggcgtggccgccctgggcctggccgccgtggccctgggcaccgtggcctggagaagagcctggcccagaagaagaagaagactgcagcaggtgggcaccgtggccaagctgtggatctaccccgtgaagagctgcaagggcgtgcccgtgagcgaggccgagtgcaccgccatgggcctgagaagcggcaacctgagagacagattctggctggtgatcaaggaggacggccacatggtgaccgccagacaggagcccagactggtgctgatcagcatcatctacgagaacaactgcctgatcttcagagcccccgacatggaccagctggtgctgcccagcaagcagcccagcagcaacaagctgcacaactgcagaatcttcggcctggacatcaagggcagagactgcggcaacgaggccgccaagtggttcaccaacttcctgaagaccgaggcctacagactggtgcagttcgagaccaacatgaagggcagaaccagcagaaagctgctgcccaccctggaccagaacttccaggtggcctaccccgactactgccccctgctgatcatgaccgacgccagcctggtggacctgaacaccagaatggagaagaagatgaagatggagaacttcagacccaacatcgtggtgaccggctgcgacgccttcgaggaggccagcgccaccagaagagactag

SEQ ID NO: 89049 - DNA, 1008 bp, synthetic construct
  misc_feature 1..1008: note = Description of Artificial Sequence: Synthetic coding sequence
  source 1..1008: mol_type = other DNA
atgggcgccagcagcagcagcgccctggccagactgggcctgcccgccagaccctggcccagatggctgggcgtggccgccctgggcctggccgccgtggccctgggcaccgtggcctggagaagagcctggcccagaagaagaagaagactgcagcaggtgggcaccgtggccaagctgtggatctaccccgtgaagagctgcaagggcgtgcccgtgagcgaggccgagtgcaccgccatgggcctgagaagcggcaacctgagagacagattctggctggtgatcaaggaggacggccacatggtgaccgccagacaggagcccagactggtgctgatcagcatcatctacgagaacaactgcctgatcttcagagcccccgacatggaccagctggtgctgcccagcaagcagcccagcagcaacaagctgcacaactgcagaatcttcggcctggacatcaagggcagagactgcggcaacgaggccgccaagtggttcaccaacttcctgaagaccgaggcctacagactggtgcagttcgagaccaacatgaagggcagaaccagcagaaagctgctgcccaccctggaccagaacttccaggtggcctaccccgactactgccccctgctgatcatgaccgacgccagcctggtggacctgaacaccagaatggagaagaagatgaagatggagaacttcagacccaacatcgtggtgaccggctgcgacgccttcgaggaggacacctgggacgagctgctgatcggcagcgtggaggtgaagaaggtgatggcctgccccagatgcatcctgaccaccgtggaccccgacaccggcgtgatcgacagaaagcagcccctggacaccctgaagagctacagactgtgcgaccccagcgagagagagctgtacaagctgagccccctgttcggcatctactacagcgtggagaagatcggcagcctgagagtgggcgaccccgtgtacagaatggtgtag

SEQ ID NO: 89050 - DNA, 519 bp, synthetic construct
  misc_feature 1..519: note = Description of Artificial Sequence: Synthetic coding sequence
  source 1..519: mol_type = other DNA
ggccacatggtgaccgccagacaggagcccagactggtgctgatcagcatcatctacgagaacaactgcctgatcttcagagcccccgacatggaccagctggtgctgcccagcaagcagcccagcagcaacaagctgcacaactgcagaatcttcggcctggacatcaagggcagagactgcggcaacgaggccgccaagtggttcaccaacttcctgaagaccgaggcctacagactggtgcagttcgagaccaacatgaagggcagaaccagcagaaagctgctgcccaccctggaccagaacttccaggtggcctaccccgactactgccccctgctgatcatgaccgacgccagcctggtggacctgaacaccagaatggagaagaagatgaagatggagaacttcagacccaacatcgtggtgaccggctgcgacgccttcgaggaggacacctgggacgagctgctgatcggcagcgtggaggtgaagaaggtgatggcctgccccagatag

SEQ ID NO: 89051 - DNA, 447 bp, synthetic construct
  misc_feature 1..447: note = Description of Artificial Sequence: Synthetic coding sequence
  source 1..447: mol_type = other DNA
atgcccttcgccgaggacaagacctacaagtacatctgcagaaacttcagcaacttctgcaacgtggacgtggtggagatcctgccctacctgccctgcctgaccgccagagaccaggacagactgagagccacctgcaccctgagcggcaacagagacaccctgtggcacctgttcaacaccctgcagctgcccacctgggccggcgaggagacccccggcggccagagcagcggcagaggcctggacttcagcagcctgaccagcggcgccgtgtggctgtggcagatgagcgacttctggagctgcttcagcacctggaccgtgagcatctggctgatcctgcactgggtgctgctgagactgaacctgcaggtgttcgccaagtgcctggcccagagcaagtggcccctgctgctgcccagcctgagctgccccacctggtag

SEQ ID NO: 89052 - DNA, 375 bp, synthetic construct
  misc_feature 1..375: note = Description of Artificial Sequence: Synthetic coding sequence
  source 1..375: mol_type = other DNA
atgcccttcgccgaggacaagacctacaagtacatctgcagaaacttcagcaacttctgcaacgtggacgtggtggagatcctgccctacctgccctgcctgaccgccagagaccaggacagactgagagccacctgcaccctgagcggcaacagagacaccctgtggcacctgttcaacaccctgcagagaagacccggctgggtggagtacttcatcgccgccctgagaggctgcgagctggtggacctggccgacgaggtggccagcgtgtaccagagctaccagccccagttcagagccagccccgccgacgcccagccccagagccaccccaaggagagcagatggtggccccccggcgtgctgctgtag

SEQ ID NO: 89053 - DNA, 1200 bp, synthetic construct
  misc_feature 1..1200: note = Description of Artificial Sequence: Synthetic coding sequence
  source 1..1200: mol_type = other DNA
atgcccgtgcaggagacccaggcccccgagagccccggcgagaacagcgagcaggccctgcagaccctgagccccagagccatccccagaaaccccgacggcggccccctggagagcagcagcgacctggccgccctgagccccctgaccagcagcggccaccaggagcaggacaccgagctgggcagcacccacaccgccggcgccaccagcagcctgacccccagcagaggccccgtgagccccagcgtgagcttccagcccctggccagaagcacccccagagccagcagactgcccggccccaccggcagcgtggtgagcaccggcaccagcttcagcagcagcagccccggcctggccagcgccggcgccgccgagggcaagcagggcgccgagagcgaccaggccgagcccatcatctgcagcagcggcgccgaggcccccgccaacagcctgcccagcaaggtgcccaccaccctgatgcccgtgaacaccgtggccctgaaggtgcccgccaaccccgccagcgtgagcaccgtgcccagcaagctgcccaccagcagcaagccccccggcgccgtgcccagcaacgccctgaccaaccccgcccccagcaagctgcccatcaacagcaccagagccggcatggtgcccagcaaggtgcccaccagcatggtgctgaccaaggtgagcgccagcaccgtgcccaccgacggcagcagcagaaacgaggagacccccgccgcccccacccccgccggcgccaccggcggcagcagcgcctggctggacagcagcagcgagaacagaggcctgggcagcgagctgagcaagcccggcgtgctggccagccaggtggacagccccttcagcggctgcttcgaggacctggccatcagcgccagcaccagcctgggcatgggcccctgccacggccccgaggagaacgagtacaagagcgagggcaccttcggcatccacgtggccgagaaccccagcatccagctgctggagggcaaccccggcccccccgccgaccccgacggcggccccagaccccaggccgacagaaagttccaggagagagaggtgccctgccacagacccagccccggcgccctgtggctgcaggtggccgtgaccggcgtgctggtggtgaccctgctggtggtgctgtacagaagaagactgcactag

SEQ ID NO: 89054 - DNA, 1623 bp, synthetic construct
  misc_feature 1..1623: note = Description of Artificial Sequence: Synthetic coding sequence
  source 1..1623: mol_type = other DNA
atgcccttcgccgaggacaagacctacaagtacatctgcagaaacttcagcaacttctgcaacgtggacgtggtggagatcctgccctacctgccctgcctgaccgccagagaccaggacagactgagagccacctgcaccctgagcggcaacagagacaccctgtggcacctgttcaacaccctgcagagaagacccggctgggtggagtacttcatcgccgccctgagaggctgcgagctggtggacctggccgacgaggtggccagcgtgtaccagagctaccagcccagaaccagcgacagaccccccgaccccctggagccccccagcctgcccgccgagagacccggcccccccacccccgccgccgcccacagcatcccctacaacagctgcagagagaaggagcccagctaccccatgcccgtgcaggagacccaggcccccgagagccccggcgagaacagcgagcaggccctgcagaccctgagccccagagccatccccagaaaccccgacggcggccccctggagagcagcagcgacctggccgccctgagccccctgaccagcagcggccaccaggagcaggacaccgagctgggcagcacccacaccgccggcgccaccagcagcctgacccccagcagaggccccgtgagccccagcgtgagcttccagcccctggccagaagcacccccagagccagcagactgcccggccccaccggcagcgtggtgagcaccggcaccagcttcagcagcagcagccccggcctggccagcgccggcgccgccgagggcaagcagggcgccgagagcgaccaggccgagcccatcatctgcagcagcggcgccgaggcccccgccaacagcctgcccagcaaggtgcccaccaccctgatgcccgtgaacaccgtggccctgaaggtgcccgccaaccccgccagcgtgagcaccgtgcccagcaagctgcccaccagcagcaagccccccggcgccgtgcccagcaacgccctgaccaaccccgcccccagcaagctgcccatcaacagcaccagagccggcatggtgcccagcaaggtgcccaccagcatggtgctgaccaaggtgagcgccagcaccgtgcccaccgacggcagcagcagaaacgaggagacccccgccgcccccacccccgccggcgccaccggcggcagcagcgcctggctggacagcagcagcgagaacagaggcctgggcagcgagctgagcaagcccggcgtgctggccagccaggtggacagccccttcagcggctgcttcgaggacctggccatcagcgccagcaccagcctgggcatgggcccctgccacggccccgaggagaacgagtacaagagcgagggcaccttcggcatccacgtggccgagaaccccagcatccagctgctggagggcaaccccggcccccccgccgaccccgacggcggccccagaccccaggccgacagaaagttccaggagagagaggtgccctgccacagacccagccccggcgccctgtggctgcaggtggccgtgaccggcgtgctggtggtgaccctgctggtggtgctgtacagaagaagactgcactag

SEQ ID NO: 89055 - DNA, 993 bp, synthetic construct
  misc_feature 1..993: note = Description of Artificial Sequence: Synthetic coding sequence
  source 1..993: mol_type = other DNA
atggccgccgccgccggcagaagcctgctgctgctgctgagcagcagaggcggcggcggcggcggcgccggcggctgcggcgccctgaccgccggctgcttccccggcctgggcgtgagcagacacagacagcagcagcaccacagaaccgtgcaccagagaatcgccagctggcagaacctgggcgccgtgtactgcagcaccgtggtgcccagcgacgacgtgaccgtggtgtaccagaacggcctgcccgtgatcagcgtgagactgcccagcagaagagagagatgccagttcaccctgaagcccatcagcgacagcgtgggcgtgttcctgagacagctgcaggaggaggacagaggcatcgacagagtggccatctacagccccgacggcgtgagagtggccgccagcaccggcatcgacctgctgctgctggacgacttcaagctggtgatcaacgacctgacctaccacgtgagaccccccaagagagtggagatgggcttctgccacgtgggccagaacggcttcgagctgctgaccagcagctacctgcccgccagcgccagccagagcgccgagatcatcgccgtgagaatcgagatcagcagaaaggccgagaagagaaccaccctggtgctgtggggcggcctggcctacatggccacccagttcggcatcctggccagactgacctggtgggagtacagctgggacatcatggagcccgtgacctacttcatcacctacggcagcgccatggccatgtacgcctacttcgtgatgaccagacaggagtacgtgtaccccgaggccagagacagacagtacctgctgttcttccacaagggcgccaagaagagcagattcgacctggagaagtacaaccagctgaaggacgccatcgcccaggccgagatggacctgaagagactgagagaccccctgcaggtgcacctgcccctgagacagatcggcgagaaggactag

SEQ ID NO: 89056 - DNA, 1056 bp, synthetic construct
  misc_feature 1..1056: note = Description of Artificial Sequence: Synthetic coding sequence
  source 1..1056: mol_type = other DNA
atggccgccgccgccggcagaagcctgctgctgctgctgagcagcagaggcggcggcggcggcggcgccggcggctgcggcgccctgaccgccggctgcttccccggcctgggcgtgagcagacacagacagcagcagcaccacagaaccgtgcaccagagaatcgccagctggcagaacctgggcgccgtgtactgcagcaccgtggtgcccagcgacgacgtgaccgtggtgtaccagaacggcctgcccgtgatcagcgtgagactgcccagcagaagagagagatgccagttcaccctgaagcccatcagcgacagcgtgggcgtgttcctgagacagctgcaggaggaggacagaggcatcgacagagtggccatctacagccccgacggcgtgagagtggccgccagcaccggcatcgacctgctgctgctggacgacttcaagctggtgatcaacgacctgacctaccacgtgagaccccccaagagagacctgctgagccacgagaacgccgccaccctgaacgacgtgaagaccctggtgcagcagctgtacaccaccctgtgcatcgagcagcaccagctgaacaaggagagagagctgatcgagagactggaggacctgaaggagcagctggcccccctggagaaggtgagaatcgagatcagcagaaaggccgagaagagaaccaccctggtgctgtggggcggcctggcctacatggccacccagttcggcatcctggccagactgacctggtgggagtacagctgggacatcatggagcccgtgacctacttcatcacctacggcagcgccatggccatgtacgcctacttcgtgatgaccagacaggagtacgtgtaccccgaggccagagacagacagtacctgctgttcttccacaagggcgccaagaagagcagattcgacctggagaagtacaaccagctgaaggacgccatcgcccaggccgagatggacctgaagagactgagagaccccctgcaggtgcacctgcccctgagacagatcggcgagaaggactag

SEQ ID NO: 89057 - DNA, 909 bp, synthetic construct
  misc_feature 1..909: note = Description of Artificial Sequence: Synthetic coding sequence
  source 1..909: mol_type = other DNA
atggtgcaccagagaatcgccagctggcagaacctgggcgccgtgtactgcagcaccgtggtgcccagcgacgacgtgaccgtggtgtaccagaacggcctgcccgtgatcagcgtgagactgcccagcagaagagagagatgccagttcaccctgaagcccatcagcgacagcgtgggcgtgttcctgagacagctgcaggaggaggacagaggcatcgacagagtggccatctacagccccgacggcgtgagagtggccgccagcaccggcatcgacctgctgctgctggacgacttcaagctggtgatcaacgacctgacctaccacgtgagaccccccaagagagacctgctgagccacgagaacgccgccaccctgaacgacgtgaagaccctggtgcagcagctgtacaccaccctgtgcatcgagcagcaccagctgaacaaggagagagagctgatcgagagactggaggacctgaaggagcagctggcccccctggagaaggtgagaatcgagatcagcagaaaggccgagaagagaaccaccctggtgctgtggggcggcctggcctacatggccacccagttcggcatcctggccagactgacctggtgggagtacagctgggacatcatggagcccgtgacctacttcatcacctacggcagcgccatggccatgtacgcctacttcgtgatgaccagacaggagtacgtgtaccccgaggccagagacagacagtacctgctgttcttccacaagggcgccaagaagagcagattcgacctggagaagtacaaccagctgaaggacgccatcgcccaggccgagatggacctgaagagactgagagaccccctgcaggtgcacctgcccctgagacagatcggcgagaaggactag

SEQ ID NO: 89058 - DNA, 912 bp, synthetic construct
  misc_feature 1..912: note = Description of Artificial Sequence: Synthetic coding sequence
  source 1..912: mol_type = other DNA
atggccgacgccgccagccaggtgctgctgggcagcggcctgaccatcctgagccagcccctgatgtacgtgaaggtgctgatccaggtgggctacgagcccctgccccccaccatcggcagaaacatcttcggcagacaggtgtgccagctgcccggcctgttcagctacgcccagcacatcgccagcatcgacggcagaagaggcctgttcaccggcctgacccccagactgtgcagcggcgtgctgggcaccgtggtgcacggcaaggtgctgcagcactaccaggagagcgacaagggcgaggagctgggccccggcaacgtgcagaaggaggtgagcagcagcttcgaccacgtgatcaaggagaccaccagagagatgatcgccagaagcgccgccaccctgatcacccaccccttccacgtgatcaccctgagaagcatggtgcagttcatcggcagagagagcaagtactgcggcctgtgcgacagcatcatcaccatctacagagaggagggcatcctgggcttcttcgccggcctggtgcccagactgctgggcgacatcctgagcctgtggctgtgcaacagcctggcctacctggtgaacacctacgccctggacagcggcgtgagcaccatgaacgagatgaagagctacagccaggccgtgaccggcttcttcgccagcatgctgacctaccccttcgtgctggtgagcaacctgatggccgtgaacaactgcggcctggccggcggctgccccccctacagccccatctacaccagctggatcgactgctggtgcatgctgcagaaggagggcaacatgagcagaggcaacagcctgttcttcagaaaggtgcccttcggcaagacctactgctgcgacctgaagatgctgatctag

SEQ ID NO: 89059 - DNA, 468 bp, synthetic construct
  misc_feature 1..468: note = Description of Artificial Sequence: Synthetic coding sequence
  source 1..468: mol_type = other DNA
atggtgcagttcatcggcagagagagcaagtactgcggcctgtgcgacagcatcatcaccatctacagagaggagggcatcctgggcttcttcgccggcctggtgcccagactgctgggcgacatcctgagcctgtggctgtgcaacagcctggcctacctggtgaacacctacgccctggacagcggcgtgagcaccatgaacgagatgaagagctacagccaggccgtgaccggcttcttcgccagcatgctgacctaccccttcgtgctggtgagcaacctgatggccgtgaacaactgcggcctggccggcggctgccccccctacagccccatctacaccagctggatcgactgctggtgcatgctgcagaaggagggcaacatgagcagaggcaacagcctgttcttcagaaaggtgcccttcggcaagacctactgctgcgacctgaagatgctgatctag

SEQ ID NO: 89060 - DNA, 360 bp, synthetic construct
  misc_feature 1..360: note = Description of Artificial Sequence: Synthetic coding sequence
  source 1..360: mol_type = other DNA
atggtgctgcccctgccctggctgagcagataccacttcctgagactgctgctgcccagctggagcctggccccccagggcagccacggctgctgcagccagaaccccaaggccagcatggaggagcagaccagcagcagaggcaacggcaagatgaccagcccccccagaggccccggcacccacagaaccgccgagctggccagagccgaggagctgctggagcagcagctggagctgtaccaggccctgctggagggccaggagggcgcctgggaggcccaggccctggtgctgaagatccagaagctgaaggagcagatgagaagacaccaggagagcctgggcggcggcgcctag

SEQ ID NO: 89061 - DNA, 360 bp, synthetic construct
  misc_feature 1..360: note = Description of Artificial Sequence: Synthetic coding sequence
  source 1..360: mol_type = other DNA
atggtgctgcccctgccctggctgagcagataccacttcctgagactgctgctgcccagctggagcctggccccccagggcagccacggctgctgcagccagaaccccaaggccagcatggaggagcagaccaacagcagaggcaacggcaagatgaccagcccccccagaggccccggcacccacagaaccgccgagctggccagagccgaggagctgctggagcagcagctggagctgtaccaggccctgctggagggccaggagggcgcctgggaggcccaggccctggtgctgaagatccagaagctgaaggagcagatgagaagacaccaggagagcctgggcggcggcgcctag

SEQ ID NO: 89062 - DNA, 360 bp, synthetic construct; identical to SEQ ID NO: 89061
  misc_feature 1..360: note = Description of Artificial Sequence: Synthetic coding sequence
  source 1..360: mol_type = other DNA

SEQ ID NO: 89063 - DNA, 360 bp, synthetic construct; identical to SEQ ID NO: 89060
  misc_feature 1..360: note = Description of Artificial Sequence: Synthetic coding sequence
  source 1..360: mol_type = other DNA

SEQ ID NO: 89064 - DNA, 360 bp, synthetic construct; identical to SEQ ID NO: 89060
  misc_feature 1..360: note = Description of Artificial Sequence: Synthetic coding sequence
  source 1..360: mol_type = other DNA

SEQ ID NO: 89065 - DNA, 360 bp, synthetic construct
  misc_feature 1..360: note = Description of Artificial Sequence: Synthetic coding sequence
  source 1..360: mol_type = other DNA
atggtgctgcccctgccctggctgagcagataccacttcctgagactgctgctgcccagctggagcctggccccccagggcagccacggctgctgcagccagaaccccaaggccagcatggagaagcagaccaacagcagaggcaacggcaagatgaccagcccccccagaggccccggcacccacagaaccgccgagctggccagagccgaggagctgctggagcagcagctggagctgtaccaggccctgctggagggccaggagggcgcctgggaggcccaggccctggtgctgaagatccagaagctgaaggagcagatgagaagacaccaggagagcctgggcggcggcgcctag

SEQ ID NO: 89066 - DNA, 360 bp, synthetic construct; identical to SEQ ID NO: 89061
  misc_feature 1..360: note = Description of Artificial Sequence: Synthetic coding sequence
  source 1..360: mol_type = other DNA

SEQ ID NO: 89067 - DNA, 360 bp, synthetic construct; identical to SEQ ID NO: 89061
  misc_feature 1..360: note = Description of Artificial Sequence: Synthetic coding sequence
  source 1..360: mol_type = other DNA

SEQ ID NO: 89068 - DNA, 1059 bp, synthetic construct
  misc_feature 1..1059: note = Description of Artificial Sequence: Synthetic coding sequence
  source 1..1059: mol_type = other DNA
atggagagcggcggcagacccagcctgtgccagttcatcctgctgggcaccaccagcgtggtgaccgccgccctgtacagcgtgtacagacagaaggccagagtgagccaggagctgaagggcgccaagaaggtgcacctgggcgaggacctgaagagcatcctgagcgaggcccccggcaagtgcgtgccctacgccgtgatcgagggcgccgtgagaagcgtgaaggagaccctgaacagccagttcgtggagaactgcaagggcgtgatccagagactgaccctgcaggagcacaagatggtgtggaacagaaccacccacctgtggaacgactgcagcaagatcatccaccagagaaccaacaccgtgcccttcgacctggtgccccacgaggacggcgtggacgtggccgtgagagtgctgaagcccctggacagcgtggacctgggcctggagaccgtgtacgagaagttccaccccagcatccagagcttcaccgacgtgatcggccactacatcagcggcgagagacccaagggcatccaggagaccgaggagatgctgaaggtgggcgccaccctgaccggcgtgggcgagctggtgctggacaacaacagcgtgagactgcagccccccaagcagggcatgcagtactacctgagcagccaggacttcgacagcctgctgcagagacaggagagcagcgtgagactgtggaaggtgctggccctggtgttcggcttcgccacctgcgccaccctgttcttcatcctgagaaagcagtacctgcagagacaggagagactgagactgaagcagatgcaggaggagttccaggagcacgaggcccagctgctgagcagagccaagcccgaggacagagagagcctgaagagcgcctgcgtggtgtgcctgagcagcttcaagagctgcgtgttcctggagtgcggccacgtgtgcagctgcaccgagtgctacagagccctgcccgagcccaagaagtgccccatctgcagacaggccatcaccagagtgatccccctgtacaacagctag

SEQ ID NO: 89069 - DNA, 2142 bp, synthetic construct
  misc_feature 1..2142: note = Description of Artificial Sequence: Synthetic coding sequence
  source 1..2142: mol_type = other DNA
atgctgtgcgtgggcagactgggcggcctgggcgccagagccgccgccctgccccccagaagagccggcagaggcagcctggaggccggcatcagagccagaagagtgagcaccagctggagccccgtgggcgccgccttcaacgtgaagccccagggcagcagactggacctgttcggcgagagaagaggcctgttcggcgtgcccgagctgagcgcccccgagggcttccacatcgcccaggagaaggccctgagaaagaccgagctgctggtggacagagcctgcagcaccccccccggcccccagaccgtgctgatcttcgacgagctgagcgacagcctgtgcagagtggccgacctggccgacttcgtgaagatcgcccaccccgagcccgccttcagagaggccgccgaggaggcctgcagaagcatcggcaccatggtggagaagctgaacaccaacgtggacctgtaccagagcctgcagaagctgctggccgacaagaagctggtggacagcctggaccccgagaccagaagagtggccgagctgttcatgttcgacttcgagatcagcggcatccacctggacaaggagaagagaaagagagccgtggacctgaacgtgaagatcctggacctgagcagcaccttcctgatgggcaccaacttccccaacaagatcgagaagcacctgctgcccgagcacatcagaagaaacttcaccagcgccggcgaccacatcatcatcgacggcctgcacgccgagagccccgacgacctggtgagagaggccgcctacaagatcttcctgtaccccaacgccggccagctgaagtgcctggaggagctgctgagcagcagagacctgctggccaagctggtgggctacagcaccttcagccacagagccctgcagggcaccatcgccaagaaccccgagaccgtgatgcagttcctggagaagctgagcgacaagctgagcgagagaaccctgaaggacttcgagatgatcagaggcatgaagatgaagctgaacccccagaacagcgaggtgatgccctgggaccccccctactacagcggcgtgatcagagccgagagatacaacatcgagcccagcctgtactgccccttcttcagcctgggcgcctgcatggagggcctgaacatcctgctgaacagactgctgggcatcagcctgtacgccgagcagcccgccaagggcgaggtgtggagcgaggacgtgagaaagctggccgtggtgcacgagagcgagggcctgctgggctacatctactgcgacttcttccagagagccgacaagccccaccaggactgccacttcaccatcagaggcggcagactgaaggaggacggcgactaccagctgcccgtggtggtgctgatgctgaacctgcccagaagcagcagaagcagccccaccctgctgacccccagcatgatggagaacctgttccacgagatgggccacgccatgcacagcatgctgggcagaaccagataccagcacgtgaccggcaccagatgccccaccgacttcgccgaggtgcccagcatcctgatggagtacttcgccaacgactacagagtggtgaaccagttcgccagacactaccagaccggccagcccctgcccaagaacatggtgagcagactgtgcgagagcaagaaggtgtgcgccgccgccgacatgcagctgcaggtgttctacgccaccctggaccagatctaccacggcaagcaccccctgagaaacagcaccaccgacatcctgaaggagacccaggagaagttctacggcctgccctacgtgcccaacaccgcctggcagctgagattcagccacctggtgggctacggcgccagatactacagctacctgatgagcagagccgtggccagcatggtgtggaaggagtgcttcctgcaggaccccttcaacagagccgccggcgagagatacagaagagagatgctggcccacggcggcggcagagagcccatgctgatggtggagggcatgctgcagaagtgccccagcgtggacgacttcgtgagcgccctggtgagcgacctggacctggacttcgagaccttcctgatggacagcgagtag

SEQ ID NO: 89070 - DNA, 1353 bp, synthetic construct; identical to SEQ ID NO: 77832
  misc_feature 1..1353: note = Description of Artificial Sequence: Synthetic coding sequence
  source 1..1353: mol_type = other DNA

SEQ ID NO: 89071 - DNA, 1170 bp, synthetic construct
  misc_feature 1..1170: note = Description of Artificial Sequence: Synthetic coding sequence
  source 1..1170: mol_type = other DNA
atgagagtgctggtgagaagatgctggggcccccccctggcccacggcgccagaagaggcagacccagcccccagtggagagccctggccagactgggctgggaggactgcagagacagcagagtgagagagaagcccccctggagagtgctgttcttcggcaccgaccagttcgccagagaggccctgagagccctgcacgccgccagagagaacaaggaggaggagctgatcgacaagctggaggtggtgaccatgcccagccccagccccaagggcctgcccgtgaagcagtacgccgtgcagagccagctgcccgtgtacgagtggcccgacgtgggcagcggcgagtacgacgtgggcgtggtggccagcttcggcagactgctgaacgaggccctgatcctgaagttcccctacggcatcctgaacgtgcaccccagctgcctgcccagatggagaggccccgcccccgtgatccacaccgtgctgcacggcgacaccgtgaccggcgtgaccatcatgcagatcagacccaagagattcgacgtgggccccatcctgaagcaggagaccgtgcccgtgccccccaagagcaccgccaaggagctggaggccgtgctgagcagactgggcgccaacatgctgatcagcgtgctgaagaacctgcccgagagcctgagcaacggcagacagcagcccatggagggcgccacctacgcccccaagatcagcgccggcaccagctgcatcaagtgggaggagcagaccagcgagcagatcttcagactgtacagagccatcggcaacatcatccccctgcagaccctgtggatggccaacaccatcaagctgctggacctggtggaggtgaacagcagcgtgctggccgaccccaagctgaccggccaggccctgatccccggcagcgtgatctaccacaagcagagccagatcctgctggtgtactgcaaggacggctggatcggcgtgagaagcgtgatgctgaagaagagcctgaccgccaccgacttctacaacggctacctgcacccctggtaccagaagaacagccaggcccagcccagccagtgcagattccagaccctgagactgcccaccaagaagaagcagaagaagaccgtggccatgcagcagtgcatcgagtag

SEQ ID NO: 89072 - DNA, 1749 bp, synthetic construct
  misc_feature 1..1749: note = Description of Artificial Sequence: Synthetic coding sequence
  source 1..1749: mol_type = other DNA
atggccgtgcccggcgtgggcctgctgaccagactgaacctgtgcgccagaagaagaaccagagtgcagagacccatcgtgagactgctgagctgccccggcaccgtggccaaggacctgagaagagacgagcagcccagcggcagcgtggagaccggcttcgaggacaagatccccaagagaagattcagcgagatgcagaacgagagaagagagcaggcccagagaaccgtgctgatccactgccccgagaagatcagcgagaacaagttcctgaagtacctgagccagttcggccccatcaacaaccacttcttctacgagagcttcggcctgtacgccgtggtggagttctgccagaaggagagcatcggcagcctgcagaacggcacccacacccccagcaccgccatggagaccgccatccccttcagaagcagattcttcaacctgaagctgaagaaccagaccagcgagagaagcagagtgagaagcagcaaccagctgcccagaagcaacaagcagctgttcgagctgctgtgctacgccgagagcatcgacgaccagctgaacaccctgctgaaggagttccagctgaccgaggagaacaccaagctgagatacctgacctgcagcctgatcgaggacatggccgccgcctacttccccgactgcatcgtgagacccttcggcagcagcgtgaacaccttcggcaagctgggctgcgacctggacatgttcctggacctggacgagaccagaaacctgagcgcccacaagatcagcggcaacttcctgatggagttccaggtgaagaacgtgcccagcgagagaatcgccacccagaagatcctgagcgtgctgggcgagtgcctggaccacttcggccccggctgcgtgggcgtgcagaagatcctgaacgccagatgccccctggtgagattcagccaccaggccagcggcttccagtgcgacctgaccaccaacaacagaatcgccctgaccagcagcgagctgctgtacatctacggcgccctggacagcagagtgagagccctggtgttcagcgtgagatgctgggccagagcccacagcctgaccagcagcatccccggcgcctggatcaccaacttcagcctgaccatgatggtgatcttcttcctgcagagaagaagcccccccatcctgcccaccctggacagcctgaagaccctggccgacgccgaggacaagtgcgtgatcgagggcaacaactgcaccttcgtgagagacctgagcagaatcaagcccagccagaacaccgagaccctggagctgctgctgaaggagttcttcgagtacttcggcaacttcgccttcgacaagaacagcatcaacatcagacagggcagagagcagaacaagcccgacagcagccccctgtacatccagaaccccttcgagaccagcctgaacatcagcaagaacgtgagccagagccagctgcagaagttcgtggacctggccagagagagcgcctggatcctgcagcaggaggacaccgacagacccagcatcagcagcaacagaccctggggcctggtgagcctgctgctgcccagcgcccccaacagaaagagcttcaccaagaagaagagcaacaagttcgccatcgagaccgtgaagaacctgctggagagcctgaagggcaacagaaccgagaacttcaccaagaccagcggcaagagaaccatcagcacccagacctag

SEQ ID NO: 89073 - DNA, 2139 bp, synthetic construct
  misc_feature 1..2139: note = Description of Artificial Sequence: Synthetic coding sequence
  source 1..2139: mol_type = other DNA
atggcctgggccaagaaggtgggcggcagagccggccagggcagaagcctgagcagatgcgaccccatcatcctggaccccgagtggctgtacggcccccccgagggcgagggcggccccgagggcgtgggcggcgagaccagagccagcatccacccccccctgagaaccggcagacaccaccagaaggtgaaccacaacatcagaggccccgagggcagcgccaaggacgccgcccccggcggcggcggccaccaccaggccggccccggccagagaggcgacgaggacggcgccctgcagcacctgtgcggcggcggcggcggcgtgggcgtgagcgtgggcagaggcaccggcaccagcgtggccgccgagcaccccagcctgcaggtgaagctgctggagctgcaggagctggtgctgagactggccggcgaccacaacgagggccacggcaagttcctggccgccgcccagaaccccgccgacgaccccgcccccggcgcccccgccccccaggagctgggcgccgccgacaagcagggcggcttcgaggacaagatccccaagagaagattcagcgagatgcagaacgagagaagagagcaggcccagagaaccgtgctgatccactgccccgagaagatcagcgagaacaagttcctgaagtacctgagccagttcggccccatcaacaaccacttcttctacgagagcttcggcctgtacgccgtggtggagttctgccagaaggagagcatcggcagcctgcagaacggcacccacacccccagcaccgccatggagaccgccatccccttcagaagcagattcttcaacctgaagctgaagaaccagaccagcgagagaagcagagtgagaagcagcaaccagctgcccagaagcaacaagcagctgttcgagctgctgtgctacgccgagagcatcgacgaccagctgaacaccctgctgaaggagttccagctgaccgaggagaacaccaagctgagatacctgacctgcagcctgatcgaggacatggccgccgcctacttccccgactgcatcgtgagacccttcggcagcagcgtgaacaccttcggcaagctgggctgcgacctggacatgttcctggacctggacgagaccagaaacctgagcgcccacaagatcagcggcaacttcctgatggagttccaggtgaagaacgtgcccagcgagagaatcgccacccagaagatcctgagcgtgctgggcgagtgcctggaccacttcggccccggctgcgtgggcgtgcagaagatcctgaacgccagatgccccctggtgagattcagccaccaggccagcggcttccagtgcgacctgaccaccaacaacagaatcgccctgaccagcagcgagctgctgtacatctacggcgccctggacagcagagtgagagccctggtgttcagcgtgagatgctgggccagagcccacagcctgaccagcagcatccccggcgcctggatcaccaacttcagcctgaccatgatggtgatcttcttcctgcagagaagaagcccccccatcctgcccaccctggacagcctgaagaccctggccgacgccgaggacaagtgcgtgatcgagggcaacaactgcaccttcgtgagagacctgagcagaatcaagcccagccagaacaccgagaccctggagctgctgctgaaggagttcttcgagtacttcggcaacttcgccttcgacaagaacagcatcaacatcagacagggcagagagcagaacaagcccgacagcagccccctgtacatccagaaccccttcgagaccagcctgaacatcagcaagaacgtgagccagagccagctgcagaagttcgtggacctggccagagagagcgcctggatcctgcagcaggaggacaccgacagacccagcatcagcagcaacagaccctggggcctggtgagcctgctgctgcccagcgcccccaacagaaagagcttcaccaagaagaagagcaacaagttcgccatcgagaccgtgaagaacctgctggagagcctgaagggcaacagaaccgagaacttcaccaagaccagcggcaagagaaccatcagcacccagacctag

SEQ ID NO: 89074 - DNA, 660 bp, synthetic construct
  misc_feature 1..660: note = Description of Artificial Sequence: Synthetic coding sequence
  source 1..660: mol_type = other DNA
atgcagaacgagagaagagagcaggcccagagaaccgtgctgatccactgccccgagaagatcagcgagaacaagttcctgaagtacctgagccagttcggccccatcaacaaccacttcttctacgagagcttcggcctgtacgccgtggtggagttctgccagaaggagagcatcggcagcctgcagaacggcacccacacccccagcaccgccatggagaccgccatccccttcagaagcagattcttcaacctgaagctgaagaaccagaccagcgagagaagcagagtgagaagcagcaaccagctgcccagaagcaacaagcagctgttcgagctgctgtgctacgccgagagcatcgacgaccagctgaacaccctgctgaaggagttccagctgaccgaggagaacaccaagctgagatacctgacctgcagcctgatcgaggacatggccgccgcctacttccccgactgcatcgtgagacccttcggcagcagcgtgaacaccttcggcaagctgggctgcgacctggacatgttcctggacctggacgagaccagaaacctgagcgcccacaagatcagcggcaacttcctgatggagttccaggtgaagaacgtgcccagcgagagaatcgccacccagaagatctag

SEQ ID NO: 89075 - DNA, 453 bp, synthetic construct
  misc_feature 1..453: note = Description of Artificial Sequence: Synthetic coding sequence
  source 1..453: mol_type = other DNA
gacctgagaagagacgagcagcccagcggcagcgtggagaccggcttcgaggacaagatccccaagagaagattcagcgagatgcagaacgagagaagagagcaggcccagagaaccgtgctgatccactgccccgagaagatcagcgagaacaagttcctgaagtacctgagccagttcggccccatcaacaaccacttcttctacgagagcttcggcctgtacgccgtggtggagttctgccagaaggagagcatcggcagcctgcagaacggcacccacacccccagcaccgccatggagaccgccatccccttcagaagcagattcttcaacctgaagctgaagaaccagaccagcgagagaagcagagtgagaagcagcaaccagctgcccagaagcaacaagcagctgttcgagctgctgtgctacgccgagagcgtgagcttctag

SEQ ID NO: 89076 - DNA, 309 bp, synthetic construct
  misc_feature 1..309: note = Description of Artificial Sequence: Synthetic coding sequence
  source 1..309: mol_type = other DNA
atgttcctgaccgccctgctgtggagaggcagaatccccggcagacagtggatcggcaagcacagaagacccagattcgtgagcctgagagccaagcagaacatgatcagaagactggagatcgaggccgagaaccactactggctgagcatgccctacatgaccagagagcaggagagaggccacgccgccgtgagaagaagagaggccttcgaggccatcaaggccgccgccaccagcaagttccccccccacagattcatcgccgaccagctggaccacctgaacgtgaccaagaagtggagctag

SEQ ID NO: 89077 - DNA, 978 bp, synthetic construct
  misc_feature 1..978: note = Description of Artificial Sequence: Synthetic coding sequence
  source 1..978: mol_type = other DNA
atggccgccgccgtgagatgcatgggcagagccctgatccaccaccagagacacagcctgagcaagatggtgtaccagaccagcctgtgcagctgcagcgtgaacatcagagtgcccaacagacacttcgccgccgccaccaagagcgccaagaagaccaagaagggcgccaaggagaagacccccgacgagaagaaggacgagatcgagaagatcaaggcctacccctacatggagggcgagcccgaggacgacgtgtacctgaagagactgtaccccagacagatctacgaggtggagaaggccgtgcacctgctgaagaagttccagatcctggacttcaccagccccaagcagagcgtgtacctggacctgaccctggacatggccctgggcaagaagaagaacgtggagcccttcaccagcgtgctgagcctgccctaccccttcgccagcgagatcaacaaggtggccgtgttcaccgagaacgccagcgaggtgaagatcgccgaggagaacggcgccgccttcgccggcggcaccagcctgatccagaagatctgggacgacgagatcgtggccgacttctacgtggccgtgcccgagatcatgcccgagctgaacagactgagaaagaagctgaacaagaagtaccccaagctgagcagaaacagcatcggcagagacatccccaagatgctggagctgttcaagaacggccacgagatcaaggtggacgaggagagagagaacttcctgcagaccaagatcgccaccctggacatgagcagcgaccagatcgccgccaacctgcaggccgtgatcaacgaggtgtgcagacacagacccctgaacctgggccccttcgtggtgagagccttcctgagaagcagcaccagcgagggcctgctgctgaagatcgaccccctgctgcccaaggaggtgaagaacgaggagagcgagaaggaggacgcctag

SEQ ID NO: 89078 - DNA, 909 bp, synthetic construct
  misc_feature 1..909: note = Description of Artificial Sequence: Synthetic coding sequence
  source 1..909: mol_type = other DNA
atggtgtaccagaccagcctgtgcagctgcagcgtgaacatcagagtgcccaacagacacttcgccgccgccaccaagagcgccaagaagaccaagaagggcgccaaggagaagacccccgacgagaagaaggacgagatcgagaagatcaaggcctacccctacatggagggcgagcccgaggacgacgtgtacctgaagagactgtaccccagacagatctacgaggtggagaaggccgtgcacctgctgaagaagttccagatcctggacttcaccagccccaagcagagcgtgtacctggacctgaccctggacatggccctgggcaagaagaagaacgtggagcccttcaccagcgtgctgagcctgccctaccccttcgccagcgagatcaacaaggtggccgtgttcaccgagaacgccagcgaggtgaagatcgccgaggagaacggcgccgccttcgccggcggcaccagcctgatccagaagatctgggacgacgagatcgtggccgacttctacgtggccgtgcccgagatcatgcccgagctgaacagactgagaaagaagctgaacaagaagtaccccaagctgagcagaaacagcatcggcagagacatccccaagatgctggagctgttcaagaacggccacgagatcaaggtggacgaggagagagagaacttcctgcagaccaagatcgccaccctggacatgagcagcgaccagatcgccgccaacctgcaggccgtgatcaacgaggtgtgcagacacagacccctgaacctgggccccttcgtggtgagagccttcctgagaagcagcaccagcgagggcctgctgctgaagatcgaccccctgctgcccaaggagatcaagagccagcccaagaagaagaagaactag

SEQ ID NO: 89079 - DNA, 816 bp, synthetic construct
  misc_feature 1..816: note = Description of Artificial Sequence: Synthetic coding sequence
  source 1..816: mol_type = other DNA
atgatcagcgcccactgcaacctgcacctgcccggcagcagcgacagccccgccagcgccagccaggtggccggcatcaccggcagactgcccaccctgcagaccgtgagatacggcagcaaggccgtgaccagacacagaagagtgatgcacttccagagacagaagctgatggccgtgaccgagtacatcccccccaagcccgccatccaccccagctgcctgcccagcccccccagccccccccaggaggagatcggcctgatcagactgctgagaagagagatcgccgccgtgttccaggacaacagaatgatcgccgtgtgccagaacgtggccctgagcgccgaggacaagctgctgatgagacaccagctgagaaagcacaagatcctgatgaaggtgttccccaaccaggtgctgaagcccttcctggaggacagcaagtaccagaacctgctgcccctgttcgtgggccacaacatgctgctggtgagcgaggagcccaaggtgaaggagatggtgagaatcctgagaaccgtgcccttcctgcccctgctgggcggctgcatcgacgacaccatcctgagcagacagggcttcatcaactacagcaagctgcccagcctgcccctggtgcagggcgagctggtgggcggcctgacctgcctgaccgcccagacccacagcctgctgcagcaccagcccctgcagctgaccaccctgctggaccagtacatcagagagcagagagagaaggacagcgtgatgagcgccaacggcaagcccgaccccgacaccgtgcccgacagctag

SEQ ID NO: 89080 - DNA, 786 bp, synthetic construct
  misc_feature 1..786: note = Description of Artificial Sequence: Synthetic coding sequence
  source 1..786: mol_type = other DNA
atggccgccgccgtggccggcatgctgagaggcggcctgctgccccaggccggcagactgcccaccctgcagaccgtgagatacggcagcaaggccgtgaccagacacagaagagtgatgcacttccagagacagaagctgatggccgtgaccgagtacatcccccccaagcccgccatccaccccagctgcctgcccagcccccccagccccccccaggaggagatcggcctgatcagactgctgagaagagagatcgccgccgtgttccaggacaacagaatgatcgccgtgtgccagaacgtggccctgagcgccgaggacaagctgctgatgagacaccagctgagaaagcacaagatcctgatgaaggtgttccccaaccaggtgctgaagcccttcctggaggacagcaagtaccagaacctgctgcccctgttcgtgggccacaacatgctgctggtgagcgaggagcccaaggtgaaggagatggtgagaatcctgagaaccgtgcccttcctgcccctgctgggcggctgcatcgacgacaccatcctgagcagacagggcttcatcaactacagcaagctgcccagcctgcccctggtgcagggcgagctggtgggcggcctgacctgcctgaccgcccagacccacagcctgctgcagcaccagcccctgcagctgaccaccctgctggaccagtacatcagagagcagagagagaaggacagcgtgatgagcgccaacggcaagcccgaccccgacaccgtgcccgacagctag

SEQ ID NO: 89081 - DNA, 816 bp, synthetic construct; identical to SEQ ID NO: 89079
  misc_feature 1..816: note = Description of Artificial Sequence: Synthetic coding sequence
  source 1..816: mol_type = other DNA

SEQ ID NO: 89082 - DNA, 579 bp, synthetic construct
  misc_feature 1..579: note = Description of Artificial Sequence: Synthetic coding sequence
  source 1..579: mol_type = other DNA
atgagcaagctgggcagagccgccagaggcctgagaaagcccgaggtgggcggcgtgatcagagccatcgtgagagccggcctggccatgcccggcccccccctgggccccgtgctgggccagagaggcgtgagcatcaaccagttctgcaaggagttcaacgagagaaccaaggacatcaaggagggcatccccctgcccaccaagatcctggtgaagcccgacagaaccttcgagatcaagatcggccagcccaccgtgagctacttcctgaaggccgccgccggcatcgagaagggcgccagacagaccggcaaggaggtggccggcctggtgaccctgaagcacgtgtacgagatcgccagaatcaaggcccaggacgaggccttcgccctgcaggacgtgcccctgagcagcgtggtgagaagcatcatcggcagcgccagaagcctgggcatcagagtggtgaaggacctgagcagcgaggagctggccgccttccagaaggagagagccatcttcctggccgcccagaaggaggccgacctggccgcccaggaggaggccgccaagaagtag

SEQ ID NO: 89083 - DNA, 546 bp, synthetic construct
  misc_feature 1..546: note = Description of Artificial Sequence: Synthetic coding sequence
  source 1..546: mol_type = other DNA
atgagcaagctgggcagagccgccagaggcctgagaaagcccgaggtgggcggcgtgatcagagccatcgtgagagccggcctggccatgcccggcccccccctgggccccgtgctgggccagagaggcgtgagcatcaaccagttctgcaaggagttcaacgagagaaccaaggacatcaaggagggcatccccctgcccaccaagatcctggtgaagcccgacagaaccttcgagatcaagatcggccagcccaccgtgagctacttcctgaaggccgccgccggcatcgagaagggcgccagacagaccggcaaggaggtggccggcctggtgaccctgaagcacgtgtacgagatcgccagaatcaaggcccaggacgaggccttcgccctgcaggacgtgcccctgagcagcgtggtgagaagcatcatcggcagcgccagaagcctgggcatcagagtggtgaaggagagatgcagcgccaacgtgctgagaaacggcaagatcagcatgaaggaccccagcggcagaagcagcgtgtag

SEQ ID NO: 89084 - DNA, 501 bp, synthetic construct
  misc_feature 1..501: note = Description of Artificial Sequence: Synthetic coding sequence
  source 1..501: mol_type = other DNA
atgagcaagctgggcagagccgccagaggcctgagaaagcccgagagaggcgtgagcatcaaccagttctgcaaggagttcaacgagagaaccaaggacatcaaggagggcatccccctgcccaccaagatcctggtgaagcccgacagaaccttcgagatcaagatcggccagcccaccgtgagctacttcctgaaggccgccgccggcatcgagaagggcgccagacagaccggcaaggaggtggccggcctggtgaccctgaagcacgtgtacgagatcgccagaatcaaggcccaggacgaggccttcgccctgcaggacgtgcccctgagcagcgtggtgagaagcatcatcggcagcgccagaagcctgggcatcagagtggtgaaggacctgagcagcgaggagctggccgccttccagaaggagagagccatcttcctggccgcccagaaggaggccgacctggccgcccaggaggaggccgccaagaagtag

SEQ ID NO: 89085 - DNA, 891 bp, synthetic construct
  misc_feature 1..891: note = Description of Artificial Sequence: Synthetic coding sequence
  source 1..891: mol_type = other DNA
atggccgccgaggccagagtgagcagatggtacttcggcggcctggccagctgcggcgccgcctgctgcacccaccccctggacctgctgaaggtgcacctgcagacccagcaggaggtgaagctgagaatgaccggcatggccctgagagtggtgagaaccgacggcatcctggccctgtacagcggcctgagcgccagcctgtgcagacagatgacctacagcctgaccagattcgccatctacgagaccgtgagagacagagtggccaagggcagccagggccccctgcccttccacgagaaggtgctgctgggcagcgtgagcggcctggccggcggcttcgtgggcacccccgccgacctggtgaacgtgagaatgcagaacgacgtgaagctgccccagggccagagaagaaactacgcccacgccctggacggcctgtacagagtggccagagaggagggcctgagaagactgttcagcggcgccaccatggccagcagcagaggcgccctggtgaccgtgggccagctgagctgctacgaccaggccaagcagctggtgctgagcaccggctacctgagcgacaacatcttcacccacttcgtggccagcttcatcgccgccgccggcgacgagccccccccccagggcggctgcgccaccttcctgtgccagcccctggacgtgctgaagaccagactgatgaacagcaagggcgagtaccagggcgtgttccactgcgccgtggagaccgccaagctgggccccctggccttctacaagggcctggtgcccgccggcatcagactgatcccccacaccgtgctgaccttcgtgttcctggagcagctgagaaagaacttcggcatcaaggtgcccagctag

SEQ ID NO: 89086 - DNA, 537 bp, synthetic construct
  misc_feature 1..537: note = Description of Artificial Sequence: Synthetic coding sequence
  source 1..537: mol_type = other DNA
atgctgcccgccgccgccagacccctgtggggcccctgcctgggcctgagagccgccgccttcagactggccagaagacaggtgccctgcgtgtgcgccgtgagacacatgagaagcagcggccaccagagatgcgaggccctggccggcgcccccctggacaacgcccccaaggagtacccccccaagatccagcagctggtgcaggacatcgccagcctgaccctgctggagatcagcgacctgaacgagctgctgaagaagaccctgaagatccaggacgtgggcctggtgcccatgggcggcgtgatgagcggcgccgtgcccgccgccgccgcccaggaggccgtggaggaggacatccccatcgccaaggagagaacccacttcaccgtgagactgaccgaggccaagcccgtggacaaggtgaagctgatcaaggagatcaagaactacatcaaggccagcaccagcagcagacagagaagctggtggagcccctgccccggcaaccagagccagtgcagacagagctag

SEQ ID NO: 89087 - DNA, 597 bp, synthetic construct
  misc_feature 1..597: note = Description of Artificial Sequence: Synthetic coding sequence
  source 1..597: mol_type = other DNA
atgctgcccgccgccgccagacccctgtggggcccctgcctgggcctgagagccgccgccttcagactggccagaagacaggtgccctgcgtgtgcgccgtgagacacatgagaagcagcggccaccagagatgcgaggccctggccggcgcccccctggacaacgcccccaaggagtacccccccaagatccagcagctggtgcaggacatcgccagcctgaccctgctggagatcagcgacctgaacgagctgctgaagaagaccctgaagatccaggacgtgggcctggtgcccatgggcggcgtgatgagcggcgccgtgcccgccgccgccgcccaggaggccgtggaggaggacatccccatcgccaaggagagaacccacttcaccgtgagactgaccgaggccaagcccgtggacaaggtgaagctgatcaaggagatcaagaactacatccagggcatcaacctggtgcaggccaagaagctggtggagagcctgccccaggagatcaaggccaacgtggccaaggccgaggccgagaagatcaaggccgccctggaggccgtgggcggcaccgtggtgctggagtag

SEQ ID NO: 89088 - DNA, 864 bp, synthetic construct
  misc_feature 1..864: note = Description of Artificial Sequence: Synthetic coding sequence
  source 1..864: mol_type = other DNA
atggccgccgaggccagagtgagcagatggtacttcggcggcctggccagctgcggcgccgcctgctgcacccaccccctggacctgctgaaggtgcacctgcagacccagcaggaggtgaagctgagaatgaccggcatggccctgagagtggtgagaaccgacggcatcctggccctgtacagcggcctgagcgccagcctgtgcagacagatgacctacagcctgaccagattcgccatctacgagaccgtgagagacagagtggccaagggcagccagggccccctgcccttccacgagaaggtgctgctgggcagcgtgagcggcctggccggcggcttcgtgggcacccccgccgacctggtgaacgtgagaatgcagaacgacgtgaagctgccccagggccagagaagaaactacgcccacgccctggacggcctgtacagagtggccagagaggagggcctgagaagactgttcagcggcgccaccatggccagcagcagaggcgccctggtgaccgtgggccagctgagctgctacgaccaggccaagcagctggtgctgagcaccggctacctgagcgacaacatcttcacccacttcgtggccagcttcatcgccggcggctgcgccaccttcctgtgccagcccctggacgtgctgaagaccagactgatgaacagcaagggcgagtaccagggcgtgttccactgcgccgtggagaccgccaagctgggccccctggccttctacaagggcctggtgcccgccggcatcagactgatcccccacaccgtgctgaccttcgtgttcctggagcagctgagaaagaacttcggcatcaaggtgcccagctag

SEQ ID NO: 89089 - DNA, 1329 bp, synthetic construct
  misc_feature 1..1329: note = Description of Artificial Sequence: Synthetic coding sequence
  source 1..1329: mol_type = other DNA
atgctgcccgccgccgccagacccctgtggggcccctgcctgggcctgagagccgccgccttcagactggccagaagacaggtgccctgcgtgtgcgccgtgagacacatgagaagcagcggccaccagagatgcgaggccctggccggcgcccccctggacaacgcccccaaggagtacccccccaagatccagcagctggtgcaggacatcgccagcctgaccctgctggagatcagcgacctgaacgagctgctgaagaagaccctgaagatccaggacgtgggcctggtgcccatgggcggcgtgatgagcggcgccgtgcccgccgccgccgcccaggaggccgtggaggaggacatccccatcgccaaggagagaacccacttcaccgtgagactgaccgaggccaagcccgtggacaaggtgaagctgatcaaggagatcaagaactacatccagggcatcaacctggtgcaggccaagaagctggtggagagcctgccccaggagatcaaggccaacgtggccaaggccgaggccgagaagatcaaggccgccctggaggccacccagcaggaggtgaagctgagaatgaccggcatggccctgagagtggtgagaaccgacggcatcctggccctgtacagcggcctgagcgccagcctgtgcagacagatgacctacagcctgaccagattcgccatctacgagaccgtgagagacagagtggccaagggcagccagggccccctgcccttccacgagaaggtgctgctgggcagcgtgagcggcctggccggcggcttcgtgggcacccccgccgacctggtgaacgtgagaatgcagaacgacgtgaagctgccccagggccagagaagaaactacgcccacgccctggacggcctgtacagagtggccagagaggagggcctgagaagactgttcagcggcgccaccatggccagcagcagaggcgccctggtgaccgtgggccagctgagctgctacgaccaggccaagcagctggtgctgagcaccggctacctgagcgacaacatcttcacccacttcgtggccagcttcatcgccggcggctgcgccaccttcctgtgccagcccctggacgtgctgaagaccagactgatgaacagcaagggcgagtaccagggcgtgttccactgcgccgtggagaccgccaagctgggccccctggccttctacaagggcctggtgcccgccggcatcagactgatcccccacaccgtgctgaccttcgtgttcctggagcagctgagaaagaacttcggcatcaaggtgcccagctag

SEQ ID NO: 89090 - DNA, 735 bp, synthetic construct
  misc_feature 1..735: note = Description of Artificial Sequence: Synthetic coding sequence
  source 1..735: mol_type = other DNA
atgaccggcatggccctgagagtggtgagaaccgacggcatcctggccctgtacagcggcctgagcgccagcctgtgcagacagatgacctacagcctgaccagattcgccatctacgagaccgtgagagacagagtggccaagggcagccagggccccctgcccttccacgagaaggtgctgctgggcagcgtgagcggcctggccggcggcttcgtgggcacccccgccgacctggtgaacgtgagaatgcagaacgacgtgaagctgccccagggccagagaagaaactacgcccacgccctggacggcctgtacagagtggccagagaggagggcctgagaagactgttcagcggcgccaccatggccagcagcagaggcgccctggtgaccgtgggccagctgagctgctacgaccaggccaagcagctggtgctgagcaccggctacctgagcgacaacatcttcacccacttcgtggccagcttcatcgccggcggctgcgccaccttcctgtgccagcccctggacgtgctgaagaccagactgatgaacagcaagggcgagtaccagggcgtgttccactgcgccgtggagaccgccaagctgggccccctggccttctacaagggcctggtgcccgccggcatcagactgatcccccacaccgtgctgaccttcgtgttcctggagcagctgagaaagaacttcggcatcaaggtgcccagctag

SEQ ID NO: 89091 - DNA, 438 bp, synthetic construct
  misc_feature 1..438: note = Description of Artificial Sequence: Synthetic coding sequence
  source 1..438: mol_type = other DNA
atggccttcttcaccggcctgtggggccccttcacctgcgtgagcagagtgctgagccaccactgcttcagcaccaccggcagcctgagcgccatccagaagatgaccagagtgagagtggtggacaacagcgccctgggcaacagcccctaccacagagcccccagatgcatccacgtgtacaagaagaacggcgtgggcaaggtgggcgaccagatcctgctggccatcaagggccagaagaagaaggccctgatcgtgggccactgcatgcccggccccagaatgacccccagattcgacagcaacaacgtggtgctgatcgaggacaacggcaaccccgtgggcaccagaatcaagacccccatccccaccagcctgagaaagagagagggcgagtacagcaaggtgctggccatcgcccagaacttcgtgtag

SEQ ID NO: 89092 - DNA, 891 bp, synthetic construct
  misc_feature 1..891: note = Description of Artificial Sequence: Synthetic coding sequence
  source 1..891: mol_type = other DNA
atggccggccccctgcagggcggcggcgccagagccctggacctgctgagaggcctgcccagagtgagcctggccaacctgaagcccaaccccggcagcaagaagcccgagagaagacccagaggcagaagaagaggcagaaagtgcggcagaggccacaagggcgagagacagagaggcaccagacccagactgggcttcgagggcggccagacccccttctacatcagaatccccaagtacggcttcaacgagggccacagcttcagaagacagtacaagcccctgagcctgaacagactgcagtacctgatcgacctgggcagagtggaccccagccagcccatcgacctgacccagctggtgaacggcagaggcgtgaccatccagcccctgaagagagactacggcgtgcagctggtggaggagggcgccgacaccttcaccgccaaggtgaacatcgaggtgcagctggccagcgagctggccatcgccgccatcgagaagaacggcggcgtggtgaccaccgccttctacgaccccagaagcctggacatcgtgtgcaagcccgtgcccttcttcctgagaggccagcccatccccaagagaatgctgccccccgaggagctggtgccctactacaccgacgccaagaacagaggctacctggccgaccccgccaagttccccgaggccagactggagctggccagaaagtacggctacatcctgcccgacatcaccaaggacgagctgttcaagatgctgtgcaccagaaaggaccccagacagatcttcttcggcctggcccccggctgggtggtgaacatggccgacaagaagatcctgaagcccaccgacgagaacctgctgaagtactacaccagctag

SEQ ID NO: 89093 - DNA, 756 bp, synthetic construct
  misc_feature 1..756: note = Description of Artificial Sequence: Synthetic coding sequence
  source 1..756: mol_type = other DNA
atgtggagactgctggccagagccagcgcccccctgctgagagtgcccctgagcgacagctgggccctgctgcccgccagcgccggcgtgaagaccctgctgcccgtgcccagcttcgaggacgtgagcatccccgagaagcccaagctgagattcatcgagagagcccccctggtgcccaaggtgagaagagagcccaagaacctgagcgacatcagaggccccagcaccgaggccaccgagttcaccgagggcaacttcgccatcctggccctgggcggcggctacctgcactggggccacttcgagatgatgagactgaccatcaacagaagcatggaccccaagaacatgttcgccatctggagagtgcccgcccccttcaagcccatcaccagaaagagcgtgggccacagaatgggcggcggcaagggcgccatcgaccactacgtgacccccgtgaaggccggcagactggtggtggagatgggcggcagatgcgagttcgaggaggtgcagggcttcctggaccaggtggcccacaagctgcccttcgccgccaaggccgtgagcagaggcaccctggagaagatgagaaaggaccaggaggagagagagagaaacaaccagaacccctggaccttcgagagaatcgccaccgccaacatgctgggcatcagaaaggtgctgagcccctacgacctgacccacaagggcaagtactggggcaagttctacatgcccaagagagtgtag

SEQ ID NO: 89094 - DNA, 528 bp, synthetic construct
  misc_feature 1..528: note = Description of Artificial Sequence: Synthetic coding sequence
  source 1..528: mol_type = other DNA
atgagactgagcgtggccgccgccatcagccacggcagagtgttcagaagaatgggcctgggccccgagagcagaatccacctgctgagaaacctgctgaccggcctggtgagacacgagagaatcgaggccccctgggccagagtggacgagatgagaggctacgccgagaagctgatcgactacggcaagctgggcgacaccaacgagagagccatgagaatggccgacttctggctgaccgagaaggacctgatccccaagctgttccaggtgctggcccccagatacaaggaccagaccggcggctacaccagaatgctgcagatccccaacagaagcctggacagagccaagatggccgtgatcgagtacaagggcaactgcctgccccccctgcccctgcccagaagagacagccacctgaccctgctgaaccagctgctgcagggcctgagacaggacctgagacagagccaggaggccagcaaccacagcagccacaccgcccagacccccggcatctag

SEQ ID NO: 89095 - DNA, 543 bp, synthetic construct
  misc_feature 1..543: note = Description of Artificial Sequence: Synthetic coding sequence
  source 1..543: mol_type = other DNA
atggccctgagaagcagattctggggcctgttcagcgtgtgcagaaaccccggctgcagattcgccgccctgagcaccagcagcgagcccgccgccaagcccgaggtggaccccgtggagaacgaggccgtggcccccgagttcaccaacagaaaccccagaaacctggagctgctgagcgtggccagaaaggagagaggctggagaaccgtgttccccagcagagagttctggcacagactgagagtgatcagaacccagcaccacgtggaggccctggtggagcaccagaacggcaaggtggtggtgagcgccagcaccagagagtgggccatcaagaagcacctgtacagcaccagaaacgtggtggcctgcgagagcatcggcagagtgctggcccagagatgcctggaggccggcatcaacttcatggtgtaccagcccaccccctgggaggccgccagcgacagcatgaagagactgcagagcgccatgaccgagggcggcgtggtgctgagagagccccagagaatctacgagtag

SEQ ID NO: 89096 - DNA, 879 bp, synthetic construct
  misc_feature 1..879: note = Description of Artificial Sequence: Synthetic coding sequence
  source 1..879: mol_type = other DNA
atggccgcctgcatcgccgccggccactgggccgccatgggcctgggcagaagcttccaggccgccagaaccctgctgcccccccccgccagcatcgcctgcagagtgcacgccggccccgtgagacagcagagcaccggccccagcgagcccggcgccttccagcccccccccaagcccgtgatcgtggacaagcacagacccgtggagcccgagagaagattcctgagccccgagttcatccccagaagaggcagaaccgaccccctgaagttccagatcgagagaaaggacatgctggagagaagaaaggtgctgcacatccccgagttctacgtgggcagcatcctgagagtgaccaccgccgacccctacgccagcggcaagatcagccagttcctgggcatctgcatccagagaagcggcagaggcctgggcgccaccttcatcctgagaaacgtgatcgagggccagggcgtggagatctgcttcgagctgtacaaccccagagtgcaggagatccaggtggtgaagctggagaagagactggacgacagcctgctgtacctgagagacgccctgcccgagtacagcaccttcgacgtgaacatgaagcccgtggtgcaggagcccaaccagaaggtgcccgtgaacgagctgaaggtgaagatgaagcccaagccctggagcaagagatgggagagacccaacttcaacatcaagggcatcagattcgacctgtgcctgaccgagcagcagatgaaggaggcccagaagtggaaccagccctggctggagttcgacatgatgagagagtacgacaccagcaagatcgaggccgccatctggaaggagatcgaggccagcaagagaagctag

SEQ ID NO: 89097 - DNA, 879 bp, synthetic construct; identical to SEQ ID NO: 89096
  misc_feature 1..879: note = Description of Artificial Sequence: Synthetic coding sequence
  source 1..879: mol_type = other DNA

SEQ ID NO: 89098 - DNA, 240 bp, synthetic construct
  misc_feature 1..240: note = Description of Artificial Sequence: Synthetic coding sequence
  source 1..240: mol_type = other DNA
aaggtgcccgtgaacgagctgaaggtgaagatgaagcccaagccctggagcaagagatgggagagacccaacttcaacatcaagggcatcagattcgacctgtgcctgaccgagcagcagatgaaggaggcccagaagtggaaccagccctggctggagttcgacatgatgagagagtacgacaccagcaagatcgaggccgccatctggaaggagatcgaggccagcaagagaagctag

SEQ ID NO: 89099 - DNA, 918 bp, synthetic construct
  misc_feature 1..918: note = Description of Artificial Sequence: Synthetic coding sequence
  source 1..918: mol_type = other DNA
atggccctgtgcgccctgaccagagccctgagaagcctgaacctggccccccccaccgtggccgcccccgcccccagcctgttccccgccgcccagatgatgaacaacggcctgctgcagcagcccagcgccctgatgctgctgccctgcagacccgtgctgaccagcgtggccctgaacgccaacttcgtgagctggaagagcagaaccaagtacaccatcacccccgtgaagatgagaaagagcggcggcagagaccacaccggcagaatcagagtgcacggcatcggcggcggccacaagcagagatacagaatgatcgacttcctgagattcagacccgaggagaccaagagcggccccttcgaggagaaggtgatccaggtgagatacgacccctgcagaagcgccgacatcgccctggtggccggcggcagcagaaagagatggatcatcgccaccgagaacatgcaggccggcgacaccatcctgaacagcaaccacatcggcagaatggccgtggccgccagagagggcgacgcccaccccctgggcgccctgcccgtgggcaccctgatcaacaacgtggagagcgagcccggcagaggcgcccagtacatcagagccgccggcacctgcggcgtgctgctgagaaaggtgaacggcaccgccatcatccagctgcccagcaagagacagatgcaggtgctggagacctgcgtggccaccgtgggcagagtgagcaacgtggaccacaacaagagagtgatcggcaaggccggcagaaacagatggctgggcaagagacccaacagcggcagatggcacagaaagggcggctgggccggcagaaagatcagacccctgccccccatgaagagctacgtgaagctgcccagcgccagcgcccagagctag

SEQ ID NO: 89100 - DNA, 450 bp, synthetic construct
  misc_feature 1..450: note = Description of Artificial Sequence: Synthetic coding sequence
  source 1..450: mol_type = other DNA
atggtgttcctgaccgcccagctgtggctgagaaacagagtgaccgacagatacttcagaatccaggaggtgctgaagcacgccagacacttcagaggcagaaagaacagatgctacagactggccgtgagaaccgtgatcagagccttcgtgaagtgcaccaaggccagatacctgaagaagaagaacatgagaaccctgtggatcaacagaatcaccgccgccagccaggagcacggcctgaagtaccccgccctgatcggcaacctggtgaagtgccaggtggagctgaacagaaaggtgctggccgacctggccatctacgagcccaagaccttcaagagcctggccgccctggccagcagaagaagacacgagggcttcgccgccgccctgggcgacggcaaggagcccgagggcatcttcagcagagtggtgcagtaccactag

SEQ ID NO: 89101 - DNA, 618 bp, synthetic construct
  misc_feature 1..618: note = Description of Artificial Sequence: Synthetic coding sequence
  source 1..618: mol_type = other DNA
atggccgccagcagcctgaccgtgaccctgggcagactggccagcgcctgcagccacagcatcctgagacccagcggccccggcgccgccagcctgtggagcgccagcagaagattcaacagccagagcaccagctacctgcccggctacgtgcccaagaccagcctgagcagccccccctggcccgaggtggtgctgcccgaccccgtggaggagaccagacaccacgccgaggtggtgaagaaggtgaacgagatgatcgtgaccggccagtacggcagactgttcgccgtggtgcacttcgccagcagacagtggaaggtgaccagcgaggacctgatcctgatcggcaacgagctggacctggcctgcggcgagagaatcagactggagaaggtgctgctggtgggcgccgacaacttcaccctgctgggcaagcccctgctgggcaaggacctggtgagagtggaggccaccgtgatcgagaagaccgagagctggcccagaatcatcatgagattcagaaagagaaagaacttcaagaagaagagaatcgtgaccaccccccagaccgtgctgagaatcaacagcatcgagatcgccccctgcctgctgtag

SEQ ID NO: 89102 - DNA, 843 bp, synthetic construct
  misc_feature 1..843: note = Description of Artificial Sequence: Synthetic coding sequence
  source 1..843: mol_type = other DNA
atggccgccagcagcctgaccgtgaccctgggcagactggccagcgcctgcagccacagcatcctgagacccagcggccccggcgccgccagcctgtggagcgccagcagaagattcaacagccagagcaccagctacctgcccggctacgtgcccaagaccagcctgagcagccccccctggcccgaggtggtgctgcccgaccccgtggaggagaccagacaccacgccgaggtggtgaagaaggtgaacgagatgatcgtgaccggccagtacggcagactgttcgccgtggtgcacttcgccagcagacagtggaaggtgaccagcgaggacctgatcctgatcggcaacgagctggacctggcctgcggcgagagaatcagactggagaaggtgctgctggtgggcgccgacaacttcaccctgctgggcaagcccctgctgggcaaggacctggtgagagtggaggccaccgtgatcgagaagaccgagagctggcccagaatcatcatgagattcagaaagagaaagaacttcaagaagaagagaagcaagctggagaaggtgcccctgggccccgtggccagatgctggctgcccagaagaatgagaaccgagggcgtgggccacgtgggcctgggcaccggcagccccggcagaagccagcccggctgccactgccccctggccaccctgatcctggagggcgcccccagaggcagcagcctggcccccctgctgctgcacgcccccagagtgaccccccccagaagccccagcccccccagaagcgccagagaccccaccagcctgcccttcagcagcaccctgagagcctag

SEQ ID NO: 89103 - DNA, 363 bp, synthetic construct
  misc_feature 1..363: note = Description of Artificial Sequence: Synthetic coding sequence
  source 1..363: mol_type = other DNA
atgatcgtgaccggccagtacggcagactgttcgccgtggtgcacttcgccagcagacagtggaaggtgaccagcgaggacctgatcctgatcggcaacgagctggacctggcctgcggcgagagaatcagactggagaaggtgctgctggtgggcgccgacaacttcaccctgctgggcaagcccctgctgggcaaggacctggtgagagtggaggccaccgtgatcgagaagaccgagagctggcccagaatcatcatgagattcagaaagagaaagaacttcaagaagaagagaatcgtgaccaccccccagaccgtgctgagaatcaacagcatcgagatcgccccctgcctgctgtag

SEQ ID NO: 89104 - DNA, 381 bp, synthetic construct
  misc_feature 1..381: note = Description of Artificial Sequence: Synthetic coding sequence
  source 1..381: mol_type = other DNA
atgtggtacctggccaagctgatcagaggcatgagcatcgaccaggccctggcccagctggagttcaacgacaagaagggcgccaagatcatcaaggaggtgctgctggaggcccaggacatggccgtgagagaccacaacgtggagttcagaagcaacctgtacatcgccgagagcaccagcggcagaggccagtgcctgaagagaatcagataccacggcagaggcagattcggcatcatggagaaggtgtactgccactacttcgtgaagctggtggagggccccccccccccccccgagccccccaagaccgccgtggcccacgccaaggagtacatccagcagctgagaagcagaaccatcgtgcacaccctgtag

SEQ ID NO: 89105 - DNA, 699 bp, synthetic construct
  misc_feature 1..699: note = Description of Artificial Sequence: Synthetic coding sequence
  source 1..699: mol_type = other DNA
atggccgccgccgtgctgggccagctgggcaaggacttcctggtggtgaagagacagaagggcgtggagatggagagcgagctgaccgcctgcgtggacgtggccggcgccctgtggatccacaacctgagaagcagaggcaagctggccctgggcgtgctgccccagagctacatccacaccagcgccagcctggacatcagcagaaagtgggagaagaagaacaagatcgtgtaccccccccagctgcccggcgagcccagaagacccgccgagatctaccactgcagaagacagatcaagtacagcaaggacaagatgtggtacctggccaagctgatcagaggcatgagcatcgaccaggccctggcccagctggagttcaacgacaagaagggcgccaagatcatcaaggaggtgctgctggaggcccaggacatggccgtgagagaccacaacgtggagttcagaagcaacctgtacatcgccgagagcaccagcggcagaggccagtgcctgaagagaatcagataccacggcagaggcagattcggcatcatggagaaggtgtactgccactacttcgtgaagctggtggagggccccccccccccccccgagccccccaagaccgccgtggcccacgccaaggagtacatccagcagctgagaagcagaaccatcgtgcacaccctgtag

SEQ ID NO: 89106 - DNA, 639 bp, synthetic construct
  misc_feature 1..639: note = Description of Artificial Sequence: Synthetic coding sequence
  source 1..639: mol_type = other DNA
atggccgccgccgtgctgggccagctgggcgccctgtggatccacaacctgagaagcagaggcaagctggccctgggcctgctgagcttccacagcgtgctgccccagagctacatccacaccagcgccagcctggacatcagcagaaagtgggagaagaagaacaagatcgtgtaccccccccagctgcccggcgagcccagaagacccgccgagatctaccactgcagaagacagatcaagtacagcaaggacaagatgtggtacctggccaagctgatcagaggcatgagcatcgaccaggccctggcccagctggagttcaacgacaagaagggcgccaagatcatcaaggaggtgctgctggaggcccaggacatggccgtgagagaccacaacgtggagttcagaagcaacctgtacatcgccgagagcaccagcggcagaggccagtgcctgaagagaatcagataccacggcagaggcagattcggcatcatggagaaggtgtactgccactacttcgtgaagctggtggagggccccccccccccccccgagccccccaagaccgccgtggcccacgccaaggagtacatccagcagctgagaagcagaaccatcgtgcacaccctgtag

SEQ ID NO: 89107 - DNA, 621 bp, synthetic construct
  misc_feature 1..621: note = Description of Artificial Sequence: Synthetic coding sequence
  source 1..621: mol_type = other DNA
atggccgccgccgtgctgggccagctgggcgccctgtggatccacaacctgagaagcagaggcaagctggccctgggcgtgctgccccagagctacatccacaccagcgccagcctggacatcagcagaaagtgggagaagaagaacaagatcgtgtaccccccccagctgcccggcgagcccagaagacccgccgagatctaccactgcagaagacagatcaagtacagcaaggacaagatgtggtacctggccaagctgatcagaggcatgagcatcgaccaggccctggcccagctggagttcaacgacaagaagggcgccaagatcatcaaggaggtgctgctggaggcccaggacatggccgtgagagaccacaacgtggagttcagaagcaacctgtacatcgccgagagcaccagcggcagaggccagtgcctgaagagaatcagataccacggcagaggcagattcggcatcatggagaaggtgtactgccactacttcgtgaagctggtggagggccccccccccccccccgagccccccaagaccgccgtggcccacgccaaggagtacatccagcagctgagaagcagaaccatcgtgcacaccctgtag

SEQ ID NO: 89108 - DNA, 462 bp, synthetic construct
  misc_feature 1..462: note = Description of Artificial Sequence: Synthetic coding sequence
  source 1..462: mol_type = other DNA
atggccagaaacgtggtgtaccccctgtacagactgggcggcccccagctgagagtgttcagaaccaacttcttcatccagctggtgagacccggcgtggcccagcccgaggacaccgtgcagttcagaatccccatggagatgaccagagtggacctgagaaactacctggagggcatctacaacgtgcccgtggccgccgtgagaaccagagtgcagcacggcagcaacaagagaagagaccacagaaacgtgagaatcaagaagcccgactacaaggtggcctacgtgcagctggcccacggccagaccttcaccttccccgacctgttccccgagaaggacgagagccccgagggcagcgccgccgacgacctgtacagcatgctggaggaggagagacagcagagacagagcagcgaccccagaagaggcggcgtgcccagctggttcggcctgtag

SEQ ID NO: 89109 - DNA, 462 bp, synthetic construct; identical to SEQ ID NO: 89108
  misc_feature 1..462: note = Description of Artificial Sequence: Synthetic coding sequence
  source 1..462: mol_type = other DNA

SEQ ID NO: 89110 - DNA, 651 bp, synthetic construct
  misc_feature 1..651: note = Description of Artificial Sequence: Synthetic coding sequence
  source 1..651: mol_type = other DNA
atgagactgagcgccctgctggccctggccagcaaggtgaccctgcccccccactacagatacggcatgagcccccccggcagcgtggccgacaagagaaagaaccccccctggatcagaagaagacccgtggtggtggagcccatcagcgacgaggactggtacctgttctgcggcgacaccgtggagatcctggagggcaaggacgccggcaagcagggcaaggtggtgcaggtgatcagacagagaaactgggtggtggtgggcggcctgaacacccactacagatacatcggcaagaccatggactacagaggcaccatgatccccagcgaggcccccctgctgcacagacaggtgaagctggtggaccccatggacagaaagcccaccgagatcgagtggagattcaccgaggccggcgagagagtgagagtgagcaccagaagcggcagaatcatccccaagcccgagttccccagagccgacggcatcgtgcccgagacctggatcgacggccccaaggacaccagcgtggaggacgccctggagagaacctacgtgccctgcctgaagaccctgcaggaggaggtgatggaggccatgggcatcaaggagaccagaaagtacaagaaggtgtactggtactag

SEQ ID NO: 89111 - DNA, 651 bp, synthetic construct; identical to SEQ ID NO: 89110
  misc_feature 1..651: note = Description of Artificial Sequence: Synthetic coding sequence
  source 1..651: mol_type = other DNA

SEQ ID NO: 89112 - DNA, 300 bp, synthetic construct
  misc_feature 1..300: note = Description of Artificial Sequence: Synthetic coding sequence
  source 1..300: mol_type = other DNA
atgagactgagcgccctgctggccctggccagcaaggtgaccctgcccccccactacagatacggcatgagcccccccggcagcgtggccgacaagagaaagaaccccccctggatcagaagaagacccgtggtggtggagcccatcagcgacgaggactggtacctgttctgcggcgacaccgtggagatcctggagggcaaggacgccggcaagcagggcaaggtggtgcaggtgatcagacagagaaactgggtggtggtgggcggcctgaacacccactacagatacatcggctag

SEQ ID NO: 89113 - DNA, 207 bp, synthetic construct
  misc_feature 1..207: note = Description of Artificial Sequence: Synthetic coding sequence
  source 1..207: mol_type = other DNA
atgagactgagcgccctgctggccctggccagcaaggtgaccctgcccccccactacagatacggcatgagcccccccggcagcgtggccgacaagagaaagaaccccccctggatcagaagaagacccgtggtggtggagcccatcagcgacgaggactggtacctgttctgcggcgacaccgtggagatcctggagggcaagtag

SEQ ID NO: 89114 - DNA, 522 bp, synthetic construct
  misc_feature 1..522: note = Description of Artificial Sequence: Synthetic coding sequence
  source 1..522: mol_type = other DNA
atgagactgagcgccctgctggccctggccagcaaggtgaccctgcccccccactacagatacggcatgagcccccccggcagcgtggccgacaagagaaagaaccccccctggatcagaagaagacccgtggtggtggagcccatcagcgacgaggactggtacctgttctgcggcgacaccgtggagatcctggagggcaaggacgccggcaagcagggcaaggtggtgcaggtgatcagacagagaaactgggtggtggtgggcggcctgaacacccactacagatacatcggcaagaccatggactacagaggcaccatgatccccagcgaggcccccctgctgcacagacaggtgaagctggtggaccccatggacagaaagcccaccgagatcgagtggagattcaccgaggccggcgagagagtgagagtgagcaccagaagcggcagaatcatccccaagcccgagttccccagagccgacggcatcgtgcccgagacctggatcgacggctag

SEQ ID NO: 89115 - DNA, 4395 bp, synthetic construct
  misc_feature 1..4395: note = Description of Artificial Sequence: Synthetic coding sequence
  source 1..4395: mol_type = other DNA
atgttcagcttcgtggacctgagactgctgctgctgctggccgccaccgccctgctgacccacggccaggaggagggccaggtggagggccaggacgaggacatcccccccatcacctgcgtgcagaacggcctgagataccacgacagagacgtgtggaagcccgagccctgcagaatctgcgtgtgcgacaacggcaaggtgctgtgcgacgacgtgatctgcgacgagaccaagaactgccccggcgccgaggtgcccgagggcgagtgctgccccgtgtgccccgacggcagcgagagccccaccgaccaggagaccaccggcgtggagggccccaagggcgacaccggccccagaggccccagaggccccgccggcccccccggcagagacggcatccccggccagcccggcctgcccggcccccccggcccccccggcccccccggcccccccggcctgggcggcaacttcgccccccagctgagctacggctacgacgagaagagcaccggcggcatcagcgtgcccggccccatgggccccagcggccccagaggcctgcccggcccccccggcgcccccggcccccagggcttccagggcccccccggcgagcccggcgagcccggcgccagcggccccatgggccccagaggcccccccggcccccccggcaagaacggcgacgacggcgaggccggcaagcccggcagacccggcgagagaggcccccccggcccccagggcgccagaggcctgcccggcaccgccggcctgcccggcatgaagggccacagaggcttcagcggcctggacggcgccaagggcgacgccggccccgccggccccaagggcgagcccggcagccccggcgagaacggcgcccccggccagatgggccccagaggcctgcccggcgagagaggcagacccggcgcccccggccccgccggcgccagaggcaacgacggcgccaccggcgccgccggcccccccggccccaccggccccgccggcccccccggcttccccggcgccgtgggcgccaagggcgaggccggcccccagggccccagaggcagcgagggcccccagggcgtgagaggcgagcccggcccccccggccccgccggcgccgccggccccgccggcaaccccggcgccgacggccagcccggcgccaagggcgccaacggcgcccccggcatcgccggcgcccccggcttccccggcgccagaggccccagcggcccccagggccccggcggcccccccggccccaagggcaacagcggcgagcccggcgcccccggcagcaagggcgacaccggcgccaagggcgagcccggccccgtgggcgtgcagggcccccccggccccgccggcgaggagggcaagagaggcgccagaggcgagcccggccccaccggcctgcccggcccccccggcgagagaggcggccccggcagcagaggcttccccggcgccgacggcgtggccggccccaagggccccgccggcgagagaggcagccccggccccgccggccccaagggcagccccggcgaggccggcagacccggcgaggccggcctgcccggcgccaagggcctgaccggcagccccggcagccccggccccgacggcaagaccggcccccccggccccgccggccaggacggcagacccggcccccccggcccccccggcgccagaggccaggccggcgtgatgggcttccccggccccaagggcgccgccggcgagcccggcaaggccggcgagagaggcgtgcccggcccccccggcgccgtgggccccgccggcaaggacggcgaggccggcgcccagggcccccccggccccgccggccccgccggcgagagaggcgagcagggccccgccggcagccccggcttccagggcctgcccggccccgccggcccccccggcgaggccggcaagcccggcgagcagggcgtgcccggcgacctgggcgcccccggccccagcggcgccagaggcgagagaggcttccccggcgagagaggcgtgcagggcccccccggccccgccggccccagaggcgccaacggcgcccccggcaacgacggcgccaagggcgacgccggcgcccccggcgcccccggcagccagggcgcccccggcctgcagggcatgcccggcgagagaggcgccgccggcctgcccggccccaagggcgacagaggcgacgccggccccaagggcgccgacggcagccccggcaaggacggcgtgagaggcctgaccggccccatcggcccccccggccccgccggcgcccccggcgacaagggcgagagcggccccagcggccccgccggccccaccggcgccagaggcgcccccggcgacagaggcgagcccggcccccccggccccgccggcttcgccggcccccccggcgccgacggccagcccggcgccaagggcgagcccggcgacgccggcgccaagggcgacgccggcccccccggccccgccggccccgccggcccccccggccccatcggcaacgtgggcgcccccggcgccaagggcgccagaggcagcgccggcccccccggcgccaccggcttccccggcgccgccggcagagtgggcccccccggccccagcggcaacgccggcccccccggcccccccggccccgccggcaaggagggcggcaagggccccagaggcgagaccggccccgccggcagacccggcgaggtgggcccccccggcccccccggccccgccggcgagaagggcagccccggcgccgacggccccgccggcgcccccggcacccccggcccccagggcatcgccggccagagaggcgtggtgggcctgcccggccagagaggcgagagaggcttccccggcctgcccggccccagcggcgagcccggcaagcagggccccagcggcgccagcggcgagagaggcccccccggccccatgggcccccccggcctggccggcccccccggcgagagcggcagagagggcgcccccggcgccgagggcagccccggcagagacggcagccccggcgccaagggcgacagaggcgagaccggccccgccggcccccccggcgcccccggcgcccccggcgcccccggccccgtgggccccgccggcaagagcggcgacagaggcgagaccggccccgccggccccaccggccccgtgggccccgtgggcgccagaggccccgccggcccccagggccccagaggcgacaagggcgagaccggcgagcagggcgacagaggcatcaagggccacagaggcttcagcggcctgcagggcccccccggcccccccggcagccccggcgagcagggccccagcggcgccagcggccccgccggccccagaggcccccccggcagcgccggcgcccccggcaaggacggcctgaacggcctgcccggccccatcggcccccccggccccagaggcagaaccggcgacgccggccccgtgggcccccccggcccccccggcccccccggcccccccggcccccccagcgccggcttcgacttcagcttcctgccccagcccccccaggagaaggcccacgacggcggcagatactacagagccgacgacgccaacgtggtgagagacagagacctggaggtggacaccaccctgaagagcctgagccagcagatcgagaacatcagaagccccgagggcagcagaaagaaccccgccagaacctgcagagacctgaagatgtgccacagcgactggaagagcggcgagtactggatcgaccccaaccagggctgcaacctggacgccatcaaggtgttctgcaacatggagaccggcgagacctgcgtgtaccccacccagcccagcgtggcccagaagaactggtacatcagcaagaaccccaaggacaagagacacgtgtggttcggcgagagcatgaccgacggcttccagttcgagtacggcggccagggcagcgaccccgccgacgtggccatccagctgaccttcctgagactgatgagcaccgaggccagccagaacatcacctaccactgcaagaacagcgtggcctacatggaccagcagaccggcaacctgaagaaggccctgctgctgcagggcagcaacgagatcgagatcagagccgagggcaacagcagattcacctacagcgtgaccgtggacggctgcaccagccacaccggcgcctggggcaagaccgtgatcgagtacaagaccaccaagaccagcagactgcccatcatcgacgtggcccccctggacgtgggcgcccccgaccaggagttcggcttcgacgtgggccccgtgtgcttcctgtag

SEQ ID NO: 89116 - DNA, 285 bp, synthetic construct
  misc_feature 1..285: note = Description of Artificial Sequence: Synthetic coding sequence
  source 1..285: mol_type = other DNA
atggccagcgtggtgctggccctgagaaccagaaccgccgtgaccagcctgctgagccccacccccgccaccgccctggccgtgagatacgccagcaagaagagcggcggcagcagcaagaacctgggcggcaagagcagcggcagaagacagggcatcaagaagatggagggccactacgtgcacgccggcaacatcatcgccacccagagacacttcagatggcaccccggcgcccacgtgagctgcagcgtggccgcccccctgttccccttcctgggctag

SEQ ID NO: 89117 - DNA, 282 bp, synthetic construct
  misc_feature 1..282: note = Description of Artificial Sequence: Synthetic coding sequence
  source 1..282: mol_type = other DNA
atggagggccactacgtgcacgccggcaacatcatcgccacccagagacacttcagatggcaccccggcgcccacgtgggcgtgggcaagaacaagtgcctgtacgccctggaggagggcatcgtgagatacaccaaggaggtgtacgtgccccaccccagaaacaccgaggccgtggacctgatcaccagactgcccaagggcgccgtgctgtacaagaccttcgtgcacgtggtgcccgccaagcccgagggcaccttcaagctggtggccatgctgtag

SEQ ID NO: 89118 - DNA, 282 bp, synthetic construct; identical to SEQ ID NO: 89117
  misc_feature 1..282: note = Description of Artificial Sequence: Synthetic coding sequence
  source 1..282: mol_type = other DNA

SEQ ID NO: 89119 - DNA, 771 bp, synthetic construct
  misc_feature 1..771: note = Description of Artificial Sequence: Synthetic coding sequence
  source 1..771: mol_type = other DNA
atgcccctgcacaagtaccccgtgtggctgtggaagagactgcagctgagagagggcatctgcagcagactgcccggccactacctgagaagcctggaggaggagagaacccccacccccgtgcactacagaccccacggcgccaagttcaagatcaaccccaagaacggccagagagagagagtggaggacgtgcccatccccatctacttcccccccgagagccagagaggcctgtggggcggcgagggctggatcctgggccagatctacgccaacaacgacaagctgagcaagagactgaagaaggtgtggaagccccagctgttcgagagagagttctacagcgagatcctggacaagaagttcaccgtgaccgtgaccatgagaaccctggacctgatcgacgaggcctacggcctggacttctacatcctgaagacccccaaggaggacctgtgcagcaagttcggcatggacctgaagagaggcatgctgctgagactggccagacaggacccccagctgcaccccgaggaccccgagagaagagccgccatctacgacaagtacaaggagttcgccatccccgaggaggaggccgagtgggtgggcctgaccctggaggaggccatcgagaagcagagactgctggaggagaaggaccccgtgcccctgttcaagatctacgtggccgagctgatccagcagctgcagcagcaggccctgagcgagcccgccgtggtgcagaagagagccagcggccagtag

SEQ ID NO: 89120 - DNA, 771 bp, synthetic construct; identical to SEQ ID NO: 89119
  misc_feature 1..771: note = Description of Artificial Sequence: Synthetic coding sequence
  source 1..771: mol_type = other DNA

SEQ ID NO: 89121 - DNA, 771 bp, synthetic construct
  misc_feature 1..771: note = Description of Artificial Sequence: Synthetic coding sequence
  source 1..771: mol_type = other DNA
atgcccctgcacaagtaccccgtgtggctgtggaagagactgcagctgagagagggcatctgcagcagactgcccggccactacctgagaagcctggaggaggagagaacccccacccccgtgcactacagaccccacggcgccaagttcaagatcaaccccaagaacggccagagagagagagtggaggacgtgcccatccccatctacttcccccccgagagccagagaggcctgtggggcggcgagggctggatcctgggccagatctacgccaacaacgacaagctgagcaagagactgaagaaggtgtggaagccccagctgttcgagagagagttctacagcgagatcctggacaagaagttcaccgtgaccgtgaccatgagaaccctggacctgatcgacgaggcctacggcctggacttctacatcctgaaggccagcggcgaggacctgtgcagcaagttcggcatggacctgaagagaggcatgctgctgagactggccagacaggacccccagctgcaccccgaggaccccgagagaagagccgccatctacgacaagtacaaggagttcgccatccccgaggaggaggccgagtgggtgggcctgaccctggaggaggccatcgagaagcagagactgctggaggagaaggaccccgtgcccctgttcaagatctacgtggccgagctgatccagcagctgcagcagcaggccctgagcgagcccgccgtggtgcagaagagagccagcggccagtag

SEQ ID NO: 89122 - DNA, 771 bp, synthetic construct; identical to SEQ ID NO: 89121
  misc_feature 1..771: note = Description of Artificial Sequence: Synthetic coding sequence
  source 1..771: mol_type = other DNA

SEQ ID NO: 89123 - DNA, 147 bp, synthetic construct
  misc_feature 1..147: note = Description of Artificial Sequence: Synthetic coding sequence
  source 1..147: mol_type = other DNA
atgagcagagccggcggcagaggcgagcagagcagatggggcagaagagccgagctgagaggcctgggcagacccgaggcccccctgagactgggccccgacgtgtgcggcagcgtgccctgcgccagaggcgccggcagcgagtag

SEQ ID NO: 89124 - DNA, 723 bp, synthetic construct
  misc_feature 1..723: note = Description of Artificial Sequence: Synthetic coding sequence
  source 1..723: mol_type = other DNA
atgcccctgcacaagtaccccgtgtggctgtggaagagactgcagctgagagagggcatctgcagcagactgcccggccactacctgagaagcctggaggaggagagaacccccacccccgtgcactacagaccccacggcgccaagttcaagatcaaccccaagaacggccagagagagagagtggaggacgtgcccatccccatctacttcccccccgagagccagagaggcctgtggggcggcgagggctggatcctgggccagatctacgccaacaacgacaagctgagcaagagactgaagaaggtgtggaagccccagctgttcgagagagagttctacagcgagatcctggacaagaagttcaccgtgaccgtgaccatgagaaccctggacctgatcgacgaggcctacggcctggacttctacatcctgaagacccccaaggaggacctgtgcagcaagttcggcatggacctgaagagaggcatgctgctgagactggccagacaggacccccagctgcaccccgaggaccccgagagaagagccgccatctacgacaagtacaaggagttcgccatccccgaggaggaggccgagtgggtgggcctgaccctggaggaggccatcgagaagcagagactgctggaggagaaggaccccgtgcccctgttcaagatctacgtggccgagctgatccagcagctgcagcagtag

SEQ ID NO: 89125 - DNA, 657 bp, synthetic construct
  misc_feature 1..657: note = Description of Artificial Sequence: Synthetic coding sequence
  source 1..657: mol_type = other DNA
atgcccctgcacaagtaccccgtgtggctgtggaagagactgcagctgagagagggcatctgcagcagactgcccggccactacctgagaagcctggaggaggagagaacccccacccccgtgcactacagaccccacggcgccaagttcaagatcaaccccaagaacggccagagagagagagtggaggacgtgcccatccccatctacttcccccccgagagccagagaggcctgtggggcggcgagggctggatcctgggccagatctacgccaacaacgacaagctgagcaagagactgaagaaggtgtggaagccccagctgttcgagagagagttctacagcgagatcctggacaagaagttcaccgtgaccgtgaccatgagaaccctggacctgatcgacgaggcctacggcctggacttctacatcctgaagacccccaaggaggacctgtgcagcaagttcggcatggacctgaagagaggcatgctgctgagactggccagacaggacccccagctgcaccccgaggaccccgagagaagagccgccatctacgacaagtacaaggagttcgccatccccgaggaggaggccgagtgggtgggcctgaccctggaggaggccatcgagaagcagagactgctgtag

SEQ ID NO: 89126 - DNA, 585 bp, synthetic construct
  misc_feature 1..585: note = Description of Artificial Sequence: Synthetic coding sequence
  source 1..585: mol_type = other DNA
atgcccctgcacaagtaccccgtgtggctgtggaagagactgcagctgagagagggcatctgcagcagactgcccggccactacctgagaagcctggaggaggagagaacccccacccccgtgcactacagaccccacggcgccaagttcaagatcaaccccaagaacggccagagagagagagtggaggacgtgcccatccccatctacttcccccccgagagccagagaggcctgtggggcggcgagggctggatcctgggccagatctacgccaacaacgacaagctgagcaagagactgaagaaggtgtggaagccccagctgttcgagagagagttctacagcgagatcctggacaagaagttcaccgtgaccgtgaccatgagaaccctggacctgatcgacgaggcctacggcctggacttctacatcctgaagacccccaaggaggacctgtgcagcaagttcggcatggacctgaagagaggcatgctgctgagactggccagacaggacccccagctgcaccccgaggaccccgagagaagagccgccatctacgacaagtacaaggagttctag

SEQ ID NO: 89127 - DNA, 1047 bp, synthetic construct
  misc_feature 1..1047: note = Description of Artificial Sequence: Synthetic coding sequence
  source 1..1047: mol_type = other DNA
atgcccggctggagactgctgacccaggtgggcgcccaggtgctgggcagactgggcgacggcctgggcgccgccctgggccccggcaacagaacccacatctggctgttcgtgagaggcctgcacggcaagagcggcacctggtgggacgagcacctgagcgaggagaacgtgcccttcatcaagcagctggtgagcgacgaggacaaggcccagctggccagcaagctgtgccccctgaaggacgagccctggcccatccacccctgggagcccggcagcttcagagtgggcctgatcgccctgaagctgggcatgatgcccctgtggaccaaggacggccagaagcacgtggtgaccctgctgcaggtgcaggactgccacgtgctgaagtacaccagcaaggagaactgcaacggcaagatggccaccctgagcgtgggcggcaagaccgtgagcagattcagaaaggccaccagcatcctggagttctacagagagctgggcctgccccccaagcagaccgtgaagatcttcaacatcaccgacaacgccgccatcaagcccggcacccccctgtacgccgcccacttcagacccggccagtacgtggacgtgaccgccaagaccatcggcaagggcttccagggcgtgatgaagagatggggcttcaagggccagcccgccacccacggccagaccaagacccacagaagacccggcgccgtggccaccggcgacatcggcagagtgtggcccggcaccaagatgcccggcaagatgggcaacatctacagaaccgagtacggcctgaaggtgtggagaatcaacaccaagcacaacatcatctacgtgaacggcagcgtgcccggccacaagaactgcctggtgaaggtgaaggacagcaagctgcccgcctacaaggacctgggcaagaacctgcccttccccacctacttccccgacggcgacgaggaggagctgcccgaggacctgtacgacgagaacgtgtgccagcccggcgcccccagcatcaccttcgcctag

SEQ ID NO: 89128 - DNA, 1128 bp, synthetic construct
  misc_feature 1..1128: note = Description of Artificial Sequence: Synthetic coding sequence
  source 1..1128: mol_type = other DNA
atgcccggctggagactgctgacccaggtgggcgcccaggtgctgggcagactgggcgacggcctgggcgccgccctgggccccggcaacagagtgaccaccaacagcctgaacgtgagcctgatcagaagaaacgtgggcagcgaggagaaggtgggcgacctgaagaagagaacccacatctggctgttcgtgagaggcctgcacggcaagagcggcacctggtgggacgagcacctgagcgaggagaacgtgcccttcatcaagcagctggtgagcgacgaggacaaggcccagctggccagcaagctgtgccccctgaaggacgagccctggcccatccacccctgggagcccggcagcttcagagtgggcctgatcgccctgaagctgggcatgatgcccctgtggaccaaggacggccagaagcacgtggtgaccctgctgcaggtgcaggactgccacgtgctgaagtacaccagcaaggagaactgcaacggcaagatggccaccctgagcgtgggcggcaagaccgtgagcagattcagaaaggccaccagcatcctggagttctacagagagctgggcctgccccccaagcagaccgtgaagatcttcaacatcaccgacaacgccgccatcaagcccggcacccccctgtacgccgcccacttcagacccggccagtacgtggacgtgaccgccaagaccatcggcaagggcttccagggcgtgatgaagagatggggcttcaagggccagcccgccacccacggccagaccaagacccacagaagacccggcgccgtggccaccggcgacatcggcagagtgtggcccggcaccaagatgcccggcaagatgggcaacatctacagaaccgagtacggcctgaaggtgtggagaatcaacaccaagcacaacatcatctacgtgaacggcagcgtgcccggccacaagaactgcctggtgaaggtgaaggacagcaagctgcccgcctacaaggacctgggcaagaacctgcccttccccacctacttccccgacggcgacgaggaggagctgcccgaggacctgtacgacgagaacgtgtgccagcccggcgcccccagcatcaccttcgcctag

SEQ ID NO: 89129 - DNA, 1092 bp, synthetic construct
  misc_feature 1..1092: note = Description of Artificial Sequence: Synthetic coding sequence
  source 1..1092: mol_type = other DNA
tgattcttccccagccagagagccagcgccggcgacagaagcggcggccactgcgagaacttccccaccgccaccgccagcacctggagatggagaggcgacagcctgaaggccgagagacagggcgccagaaagagcacccacatctggctgttcgtgagaggcctgcacggcaagagcggcacctggtgggacgagcacctgagcgaggagaacgtgcccttcatcaagcagctggtgagcgacgaggacaaggcccagctggccagcaagctgtgccccctgaaggacgagccctggcccatccacccctgggagcccggcagcttcagagtgggcctgatcgccctgaagctgggcatgatgcccctgtggaccaaggacggccagaagcacgtggtgaccctgctgcaggtgcaggactgccacgtgctgaagtacaccagcaaggagaactgcaacggcaagatggccaccctgagcgtgggcggcaagaccgtgagcagattcagaaaggccaccagcatcctggagttctacagagagctgggcctgccccccaagcagaccgtgaagatcttcaacatcaccgacaacgccgccatcaagcccggcacccccctgtacgccgcccacttcagacccggccagtacgtggacgtgaccgccaagaccatcggcaagggcttccagggcgtgatgaagagatggggcttcaagggccagcccgccacccacggccagaccaagacccacagaagacccggcgccgtggccaccggcgacatcggcagagtgtggcccggcaccaagatgcccggcaagatgggcaacatctacagaaccgagtacggcctgaaggtgtggagaatcaacaccaagcacaacatcatctacgtgaacggcagcgtgcccggccacaagaactgcctggtgaaggtgaaggacagcaagctgcccgcctacaaggacctgggcaagaacctgcccttccccacctacttccccgacggcgacgaggaggagctgcccgaggacctgtacgacgagaacgtgtgccagcccggcgcccccagcatcaccttcgcctag

SEQ ID NO: 89130 - DNA, 486 bp, synthetic construct
  misc_feature 1..486: note = Description of Artificial Sequence: Synthetic coding sequence
  source 1..486: mol_type = other DNA
atggccggcatcctgagactggtggtgcagtggccccccggcagactgcagaccgtgaccaagggcgtggagagcctgatctgcaccgactggatcagacacaagttcaccagaagcagaatccccgagaaggtgttccaggccagccccgaggaccacgagaagtacggcggcgacccccagaacccccacaagctgcacatcgtgaccagaatcaagagcaccagaagaagaccctactgggagaaggacatcatcaagatgctgggcctggagaaggcccacaccccccaggtgcacaagaacatccccagcgtgaacgccaagctgaaggtggtgaagcacctgatcagaatcaagcccctgaagctgccccagggcctgcccgccgaggagaacatgagcaacacctgcctgaagagcaccggcgagctggtggtgcagtggcacctgaagcccgtggagcagaaggcccacgagagctag

SEQ ID NO: 89131 - DNA, 486 bp, synthetic construct; identical to SEQ ID NO: 89130
  misc_feature 1..486: note = Description of Artificial Sequence: Synthetic coding sequence
  source 1..486: mol_type = other DNA

SEQ ID NO: 89132 - DNA, 705 bp, synthetic construct
  misc_feature 1..705: note = Description of Artificial Sequence: Synthetic coding sequence
  source 1..705: mol_type = other DNA
atggccgagagaggctacagcttcagcctgaccaccttcagccccagcggcaagctggtgcagatcgagtacgccctggccgccgtggccggcggcgcccccagcgtgggcatcaaggccgccaacggcgtggtgctggccaccgagaagaagcagaagagcatcctgtacgacgagagaagcgtgcacaaggtggagcccatcaccaagcacatcggcctggtgtacagcggcatgggccccgactacagagtgctggtgcacagagccagaaagctggcccagcagtactacctggtgtaccaggagcccatccccaccgcccagctggtgcagagagtggccagcgtgatgcaggagtacacccagagcggcggcgtgagacccttcggcgtgagcctgctgatctgcggctggaacgagggcagaccctacctgttccagagcgaccccagcggcgcctacttcgcctggaaggccaccgccatgggcaagaactacgtgaacggcaagaccttcctggagaagagatacaacgaggacctggagctggaggacgccatccacaccgccatcctgaccctgaaggagagcttcgagggccagatgaccgaggacaacatcgaggtgggcatctgcaacgaggccggcttcagaagactgacccccaccgaggtgaaggactacctggccgccatcgcctag

SEQ ID NO: 89133 - DNA, 324 bp, synthetic construct
  misc_feature 1..324: note = Description of Artificial Sequence: Synthetic coding sequence
  source 1..324: mol_type = other DNA
atggccctggccatgctggtgctggtggtgagcccctggagcgccgccagaggcgtgctgagaaactactgggagagactgctgagaaagctgccccagagcagacccggcttccccagccccccctggggccccgccctggccgtgcagggccccgccatgttcaccgagcccgccaacgacaccagcggcagcaaggagaacagcagcctgctggacagcatcttctggatggccgcccccaagaacagaagaaccatcgaggtgaacagatgcagaagaagaaacccccagaagctgatcaaggtgaaggtgatgcactag

SEQ ID NO: 89134 - DNA, 279 bp, synthetic construct
  misc_feature 1..279: note = Description of Artificial Sequence: Synthetic coding sequence
  source 1..279: mol_type = other DNA
atggccgtgctggccggcagcctgctgggccccaccagcagaagcgccgccctgctgggcggcagatggctgcagcccagagcctggctgggcttccccgacgcctggggcctgcccaccccccagcaggccagaggcaaggccagaggcaacgagtaccagcccagcaacatcaagagaaagaacaagcacggctgggtgagaagactgagcacccccgccggcgtgcaggtgatcctgagaagaatgctgaagggcagaaagagcctgagccactag

SEQ ID NO: 89135 - DNA, 513 bp, synthetic construct
  misc_feature 1..513: note = Description of Artificial Sequence: Synthetic coding sequence
  source 1..513: mol_type = other DNA
atggccgccagcgccttcgccggcgccgtgagagccgccagcggcatcctgagacccctgaacatcctggccagcagcacctacagaaactgcgtgaagaacgccagcctgatcagcgccctgagcaccggcagattcagccacatccagacccccgtggtgagcagcacccccagactgaccaccagcgagagaaacctgacctgcggccacaccagcgtgatcctgaacagaatggcccccgtgctgcccagcgtgctgaagctgcccgtgagaagcctgacctacttcagcgccagaaagggcaagagaaagaccgtgaaggccgtgatcgacagattcctgagactgcactgcggcctgtgggtgagaagaaaggccggctacaagaagaagctgtggaagaagacccccgccagaaagaagagactgagagagttcgtgttctgcaacaagacccagagcaagctgctggacaagatgaccaccagcttctggaagagaagaaactag

SEQ ID NO: 89136 - DNA, 567 bp, synthetic construct
  misc_feature 1..567: note = Description of Artificial Sequence: Synthetic coding sequence
  source 1..567: mol_type = other DNA
atggccgccagcgccttcgccggcgccgtgagagccgccagcggcatcctgagacccctgaacatcctggccagcagcacctacagaaactgcgtgaagaacgccagcctgatcagcgccctgagcaccggcagattcagccacatccagacccccgtggtgagcagcacccccagactgaccaccagcgagagaaacctgacctgcggccacaccagcgtgatcctgaacagaatggcccccgtgctgcccagcgtgctgaagctgcccgtgagaagcctgacctacttcagcgccagaaagggcaagagaaagaccgtgaaggccgtgatcgacagattcctgagactgcactgcggcctgtgggtgagaagaaaggccggctacaagaagaagctgtggaagaagacccccgccagaaagaagagactgagagagttcgtgttctgcaacaagacccagagcaagctgctggacaagatgaccaccagcttctggaagagaagaaactggtacgtggacgacccctaccagaagtaccacgacagaaccaacctgaaggtgtag

SEQ ID NO: 89137 - DNA, 312 bp, synthetic construct
  misc_feature 1..312: note = Description of Artificial Sequence: Synthetic coding sequence
  source 1..312: mol_type = other DNA
atggccaacctgttcatcagaaagatggtgaaccccctgctgtacctgagcagacacaccgtgaagcccagagccctgagcaccttcctgttcggcagcatcagaggcgccgcccccgtggccgtggagcccggcgccgccgtgagaagcctgctgagccccggcctgctgccccacctgctgcccgccctgggcttcaagaacaagaccgtgctgaagaagagatgcaaggactgctacctggtgaagagaagaggcagatggtacgtgtactgcaagacccaccccagacacaagcagagacagatgtag

SEQ ID NO: 89138 - DNA, 312 bp, synthetic construct; identical to SEQ ID NO: 89137
  misc_feature 1..312: note = Description of Artificial Sequence: Synthetic coding sequence
  source 1..312: mol_type = other DNA

SEQ ID NO: 89139 - DNA, 312 bp, synthetic construct; identical to SEQ ID NO: 89137
  misc_feature 1..312: note = Description of Artificial Sequence: Synthetic coding sequence
  source 1..312: mol_type = other DNA

SEQ ID NO: 89140 - DNA, 312 bp, synthetic construct; identical to SEQ ID NO: 89137
  misc_feature 1..312: note = Description of Artificial Sequence: Synthetic coding sequence
  source 1..312: mol_type = other DNA

SEQ ID NO: 89141 - DNA, 1251 bp, synthetic construct
  misc_feature 1..1251: note = Description of Artificial Sequence: Synthetic coding sequence
  source 1..1251: mol_type = other DNA
atgcacttcgtgccctggctggccagacccatcttccccccctgggacagaggctacaaggaccccagattctacagaagcccccccctgcacgagcaccccctgtacaaggaccaggcctgctacatcttccaccacagatgcagactgctggagggcgtgaagcaggccctgtggctgaccaagaccaagctgatcgagggcctgcccgagaaggtgctgagcctggtggacgaccccagaaaccacatcgagaaccaggacgagtgcgtgctgaacgtgatcagccacgccagactgtggcagaccaccgaggagatccccaagagagagacctactgccccgtgatcgtggacaacctgatccagctgtgcaagagccagatcctgaagcaccccagcctggccagaagaatctgcgtgcagaacagcaccttcagcgccacctggaacagagagagcctgctgctgcaggtgagaggcagcggcggcgccagactgagcaccaaggaccccctgcccaccatcgccagcagagaggagatcgaggccaccaagaaccacgtgctggagaccttctaccccatcagccccatcatcgacctgcacgagtgcaacatctacgacgtgaagaacgacaccggcttccaggagggctacccctacccctacccccacaccctgtacctgctggacaaggccaacctgagaccccacagactgcagcccgaccagctgagagccaagatgatcctgttcgccttcggcagcgccctggcccaggccagactgctgtacggcaacgacgccaaggtgctggagcagcccgtggtggtgcagagcgtgggcaccgacggcagagtgttccacttcctggtgttccagctgaacaccaccgacctggactgcaacgagggcgtgaagaacctggcctgggtggacagcgaccagctgctgtaccagcacttctggtgcctgcccgtgatcaagaagagagtggtggtgaccggcccctgcttcagcaagagccagatgagcaccagcttcgtgctgacccccagcttcaacgccggcgaggaggtgatgcagagaaacctgagagccagcgccagcctgccccccagcaccggcagccccgccagcgagctggtgaaggagcaggagcacgccgccggcagagtgctgagaagagtgatgctggacagcgagacccccagagaggagctgcccgccgccgacttctggaagtag

SEQ ID NO: 89142 - DNA, 879 bp, synthetic construct
  misc_feature 1..879: note = Description of Artificial Sequence: Synthetic coding sequence
  source 1..879: mol_type = other DNA
atgagcggcgcctgcgcccccagaggcagcagaagcctgctgccctggatcggctgcaccagaagcctggactggagccccagccccctgagaggcagatgcaccagctgccccggctggagaggcagaagcttcagacccggcaccgccgccaccagaacccagggcagcaccgccagacccctgttcaccagcatcagatgcaccaagaccagacccgccatcagcttcaccaccgtggccgccttcagcagaagcctgctgctgcaggtgagaggcagcggcggcgccagactgagcaccaaggaccccctgcccaccatcgccagcagagaggagatcgaggccaccaagaaccacgtgctggagaccttctaccccatcagccccatcatcgacctgcacgagtgcaacatctacgacgtgaagaacgacaccggcttccaggagggctacccctacccctacccccacaccctgtacctgctggacaaggccaacctgagaccccacagactgcagcccgaccagctgagagccaagatgatcctgttcgccttcggcagcgccctggcccaggccagactgctgtacggcaacgacgccaaggtgctggagcagcccgtggtggtgcagagcgtgggcaccgacggcagagtgttccacttcctggtgttccagctgaacaccaccgacctggactgcaacgagggcgtgaagaacctggcctgggtggacagcgaccagctgctgtaccagcacttctggtgcctgcccgtgatcaagaagagagtggtggtggagcccgtgggccccgtgggcttcaagcccgagaccttcagaaagttcctggccctgtacctgcacggcgccgcctag

SEQ ID NO: 89143 - DNA, 1272 bp, synthetic construct
  misc_feature 1..1272: note = Description of Artificial Sequence: Synthetic coding sequence
  source 1..1272: mol_type = other DNA
atggccctggccagcggccccgccagaagagccctggccggcagcggccagctgggcctgggcggcttcggcgcccccagaagaggcgcctacgagtggggcgtgagaagcaccagaaagagcgagcccccccccctggacagagtgtacgagatccccggcctggagcccatcaccttcgccggcaagatgcacttcgtgccctggctggccagacccatcttccccccctgggacagaggctacaaggaccccagattctacagaagcccccccctgcacgagcaccccctgtacaaggaccaggcctgctacatcttccaccacagatgcagactgctggagggcgtgaagcaggccctgtggctgaccaagaccaagctgatcgagggcctgcccgagaaggtgctgagcctggtggacgaccccagaaaccacatcgagaaccaggacgagtgcgtgctgaacgtgatcagccacgccagactgtggcagaccaccgaggagatccccaagagagagacctactgccccgtgatcgtggacaacctgatccagctgtgcaagagccagatcctgaagcaccccagcctggccagaagaatctgcgtgcagaacagcaccttcagcgccacctggaacagagagagcctgctgctgcaggtgagaggcagcggcggcgccagactgagcaccaaggaccccctgcccaccatcgccagcagagaggagatcgaggccaccaagaaccacgtgctggagaccttctaccccatcagccccatcatcgacctgcacgagtgcaacatctacgacgtgaagaacgacaccggcttccaggagggctacccctacccctacccccacaccctgtacctgctggacaaggccaacctgagaccccacagactgcagcccgaccagctgagagccaagatgatcctgttcgccttcggcagcgccctggcccaggccagactgctgtacggcaacgacgccaaggtgctggagcagcccgtggtggtgcagagcgtgggcaccgacggcagagtgttccacttcctggtgttccagctgaacaccaccgacctggactgcaacgagggcgtgaagaacctggcctgggtggacagcgaccagctgctgtaccagcacttctggtgcctgcccgtgatcaagaagagagtggtggtggagcccgtgggccccgtgggcttcaagcccgagaccttcagaaagttcctggccctgtacctgcacggcgccgcctag

SEQ ID NO: 89144 - DNA, 795 bp, synthetic construct
  misc_feature 1..795: note = Description of Artificial Sequence: Synthetic coding sequence
  source 1..795: mol_type = other DNA
tgaagcctgctgctgcaggtgagaggcagcggcggcgccagactgagcaccaaggaccccctgcccaccatcgccagcagagaggagatcgaggccaccaagaaccacgtgctggagaccttctaccccatcagccccatcatcgacctgcacgagtgcaacatctacgacgtgaagaacgacaccggcttccaggagggctacccctacccctacccccacaccctgtacctgctggacaaggccaacctgagaccccacagactgcagcccgaccagctgagagccaagatgatcctgttcgccttcggcagcgccctggcccaggccagactgctgtacggcaacgacgccaaggtgctggagcagcccgtggtggtgcagagcgtgggcaccgacggcagagtgttccacttcctggtgttccagctgaacaccaccgacctggactgcaacgagggcgtgaagaacctggcctgggtggacagcgaccagctgctgtaccagcacttctggtgcctgcccgtgatcaagaagagagtggtggtgaccggcccctgcttcagcaagagccagatgagcaccagcttcgtgctgacccccagcttcaacgccggcgaggaggtgatgcagagaaacctgagagccagcgccagcctgccccccagcaccggcagccccgccagcgagctggtgaaggagcaggagcacgccgccggcagagtgctgagaagagtgatgctggacagcgagacccccagagaggagctgcccgccgccgacttctggaagtag

SEQ ID NO: 89145 - DNA, 1143 bp, synthetic construct
  misc_feature 1..1143: note = Description of Artificial Sequence: Synthetic coding sequence
  source 1..1143: mol_type = other DNA
atggccgccccctggtggagagccgccctgtgcgagtgcagaagatggagaggcttcagcaccagcgccgtgctgggcagaagaaccccccccctgggccccatgcccaacagcgacatcgacctgagcaacctggagagactggagaagtacagaagcttcgacagatacagaagaagagccgagcaggaggcccaggccccccactggtggagaacctacagagagtacttcggcgagaagaccgaccccaaggagaagatcgacatcggcctgcccccccccaaggtgagcagaacccagcagctgctggagagaaagcaggccatccaggagctgagagccaacgtggaggaggagagagccgccagactgagaaccgccagcgtgcccctggacgccgtgagagccgagtgggagagaacctgcggcccctaccacaagcagagactggccgagtactacggcctgtacagagacctgttccacggcgccaccttcgtgcccagagtgcccctgcacgtggcctacgccgtgggcgaggacgacctgatgcccgtgtactgcggcaacgaggtgacccccaccgaggccgcccaggcccccgaggtgacctacgaggccgaggagggcagcctgtggaccctgctgctgaccagcctggacggccacctgctggagcccgacgccgagtacctgcactggctgctgaccaacatccccggcaacagagtggccgagggccaggtgacctgcccctacctgccccccttccccgccagaggcagcggcatccacagactggccttcctgctgttcaagcaggaccagcccatcgacttcagcgaggacgccagacccagcccctgctaccagctggcccagagaaccttcagaaccttcgacttctacaagaagcaccaggagaccatgacccccgccggcctgagcttcttccagtgcagatgggacgacagcgtgacctacatcttccaccagctgctggacatgagagagcccgtgttcgagttcgtgagaccccccccctaccaccccaagcagaagagattcccccacagacagcccctgagatacctggacagatacagagacagccacgagcccacctacggcatctactag

SEQ ID NO: 89146 - DNA, 591 bp, synthetic construct
  misc_feature 1..591: note = Description of Artificial Sequence: Synthetic coding sequence
  source 1..591: mol_type = other DNA
atgcccgtgtactgcggcaacgaggtgacccccaccgaggccgcccaggcccccgaggtgacctacgaggccgaggagggcagcctgtggaccctgctgctgaccagcctggacggccacctgctggagcccgacgccgagtacctgcactggctgctgaccaacatccccggcaacagagtggccgagggccaggtgacctgcccctacctgccccccttccccgccagaggcagcggcatccacagactggccttcctgctgttcaagcaggaccagcccatcgacttcagcgaggacgccagacccagcccctgctaccagctggcccagagaaccttcagaaccttcgacttctacaagaagcaccaggagaccatgacccccgccggcctgagcttcttccagtgcagatgggacgacagcgtgacctacatcttccaccagctgctggacatgagagagcccgtgttcgagttcgtgagaccccccccctaccaccccaagcagaagagattcccccacagacagcccctgagatacctggacagatacagagacagccacgagcccacctacggcatctactag

SEQ ID NO: 89147 - DNA, 1062 bp, synthetic construct
  misc_feature 1..1062: note = Description of Artificial Sequence: Synthetic coding sequence
  source 1..1062: mol_type = other DNA
atggaggccctggccatgggcagcagagccctgagactgtggctggtggcccccggcggcggcatcaagtggagattcatcgccaccagcagcgccagccagctgagccccaccgagctgaccgagatgagaaacgacctgttcaacaaggagaaggccagacagctgagcctgacccccagaaccgagaagatcgaggtgaagcacgtgggcaagaccgaccccggcaccgtgttcgtgatgaacaagaacatcagcaccccctacagctgcgccatgcacctgagcgagtggtactgcagaaagagcatcctggccctggtggacggccagccctgggacatgtacaagcccctgaccaagagctgcgagatcaagttcctgaccttcaaggactgcgaccccggcgaggtgaacaaggcctactggagaagctgcgccatgatgatgggctgcgtgatcgagagagccttcaaggacgagtacatggtgaacctggtgagagcccccgaggtgcccgtgatcagcggcgccttctgctacgacgtggtgctggacagcaagctggacgagtggatgcccaccaaggagaacctgagaagcttcaccaaggacgcccacgccctgatctacaaggacctgcccttcgagaccctggaggtggaggccaaggtggccctggagatcttccagcacagcaagtacaaggtggacttcatcgaggagaaggccagccagaaccccgagagaatcgtgaagctgcacagaatcggcgacttcatcgacgtgagcgagggccccctgatccccagaaccagcatctgcttccagtacgaggtgagcgccgtgcacaacctgcagcccacccagcccagcctgatcagaagattccagggcgtgagcctgcccgtgcacctgagagcccacttcaccatctgggacaagctgctggagagaagcagaaagatgacccccttccccatcctgctgctgttcaccacccagagcttcttcaccaccagccccgagagctacctgctgcacggcaccgtgagcgagtag

SEQ ID NO: 89148 - DNA, 1017 bp, synthetic construct
  misc_feature 1..1017: note = Description of Artificial Sequence: Synthetic coding sequence
  source 1..1017: mol_type = other DNA
atggaggccctggccatgggcagcagagccctgagactgtggctggtggcccccggcggcggcatcaagtggagattcatcgccaccagcagcgccagccagctgagccccaccgagctgaccgagatgagaaacgacctgttcaacaaggagaaggccagacagctgagcctgacccccagaaccgagaagatcgaggtgaagcacgtgggcaagaccgaccccggcaccgtgttcgtgatgaacaagaacatcagcaccccctacagctgcgccatgcacctgagcgagtggtactgcagaaagagcatcctggccctggtggacggccagccctgggacatgtacaagcccctgaccaagagctgcgagatcaagttcctgaccttcaaggactgcgaccccggcgaggtgaacaaggcctactggagaagctgcgccatgatgatgggctgcgtgatcgagagagccttcaaggacgagtacatggtgaacctggtgagagcccccgaggtgcccgtgatcagcggcgccttctgctacgacgtggtgctggacagcaagctggacgagtggatgcccaccaaggagaacctgagaagcttcaccaaggacgcccacgccctgatctacaaggacctgcccttcgagaccctggaggtggaggccaaggtggccctggagatcttccagcacagcaagtacaaggtggacttcatcgaggagaaggccagccagaaccccgagagaatcgtgaagctgcacagaatcggcgacttcatcgacgtgagcgagggccccctgatccccagaaccagcatctgcttccagtacgaggtgagcgccgtgcacaacctgcagcccacccagcccagcctgatcagaagattccagggcgtgagcctgcccgtgcacctgagagcccacttcaccatctgggacaagctgctggagagaagcagaaagatggtgaccgaggaccagagcaaggccaccgaggagtgcaccagcacctag

SEQ ID NO: 89149 - DNA, 936 bp, synthetic construct
  misc_feature 1..936: note = Description of Artificial Sequence: Synthetic coding sequence
  source 1..936: mol_type = other DNA
atgctgcagttcgtgagagccggcgccagagcctggctgagacccaccggcagccagggcctgagcagcctggccgaggaggccgccagagccaccgagaaccccgagcaggtggccagcgagggcctgcccgagcccgtgctgagaaaggtggagctgcccgtgcccacccacagaagacccgtgcaggcctgggtggagagcctgagaggcttcgagcaggagagagtgggcctggccgacctgcaccccgacgtgttcgccaccgcccccagactggacatcctgcaccaggtggccatgtggcagaagaacttcaagagaatcagctacgccaagaccaagaccagagccgaggtgagaggcggcggcagaaagccctggccccagaagggcaccggcagagccagacacggcagcatcagaagccccctgtggagaggcggcggcgtggcccacggccccagaggccccaccagctactactacatgctgcccatgaaggtgagagccctgggcctgaaggtggccctgaccgtgaagctggcccaggacgacctgcacatcatggacagcctggagctgcccaccggcgacccccagtacctgaccgagctggcccactacagaagatggggcgacagcgtgctgctggtggacctgacccacgaggagatgccccagagcatcgtggaggccaccagcagactgaagaccttcaacctgatccccgccgtgggcctgaacgtgcacagcatgctgaagcaccagaccctggtgctgaccctgcccaccgtggccttcctggaggacaagctgctgtggcaggacagcagatacagacccctgtaccccttcagcctgccctacagcgacttccccagacccctgccccacgccacccagggccccgccgccaccccctaccactgctag

SEQ ID NO: 89150 - DNA, 936 bp, synthetic construct; identical to SEQ ID NO: 89149
  misc_feature 1..936: note = Description of Artificial Sequence: Synthetic coding sequence
  source 1..936: mol_type = other DNA

SEQ ID NO: 89151 - DNA, 792 bp, synthetic construct
  misc_feature 1..792: note = Description of Artificial Sequence: Synthetic coding sequence
  source 1..792: mol_type = other DNA
atgctgcagttcgtgagagccggcgccagagcctggctgagacccaccggcagccagggcctgagcagcctggccgaggaggccgccagagccaccgagaaccccgagcaggtggccagcgagggcctgcccgagcccgtgctgagaaaggtggagctgcccgtgcccacccacagaagacccgtgcaggcctgggtggagagcctgagaggcttcgagcaggagagagtgggcctggccgacctgcaccccgacgtgttcgccaccgcccccagactggacatcctgcaccaggtggccatgtggcagaagaacttcaagagaatcagctacgccaagaccaagaccagagccgaggtgagaggcggcggcagaaagccctggccccagaagggcaccggcagagccagacacggcagcatcagaagccccctgtggagaggcggcggcgtggcccacggccccagaggccccaccagctactactacatgctgcccatgaaggtgagagccctgggcctgaaggtggccctgaccgtgaagctggcccaggacgacctgcacatcatggacagcctggagctgcccaccggcgacccccagtacctgaccgagctggcccactacagaagatggggcgacagcgtgctgctggtggacctgacccacgaggagatgccccagagcatcgtggaggccaccagcagactgaagaccttcaacctgatccccgccgtgggcgagcagagagcccaggcccccagagtgagaatgtgcagactgagatgctag

SEQ ID NO: 89152 - DNA, 792 bp, synthetic construct; identical to SEQ ID NO: 89151
  misc_feature 1..792: note = Description of Artificial Sequence: Synthetic coding sequence
  source 1..792: mol_type = other DNA

SEQ ID NO: 89153 - DNA, 414 bp, synthetic construct
  misc_feature 1..414: note = Description of Artificial Sequence: Synthetic coding sequence
  source 1..414: mol_type = other DNA
atgggcgtgctggccgccgccgccagatgcctggtgagaggcgccgacagaatgagcaagtggaccagcaagagaggccccagaagcttcagaggcagaaagggcagaggcgccaagggcatcggcttcctgaccagcggctggagattcgtgcagatcaaggagatggtgcccgagttcgtggtgcccgacctgaccggcttcaagctgaagccctacgtgagctacctggcccccgagagcgaggagacccccctgaccgccgcccagctgttcagcgaggccgtggcccccgccatcgagaaggacttcaaggacggcaccttcgaccccgacaacctggagaagtacggcttcgagcccacccaggagggcaagctgttccagctgtaccccagaaacttcctgagatag

SEQ ID NO: 89154 - DNA, 429 bp, synthetic construct
  misc_feature 1..429: note = Description of Artificial Sequence: Synthetic coding sequence
  source 1..429: mol_type = other DNA
atgggcgacgtgaaggagaactacctggagaccttcatcagcagccccaagttcggcagaacctgcgccgacggcgccctgtactgcgtgtgccacaagagcacctacagccccctgcccgacgactacaactgcaacgtggagctggccctgaccagcgacggcagaaccatcgtgtgctaccaccccagcgtggacatcccctacgagcacaccaagcccatccccagacccgaccccgtgcacaacaacgaggagacccacgaccaggtgctgaagaccagactggaggagaaggtggagcacctggaggagggccccatgatcgagcagctgagcaagatgttcttcaccaccaagcacagatggtacccccacggcagataccacagatgcagaaagaacctgaacccccccaaggacagatag

SEQ ID NO: 89155 - DNA, 429 bp, synthetic construct
  misc_feature 1..429: note = Description of Artificial Sequence: Synthetic coding sequence
  source 1..429: mol_type = other DNA
atggccgtggccgccgtgaagtgggtgatgagcaagagaaccatcctgaagcacctgttccccgtgcagaacggcgccctgtactgcgtgtgccacaagagcacctacagccccctgcccgacgactacaactgcaacgtggagctggccctgaccagcgacggcagaaccatcgtgtgctaccaccccagcgtggacatcccctacgagcacaccaagcccatccccagacccgaccccgtgcacaacaacgaggagacccacgaccaggtgctgaagaccagactggaggagaaggtggagcacctggaggagggccccatgatcgagcagctgagcaagatgttcttcaccaccaagcacagatggtacccccacggcagataccacagatgcagaaagaacctgaacccccccaaggacagatag

SEQ ID NO: 89156 - DNA, 429 bp, synthetic construct; identical to SEQ ID NO: 89155
  misc_feature 1..429: note = Description of Artificial Sequence: Synthetic coding sequence
  source 1..429: mol_type = other DNA

SEQ ID NO: 89157 - DNA, 429 bp, synthetic construct; identical to SEQ ID NO: 89155
  misc_feature 1..429: note = Description of Artificial Sequence: Synthetic coding sequence
  source 1..429: mol_type = other DNA

SEQ ID NO: 89158 - DNA, 609 bp, synthetic construct
  misc_feature 1..609: note = Description of Artificial Sequence: Synthetic coding sequence
  source 1..609: mol_type = other DNA
atgaccgccagaggcacccccagcagattcctggccagcgtgctgcacaacggcctgggcagatacgtgcagcagctgcagagactgagcttcagcgtgagcagagacggcgccagcagcagaggcgccagagagttcgtggagagagaggtgatcgacttcgccagaagaaaccccggcgtggtgatctacgtgaacagcagaccctgctgcgtgcccagagtggtggccgagtacctgaacggcgccgtgagagaggagagcatccactgcaagagcgtggaggagatcagcaccctggtgcagaagctggccgaccagagcggcctggacgtgatcagaatcagaaagcccttccacaccgacaaccccagcatccagggccagtggcaccccttcaccaacaagcccaccaccttcagaggcctgagacccagagaggtgcaggaccccgcccccgcccaggacaccggcctgagactgagcgccgtggccccccagatcctgctgcccggctggcccgaccccatcagcgtgcagagcagcgacctgccctggggcaacacccactacagacccgagcccctgagcagcaccacctggctgtag

SEQ ID NO: 89159 - DNA, 648 bp, synthetic construct
  misc_feature 1..648: note = Description of Artificial Sequence: Synthetic coding sequence
  source 1..648: mol_type = other DNA
atgaccgccagaggcacccccagcagattcctggccagcgtgctgcacaacggcctgggcagatacgtgcagcagctgcagagactgagcttcagcgtgagcagagacggcgccagcagcagaggcgccagagagttcgtggagagagaggtgatcgacttcgccagaagaaaccccggcgtggtgatctacgtgaacagcagaccctgctgcgtgcccagagtggtggccgagtacctgaacggcgccgtgagagaggagagcatccactgcaagagcgtggaggagatcagcaccctggtgcagaagctggccgaccagagcggcctggacgtgatcagaatcagaaagcccttccacaccgacaaccccagcatccagggccagtggcaccccttcaccaacaagcccaccaccttcagaggcctgagacccagagaggtgcaggaccccgcccccgcccaggacaccggcctgagactgagcgccgtggccccccagatcctgctgcccggctggcccgacccccccgacctgcccaccgtggaccccatcagcagcagcctgaccagcgcccccgcccccatgctgagcgccgtgagctgcctgcccatcgtgcccgccctgaccaccgtgtgcagcgcctag

SEQ ID NO: 89160 - DNA, 480 bp, synthetic construct
  misc_feature 1..480: note = Description of Artificial Sequence: Synthetic coding sequence
  source 1..480: mol_type = other DNA
atgaccgccagaggcacccccagcagattcctggccagcgtgctgcacaacggcctgggcagatacgtgcagcagctgcagagactgagcttcagcgtgagcagagacggcgccagcagcagaggcgccagagagttcgtggagagagaggtgatcgacttcgccagaagaaaccccggcgtggtgatctacgtgaacagcagaccctgctgcgtgcccagagtggtggccgagtacctgaacggcgccgtgagagaggagagcatccactgcaagagcgtggaggagatcagcaccctggtgcagaagctggccgaccagagcggcctggacgtgatcagaatcagaaagcccttccacaccgacaaccccagcatccagggccagtggcaccccttcaccaacaagcccaccaccttcagaggcctgagacccagagaggtgcaggaccccgcccccgcccaggtgcaggcccagtag

SEQ ID NO: 89161 - DNA, 708 bp, synthetic construct
  misc_feature 1..708: note = Description of Artificial Sequence: Synthetic coding sequence
  source 1..708: mol_type = other DNA
atgaccgccagaggcacccccagcagattcctggccagcgtgctgcacaacggcctgggcagatacgtgcagcagctgcagagactgagcttcagcgtgagcagagacggcgccagcagcagaggcgccagagagttcgtggagagagaggtgatcgacttcgccagaagaaaccccggcgtggtgatctacgtgaacagcagaccctgctgcgtgcccagagtggtggccgagtacctgaacggcgccgtgagagaggagagcatccactgcaagagcgtggaggagatcagcaccctggtgcagaagctggccgaccagagcggcctggacgtgatcagaatcagaaagcccttccacaccgacaaccccagcatccagggccagtggcaccccttcaccaacaagcccaccaccttcagaggcctgagacccagagaggtgcaggaccccgcccccgcccaggacgccgccgagttcctgggcgagggcgccggcccctgctggtacagcatcgtggccctgccccagaagcacatcgccatcgccatccaccccccccagcccgccggccagtgccaccaggccatcggccactggcccgagaccgtgtgcagctgcaccgccgacccccccgccagactggccagacccaacatcagcagcgtgatcagaagcagcctgggcaagtaccccctgcccagctag

SEQ ID NO: 89162 - DNA, 495 bp, synthetic construct
  misc_feature 1..495: note = Description of Artificial Sequence: Synthetic coding sequence
  source 1..495: mol_type = other DNA
atgaccgccagaggcacccccagcagattcctggccagcgtgctgcacaacggcctgggcagatacgtgcagcagctgcagagactgagcttcagcgtgagcagagacggcgccagcagcagaggcgccagagagttcgtggagagagaggtgatcgacttcgccagaagaaaccccggcgtggtgatctacgtgaacagcagaccctgctgcgtgcccagagtggtggccgagtacctgaacggcgccgtgagagaggagagcatccactgcaagagcgtggaggagatcagcaccctggtgcagaagctggccgaccagagcggcctggacgtgatcagaatcagaaagcccttccacaccgacaaccccagcatccagggccagtggcaccccttcaccaacaagcccaccaccttcagaggcctgagacccagagaggtgcaggaccccgcccccgcccagtgcctgctgctgggcgccgtgaccctgtag

SEQ ID NO: 89163 - DNA, 480 bp, synthetic construct; identical to SEQ ID NO: 89160
  misc_feature 1..480: note = Description of Artificial Sequence: Synthetic coding sequence
  source 1..480: mol_type = other DNA

SEQ ID NO: 89164 - DNA, 555 bp, synthetic construct
  misc_feature 1..555: note = Description of Artificial Sequence: Synthetic coding sequence
  source 1..555: mol_type = other DNA
atgaccgccagaggcacccccagcagattcctggccagcgtgctgcacaacggcctgggcagatacgtgcagcagctgcagagactgagcttcagcgtgagcagagacggcgccagcagcagaggcgccagagagttcgtggagagagaggtgatcgacttcgccagaagaaaccccggcgtggtgatctacgtgaacagcagaccctgctgcgtgcccagagtggtggccgagtacctgaacggcgccgtgagagaggagagcatccactgcaagagcgtggaggagatcagcaccctggtgcagaagctggccgaccagagcggcctggacgtgatcagaatcagaaagcccttccacaccgacaaccccagcatccagggccagtggcaccccttcaccaacaagcccaccaccttcagaggcctgagacccagagaggtgcaggaccccgcccccgcccaggacaccggcctgagactgagcgccgtggccccccagatcctgctgcccggctggcccgaccccaccagagccaccagagccaccagatag

SEQ ID NO: 89165 - DNA, 786 bp, synthetic construct
  misc_feature 1..786: note = Description of Artificial Sequence: Synthetic coding sequence
  source 1..786: mol_type = other DNA
atgaccgccagaggcacccccagcagattcctggccagcgtgctgcacaacggcctgggcagatacgtgcagcagctgcagagactgagcttcagcgtgagcagagacggcgccagcagcagaggcgccagagagttcgtggagagagaggtgatcgacttcgccagaagaaaccccggcgtggtgatctacgtgaacagcagaccctgctgcgtgcccagagtggtggccgagtacctgaacggcgccgtgagagaggagagcatccactgcaagagcgtggaggagatcagcaccctggtgcagaagctggccgaccagagcggcctggacgtgatcagaatcagaaagcccttccacaccgacaaccccagcatccagggccagtggcaccccttcaccaacaagcccaccaccttcagaggcctgagacccagagaggtgcaggaccccgcccccgcccaggacgccgccgagttcctgggcgagggcgccggcccctgctggtacagcatcgtggccctgccccagaagcacatcgccatcgccatccaccccccccagcccgccggccagtgccaccaggccatcggccactggcccgagaccgtgtgcagctgcaccgccgacccccccgccagactggccagacccaccagacccccccacagcggcagctacctgatcctgatcgacctgtgcagcagcccctacgccgtgagaagcttcctgccccccgactgcccctgcaccgaccactgcgtgctgagcgtgaaggccgcctag

SEQ ID NO: 89166 - DNA, 510 bp, synthetic construct
  misc_feature 1..510: note = Description of Artificial Sequence: Synthetic coding sequence
  source 1..510: mol_type = other DNA
tgaggcacccccagcagattcctggccagcgtgctgcacaacggcctgggcagatacgtgcagcagctgcagagactgagcttcagcgtgagcagagacggcgccagcagcagaggcgccagagagttcgtggagagagaggtgatcgacttcgccagaagaaaccccggcgtggtgatctacgtgaacagcagaccctgctgcgtgcccagagtggtggccgagtacctgaacggcgccgtgagagaggagagcatccactgcaagagcgtggaggagatcagcaccctggtgcagaagctggccgaccagagcggcctggacgtgatcagaatcagaaagcccttccacaccgacaaccccagcatccagggccagtggcaccccttcaccaacaagcccaccaccttcagaggcctgagacccagagaggtgcaggaccccgcccccgcccaggacgccgccgagttcctgggcgagggcgccggcccctgctggaccctggcctag

SEQ ID NO: 89167 - DNA, 999 bp, synthetic construct
  misc_feature 1..999: note = Description of Artificial Sequence: Synthetic coding sequence
  source 1..999: mol_type = other DNA
atggccagcggcctggtgagactgctgcagcagggccacagatgcctgctggcccccgtggcccccaagctggtgccccccgtgagaggcgtgaagaagggcttcagagccgccttcagattccagaaggagctggagagacagagactgctgagatgcccccccccccccgtgagaagaagcgagaagcccaactgggactaccacgccgagatccaggccttcggccacagactgcaggagaacttcagcctggacctgctgaagaccgccttcgtgaacagctgctacatcaagagcgaggaggccaagagacagcagctgggcatcgagaaggaggccgtgctgctgaacctgaagagcaaccaggagctgagcgagcagggcaccagcttcagccagacctgcctgacccagttcctggaggacgagtaccccgacatgcccaccgagggcatcaagaacctggtggacttcctgaccggcgaggaggtggtgtgccacgtggccagaaacctggccgtggagcagctgaccctgagcgaggagttccccgtgccccccgccgtgctgcagcagaccttcttcgccgtgatcggcgccctgctgcagagcagcggccccgagagaaccgccctgttcatcagagacttcctgatcacccagatgaccggcaaggagctgttcgagatgtggaagatcatcaaccccatgggcctgctggtggaggagctgaagaagagaaacgtgagcgcccccgagagcagactgaccagacagagcggcggcaccaccgccctgcccctgtacttcgtgggcctgtactgcgacaagaagctgatcgccgagggccccggcgagaccgtgctggtggccgaggaggaggccgccagagtggccctgagaaagctgtacggcttcaccgagaacagaagaccctggaactacagcaagcccaaggagaccctgagagccgagaagagcatcaccgccagctag

SEQ ID NO: 89168 - DNA, 921 bp, synthetic construct
  misc_feature 1..921: note = Description of Artificial Sequence: Synthetic coding sequence
  source 1..921: mol_type = other DNA
atggccgcccccatcccccagggcttcagctgcctgagcagattcctgggctggtggttcagacagcccgtgctggtgacccagagcgccgccatcgtgcccgtgagaaccaagaagagattcaccccccccatctaccagcccaagttcaagaccgagaaggagttcatgcagcacgccagaaaggccggcctggtgatcccccccgagaagagcgacagaagcatccacctggcctgcaccgccggcatcttcgacgcctacgtgccccccgagggcgacgccagaatcagcagcctgagcaaggagggcctgatcgagagaaccgagagaatgaagaagaccatggccagccaggtgagcatcagaagaatcaaggactacgacgccaacttcaagatcaaggacttccccgagaaggccaaggacatcttcatcgaggcccacctgtgcctgaacaacagcgaccacgacagactgcacaccctggtgaccgagcactgcttccccgacatgacctgggacatcaagtacaagaccgtgagatggagcttcgtggagagcctggagcccagccacgtggtgcaggtgagatgcagcagcatgatgaaccagggcaacgtgtacggccagatcaccgtgagaatgcacaccagacagaccctggccatctacgacagattcggcagactgatgtacggccaggaggacgtgcccaaggacgtgctggagtacgtggtgttcgagaagcagctgaccaacccctacggcagctggagaatgcacaccaagatcgtgcccccctgggccccccccaagcagcccatcctgaagaccgtgatgatccccggcccccagctgaagcccgaggaggagtacgaggaggcccagggcgaggcccagaagccccagctggcctag

SEQ ID NO: 89169 - DNA, 693 bp, synthetic construct
  misc_feature 1..693: note = Description of Artificial Sequence: Synthetic coding sequence
  source 1..693: mol_type = other DNA
atggccgccgccggcctggccctgctgtgcagaagagtgagcagcgccctgaagagcagcagaagcctgatcaccccccaggtgcccgcctgcaccggcctgctgcacaccaccctgagcagaaagggcctggaggagttcttcgacgaccccaagaactggggccaggagaaggtgaagagcggcgccgcctggacctgccagcagctgagaaacaagagcaacgaggacctgcacaagctgtggtacgtgctgctgaaggagagaaacatgctgctgaccctggagcaggaggccaagagacagagactgcccatgcccagccccgagagactggacaaggtggtggacagcatggacgccctggacaaggtggtgcaggagagagaggacgccctgagactgctgcagaccggccaggagagagccagacccggcgcctggagaagagacatcttcggcagaatcatctggcacaagttcaagcagtgggtgatcccctggcacctgaacaagagatacaacagaaagagattcttcgccctgccctacgtggaccacttcctgagactggagagagagaagagagccagaatcaaggccagaaaggagaacctggagagaaagaaggccaagatcctgctgaagaagttcccccacctggccgaggcccagaagagcagcctggtgtag

SEQ ID NO: 89170 - DNA, 423 bp, synthetic construct
  misc_feature 1..423: note = Description of Artificial Sequence: Synthetic coding sequence
  source 1..423: mol_type = other DNA
atgctgctgaccctggagcaggaggccaagagacagagactgcccatgcccagccccgagagactggacaaggtggtggacagcatggacgccctggacaaggtggtgcaggagagagaggacgccctgagactgctgcagaccggccaggagagagccagacccggcgcctggagaagagacatcttcggcagaatcatctggcacaagttcaagcagtgggtgatcccctggcacctgaacaagagatacaacagaaagagattcttcgccctgccctacgtggaccacttcctgagactggagagagagaagagagccagaatcaaggccagaaaggagaacctggagagaaagaaggccaagatcctgctgaagaagttcccccacctggccgaggcccagaagagcagcctggtgtag

SEQ ID NO: 89171 - DNA, 753 bp, synthetic construct
  misc_feature 1..753: note = Description of Artificial Sequence: Synthetic coding sequence
  source 1..753: mol_type = other DNA
atggccgccgccggcctggccctgctgtgcagaagagtgagcagcgccctgaagagcagcagaagcctgatcaccccccaggtgcccgcctgcaccggcttcttcctgagcctgctgcccaagagcacccccaacgtgaccagcttccaccagtacagactgctgcacaccaccctgagcagaaagggcctggaggagttcttcgacgaccccaagaactggggccaggagaaggtgaagagcggcgccgcctggacctgccagcagctgagaaacaagagcaacgaggacctgcacaagctgtggtacgtgctgctgaaggagagaaacatgctgctgaccctggagcaggaggccaagagacagagactgcccatgcccagccccgagagactggacaaggtggtggacagcatggacgccctggacaaggtggtgcaggagagagaggacgccctgagactgctgcagaccggccaggagagagccagacccggcgcctggagaagagacatcttcggcagaatcatctggcacaagttcaagcagtgggtgatcccctggcacctgaacaagagatacaacagaaagagattcttcgccctgccctacgtggaccacttcctgagactggagagagagaagagagccagaatcaaggccagaaaggagaacctggagagaaagaaggccaagatcctgctgaagaagttcccccacctggccgaggcccagaagagcagcctggtgtag

SEQ ID NO: 89172 - DNA, 639 bp, synthetic construct
  misc_feature 1..639: note = Description of Artificial Sequence: Synthetic coding sequence
  source 1..639: mol_type = other DNA
atgagcggcaccctggagaaggtgctgtgcctgagaaacaacaccatcttcaagcaggccttcagcctgctgagattcagaaccagcggcgagaagcccatctacagcgtgggcggcatcctgctgagcatcagcagaccctacaagaccaagcccacccacggcatcggcaagtacaagcacctgatcaaggccgaggagcccaagaagaagaagggcaaggtggaggtgagagccatcaacctgggcaccgactacgagtacggcgtgctgaacatccacctgaccgcctacgacatgaccctggccgagagctacgcccagtacgtgcacaacctgtgcaacagcctgagcatcaaggtggaggagagctacgccatgcccaccaagaccatcgaggtgctgcagctgcaggaccagggcagcaagatgctgctggacagcgtgctgaccacccacgagagagtggtgcagatcagcggcctgagcgccaccttcgccgagatcttcctggagatcatccagagcagcctgcccgagggcgtgagactgagcgtgaaggagcacaccgaggaggacttcaagggcagattcaaggccagacccgagctggaggagctgctggccaagctgaagtag

SEQ ID NO: 89173 - DNA, 585 bp, synthetic construct
  misc_feature 1..585: note = Description of Artificial Sequence: Synthetic coding sequence
  source 1..585: mol_type = other DNA
atgggcctgagcagctgcagaaagaccagcagcggcctgcccctgatcctgcactacggcggcatcctgctgagcatcagcagaccctacaagaccaagcccacccacggcatcggcaagtacaagcacctgatcaaggccgaggagcccaagaagaagaagggcaaggtggaggtgagagccatcaacctgggcaccgactacgagtacggcgtgctgaacatccacctgaccgcctacgacatgaccctggccgagagctacgcccagtacgtgcacaacctgtgcaacagcctgagcatcaaggtggaggagagctacgccatgcccaccaagaccatcgaggtgctgcagctgcaggaccagggcagcaagatgctgctggacagcgtgctgaccacccacgagagagtggtgcagatcagcggcctgagcgccaccttcgccgagatcttcctggagatcatccagagcagcctgcccgagggcgtgagactgagcgtgaaggagcacaccgaggaggacttcaagggcagattcaaggccagacccgagctggaggagctgctggccaagctgaagtag

SEQ ID NO: 89174 - DNA, 501 bp, synthetic construct
  misc_feature 1..501: note = Description of Artificial Sequence: Synthetic coding sequence
  source 1..501: mol_type = other DNA
atggccgccaccatgttcagagccaccctgagaggctggagaaccggcgtgcagagaggctgcggcctgagactgctgagccagacccagggcccccccgactaccccagattcgtggagagcgtggacgagtaccagttcgtggagagactgctgcccgccaccagaatccccgacccccccaagcacgagcactaccccacccccagcggctggcagccccccagagaccccccccccaacctgccctacttcgtgagaagaagcagaatgcacaacatccccgtgtacaaggacatcacccacggcaacagacagatgaccgtgatcagaaaggtggagggcgacatctgggccctgcagaaggacgtggaggacttcctgagccccctgctgggcaagacccccgtgacccaggtgaacgaggtgaccggcaccctgagaatcaagggctacttcgaccaggagctgaaggcctggctgctggagaagggcttctag

SEQ ID NO: 89175 - DNA, 501 bp, synthetic construct; identical to SEQ ID NO: 89174
  misc_feature 1..501: note = Description of Artificial Sequence: Synthetic coding sequence
  source 1..501: mol_type = other DNA

SEQ ID NO: 89176 - DNA, 477 bp, synthetic construct
  misc_feature 1..477: note = Description of Artificial Sequence: Synthetic coding sequence
  source 1..477: mol_type = other DNA
atggccgccagaagcgtgagcggcatcaccagaagagtgttcatgtggaccgtgagcggcaccccctgcagagagttctggagcagattcagaaaggagaaggagcccgtggtggtggagaccgtggaggagaagaaggagcccatcctggtgtgcccccccctgagaagcagagcctacaccccccccgaggacctgcagagcagactggagagctacgtgaaggaggtgttcggcagcagcctgcccagcaactggcaggacatcagcctggaggacagcagactgaagttcaacctgctggcccacctggccgacgacctgggccacgtggtgcccaacagcagactgcaccagatgtgcagagtgagagacgtgctggacttctacaacgtgcccatccaggacagaagcaagttcgacgagctgagcgccagcaacctgccccccaacctgaagatcacctggagctactag

SEQ ID NO: 89177 - DNA, 408 bp, synthetic construct
  misc_feature 1..408: note = Description of Artificial Sequence: Synthetic coding sequence
  source 1..408: mol_type = other DNA
atggccgccagaagcgtgagcggcatcaccagaagagtgttcatgtggaccgtgagcggcaccccctgcagagagttctggagcagattcagaaaggagaaggagcccgtggtggtggagaccgtggaggagaagaaggagcccatcctggtgtgcccccccctgagaagcagagcctacaccccccccgaggacctgcagagcagactggagagctacgtgaaggaggtgttcggcagcagcctgcccagcaactggcaggacatcagcctggaggacagcagactgaagttcaacctgctggcccacctggccgacgacctgggccacgtggtgcccaacagcagactgcaccagatgtgcagaggctacagcttcgaggagggcaagatccagctgggcatctag

SEQ ID NO: 89178 - DNA, 1146 bp, synthetic construct
  misc_feature 1..1146: note = Description of Artificial Sequence: Synthetic coding sequence
  source 1..1146: mol_type = other DNA
atggccagccccagcctggagagacccgagaagggcgccggcaagagcgagttcagaaaccagaagcccaagcccgagaaccaggacgagagcgagctgctgaccgtgcccgacggctggaaggagcccgccttcagcaaggaggacaaccccagaggcctgctggaggagagcagcttcgccaccctgttccccaagtacagagaggcctacctgaaggagtgctggcccctggtgcagaaggccctgaacgagcaccacgtgaacgccaccctggacctgatcgagggcagcatgaccgtgtgcaccaccaagaagaccttcgacccctacatcatcatcagagccagagacctgatcaagctgctggccagaagcgtgagcttcgagcaggccgtgagaatcctgcaggacgacgtggcctgcgacatcatcaagatcggcagcctggtgagaaacaaggagagattcgtgaagagaagacagagactgatcggccccaagggcagcaccctgaaggccctggagctgctgaccaactgctacatcatggtgcagggcaacaccgtgagcgccatcggccccttcagcggcctgaaggaggtgagaaaggtggtgctggacaccatgaagaacatccaccccatctacaacatcaagagcctgatgatcaagagagagctggccaaggacagcgagctgagaagccagagctgggagagattcctgccccagttcaagcacaagaacgtgaacaagagaaaggagcccaagaagaagaccgtgaagaaggagtacacccccttcccccccccccagcccgagagccagatcgacaaggagctggccagcggcgagtacttcctgaaggccaaccagaagaagagacagaagatggaggccatcaaggccaagcaggccgaggccatcagcaagagacaggaggagagaaacaaggccttcatcccccccaaggagaagcccatcgtgaagcccaaggaggccagcaccgagaccaagatcgacgtggccagcatcaaggagaaggtgaagaaggccaagaacaagaagctgggcgccctgaccgccgaggagatcgccctgaagatggaggccgacgagaagaagaagaagaagaagaagtag

SEQ ID NO: 89179 - DNA, 372 bp, synthetic construct
  misc_feature 1..372: note = Description of Artificial Sequence: Synthetic coding sequence
  source 1..372: mol_type = other DNA
atggccgccctgggcaccgtgctgttcaccggcgtgagaagactgcactgcagcgtggccgcctgggccggcggccagtggagactgcagcagggcctggccgccaaccccagcggctacggccccctgaccgagctgcccgactggagctacgccgacggcagacccgccccccccatgaagggccagctgagaagaaaggccgagagagagaccttcgccagaagagtggtgctgctgagccaggagatggacgccggcctgcaggcctggcagctgagacagcagaagctgcaggaggagcagagaaagcaggagaacgccctgaagcccaagggcgccagcctgaagagccccctgcccagccagtag

SEQ ID NO: 89180 - DNA, 369 bp, synthetic construct
  misc_feature 1..369: note = Description of Artificial Sequence: Synthetic coding sequence
  source 1..369: mol_type = other DNA
atggccgccctgggcaccgtgctgttcagcgtgagaagactgcactgcagcgtggccgcctgggccggcggccagtggagactgcagcagggcctggccgccaaccccagcggctacggccccctgaccgagctgcccgactggagctacgccgacggcagacccgccccccccatgaagggccagctgagaagaaaggccgagagagagaccttcgccagaagagtggtgctgctgagccaggagatggacgccggcctgcaggcctggcagctgagacagcagaagctgcaggaggagcagagaaagcaggagaacgccctgaagcccaagggcgccagcctgaagagccccctgcccagccagtag

SEQ ID NO: 89181 - DNA, 264 bp, synthetic construct
  misc_feature 1..264: note = Description of Artificial Sequence: Synthetic coding sequence
  source 1..264: mol_type = other DNA
atggccgccctgggcaccgtgctgttcaccggcgtgagaagactgcactgcagcgtggccgcctgggccggcggccagtggagactgcagcagggcctggccgccaaccccagcggctacggccccctgaccgagctgcccgactggagctacgccgagaccagctgcaccgccgtgaccggcaacggcagatggatcaccagcatggccgcccaggccgccgaggtggccggcagaaccaaggaggccggcaagtgcagctag

SEQ ID NO: 89182 - DNA, 195 bp, synthetic construct
  misc_feature 1..195: note = Description of Artificial Sequence: Synthetic coding sequence
  source 1..195: mol_type = other DNA
atgaagggccagctgagaagaaaggccgagagagagaccttcgccagaagagtggtgctgctgagccaggagatggacgccggcctgcaggcctggcagctgagacagcagaagctgcaggaggagcagagaaagcaggagaacgccctgaagcccaagggcgccagcctgaagagccccctgcccagccagtag

SEQ ID NO: 89183 - DNA, 195 bp, synthetic construct; identical to SEQ ID NO: 89182
  misc_feature 1..195: note = Description of Artificial Sequence: Synthetic coding sequence
  source 1..195: mol_type = other DNA

SEQ ID NO: 89184 - DNA, 195 bp, synthetic construct; identical to SEQ ID NO: 89182
  misc_feature 1..195: note = Description of Artificial Sequence: Synthetic coding sequence
  source 1..195: mol_type = other DNA

SEQ ID NO: 89185 - DNA, 339 bp, synthetic construct
  misc_feature 1..339: note = Description of Artificial Sequence: Synthetic coding sequence
  source 1..339: mol_type = other DNA
atggccgccgccctggccagactgggcctgagacccgtgaagcaggtgagagtgcagttctgccccttcgagaagaacgtggagagcaccagaaccttcctgcagaccgtgagcagcgagaaggtgagaagcaccaacctgaactgcagcgtgatcgccgacgtgagacacgacggcagcgagccctgcgtggacgtgctgttcggcgacggccacagactgatcatgagaggcgcccacctgaccgccctggagatgctgaccgccttcgccagccacatcagagccagagacgccgccggcagcggcgacaagcccggcgccgacaccggcagatag

SEQ ID NO: 89186 - DNA, 417 bp, synthetic construct
  misc_feature 1..417: note = Description of Artificial Sequence: Synthetic coding sequence
  source 1..417: mol_type = other DNA
atggccaccaagagactgttcggcgccaccagaacctgggccggctggggcgcctgggagctgctgaaccccgccaccagcggcagactgctggccagagactacgccaagaagcccgtgatgaagggcgccaagagcggcaagggcgccgtgaccagcgaggccctgaaggaccccgacgtgtgcaccgaccccgtgcagctgaccacctacgccatgggcgtgaacatctacaaggagggccaggacgtgcccctgaagcccgacgccgagtaccccgagtggctgttcgagatgaacctgggcccccccaagaccctggaggagctggaccccgagagcagagagtactggagaagactgagaaagcagaacatctggagacacaacagactgagcaagaacaagagactgtag

SEQ ID NO: 89187 - DNA, 387 bp, synthetic construct
  misc_feature 1..387: note = Description of Artificial Sequence: Synthetic coding sequence
  source 1..387: mol_type = other DNA
atggccgccgtgggcagcctgctgggcagactgagacagagcaccgtgaaggccaccggccccgccctgagaagactgcacaccagcagctggagagccgacagcagcagagccagcctgaccagagtgcacagacaggcctacgccagactgtaccccgtgctgctggtgaagcaggacggcagcaccatccacatcagatacagagagcccagaagaatgctggccatgcccatcgacctggacaccctgagccccgaggagagaagagccagactgagaaagagagaggcccagctgcagagcagaaaggagtacgagcaggagctgagcgacgacctgcacgtggagagatacagacagttctggaccagaaccaagaagtag

SEQ ID NO: 89188 - DNA, 387 bp, synthetic construct; identical to SEQ ID NO: 89187
  misc_feature 1..387: note = Description of Artificial Sequence: Synthetic coding sequence
  source 1..387: mol_type = other DNA

SEQ ID NO: 89189 - DNA, 387 bp, synthetic construct; identical to SEQ ID NO: 89187
  misc_feature 1..387: note = Description of Artificial Sequence: Synthetic coding sequence
  source 1..387: mol_type = other DNA

SEQ ID NO: 89190 - DNA, 387 bp, synthetic construct; identical to SEQ ID NO: 89187
  misc_feature 1..387: note = Description of Artificial Sequence: Synthetic coding sequence
  source 1..387: mol_type = other DNA

SEQ ID NO: 89191 - DNA, 495 bp, synthetic construct
  misc_feature 1..495: note = Description of Artificial Sequence: Synthetic coding sequence
  source 1..495: mol_type = other DNA
atggccgccgtgggcagcctgctgggcctggccgccagcagctggctgggcggccagaacgccagcgaccacagcctgtggctgctgagaaagcccagaggcagcagctgccccggcaccggccaccagctgtgcagactgagacagagcaccgtgaaggccaccggccccgccctgagaagactgcacaccagcagctggagagccgacagcagcagagccagcctgaccagagtgcacagacaggcctacgccagactgtaccccgtgctgctggtgaagcaggacggcagcaccatccacatcagatacagagagcccagaagaatgctggccatgcccatcgacctggacaccctgagccccgaggagagaagagccagactgagaaagagagaggcccagctgcagagcagaaaggagtacgagcaggagctgagcgacgacctgcacgtggagagatacagacagttctggaccagaaccaagaagtag

SEQ ID NO: 89192 - DNA, 378 bp, synthetic construct
  misc_feature 1..378: note = Description of Artificial Sequence: Synthetic coding sequence
  source 1..378: mol_type = other DNA
atggccgccgtgggcagcctgctgggccagagcaccgtgaaggccaccggccccgccctgagaagactgcacaccagcagctggagagccgacagcagcagagccagcctgaccagagtgcacagacaggcctacgccagactgtaccccgtgctgctggtgaagcaggacggcagcaccatccacatcagatacagagagcccagaagaatgctggccatgcccatcgacctggacaccctgagccccgaggagagaagagccagactgagaaagagagaggcccagctgcagagcagaaaggagtacgagcaggagctgagcgacgacctgcacgtggagagatacagacagttctggaccagaaccaagaagtag

SEQ ID NO: 89193 - DNA, 387 bp, synthetic construct; identical to SEQ ID NO: 89187
  misc_feature 1..387: note = Description of Artificial Sequence: Synthetic coding sequence
  source 1..387: mol_type = other DNA

SEQ ID NO: 89194 - DNA, 387 bp, synthetic construct; identical to SEQ ID NO: 89187
  misc_feature 1..387: note = Description of Artificial Sequence: Synthetic coding sequence
  source 1..387: mol_type = other DNA

SEQ ID NO: 89195 - DNA, 387 bp, synthetic construct; identical to SEQ ID NO: 89187
  misc_feature 1..387: note = Description of Artificial Sequence: Synthetic coding sequence
  source 1..387: mol_type = other DNA

SEQ ID NO: 89196 - DNA, 387 bp, synthetic construct; identical to SEQ ID NO: 89187
  misc_feature 1..387: note = Description of Artificial Sequence: Synthetic coding sequence
  source 1..387: mol_type = other DNA

SEQ ID NO: 89197 - DNA, 495 bp, synthetic construct; identical to SEQ ID NO: 89191
  misc_feature 1..495: note = Description of Artificial Sequence: Synthetic coding sequence
  source 1..495: mol_type = other DNA

SEQ ID NO: 89198 - DNA, 387 bp, synthetic construct; identical to SEQ ID NO: 89187
  misc_feature 1..387: note = Description of Artificial Sequence: Synthetic coding sequence
  source 1..387: mol_type = other DNA

SEQ ID NO: 89199 - DNA, 387 bp, synthetic construct; identical to SEQ ID NO: 89187
  misc_feature 1..387: note = Description of Artificial Sequence: Synthetic coding sequence
  source 1..387: mol_type = other DNA

SEQ ID NO: 89200 - DNA, 387 bp, synthetic construct; identical to SEQ ID NO: 89187
  misc_feature 1..387: note = Description of Artificial Sequence: Synthetic coding sequence
  source 1..387: mol_type = other DNA

SEQ ID NO: 89201 - DNA, 387 bp, synthetic construct; identical to SEQ ID NO: 89187
  misc_feature 1..387: note = Description of Artificial Sequence: Synthetic coding sequence
  source 1..387: mol_type = other DNA

SEQ ID NO: 89202 - DNA, 387 bp, synthetic construct; identical to SEQ ID NO: 89187
  misc_feature 1..387: note = Description of Artificial Sequence: Synthetic coding sequence
  source 1..387: mol_type = other DNA

SEQ ID NO: 89203 - DNA, 387 bp, synthetic construct; identical to SEQ ID NO: 89187
  misc_feature 1..387: note = Description of Artificial Sequence: Synthetic coding sequence
  source 1..387: mol_type = other DNA

SEQ ID NO: 89204 - DNA, 387 bp, synthetic construct; identical to SEQ ID NO: 89187
  misc_feature 1..387: note = Description of Artificial Sequence: Synthetic coding sequence
  source 1..387: mol_type = other DNA

SEQ ID NO: 89205 - DNA, 387 bp, synthetic construct; identical to SEQ ID NO: 89187
  misc_feature 1..387: note = Description of Artificial Sequence: Synthetic coding sequence
  source 1..387: mol_type = other DNA

SEQ ID NO: 89206 - DNA, 387 bp, synthetic construct; identical to SEQ ID NO: 89187
  misc_feature 1..387: note = Description of Artificial Sequence: Synthetic coding sequence
  source 1..387: mol_type = other DNA

SEQ ID NO: 89207 - DNA, 495 bp, synthetic construct; identical to SEQ ID NO: 89191
  misc_feature 1..495: note = Description of Artificial Sequence: Synthetic coding sequence
  source 1..495: mol_type = other DNA

SEQ ID NO: 89208 - DNA, 231 bp, synthetic construct
  misc_feature 1..231: note = Description of Artificial Sequence: Synthetic coding sequence
  source 1..231: mol_type = other DNA
atggccgccgtgggcagcctgctgggcagactgagacagagcaccgtgaaggccaccggccccgccctgagaagactgcacaccagcagctggagagccgacagcagcagagccagcctgaccagagtgcacagacaggcctacgccagactgtaccccgtgctgctggtgaagcaggacggcagcaccatccacatcagatacagagagcccagaagaatgctggcctag

SEQ ID NO: 89209 - DNA, 702 bp, synthetic construct
  misc_feature 1..702: note = Description of Artificial Sequence: Synthetic coding sequence
  source 1..702: mol_type = other DNA
atggccgcccccgtggtgaccgcccccggcagagccctgctgagagccggcgccggcagactgctgagaggcggcgtgcaggagctgctgagacccagacacgagggcaacgcccccgacctggcctgcaacttcagcctgagccagaacagaggcaccgtgatcgtggagagatggtggaaggtgcccctggccggcgagggcagaaagcccagactgcacagaagacacagagtgtacaagctggtggaggacaccaagcacagacccaaggagaacctggagctgatcctgacccagagcgtggagaacgtgggcgtgagaggcgacctggtgagcgtgaagaagagcctgggcagaaacagactgctgccccagggcctggccgtgtacgccagccccgagaacaagaagctgttcgaggaggagaagctgctgagacaggagggcaagctggagaagatccagaccaaggccggcgaggccctgggcgtggtggtggccccccacaccctgaagctgcccgaggagcccatcaccagatggggcgagtactggtgcgaggtgaccgtgaacggcctggacaccgtgagagtgcccatgagcgtggtgaacttcgagaagcccaagaccaagagatacaagtactggctggcccagcaggccgccaaggccatggcccccaccagcccccagatctag

SEQ ID NO: 89210 - DNA, 804 bp, synthetic construct
  misc_feature 1..804: note = Description of Artificial Sequence: Synthetic coding sequence
  source 1..804: mol_type = other DNA
atggccgcccccgtggtgaccgcccccggcagagccctgctgagagccggcgccggcagactgctgagaggcggcgtgcaggagctgctgagacccagacacgagggcaacgcccccgacctggcctgcaacttcagcctgagccagaacagaggcaccgtgatcgtggagagatggtggaaggtgcccctggccggcgagggcagaaagcccagactgcacagaagacacagagtgtacaagctggtggaggacaccaagcacagacccaaggagaacctggagctgatcctgacccagagcgtggagaacgtgggcgtgagaggcgacctggtgagcgtgaagaagagcctgggcagaaacagactgctgccccagggcctggccgtgtacgccagccccgagaacaagaagctgttcgaggaggagaagctgctgagacaggagggcaagctggagaagatccagaccaaggccggcgaggccaccgtgaagttcctgaagagctgcagactggaggtgggcatgaagaacaacgtgaagtgggagctgaaccccgagatcgtggccagacacttcttcaagaacctgggcgtggtggtggccccccacaccctgaagctgcccgaggagcccatcaccagatggggcgagtactggtgcgaggtgaccgtgaacggcctggacaccgtgagagtgcccatgagcgtggtgaacttcgagaagcccaagaccaagagatacaagtactggctggcccagcaggccgccaaggccatggcccccaccagcccccagatctag

SEQ ID NO: 89211 - DNA, 606 bp, synthetic construct
  misc_feature 1..606: note = Description of Artificial Sequence: Synthetic coding sequence
  source 1..606: mol_type = other DNA
atggccgccagaaccgccttcggcgccgtgtgcagaagactgtggcagggcctgggcaacttcagcgtgaacaccagcaagggcaacaccgccaagaacggcggcctgctgctgagcaccaacatgaagtgggtgcagttcagcaacctgcacgtggacgtgcccaaggacctgaccaagcccgtggtgaccatcagcgacgagcccgacatcctgtacaagagactgagcgtgctggtgaagggccacgacaaggccgtgctggacagctacgagtacttcgccgtgctggccgccaaggagctgggcatcagcatcaaggtgcacgagccccccagaaagatcgagagattcaccctgctgcagagcgtgcacatctacaagaagcacagagtgcagtacgagatgagaaccctgtacagatgcctggagctggagcacctgaccggcagcaccgccgacgtgtacctggagtacatccagagaaacctgcccgagggcgtggccatggaggtgaccaagacccagctggagcagctgcccgagcacatcaaggagcccatctgggagaccctgagcgaggagaaggaggagagcaagagctag

SEQ ID NO: 89212 - DNA, 585 bp, synthetic construct
  misc_feature 1..585: note = Description of Artificial Sequence: Synthetic coding sequence
  source 1..585: mol_type = other DNA
atgcaggccgtgagaaacgccggcagcagattcctgagaagctggacctggccccagaccgccggcagagtggtggccagaacccccgccggcaccatctgcaccggcgccagacagctgcaggacgccgccgccaagcagaaggtggagcagaacgccgcccccagccacaccaagttcagcatctacccccccatccccggcgaggagagcagcctgagatgggccggcaagaagttcgaggagatccccatcgcccacatcaaggccagccacaacaacacccagatccaggtggtgagcgccagcaacgagcccctggccttcgccagctgcggcaccgagggcttcagaaacgccaagaagggcaccggcatcgccgcccagaccgccggcatcgccgccgccgccagagccaagcagaagggcgtgatccacatcagagtggtggtgaagggcctgggccccggcagactgagcgccatgcacggcctgatcatgggcggcctggaggtgatcagcatcaccgacaacacccccatcccccacaacggctgcagacccagaaaggccagaaagctgtag

SEQ ID NO: 89213 - DNA, 486 bp, synthetic construct
  misc_feature 1..486: note = Description of Artificial Sequence: Synthetic coding sequence
  source 1..486: mol_type = other DNA
atgcaggccgtgagaaacgccggcagcagattcctgagaagctggacctggccccagaccgccggcagagtggtggccagaacccccgccggcaccatctgcaccggcgccagacagctgcaggacgccgccgccaagcagaaggtggagcagaacgccgcccccagccacaccaagttcagcacccagatccaggtggtgagcgccagcaacgagcccctggccttcgccagctgcggcaccgagggcttcagaaacgccaagaagggcaccggcatcgccgcccagaccgccggcatcgccgccgccgccagagccaagcagaagggcgtgatccacatcagagtggtggtgaagggcctgggccccggcagactgagcgccatgcacggcctgatcatgggcggcctggaggtgatcagcatcaccgacaacacccccatcccccacaacggctgcagacccagaaaggccagaaagctgtag

SEQ ID NO: 89214 - DNA, 417 bp, synthetic construct
  misc_feature 1..417: note = Description of Artificial Sequence: Synthetic coding sequence
  source 1..417: mol_type = other DNA
atgagctggagcggcctgctgcacggcctgaacaccagcctgacctgcggccccgccctggtgcccagactgtgggccacctgcagcatggccaccctgaaccagatgcacagactgggcccccccaagagaccccccagaaagctgggccccaccgagggcagaccccagctgaagggcgtggtgctgtgcaccttcaccagaaagcccaagaagcccaacagcgccaacagaaagtgctgcagagtgagactgagcaccggcagagaggccgtgtgcttcatccccggcgagggccacaccctgcaggagcaccagatcgtgctggtggagggcggcagaacccaggacctgcccggcgtgaagctgaccgtggtgagaggcaagtacgactgcggccacgtgcagaagaagtag

SEQ ID NO: 89215 - DNA, 417 bp, synthetic construct; identical to SEQ ID NO: 89214
  misc_feature 1..417: note = Description of Artificial Sequence: Synthetic coding sequence
  source 1..417: mol_type = other DNA

SEQ ID NO: 89216 - DNA, 417 bp, synthetic construct; identical to SEQ ID NO: 89214
  misc_feature 1..417: note = Description of Artificial Sequence: Synthetic coding sequence
  source 1..417: mol_type = other DNA

SEQ ID NO: 89217 - DNA, 387 bp, synthetic construct
  misc_feature 1..387: note = Description of Artificial Sequence: Synthetic coding sequence
  source 1..387: mol_type = other DNA
atggccgccttcatgctgggcagcctgctgagaaccttcaagcagatggtgcccagcagcgccagcggccaggtgagaagccactacgtggactggagaatgtggagagacgtgaagagaagaaagatggcctacgagtacgccgacgagagactgagaatcaacagcctgagaaagaacaccatcctgcccaagatcctgcaggacgtggccgacgaggagatcgccgccctgcccagagacagctgccccgtgagaatcagaaacagatgcgtgatgaccagcagacccagaggcgtgaagagaagatggagactgagcagaatcgtgttcagacacctggccgaccacggccagctgagcggcatccagagagccacctggtag

SEQ ID NO: 89218 - DNA, 774 bp, synthetic construct
  misc_feature 1..774: note = Description of Artificial Sequence: Synthetic coding sequence
  source 1..774: mol_type = other DNA
atgctgagagtggcctggagaaccctgagcctgatcagaaccagagccgtgacccaggtgctggtgcccggcctgcccggcggcggcagcgccaagttccccttcaaccagtggggcctgcagcccagaagcctgctgctgcaggccgccagaggctacgtggtgagaaagcccgcccagagcagactggacgacgaccccccccccagcaccctgctgaaggactaccagaacgtgcccggcatcgagaaggtggacgacgtggtgaagagactgctgagcctggagatggccaacaagaaggagatgctgaagatcaagcaggagcagttcatgaagaagatcgtggccaaccccgaggacaccagaagcctggaggccagaatcatcgccctgagcgtgaagatcagaagctacgaggagcacctggagaagcacagaaaggacaaggcccacaagagatacctgctgatgagcatcgaccagagaaagaagatgctgaagaacctgagaaacaccaactacgacgtgttcgagaagatctgctggggcctgggcatcgagtacaccttcccccccctgtactacagaagagcccacagaagattcgtgaccaagaaggccctgtgcatcagagtgttccaggagacccagaagctgaagaagagaagaagagccctgaaggccgccgccgccgcccagaagcaggccaagagaagaaaccccgacagccccgccaaggccatccccaagaccctgaaggacagccagtag

SEQ ID NO: 89219 - DNA, 300 bp, synthetic construct
  misc_feature 1..300: note = Description of Artificial Sequence: Synthetic coding sequence
  source 1..300: mol_type = other DNA
atggtgcacctgaccaccctgctgtgcaaggcctacagaggcggccacctgaccatcagactggccctgggcggctgcaccaacagacccttctacagaatcgtggccgcccacaacaagtgccccagagacggcagattcgtggagcagctgggcagctacgaccccctgcccaacagccacggcgagaagctggtggccctgaacctggacagaatcagacactggatcggctgcggcgcccacctgagcaagcccatggagaagctgctgggcctgaagtacagccacgtgttctag

SEQ ID NO: 89220 - DNA, 414 bp, synthetic construct
  misc_feature 1..414: note = Description of Artificial Sequence: Synthetic coding sequence
  source 1..414: mol_type = other DNA
atggtgcacctgaccaccctgctgtgcaaggcctacagaggcggccacctgaccatcagactggccctgggcggctgcaccaacagacccttctacagaatcgtggccgcccacaacaagtgccccagagacggcagattcgtggagcagctgggcagctacgaccccctgcccaacagccacggcgagaagctggtggccctgaacctggacagaatcagacactggatcggctgcggcgcccacctgagcaagcccatggagaagctgctgggcctggccggcttcttccccctgcaccccatgatgatcaccaacgccgagagactgagaagaaagagagccagagaggtgctgctggccagccagaagaccgacgccgaggccaccgacaccgaggccaccgagacctag

SEQ ID NO: 89221 - DNA, 372 bp, synthetic construct
  misc_feature 1..372: note = Description of Artificial Sequence: Synthetic coding sequence
  source 1..372: mol_type = other DNA
atggtgcacctgaccaccctgctgtgcaaggcctacagaggcggccacctgaccatcagactggccctgggcggctgcaccaacagacccttctacagaatcgtggccgcccacaacaagtgccccagagacggcagattcgtggagcagctgggcagctacgaccccctgcccaacagccacggcgagaagctggtggccctgaacctggacagaatcagacactggatcggctgcggcgcccacctgagcaagcccatggagaagctgctgggcaagaccgacgccagattccccgagcagggcgaggagagacccgagcagcaccacttccccgaggacctggcccccgccagaggcagaggcctgtag

SEQ ID NO: 89222 - DNA, 393 bp, synthetic construct
  misc_feature 1..393: note = Description of Artificial Sequence: Synthetic coding sequence
  source 1..393: mol_type = other DNA
atgagcgtggtgagaagcagcgtgcacgccagatggatcgtgggcaaggtgatcggcaccaagatgcagaagaccgccaaggtgagagtgaccagactggtgctggacccctacctgctgaagtacttcaacaagagaaagacctacttcgcccacgacgccctgcagcagtgcaccgtgggcgacatcgtgctgctgagagccctgcccgtgcccagagccaagcacgtgaagcacgagctggccgagatcgtgttcaaggtgggcaaggtgatcgaccccgtgaccggcaagccctgcgccggcaccacctacctggagagccccctgagcagcgagaccacccagctgagcaagaacctggaggagctgaacatcagcagcgcccagtag

SEQ ID NO: 89223 - DNA, 390 bp, synthetic construct
  misc_feature 1..390: note = Description of Artificial Sequence: Synthetic coding sequence
  source 1..390: mol_type = other DNA
atgagcgtggtgagaagcagcgtgcacgccagatggatcgtgggcaaggtgatcggcaccaagatgcagaagaccgccaaggtgagagtgaccagactggtgctggacccctacctgctgaagtacttcaacaagagaaagacctacttcgcccacgacgccctgcagcagtgcaccgtgggcgacatcgtgctgctgagagccctgcccgtgcccagagccaagcacgtgaagcacgagctggccgagatcgtgttcaaggtgggcaaggtgatcgaccccgtgaccggcaagccctgcgccggcaccacctacctggagagccccctgagcagcgagaccacccagctgagcaagaacctggaggagctgaacatcagcagcgcctag

SEQ ID NO: 89224 - DNA, 384 bp, synthetic construct
  misc_feature 1..384: note = Description of Artificial Sequence: Synthetic coding sequence
  source 1..384: mol_type = other DNA
atggccgccctgaaggccctggtgagcggctgcggcagactgctgagaggcctgctggccggccccgccgccaccagctggagcagactgcccgccagaggcttcagagaggtggtggagacccaggagggcaagaccaccatcatcgagggcagaatcaccgccacccccaaggagagccccaacccccccaaccccagcggccagtgccccatctgcagatggaacctgaagcacaagtacaactacgacgacgtgctgctgctgagccagttcatcagaccccacggcggcatgctgcccagaaagatcaccggcctgtgccaggaggagcacagaaagatcgaggagtgcgtgaagatggcccacagagccggcacctag

SEQ ID NO: 89225 - DNA, 813 bp, synthetic construct
  misc_feature 1..813: note = Description of Artificial Sequence: Synthetic coding sequence
  source 1..813: mol_type = other DNA
atggccgccctgaaggccctggtgagcggctgcggcagactgctgagaggcctgctggccggccccgccgccaccagctggagcagactgcccgccagaggcttcagagaggtggtggagacccaggagggcaagaccaccatcatcgagggcagaatcaccgccacccccaaggagagccccaacccccccaaccccagcggccagtgccccatctgcagatggaacctgaagcacaagtacaactacgacgacgtgctgctgctgagccagttcatcagaccccacggcggcatgctgcccagaaagatcaccggcctgtgccaggaggagcacagaaagatcgaggagtgcgtgaagatggcccacagagccggcagaagaccctggggccccagaggcgccgagggctgcagacacagcctgcccacccagctgccccacgtgagcgccccccccggcagaaaggtggacatcagaagcgtgaactacacccaccaccccatgcccaccttccccctgccctgggccttccccctggcccccagcgagctgcagagagagctgcagagactgagccccctgcccagacacagcggcctgctgcccaaccacagacccagactgcccgagggcgtggtgcccaagagcaagccccagctgaacagatacctgaccagatgggcccccggcagcgtgaagcccatctacaagaagggccccagatggaacagagtgagaatgcccgtgggcagccccctgctgagagacaacgtgtgctacagcagaaccccctggaagctgtaccactag

SEQ ID NO: 89226 - DNA, 591 bp, synthetic construct
  misc_feature 1..591: note = Description of Artificial Sequence: Synthetic coding sequence
  source 1..591: mol_type = other DNA
atggccgccctgaaggccctggtgagcggctgcggcagactgctgagaggcctgctggccggccccgccgccaccagctggagcagactgcccgccagaggcttcagagaggtggtggagacccaggagggcaagaccaccatcatcgagggcagaatcaccgccacccccaaggagagccccaacccccccaaccccagcggccagtgccccatctgcagatggaacctgaagcacaagtacaactacgacgacgtgctgctgctgagccagttcatcagaccccacggcggcatgctgcccagaaagatcaccggcctgtgccaggaggagcacagaaagatcgaggagtgcgtgaagatggcccacagagccggcctgctgcccaaccacagacccagactgcccgagggcgtggtgcccaagagcaagccccagctgaacagatacctgaccagatgggcccccggcagcgtgaagcccatctacaagaagggccccagatggaacagagtgagaatgcccgtgggcagccccctgctgagagacaacgtgtgctacagcagaaccccctggaagctgtaccactag

SEQ ID NO: 89227 - DNA, 795 bp, synthetic construct
  misc_feature 1..795: note = Description of Artificial Sequence: Synthetic coding sequence
  source 1..795: mol_type = other DNA
atggccgccctgaaggccctggtgagcggctgcggcagactgctgagaggcctgctggccggccccgccgccaccagctggagcagactgcccgccagaggcttcagagaggtggtggagacccaggagggcaagaccaccatcatcgagggcagaatcaccgccacccccaaggagagccccaacccccccaaccccagcggccagtgccccatctgcagatggaacctgaagcacaagtacaactacgacgacgtgctgctgctgagccagttcatcagaccccacggcggcatgctgcccagaaagatcaccggcctgtgccaggaggagcacagaaagatcgaggagtgcgtgaagatggcccacagagccggcagaagaccctggggccccagaggcgccgagggctgcagacacagcctgcccacccagctgccccacgtgagcgccccccccggcagaaaggtggacatcagaagcgtgaactacacccaccaccccatgcccaccttccccctgccctgggccttccccctggcccccagcgagctgcagagagagctgcagagactgagccccctgcccagacacagcggcctgctgcccaaccacagacccagactgcccgagggcgtggtgcccaagagcaagccccagctgaacagatacctgaccagatgggcccccggcagcgtgaagcccatctacaagaagggccccagatggaacagagtgagaatgcccgtgggcagccccctgctgagagacaacgtgtgctacagcagaacctag

SEQ ID NO: 89228 - DNA, 777 bp, synthetic construct
  misc_feature 1..777: note = Description of Artificial Sequence: Synthetic coding sequence
  source 1..777: mol_type = other DNA
atggccgccagcgtgctgaacaccgtgctgagaagactgcccatgctgagcctgttcagaggcagccacagagtgcaggtgcccctgcagaccctgtgcaccaaggcccccagcgaggaggacagcctgagcagcgtgcccatcagcccctacaaggacgagccctggaagtacctggagagcgaggagtaccaggagagatacggcagcagacccgtgtgggccgactacagaagaaaccacaagggcggcgtgcccccccagagaaccagaaagacctgcatcagaagaaacaaggtggtgggcaacccctgccccatctgcagagaccacaagctgcacgtggacttcagaaacgtgaagctgctggagcagttcgtgtgcgcccacaccggcatcatcttctacgccccctacaccggcgtgtgcgtgaagcagcacaagagactgacccaggccatccagaaggccagagaccacggcctgctgatctaccacatcccccaggtggagcccagagacctggacttcagcaccagccacggcgccgtgagcgccaccccccccgcccccaccctggtgagcggcgacccctggtacccctggtacaactggaagcagccccccgagagagagctgagcagactgagaagactgtaccagggccacctgcaggaggagagcggccccccccccgagagcatgcccaagatgccccccagaacccccgccgaggccagcagcaccggccagaccggcccccagagcgccctgtag

SEQ ID NO: 89229 - DNA, 777 bp, synthetic construct; identical to SEQ ID NO: 89228
  misc_feature 1..777: note = Description of Artificial Sequence: Synthetic coding sequence
  source 1..777: mol_type = other DNA

SEQ ID NO: 89230 - DNA, 648 bp, synthetic construct
  misc_feature 1..648: note = Description of Artificial Sequence: Synthetic coding sequence
  source 1..648: mol_type = other DNA
atggccgccagcgtgctgaacaccgtgctgagaagactgcccatgctgagcctgttcagaggcagccacagagtgcaggtgcccctgcagaccctgtgcaccaaggcccccagcgaggaggacagcctgagcagcgtgcccatcagcccctacaaggacgagccctggaagtacctggagagcgaggagtaccaggagagatacggcagcagacccgtgtgggccgactacagaagaaaccacaagggcggcgtgcccccccagagaaccagaaagacctgcatcaacgtgaagctgctggagcagttcgtgtgcgcccacaccggcatcatcttctacgccccctacaccggcctgctgatctaccacatcccccaggtggagcccagagacctggacttcagcaccagccacggcgccgtgagcgccaccccccccgcccccaccctggtgagcggcgacccctggtacccctggtacaactggaagcagccccccgagagagagctgagcagactgagaagactgtaccagggccacctgcaggaggagagcggccccccccccgagagcatgcccaagatgccccccagaacccccgccgaggccagcagcaccggccagaccggcccccagagcgccctgtag

SEQ ID NO: 89231 - DNA, 648 bp, synthetic construct; identical to SEQ ID NO: 89230
  misc_feature 1..648: note = Description of Artificial Sequence: Synthetic coding sequence
  source 1..648: mol_type = other DNA

SEQ ID NO: 89232 - DNA, 777 bp, synthetic construct; identical to SEQ ID NO: 89228
  misc_feature 1..777: note = Description of Artificial Sequence: Synthetic coding sequence
  source 1..777: mol_type = other DNA

SEQ ID NO: 89233 - DNA, 648 bp, synthetic construct; identical to SEQ ID NO: 89230
  misc_feature 1..648: note = Description of Artificial Sequence: Synthetic coding sequence
  source 1..648: mol_type = other DNA

SEQ ID NO: 89234 - DNA, 648 bp, synthetic construct; identical to SEQ ID NO: 89230
  misc_feature 1..648: note = Description of Artificial Sequence: Synthetic coding sequence
  source 1..648: mol_type = other DNA

SEQ ID NO: 89235 - DNA, 777 bp, synthetic construct; identical to SEQ ID NO: 89228
  misc_feature 1..777: note = Description of Artificial Sequence: Synthetic coding sequence
  source 1..777: mol_type = other DNA

SEQ ID NO: 89236 - DNA, 648 bp, synthetic construct; identical to SEQ ID NO: 89230
  misc_feature 1..648: note = Description of Artificial Sequence: Synthetic coding sequence
  source 1..648: mol_type = other DNA

SEQ ID NO: 89237 - DNA, 777 bp, synthetic construct; identical to SEQ ID NO: 89228
  misc_feature 1..777: note = Description of Artificial Sequence: Synthetic coding sequence
  source 1..777: mol_type = other DNA

SEQ ID NO: 89238 - DNA, 648 bp, synthetic construct; identical to SEQ ID NO: 89230
  misc_feature 1..648: note = Description of Artificial Sequence: Synthetic coding sequence
  source 1..648: mol_type = other DNA

SEQ ID NO: 89239 - DNA, 648 bp, synthetic construct; identical to SEQ ID NO: 89230
  misc_feature 1..648: note = Description of Artificial Sequence: Synthetic coding sequence
  source 1..648: mol_type = other DNA

SEQ ID NO: 89240 - DNA, 777 bp, synthetic construct; identical to SEQ ID NO: 89228
  misc_feature 1..777: note = Description of Artificial Sequence: Synthetic coding sequence
  source 1..777: mol_type = other DNA

SEQ ID NO: 89241 - DNA, 777 bp, synthetic construct; identical to SEQ ID NO: 89228
  misc_feature 1..777: note = Description of Artificial Sequence: Synthetic coding sequence
  source 1..777: mol_type = other DNA

SEQ ID NO: 89242 - DNA, 366 bp, synthetic construct
  misc_feature 1..366: note = Description of Artificial Sequence: Synthetic coding sequence
  source 1..366: mol_type = other DNA
atggccgccagcgtgctgaacaccgtgctgagaagactgcccatgctgagcctgttcagaggcagccacagagtgcaggtgcccctgcagaccctgtgcaccaaggcccccagcgaggaggacagcctgagcagcgtgcccatcagcccctacaaggacgagccctggaagtacctggagagcgaggagtaccaggagagatacggcagcagacccgtgtgggccgactacagaagaaaccacaagggcggcgtgcccccccagagaaccagaaagacctgcatcagaagaaacaaggtggtgggcaacccctgccccatctgcagagaccacaagctgcacgtggacttcagagagagcgtgtag

SEQ ID NO: 89243 - DNA, 366 bp, synthetic construct; identical to SEQ ID NO: 89242
  misc_feature 1..366: note = Description of Artificial Sequence: Synthetic coding sequence
  source 1..366: mol_type = other DNA

SEQ ID NO: 89244 - DNA, 366 bp, synthetic construct; identical to SEQ ID NO: 89242
  misc_feature 1..366: note = Description of Artificial Sequence: Synthetic coding sequence
  source 1..366: mol_type = other DNA

SEQ ID NO: 89245 - DNA, 366 bp, synthetic construct; identical to SEQ ID NO: 89242
  misc_feature 1..366: note = Description of Artificial Sequence: Synthetic coding sequence
  source 1..366: mol_type = other DNA

SEQ ID NO: 89246 - DNA, 366 bp, synthetic construct; identical to SEQ ID NO: 89242
  misc_feature 1..366: note = Description of Artificial Sequence: Synthetic coding sequence
  source 1..366: mol_type = other DNA

SEQ ID NO: 89247 - DNA, 366 bp, synthetic construct; identical to SEQ ID NO: 89242
  misc_feature 1..366: note = Description of Artificial Sequence: Synthetic coding sequence
  source 1..366: mol_type = other DNA

SEQ ID NO: 89248 - DNA, 366 bp, synthetic construct; identical to SEQ ID NO: 89242
  misc_feature 1..366: note = Description of Artificial Sequence: Synthetic coding sequence
  source 1..366: mol_type = other DNA

SEQ ID NO: 89249 - DNA, 429 bp, synthetic construct
  misc_feature 1..429: note = Description of Artificial Sequence: Synthetic coding sequence
  source 1..429: mol_type = other DNA
atggccgccgtggtggccgtgtgcggcggcctgggcagaaagaagctgacccacctggtgaccgccgccgtgagcctgacccaccccggcacccacaccgtgctgtggagaagaggctgcagccagcaggtgagcagcaacgaggacctgcccatcagcatggagaacccctacaaggagcccctgaagaagtgcatcctgtgcggcaagcacgtggactacaagaacgtgcagctgctgagccagttcgtgagccccttcaccggctgcatctacggcagacacatcaccggcctgtgcggcaagaagcagaaggagatcaccaaggccatcaagagagcccagatcatgggcttcatgcccgtgacctacaaggaccccgcctacctgaaggaccccaaggtgtgcaacatcagatacagagagtag

SEQ ID NO: 89250 - DNA, 345 bp, synthetic construct
  misc_feature 1..345: note = Description of Artificial Sequence: Synthetic coding sequence
  source 1..345: mol_type = other DNA
atggccgccgtggtggccgtgtgcggcggcctgggcagaaagaagctgacccacctggtgaccgccgccgtgagcctgacccaccccggcacccacaccgtgctgtggagaagaggctgcagccagcaggtgagcagcaacgaggacctgctgctgagccagttcgtgagccccttcaccggctgcatctacggcagacacatcaccggcctgtgcggcaagaagcagaaggagatcaccaaggccatcaagagagcccagatcatgggcttcatgcccgtgacctacaaggaccccgcctacctgaaggaccccaaggtgtgcaacatcagatacagagagtag

SEQ ID NO: 89251 - DNA, 891 bp, synthetic construct
  misc_feature 1..891: note = Description of Artificial Sequence: Synthetic coding sequence
  source 1..891: mol_type = other DNA
atggccaccagcagcgccgccctgcccagaatcctgggcgccggcgccagagcccccagcagatggctgggcttcctgggcaaggccacccccagacccgccagacccagcagaagaaccctgggcagcgccaccgccctgatgatcagagagagcgaggacagcaccgacttcaacgacaagatcctgaacgagcccctgaagcacagcgacttcttcaacgtgaaggagctgttcagcgtgagaagcctgttcgacgccagagtgcacctgggccacaaggccggctgcagacacagattcatggagccctacatcttcggcagcagactggaccacgacatcatcgacctggagcagaccgccacccacctgcagctggccctgaacttcaccgcccacatggcctacagaaagggcatcatcctgttcatcagcagaaacagacagttcagctacctgatcgagaacatggccagagactgcggcgagtacgcccacaccagatacttcagaggcggcatgctgaccaacgccagactgctgttcggccccaccgtgagactgcccgacctgatcatcttcctgcacaccctgaacaacatcttcgagccccacgtggccgtgagagacgccgccaagatgaacatccccaccgtgggcatcgtggacaccaactgcaacccctgcctgatcacctaccccgtgcccggcaacgacgacagccccctggccgtgcacctgtactgcagactgttccagaccgccatcaccagagccaaggagaagagacagcaggtggaggccctgtacagactgcagggccagaaggagcccggcgaccagggccccgcccacccccccggcgccgacatgagccacagcctgtag

SEQ ID NO: 89252 - DNA, 891 bp, synthetic construct; identical to SEQ ID NO: 89251
  misc_feature 1..891: note = Description of Artificial Sequence: Synthetic coding sequence
  source 1..891: mol_type = other DNA

SEQ ID NO: 89253 - DNA, 813 bp, synthetic construct
  misc_feature 1..813: note = Description of Artificial Sequence: Synthetic coding sequence
  source 1..813: mol_type = other DNA
agaagaggccccctgggcatgagatggggcgccggcgtggtgcacagcggcctgggcgccagaaccagcatctacttcccccccggcgccagagcccccagcagatggctgggcttcctgggcaaggccacccccagacccgccagacccagcagaagaaccctgggcagcgccaccgccctgatgatcagagagagcgaggacagcaccgacttcaacgacaagatcctgaacgagcccctgaagcacagcgacttcttcaacgtgaaggagctgttcagcgtgagaagcctgttcgacgccagagtgcacctgggccacaaggccggctgcagacacagattcatggagccctacatcttcggcagcagactggaccacgacatcatcgacctggagcagaccgccacccacctgcagctggccctgaacttcaccgcccacatggcctacagaaagggcatcatcctgttcatcagcagaaacagacagttcagctacctgatcgagaacatggccagagactgcggcgagtacgcccacaccagatacttcagaggcggcatgctgaccaacgccagactgctgttcggccccaccgtgagactgcccgacctgatcatcttcctgcacaccctgaacaacatcttcgagccccacgtggccgtgagagacgccgccaagatgaacatccccaccgtgggcatcgtggacaccaactgcaacccctgcctgatcacctaccccgtgcccggcaacgacgacagccccctggccgtgcacctgtactgcagactgttccagaccgcctag

SEQ ID NO: 89254 - DNA, 264 bp, synthetic construct
  misc_feature 1..264: note = Description of Artificial Sequence: Synthetic coding sequence
  source 1..264: mol_type = other DNA
atggccaagcacctgaagttcatcgccagaaccgtgatggtgcaggagggcaacgtggagagcgcctacagaaccctgaacagaatcctgaccatggacggcctgatcgaggacatcaagcacagaagatactacgagaagccctgcagaagaagacagagagagagctacgagagatgcagaagaatctacaacatggagatggccagaaagatcaacttcctgatgagaaagaacagagccgacccctggcagggctgctag

SEQ ID NO: 89255 - DNA, 264 bp, synthetic construct; identical to SEQ ID NO: 89254
  misc_feature 1..264: note = Description of Artificial Sequence: Synthetic coding sequence
  source 1..264: mol_type = other DNA

SEQ ID NO: 89256 - DNA, 1083 bp, synthetic construct
  misc_feature 1..1083: note = Description of Artificial Sequence: Synthetic coding sequence
  source 1..1083: mol_type = other DNA
atggcccccctgggcaccaccgtgctgctgtggagcctgctgagaagcagccccggcgtggagagagtgtgcttcagagccagaatccagccctggcacggcggcctgctgcagcccctgccctgcagcttcgagatgggcctgcccagaagaagattcagcagcgaggccgccgagagcggcagccccgagaccaagaagcccaccttcatggacgaggaggtgcagagcatcctgaccaagatgaccggcctgaacctgcagaagaccttcaagcccgccatccaggagctgaagccccccacctacaagctgatgacccaggcccagctggaggaggccaccagacaggccgtggaggccgccaaggtgagactgaagatgccccccgtgctggaggagagagtgcccatcaacgacgtgctggccgaggacaagatcctggagggcaccgagaccaccaagtacgtgttcaccgacatcagctacagcatcccccacagagagagattcatcgtggtgagagagcccagcggcaccctgagaaaggccagctgggaggagagagacagaatgatccaggtgtacttccccaaggagggcagaaagatcctgacccccatcatcttcaaggaggagaacctgagaaccatgtacagccaggacagacacgtggacgtgctgaacctgtgcttcgcccagttcgagcccgacagcaccgagtacatcaaggtgcaccacaagacctacgaggacatcgacaagagaggcaagtacgacctgctgagaagcaccagatacttcggcggcatggtgtggtacttcgtgaacaacaagaagatcgacggcctgctgatcgaccagatccagagagacctgatcgacgacgccaccaacctggtgcagctgtaccacgtgctgcaccccgacggccagagcgcccagggcgccaaggaccaggccgccgagggcatcaacctgatcaaggtgttcgccaagaccgaggcccagaagggcgcctacatcgagctgaccctgcagacctaccaggaggccctgagcagacacagcgccgccagctag

SEQ ID NO: 89257 - DNA, 1080 bp, synthetic construct
  misc_feature 1..1080: note = Description of Artificial Sequence: Synthetic coding sequence
  source 1..1080: mol_type = other DNA
atggcccccctgggcaccaccgtgctgctgtggagcctgctgagaagcagccccggcgtggagagagtgtgcttcagagccagaatccagccctggcacggcggcctgctgcagcccctgccctgcagcttcgagatgggcctgcccagaagaagattcagcagcgaggccgagagcggcagccccgagaccaagaagcccaccttcatggacgaggaggtgcagagcatcctgaccaagatgaccggcctgaacctgcagaagaccttcaagcccgccatccaggagctgaagccccccacctacaagctgatgacccaggcccagctggaggaggccaccagacaggccgtggaggccgccaaggtgagactgaagatgccccccgtgctggaggagagagtgcccatcaacgacgtgctggccgaggacaagatcctggagggcaccgagaccaccaagtacgtgttcaccgacatcagctacagcatcccccacagagagagattcatcgtggtgagagagcccagcggcaccctgagaaaggccagctgggaggagagagacagaatgatccaggtgtacttccccaaggagggcagaaagatcctgacccccatcatcttcaaggaggagaacctgagaaccatgtacagccaggacagacacgtggacgtgctgaacctgtgcttcgcccagttcgagcccgacagcaccgagtacatcaaggtgcaccacaagacctacgaggacatcgacaagagaggcaagtacgacctgctgagaagcaccagatacttcggcggcatggtgtggtacttcgtgaacaacaagaagatcgacggcctgctgatcgaccagatccagagagacctgatcgacgacgccaccaacctggtgcagctgtaccacgtgctgcaccccgacggccagagcgcccagggcgccaaggaccaggccgccgagggcatcaacctgatcaaggtgttcgccaagaccgaggcccagaagggcgcctacatcgagctgaccctgcagacctaccaggaggccctgagcagacacagcgccgccagctag

SEQ ID NO: 89258 - DNA, 960 bp, synthetic construct
  misc_feature 1..960: note = Description of Artificial Sequence: Synthetic coding sequence
  source 1..960: mol_type = other DNA
atgagcagaaacgagaccgagcacagatacctgggcacccacttcggcgccgagagcggcagccccgagaccaagaagcccaccttcatggacgaggaggtgcagagcatcctgaccaagatgaccggcctgaacctgcagaagaccttcaagcccgccatccaggagctgaagccccccacctacaagctgatgacccaggcccagctggaggaggccaccagacaggccgtggaggccgccaaggtgagactgaagatgccccccgtgctggaggagagagtgcccatcaacgacgtgctggccgaggacaagatcctggagggcaccgagaccaccaagtacgtgttcaccgacatcagctacagcatcccccacagagagagattcatcgtggtgagagagcccagcggcaccctgagaaaggccagctgggaggagagagacagaatgatccaggtgtacttccccaaggagggcagaaagatcctgacccccatcatcttcaaggaggagaacctgagaaccatgtacagccaggacagacacgtggacgtgctgaacctgtgcttcgcccagttcgagcccgacagcaccgagtacatcaaggtgcaccacaagacctacgaggacatcgacaagagaggcaagtacgacctgctgagaagcaccagatacttcggcggcatggtgtggtacttcgtgaacaacaagaagatcgacggcctgctgatcgaccagatccagagagacctgatcgacgacgccaccaacctggtgcagctgtaccacgtgctgcaccccgacggccagagcgcccagggcgccaaggaccaggccgccgagggcatcaacctgatcaaggtgttcgccaagaccgaggcccagaagggcgcctacatcgagctgaccctgcagacctaccaggaggccctgagcagacacagcgccgccagctag

SEQ ID NO: 89259 - DNA, 1083 bp, synthetic construct; identical to SEQ ID NO: 89256
  misc_feature 1..1083: note = Description of Artificial Sequence: Synthetic coding sequence
  source 1..1083: mol_type = other DNA

SEQ ID NO: 89260 - DNA, 507 bp, synthetic construct
  misc_feature 1..507: note = Description of Artificial Sequence: Synthetic coding sequence
  source 1..507: mol_type = other DNA
atggcccccctgggcaccaccgtgctgctgtggagcctgctgagaagcagccccggcgtggagagagtgtgcttcagagccagaatccagccctggcacggcggcctgctgcagcccctgccctgcagcttcgagatgggcctgcccagaagaagattcagcagcgaggccgagagcggcagccccgagaccaagaagcccaccttcatggacgaggaggtgcagagcatcctgaccaagatgaccggcctgaacctgcagaagaccttcaagcccgccatccaggagctgaagccccccacctacaagctgatgacccaggcccagctggaggaggccaccagacaggccgtggaggccgccaaggtgagactgaagatgccccccgtgctggaggagagagtgcccatcaacgacgtgctggccgaggacaagatcctggagggcaccgagaccaccaagtacgtgttcaccgacatcagctacagcatcccccacagatgctag

SEQ ID NO: 89261 - DNA, 573 bp, synthetic construct
  misc_feature 1..573: note = Description of Artificial Sequence: Synthetic coding sequence
  source 1..573: mol_type = other DNA
atggccggcagcagactggagaccgtgggcagcatcttcagcagaaccagagacctggtgagagccggcgtgctgaaggagaagcccctgtggttcgacgtgtacgacgccttcccccccctgagagagcccgtgttccagagacccagagtgagatacggcaaggccaaggcccccatccaggacatctggtaccacgaggacagaatcagagccaagttctacagcgtgtacggcagcggccagagagccttcgacctgttcaaccccaacttcaagagcacctgccagagattcgtggagaagtacaccgagctgcagaagctgggcgagaccgacgaggagaagctgttcgtggagaccggcaaggccctgctggccgagggcgtgatcctgagaagagtgggcgaggccagaacccagcacggcggcagccacgtgagcagaaagagcgagcacctgagcgtgagaccccagaccgccctggaggagaacgagacccagaaggaggtgccccaggaccagcacctggaggcccccgccgaccagagcaagggcctgctgcccccctag

SEQ ID NO: 89262 - DNA, 504 bp, synthetic construct
  misc_feature 1..504: note = Description of Artificial Sequence: Synthetic coding sequence
  source 1..504: mol_type = other DNA
atggccgccagcgtgtgcagcggcctgctgggccccagagtgctgagctggagcagagagctgccctgcgcctggagagccctgcacaccagccccgtgtgcgccaagaacagagccgccagagtgagagtgagcaagggcgacaagcccgtgacctacgaggaggcccacgccccccactacatcgcccacagaaagggctggctgagcctgcacaccggcaacctggacggcgaggaccacgccgccgagagaaccgtggaggacgtgttcctgagaaagttcatgtggggcaccttccccggctgcctggccgaccagctggtgctgaagagaagaggcaaccagctggagatctgcgccgtggtgctgagacagctgagcccccacaagtactacttcctggtgggctacagcgagaccctgctgagctacttctacaagtgccccgtgagactgcacctgcagaccgtgcccagcaaggtggtgtacaagtacctgtag

SEQ ID NO: 89263 - DNA, 522 bp, synthetic construct
  misc_feature 1..522: note = Description of Artificial Sequence: Synthetic coding sequence
  source 1..522: mol_type = other DNA
atgcccatgaagggcagattccccatcagaagaaccctgcagtacctgagccagggcaacgtggtgttcaaggacagcgtgaaggtgatgaccgtgaactacaacacccacggcgagctgggcgagggcgccagaaagttcgtgttcttcaacatcccccagatccagtacaagaacccctgggtgcagatcatgatgttcaagaacatgacccccagccccttcctgagattctacctggacagcggcgagcaggtgctggtggacgtggagaccaagagcaacaaggagatcatggagcacatcagaaagatcctgggcaagaacgaggagaccctgagagaggaggaggaggagaagaagcagctgagccaccccgccaacttcggccccagaaagtactgcctgagagagtgcatctgcgaggtggagggccaggtgccctgccccagcctggtgcccctgcccaaggagatgagaggcaagtacaaggccgccctgaaggccgacgcccaggactag

SEQ ID NO: 89264 - DNA, 333 bp, synthetic construct
  misc_feature 1..333: note = Description of Artificial Sequence: Synthetic coding sequence
  source 1..333: mol_type = other DNA
atgcccatgaagggcagattccccatcagaagaaccctgcagtacctgagccagggcaacgtggtgttcaaggacagcgtgaaggtgatgaccgtgaactacaacacccacggcgagctgggcgagggcgccagaaagttcgtgttcttcaacatcccccagatccagtacaagaacccctgggtgcagatcatgatgttcaagaacatgacccccagccccttcctgagattctacctggacagcggcgagcaggtgctggtggacgtggagaccaagagcaacaaggagatcatggagcacatcagaaagatcctgggcaagaacgagtag

SEQ ID NO: 89265 - DNA, 390 bp, synthetic construct
  misc_feature 1..390: note = Description of Artificial Sequence: Synthetic coding sequence
  source 1..390: mol_type = other DNA
atgcccatgaagggcagattccccatcagaagaaccctgcagtacctgagccagggcaacgtggtgttcaaggacagcgtgaaggtgatgaccgtgaactacaacacccacggcgagctgggcgagggcgccagaaagttcgtgttcttcaacatcccccagatccagtacaagaacccctgggtgcagatcatgatgttcaagaacatgacccccagccccttcctgagattctacctgggcaagcccagcggcaagagaagaagaagaaagagcagcttcctgacccagcccaccagcgccctggagagcaccgcctgcggcagcgccagcgtgaagtggaagggcagatgccccgcccccgcctggtgccactaccccagaagatag

SEQ ID NO: 89266 - DNA, 333 bp, synthetic construct; identical to SEQ ID NO: 89264
  misc_feature 1..333: note = Description of Artificial Sequence: Synthetic coding sequence
  source 1..333: mol_type = other DNA

SEQ ID NO: 89267 - DNA, 438 bp, synthetic construct
  misc_feature 1..438: note = Description of Artificial Sequence: Synthetic coding sequence
  source 1..438: mol_type = other DNA
atgcccatgaagggcagattccccatcagaagaaccctgcagtacctgagccagggcaacgtggtgttcaaggacagcgtgaaggtgatgaccgtgaactacaacacccacggcgagctgggcgagggcgccagaaagttcgtgttcttcaacatcccccagatccagtacaagaacccctgggtgcagatcatgatgttcaagaacatgacccccagccccttcctgagattctacctggacagcggcgagcaggtgctggtggacgtggagaccaagagcaacaaggagatcatggagcacatcagaaagatcctgggcaagaacgagcactacctggccgcccccagcaagcccgtgagcagcgccgtggtgcccgtgacccaggaggccgaggccggcggcagcctggagcccagaagactgagactggagtag

SEQ ID NO: 89268 - DNA, 618 bp, synthetic construct
  misc_feature 1..618: note = Description of Artificial Sequence: Synthetic coding sequence
  source 1..618: mol_type = other DNA
atgctgagagccctgagcagactgggcgccggcaccccctgcagacccagagcccccctggtgctgcccgccagaggcagaaagaccagacacgaccccctggccaagagcaagatcgagagagtgaacatgccccccgccgtggaccccgccgagttcttcgtgctgatggagagataccagcactacagacagaccgtgagagccctgagaatggagttcgtgagcgaggtgcagagaaaggtgcacgaggccagagccggcgtgctggccgagagaaaggccctgaaggacgccgccgagcacagagagctgatggcctggaaccaggccgagaacagaagactgcacgagctgagaatcgccagactgagacaggaggagagagagcaggagcagagacaggccctggagcaggccagaaaggccgaggaggtgcaggcctgggcccagagaaaggagagagaggtgctgcagctgcaggaggaggtgaagaacttcatcaccagagagaacctggaggccagagtggaggccgccctggacagcagaaagaactacaactgggccatcaccagagagggcctggtggtgagaccccagagaagagacagctag

SEQ ID NO: 89269 - DNA, 1245 bp, synthetic construct
  misc_feature 1..1245: note = Description of Artificial Sequence: Synthetic coding sequence
  source 1..1245: mol_type = other DNA
atggccgccagcatcgtgagaagaggcatgctgctggccagacaggtggtgctgccccagctgagccccgccggcaagagatacctgctgagcagcgcctacgtggacagccacaagtgggaggccagagagaaggagcactactgcctggccgacctggccagcctgatggacaagaccttcgagagaaagctgcccgtgagcagcctgaccatcagcagactgatcgacaacatcagcagcagagaggagatcgaccacgccgagtactacctgtacaagttcagacacagccccaactgctggtacctgagaaactggaccatccacacctggatcagacagtgcctgaagtacgacgcccaggacaaggccctgtacaccctggtgaacaaggtgcagtacggcatcttccccgacaacttcaccttcaacctgctgatggacagcttcatcaagaaggagaactacaaggacgccctgagcgtggtgttcgaggtgatgatgcaggaggccttcgaggtgcccagcacccagctgctgagcctgtacgtgctgttccactgcctggccaagaagaccgacttcagctgggaggaggagagaaacttcggcgccagcctgctgctgcccggcctgaagcagaagaacagcgtgggcttcagcagccagctgtacggctacgccctgctgggcaaggtggagctgcagcagggcctgagagccgtgtaccacaacatgcccctgatctggaagcccggctacctggacagagccctgcaggtgatggagaaggtggccgccagccccgaggacatcaagctgtgcagagaggccctggacgtgctgggcgccgtgctgaaggccctgaccagcgccgacggcgccagcgaggagcagagccagaacgacgaggacaaccagggcagcgagaagctggtggagcagctggacatcgaggagaccgagcagagcaagctgccccagtacctggagagattcaaggccctgcacagcaagctgcaggccctgggcaagatcgagagcgagggcctgctgagcctgaccacccagctggtgaaggagaagctgagcacctgcgaggccgaggacatcgccacctacgagcagaacctgcagcagtggcacctggacctggtgcagctgatccagagagagcagcagcagagagagcaggccaagcaggagtaccaggcccagaaggccgccaaggccagcgcctag

SEQ ID NO: 89270 - DNA, 1077 bp, synthetic construct
  misc_feature 1..1077: note = Description of Artificial Sequence: Synthetic coding sequence
  source 1..1077: mol_type = other DNA
atggacaagaccttcgagagaaagctgcccgtgagcagcctgaccatcagcagactgatcgacaacatcagcagcagagaggagatcgaccacgccgagtactacctgtacaagttcagacacagccccaactgctggtacctgagaaactggaccatccacacctggatcagacagtgcctgaagtacgacgcccaggacaaggccctgtacaccctggtgaacaaggtgcagtacggcatcttccccgacaacttcaccttcaacctgctgatggacagcttcatcaagaaggagaactacaaggacgccctgagcgtggtgttcgaggtgatgatgcaggaggccttcgaggtgcccagcacccagctgctgagcctgtacgtgctgttccactgcctggccaagaagaccgacttcagctgggaggaggagagaaacttcggcgccagcctgctgctgcccggcctgaagcagaagaacagcgtgggcttcagcagccagctgtacggctacgccctgctgggcaaggtggagctgcagcagggcctgagagccgtgtaccacaacatgcccctgatctggaagcccggctacctggacagagccctgcaggtgatggagaaggtggccgccagccccgaggacatcaagctgtgcagagaggccctggacgtgctgggcgccgtgctgaaggccctgaccagcgccgacggcgccagcgaggagcagagccagaacgacgaggacaaccagggcagcgagaagctggtggagcagctggacatcgaggagaccgagcagagcaagctgccccagtacctggagagattcaaggccctgcacagcaagctgcaggccctgggcaagatcgagagcgagggcctgctgagcctgaccacccagctggtgaaggagaagctgagcacctgcgaggccgaggacatcgccacctacgagcagaacctgcagcagtggcacctggacctggtgcagctgatccagagagagcagcagcagagagagcaggccaagcaggagtaccaggcccagaaggccgccaaggccagcgcctag

SEQ ID NO: 89271 - DNA, 1287 bp, synthetic construct
  misc_feature 1..1287: note = Description of Artificial Sequence: Synthetic coding sequence
  source 1..1287: mol_type = other DNA
atggccgccagcatcgtgagaagaggcatgctgctggccagacaggtggtgctgccccagctgagccccgccggcaagagatacctgctgagcagcgcctacgtggacagccacaagtgggaggccagagagaaggagcactactgcctggccgacctggccagcctgatggacaagaccttcgagagaaagctgcccgtgagcagcctgaccatcagcagactgatcgacaacatcagcagcagagaggagatcgaccacgccgagtactacctgtacaagaagggcgagtgcagcagcagcaacccccagaactacagcagattcagacacagccccaactgctggtacctgagaaactggaccatccacacctggatcagacagtgcctgaagtacgacgcccaggacaaggccctgtacaccctggtgaacaaggtgcagtacggcatcttccccgacaacttcaccttcaacctgctgatggacagcttcatcaagaaggagaactacaaggacgccctgagcgtggtgttcgaggtgatgatgcaggaggccttcgaggtgcccagcacccagctgctgagcctgtacgtgctgttccactgcctggccaagaagaccgacttcagctgggaggaggagagaaacttcggcgccagcctgctgctgcccggcctgaagcagaagaacagcgtgggcttcagcagccagctgtacggctacgccctgctgggcaaggtggagctgcagcagggcctgagagccgtgtaccacaacatgcccctgatctggaagcccggctacctggacagagccctgcaggtgatggagaaggtggccgccagccccgaggacatcaagctgtgcagagaggccctggacgtgctgggcgccgtgctgaaggccctgaccagcgccgacggcgccagcgaggagcagagccagaacgacgaggacaaccagggcagcgagaagctggtggagcagctggacatcgaggagaccgagcagagcaagctgccccagtacctggagagattcaaggccctgcacagcaagctgcaggccctgggcaagatcgagagcgagggcctgctgagcctgaccacccagctggtgaaggagaagctgagcacctgcgaggccgaggacatcgccacctacgagcagaacctgcagcagtggcacctggacctggtgcagctgatccagagagagcagcagcagagagagcaggccaagcaggagtaccaggcccagaaggccgccaaggccagcgcctag

SEQ ID NO: 89272 - DNA, 564 bp, synthetic construct
  misc_feature 1..564: note = Description of Artificial Sequence: Synthetic coding sequence
  source 1..564: mol_type = other DNA
atggccgccctgtgcagaaccagagccgtggccgccgagagccacttcctgagagtgttcctgttcttcagacccttcagaggcgtgggcaccgagagcggcagcgagagcggcagcagcaacgccaaggagcccaagaccagagccggcggcttcgccagcgccctggagagacacagcgagctgctgcagaaggtggagcccctgcagaagggcagccccaagaacgtggagagcttcgccagcatgctgagacacagccccctgacccagatgggccccgccaaggacaagctggtgatcggcagaatcttccacatcgtggagaacgacctgtacatcgacttcggcggcaagttccactgcgtgtgcagaagacccgaggtggacggcgagaagtaccagaagggcaccagagtgagactgagactgctggacctggagctgaccagcagattcctgggcgccaccaccgacaccaccgtgctggaggccaacgccgtgctgctgggcatccaggagagcaaggacagcagaagcaaggaggagcaccacgagaagtag

SEQ ID NO: 89273 - DNA, 1320 bp, synthetic construct
  misc_feature 1..1320: note = Description of Artificial Sequence: Synthetic coding sequence
  source 1..1320: mol_type = other DNA
atggccgccgccagatgctggagacccctgctgagaggccccagactgagcctgcacaccgccgccaacgccgccgccaccgccaccgagaccacctgccaggacgtggccgccacccccgtggccagatacccccccatcgtggccagcatgaccgccgacagcaaggccgccagactgagaagaatcgagagatggcaggccaccgtgcacgccgccgagagcgtggacgagaagctgagaatcctgaccaagatgcagttcatgaagtacatggtgtacccccagaccttcgccctgaacgccgacagatggtaccagtacttcaccaagaccgtgttcctgagcggcctgccccccccccccgccgagcccgagcccgagcccgagcccgagcccgagcccgccctggacctggccgccctgagagccgtggcctgcgactgcctgctgcaggagcacttctacctgagaagaagaagaagagtgcacagatacgaggagagcgaggtgatcagcctgcccttcctggaccagctggtgagcaccctggtgggcctgctgagcccccacaaccccgccctggccgccgccgccctggactacagatgccccgtgcacttctactgggtgagaggcgaggagatcatccccagaggccacagaagaggcagaatcgacgacctgagataccagatcgacgacaagcccaacaaccagatcagaatcagcaagcagctggccgagttcgtgcccctggactacagcgtgcccatcgagatccccaccatcaagtgcaagcccgacaagctgcccctgttcaagagacagtacgagaaccacatcttcgtgggcagcaagaccgccgacccctgctgctacggccacacccagttccacctgctgcccgacaagctgagaagagagagactgctgagacagaactgcgccgaccagatcgaggtggtgttcagagccaacgccatcgccagcctgttcgcctggaccggcgcccaggccatgtaccagggcttctggagcgaggccgacgtgaccagacccttcgtgagccaggccgtgatcaccgacggcaagtacttcagcttcttctgctaccagctgaacaccctggccctgaccacccaggccgaccagaacaaccccagaaagaacatctgctggggcacccagagcaagcccctgtacgagaccatcgaggacaacgacgtgaagggcttcaacgacgacgtgctgctgcagatcgtgcacttcctgctgaacagacccaaggaggagaagagccagctgctggagaactag

SEQ ID NO: 89274 - DNA, 1188 bp, synthetic construct
  misc_feature 1..1188: note = Description of Artificial Sequence: Synthetic coding sequence
  source 1..1188: mol_type = other DNA
atgttccccagagtgagcaccttcctgcccctgagacccctgagcagacaccccctgagcagcggcagccccgagaccagcgccgccgccatcatgctgctgaccgtgagacacggcaccgtgagatacagaagcagcgccctgctggccagaaccaagaacaacatccagagatacttcggcaccaacagcgtgatctgcagcaagaaggacaagcagagcgtgagaaccgaggagaccagcaaggagaccagcgagagccaggacagcgagaaggagaacaccaagaaggacctgctgggcatcatcaagggcatgaaggtggagctgagcaccgtgaacgtgagaaccaccaagccccccaagagaagacccctgaagagcctggaggccaccctgggcagactgagaagagccaccgagtacgcccccaagaagagaatcgagcccctgagccccgagctggtggccgccgccagcgccgtggccgacagcctgcccttcgacaagcagaccaccaagagcgagctgctgagccagctgcagcagcacgaggaggagagcagagcccagagagacgccaagagacccaagatcagcttcagcaacatcatcagcgacatgaaggtggccagaagcgccaccgccagagtgagaagcagacccgagctgagaatccagttcgacgagggctacgacaactaccccggccaggagaagaccgacgacctgaagaagagaaagaacatcttcaccggcaagagactgaacatcttcgacatgatggccgtgaccaaggaggcccccgagaccgacaccagccccagcctgtgggacgtggagttcgccaagcagctggccaccgtgaacgagcagcccctgcagaacggcttcgaggagctgatccagtggaccaaggagggcaagctgtgggagttccccatcaacaacgaggccggcttcgacgacgacggcagcgagttccacgagcacatcttcctggagaagcacctggagagcttccccaagcagggccccatcagacacttcatggagctggtgacctgcggcctgagcaagaacccctacctgagcgtgaagcagaaggtggagcacatcgagtggttcagaaactacttcaacgagaagaaggacatcctgaaggagagcaacatccagttcaactag

SEQ ID NO: 89275 - DNA, 321 bp, synthetic construct
  misc_feature 1..321: note = Description of Artificial Sequence: Synthetic coding sequence
  source 1..321: mol_type = other DNA
atgagcagcctgagcgagtacgccttcagaatgagcagactgagcgccagactgttcggcgaggtgaccagacccaccaacagcaagagcatgaaggtggtgaagctgttcagcgagctgcccctggccaagaagaaggagacctacgactggtaccccaaccaccacacctacgccgagctgatgcagaccctgagattcctgggcctgtacagagacgagcaccaggacttcatggacgagcagaagagactgaagaagctgagaggcaaggagaagcccaagaagggcgagggcaagagagccgccaagagaaagtag

SEQ ID NO: 89276 - DNA, 321 bp, synthetic construct; identical to SEQ ID NO: 89275
  misc_feature 1..321: note = Description of Artificial Sequence: Synthetic coding sequence
  source 1..321: mol_type = other DNA

SEQ ID NO: 89277 - DNA, 321 bp, synthetic construct; identical to SEQ ID NO: 89275
  misc_feature 1..321: note = Description of Artificial Sequence: Synthetic coding sequence
  source 1..321: mol_type = other DNA

SEQ ID NO: 89278 - DNA, 321 bp, synthetic construct; identical to SEQ ID NO: 89275
  misc_feature 1..321: note = Description of Artificial Sequence: Synthetic coding sequence
  source 1..321: mol_type = other DNA

SEQ ID NO: 89279 - DNA, 339 bp, synthetic construct
  misc_feature 1..339: note = Description of Artificial Sequence: Synthetic coding sequence
  source 1..339: mol_type = other DNA
atgagcagcctgagcgagtacgccttcagaatgagcagactgagcgccagactgttcggcgaggtgaccagacccaccaacagcaagagcatgaaggtggtgaagctgttcagcgagctgcccctggccaagaagaaggagacctacgactggtaccccaaccaccacacctacgccgagctgatgcagaccctgagattcctgggcctgtacagagacgagcaccaggacttcatggacgagcagaagagactgaagaagctgagaggcaaggagaagcccaagaagggcgagggcaagagagccgccaagagaaagaagaagaagaagaagagatag

SEQ ID NO: 89280 - DNA, 678 bp, synthetic construct
  misc_feature 1..678: note = Description of Artificial Sequence: Synthetic coding sequence
  source 1..678: mol_type = other DNA
atggccagaaagaaggtgagacccagactgatcgccgagctggccagaagagtgagagccctgagagagcagctgaacagacccagagacagccagctgtacgccgtggactacgagaccctgaccagacccttcagcggcagaagactgcccgtgagagcctgggccgacgtgagaagagagagcagactgctgcagctgctgggcagactgcccctgttcggcctgggcagactggtgaccagaaagagctggctgtggcagcacgacgagccctgctactggagactgaccagagtgagacccgactacaccgcccagaacctggaccacggcaaggcctggggcatcctgaccttcaaggacgccagcttcagcagcagcggcaagaccgagagcgaggccagagagatcgagcacgtgatgtaccacgactggagactggtgcccaagcacgaggaggaggccttcaccgccttcacccccgcccccgaggacagcctggccagcgtgccctacccccccctgctgagagccatgatcatcgccgagagacagaagaacggcgacaccagcaccgaggagcccatgctgaacgtgcagagaatcagaatggagccctgggactaccccgccaagcaggaggacaagggcagagccaagggcacccccgtgtag

SEQ ID NO: 89281 - DNA, 657 bp, synthetic construct
  misc_feature 1..657: note = Description of Artificial Sequence: Synthetic coding sequence
  source 1..657: mol_type = other DNA
atggccagaaagaaggtgagacccagactgatcgccgagctggccagaagagtgagagccctgagagagcagctgaacagacccagagacagccagctgtacgccgtggactacgagaccctgaccagacccttcagcggcagaagactgcccgtgagagcctgggccgacgtgagaagagagagcagactgctgcagctgctgggcagactgcccctgttcggcctgggcagactggtgaccagaaagagctggctgtggcagcacgacgagccctgctactggagactgaccagagtgagacccgactacaccgcccagaacctggaccacggcaaggcctggggcatcctgaccttcaagggcaagaccgagagcgaggccagagagatcgagcacgtgatgtaccacgactggagactggtgcccaagcacgaggaggaggccttcaccgccttcacccccgcccccgaggacagcctggccagcgtgccctacccccccctgctgagagccatgatcatcgccgagagacagaagaacggcgacaccagcaccgaggagcccatgctgaacgtgcagagaatcagaatggagccctgggactaccccgccaagcaggaggacaagggcagagccaagggcacccccgtgtag

SEQ ID NO: 89282 - DNA, 972 bp, synthetic construct
  misc_feature 1..972: note = Description of Artificial Sequence: Synthetic coding sequence
  source 1..972: mol_type = other DNA
atggccgccgccgccctgcccgcctggctgagcctgcagagcagagccagaaccctgagagccttcagcaccgccgtgtacagcgccacccccgtgcccacccccagcctgcccgagagaacccccggcaacgagagaccccccagaagaaaggccctgccccccagaaccgagaagatggccgtggaccaggactggcccagcgtgtaccccgtggccgcccccttcaagcccagcgccgtgcccctgcccgtgagaatgggctaccccgtgaagaagggcgtgcccatggccaaggagggcaacctggagctgctgaagatccccaacttcctgcacctgacccccgtggccatcaagaagcactgcgaggccctgaaggacttctgcaccgagtggcccgccgccctggacagcgacgagaagtgcgagaagcacttccccatcgagatcgacagcaccgactacgtgagcagcggccccagcgtgagaaaccccagagccagagtggtggtgctgagagtgaagctgagcagcctgaacctggacgaccacgccaagaagaagctgatcaagctggtgggcgagagatactgcaagaccaccgacgtgctgaccatcaagaccgacagatgccccctgagaagacagaactacgactacgccgtgtacctgctgaccgtgctgtaccacgagagctggaacaccgaggagtgggagaagagcaagaccgaggccgacatggaggagtacatctgggagaacagcagcagcgagagaaacatcctggagaccctgctgcagatgaaggccgccgagaagaacatggagatcaacaaggaggagctgctgggcaccaaggagatcgaggagtacaagaagagcgtggtgagcctgaagaacgaggaggagaacgagaacagcatcagccagtacaaggagagcgtgaagagactgctgaacgtgacctag

SEQ ID NO: 89283 - DNA, 864 bp, synthetic construct
  misc_feature 1..864: note = Description of Artificial Sequence: Synthetic coding sequence
  source 1..864: mol_type = other DNA
atggccgccgccgccctgcccgcctggctgagcctgcagagcagagccagaaccctgagagccttcagcaccgccgtgtacagcgccacccccgtgcccacccccagcctgcccgagagaacccccggcaacgagagaccccccagaagaaaggccctgccccccagaaccgagaagatggccgtggaccaggactggcccagcgtgtaccccgtggccgcccccttcaagcccagcgccgtgcccctgcccgtgagaatgggctaccccgtgaagaagggcgtgcccatggccaaggagggcaacctggagctgctgaagatccccaacttcctgcacctgacccccgtggccatcaagaagcactgcgaggccctgaaggacttctgcaccgagtggcccgccgccctggacagcgacgagaagtgcgagaagcacttccccatcgagatcgacagcaccgactacgtgagcagcggccccagcgtgagaaaccccagagccagagtggtggtgctgagaagatgccccctgagaagacagaactacgactacgccgtgtacctgctgaccgtgctgtaccacgagagctggaacaccgaggagtgggagaagagcaagaccgaggccgacatggaggagtacatctgggagaacagcagcagcgagagaaacatcctggagaccctgctgcagatgaaggccgccgagaagaacatggagatcaacaaggaggagctgctgggcaccaaggagatcgaggagtacaagaagagcgtggtgagcctgaagaacgaggaggagaacgagaacagcatcagccagtacaaggagagcgtgaagagactgctgaacgtgacctag

SEQ ID NO: 89284 - DNA, 585 bp, synthetic construct
  misc_feature 1..585: note = Description of Artificial Sequence: Synthetic coding sequence
  source 1..585: mol_type = other DNA
atggccgccgccgccctgcccgcctggctgagcctgcagagcagagccagaaccctgagagccttcagcaccgccgtgtacagcgccacccccgtgcccacccccagcctgcccgagagaacccccggcaacgagagaccccccagaagaaaggccctgccccccagaaccgagaagatggccgtggaccaggactggcccagcgtgtaccccgtggccgcccccttcaagcccagcgccgtgcccctgcccgtgagaatgggctaccccgtgaagaagggcgtgcccatggccaaggagggcaacctggagctgctgaagatccccaacttcctgcacctgacccccgtggccatcaagaagcactgcgaggccctgaaggacttctgcaccgagtggcccgccgccctggacagcgacgagaagtgcgagaagcacttccccatcgagatcgacagcaccgactacgtgagcagcggccccagcgtgagaaaccccagagccagagtggtggtgctgagagtgcccttcaaggaggccgagctgagactgtgcagcgtgagcaccaacagcgtgatcccctag

SEQ ID NO: 89285 - DNA, 312 bp, synthetic construct
  misc_feature 1..312: note = Description of Artificial Sequence: Synthetic coding sequence
  source 1..312: mol_type = other DNA
atgatgggcagcaagatggccagcgccagcagagtggtgcaggtggtgaagccccacacccccctgatcagattccccgacagaagagacaaccccaagcccaacgtgagcgaggccctgagaagcgccggcctgcccagccacagcagcgtgatcagccagcacagcaagggcagcaagagccccgacctgctgatgtaccagggcccccccgacaccgccgagatcatcaagaccctgccccagaagtacagaagaaagctggtgagccaggaggagatggagttcatccagagaggcggccccgagtag

SEQ ID NO: 89286 - DNA, 1293 bp, synthetic construct
  misc_feature 1..1293: note = Description of Artificial Sequence: Synthetic coding sequence
  source 1..1293: mol_type = other DNA
atggccaccgccgtgagagccgtgggctgcctgcccgtgctgtgcagcggcaccgccggccacctgctgggcagacagtgcagcctgaacaccctgcccgccgccagcatcctggcctggaagagcgtgctgggcaacggccacctgagcagcctgggcaccagagacacccacccctacgccagcctgagcagagccctgcagacccagtgctgcatcagcagccccagccacctgatgagccagcagtacagaccctacagcttcttcaccaagctgaccgccgacgagctgtggaagggcgccctggccgagaccggcgccggcgccaagaagggcagaggcaagagaaccaagaagaagaagagaaaggacctgaacagaggccagatcatcggcgagggcagatacggcttcctgtggcccggcctgaacgtgcccctgatgaagaacggcgccgtgcagaccatcgcccagagaagcaaggaggagcaggagaaggtggaggccgacatgatccagcagagagaggagtgggacagaaagaagaagatgaaggtgaagagagagagaggctggagcggcaacagctggggcggcatcagcctgggcccccccgaccccggcccctgcggcgagacctacgaggacttcgacaccagaatcctggaggtgagaaacgtgttcaccatgaccgccaaggagggcagaaagaagagcatcagagtgctggtggccgtgggcaacggcaagggcgccgccggcttcagcatcggcaaggccaccgacagaatggacgccttcagaaaggccaagaacagagccgtgcaccacctgcactacatcgagagatacgaggaccacaccatcttccacgacatcagcctgagattcaagagaacccacatcaagatgaagaagcagcccaagggctacggcctgagatgccacagagccatcatcaccatctgcagactgatcggcatcaaggacatgtacgccaaggtgagcggcagcatcaacatgctgagcctgacccagggcctgttcagaggcctgagcagacaggagacccaccagcagctggccgacaagaagggcctgcacgtggtggagatcagagaggagtgcggccccctgcccatcgtggtggccagccccagaggccccctgagaaaggaccccgagcccgaggacgaggtgcccgacgtgaagctggactgggaggacgtgaagaccgcccagggcatgaagagaagcgtgtggagcaacctgaagagagccgccacctag

SEQ ID NO: 89287 - DNA, 378 bp, synthetic construct
  misc_feature 1..378: note = Description of Artificial Sequence: Synthetic coding sequence
  source 1..378: mol_type = other DNA
atgcccagatacgagctggccctgatcctgaaggccatgcagagacccgagaccgccgccaccctgaagagaaccatcgaggccctgatggacagaggcgccatcgtgagagacctggagaacctgggcgagagagccctgccctacagaatcagcgcccacagccagcagcacaacagaggcggctacttcctggtggacttctacgcccccaccgccgccgtggagagcatggtggagcacctgagcagagacatcgacgtgatcagaggcaacatcgtgaagcaccccctgacccaggagctgaaggagtgcgagggcatcgtgcccgtgcccctggccgagaagctgtacagcaccaagaagagaaagaagtag

SEQ ID NO: 89288 - DNA, 729 bp, synthetic construct
  misc_feature 1..729: note = Description of Artificial Sequence: Synthetic coding sequence
  source 1..729: mol_type = other DNA
atggccgcccccgccgtgaaggtggccagaggctggagcggcctggccctgggcgtgagaagagccgtgctgcagctgcccggcctgacccaggtgagatggagcagatacagccccgagttcaaggaccccctgatcgacaaggagtactacagaaagcccgtggaggagctgaccgaggaggagaagtacgtgagagagctgaagaagacccagctgatcaaggccgcccccgccggcaagaccagcagcgtgttcgaggaccccgtgatcagcaagttcaccaacatgatgatgatcggcggcaacaaggtgctggccagaagcctgatgatccagaccctggaggccgtgaagagaaagcagttcgagaagtaccacgccgccagcgccgaggagcaggccaccatcgagagaaacccctacaccatcttccaccaggccctgaagaactgcgagcccatgatcggcctggtgcccatcctgaagggcggcagattctaccaggtgcccgtgcccctgcccgacagaagaagaagattcctggccatgaagtggatgatcaccgagtgcagagacaagaagcaccagagaaccctgatgcccgagaagctgagccacaagctgctggaggccttccacaaccagggccccgtgatcaagagaaagcacgacctgcacaagatggccgaggccaacagagccctggcccactacagatggtggtag

SEQ ID NO: 89289 - DNA, 1191 bp, synthetic construct
  misc_feature 1..1191: note = Description of Artificial Sequence: Synthetic coding sequence
  source 1..1191: mol_type = other DNA
atggccgccccctgcgtgagctacggcggcgccgtgagctacagactgctgctgtggggcagaggcagcctggccagaaagcagggcctgtggaagaccgccgcccccgagctgcagaccaacgtgagaagccagatcctgagactgagacacaccgccttcgtgatccccaagaagaacgtgcccaccagcaagagagagacctacaccgaggacttcatcaagaagcagatcgaggagttcaacatcggcaagagacacctggccaacatgatgggcgaggaccccgagaccttcacccaggaggacatcgacagagccatcgcctacctgttccccagcggcctgttcgagaagagagccagacccgtgatgaagcaccccgagcagatcttccccagacagagagccatccagtggggcgaggacggcagacccttccactacctgttctacaccggcaagcagagctactacagcctgatgcacgacgtgtacggcatgctgctgaacctggagaagcaccagagccacctgcaggccaagagcctgctgcccgagaagaccgtgaccagagacgtgatcggcagcagatggctgatcaaggaggagctggaggagatgctggtggagaagctgagcgacctggactacatgcagttcatcagactgctggagaagctgctgaccagccagtgcggcgccgccgaggaggagttcgtgcagagattcagaagaagcgtgaccctggagagcaagaagcagctgatcgagcccgtgcagtacgacgagcagggcatggccttcagcaagagcgagggcaagagaaagaccgccaaggccgaggccatcgtgtacaagcacggcagcggcagaatcaaggtgaacggcatcgactaccagctgtacttccccatcacccaggacagagagcagctgatgttccccttccacttcgtggacagactgggcaagcacgacgtgacctgcaccgtgagcggcggcggcagaagcgcccaggccggcgccatcagactggccatggccaaggccctgtgcagcttcgtgaccgaggacgaggtggagtggatgagacaggccggcctgctgaccaccgaccccagagtgagagagagaaagaagcccggccaggagggcgccagaagaaagttcacctggaagaagagatag

SEQ ID NO: 89290 - DNA, 1122 bp, synthetic construct
  misc_feature 1..1122: note = Description of Artificial Sequence: Synthetic coding sequence
  source 1..1122: mol_type = other DNA
atgtgggtgtgcagcaccctgtggagagtgagaacccccgccagacagtggagaggcctgctgcccgccagcggctgccacggccccgccgccagcagctacagcgccagcgccgagcccgccagagtgagagccctggtgtacggccaccacggcgaccccgccaaggtggtggagctgaagaacctggagctggccgccgtgagaggcagcgacgtgagagtgaagatgctggccgcccccatcaaccccagcgacatcaacatgatccagggcaactacggcttcctgcccgagctgcccgccgtgggcggcaacgagggcgtggcccaggtggtggccgtgggcagcaacgtgaccggcctgaagcccggcgactgggtgatccccgccaacgccggcctgggcacctggagaaccgaggccgtgttcagcgaggaggccctgatccaggtgcccagcgacatccccctgcagagcgccgccaccctgggcgtgaacccctgcaccgcctacagaatgctgatggacttcgagcagctgcagcccggcgacagcgtgatccagaacgccagcaacagcggcgtgggccaggccgtgatccagatcgccgccgccctgggcctgagaaccatcaacgtggtgagagacagacccgacatccagaagctgagcgacagactgaagagcctgggcgccgagcacgtgatcaccgaggaggagctgagaagacccgagatgaagaacttcttcaaggacatgccccagcccagactggccctgaactgcgtgggcggcaagagcagcaccgagctgctgagacagctggccagaggcggcaccatggtgacctacggcggcatggccaagcagcccgtggtggccagcgtgagcctgctgatcttcaaggacctgaagctgagaggcttctggctgagccagtggaagaaggaccacagccccgaccagttcaaggagctgatcctgaccctgtgcgacctgatcagaagaggccagctgaccgcccccgcctgcagccaggtgcccctgcaggactaccagagcgccctggaggccagcatgaagcccttcatcagcagcaagcagatcctgaccatgtag

SEQ ID NO: 89291 - DNA, 894 bp, synthetic construct
  misc_feature 1..894: note = Description of Artificial Sequence: Synthetic coding sequence
  source 1..894: mol_type = other DNA
atgctggccgcccccatcaaccccagcgacatcaacatgatccagggcaactacggcttcctgcccgagctgcccgccgtgggcggcaacgagggcgtggcccaggtggtggccgtgggcagcaacgtgaccggcctgaagcccggcgactgggtgatccccgccaacgccggcctgggcacctggagaaccgaggccgtgttcagcgaggaggccctgatccaggtgcccagcgacatccccctgcagagcgccgccaccctgggcgtgaacccctgcaccgcctacagaatgctgatggacttcgagcagctgcagcccggcgacagcgtgatccagaacgccagcaacagcggcgtgggccaggccgtgatccagatcgccgccgccctgggcctgagaaccatcaacgtggtgagagacagacccgacatccagaagctgagcgacagactgaagagcctgggcgccgagcacgtgatcaccgaggaggagctgagaagacccgagatgaagaacttcttcaaggacatgccccagcccagactggccctgaactgcgtgggcggcaagagcagcaccgagctgctgagacagctggccagaggcggcaccatggtgacctacggcggcatggccaagcagcccgtggtggccagcgtgagcctgctgatcttcaaggacctgaagctgagaggcttctggctgagccagtggaagaaggaccacagccccgaccagttcaaggagctgatcctgaccctgtgcgacctgatcagaagaggccagctgaccgcccccgcctgcagccaggtgcccctgcaggactaccagagcgccctggaggccagcatgaagcccttcatcagcagcaagcagatcctgaccatgtag

SEQ ID NO: 89292 - DNA, 789 bp, synthetic construct
  misc_feature 1..789: note = Description of Artificial Sequence: Synthetic coding sequence
  source 1..789: mol_type = other DNA
atgatccagggcaactacggcttcctgcccgagctgcccgccgtgggcggcaacgagggcgtggcccaggtggtggccgtgggcagcaacgtgaccggcctgaagcccggcgactgggtgatccccgccaacgccggcctgggcacctggagaaccgaggccgtgttcagcgaggaggccctgatccaggtgcccagcgacatccccctgcagagcgccgccaccctgggcgtgaacccctgcaccgcctacagaatgctgatggacttcgagcagctgcagcccggcgacagcgtgatccagaacgccagcaacagcggcgtgggccaggccgtgatccagatcgccgccgccctgggcctgagaaccatcaacgtggtgagagacagacccgacatccagaagctgagcgacagactgaagagcctgggcgccgagcacgtgatcaccgaggaggagctgagaagacccgagatgaagaacttcttcaagatcagaaagctgagactgagaaaggaggagatgctgaaccagaaccacatcgtgtacaagggcagcagagagagcgagctggccagcgtgagccccaacagcaagcccctgaacctgcccgagccccccccccacaacatgcccagacacgcccccgccaccgcctgcagccagctgtgctggtgggagaagctgcacagagccgccgccgccgtgagcgcctggagaaaccacggcaacctgtggggcgacggccaggccgccagaagaagcctgtgcgagcccgcccacttctag

SEQ ID NO: 89293 - DNA, 570 bp, synthetic construct
  misc_feature 1..570: note = Description of Artificial Sequence: Synthetic coding sequence
  source 1..570: mol_type = other DNA
gccaccctgggcgtgaacccctgcaccgcctacagaatgctgatggacttcgagcagctgcagcccggcgacagcgtgatccagaacgccagcaacagcggcgtgggccaggccgtgatccagatcgccgccgccctgggcctgagaaccatcaacgtggtgagagacagacccgacatccagaagctgagcgacagactgaagagcctgggcgccgagcacgtgatcaccgaggaggagctgagaagacccgagatgaagaacttcttcaagatcagaaagctgagactgagaaaggaggagatgctgaaccagaaccacatcgtgtacaagggcagcagagagagcgagctggccagcgtgagccccaacagcaagcccctgaacctgcccgagccccccccccacaacatgcccagacacgcccccgccaccgcctgcagccagctgtgctggtgggagaagctgcacagagccgccgccgccgtgagcgcctggagaaaccacggcaacctgtggggcgacggccaggccgccagaagaagcctgtgcgagcccgcccacttctag

SEQ ID NO: 89294 - DNA, 1200 bp, synthetic construct
  misc_feature 1..1200: note = Description of Artificial Sequence: Synthetic coding sequence
  source 1..1200: mol_type = other DNA
atgcagagcctgagcctgggccagaccagcatcagcaagggcctgaactacctgaccatcatggcccccggcaacctgtggcacatgagaaacaacttcctgttcggcagcagatgctggatgaccagattcagcgccgagaacatcttcaagagcgtgagcttcagactgttcggcgtgaagtgccacaacaccgacagcgagcccctgaagaacgaggacctgctgaagaacctgctgaccatgggcgtggacatcgacatggccagaaagagacagcccggcgtgttccacagaatgatcaccaacgagcaggacctgaagatgttcctgctgagcaagggcgccagcaaggaggtgatcgccagcatcatcagcagataccccagagccatcaccagaacccccgagaacctgagcaagagatgggacctgtggagaaagatcgtgaccagcgacctggagatcgtgaacatcctggagagaagccccgagagcttcttcagaagcaacaacaacctgaacctggagaacaacatcaagttcctgtacagcgtgggcctgaccagaaagtgcctgtgcagactgctgaccaacgcccccagaaccttcagcaacagcctggacctgaacaagcagatggtggagttcctgcaggccgccggcctgagcctgggccacaacgaccccgccgacttcgtgagaaagatcatcttcaagaaccccttcatcctgatccagagcaccaagagagtgaaggccaacatcgagttcctgagaagcaccttcaacctgaacagcgaggagctgctggtgctgatctgcggccccggcgccgagatcctggacctgagcaacgactacgccagaagaagctacgccaacatcaaggagaagctgttcagcctgggctgcaccgaggaggaggtgcagaagttcgtgctgagctaccccgacgtgatcttcctggccgagaagaagttcaacgacaagatcgactgcctgatggaggagaacatcagcatcagccagatcatcgagaaccccagagtgctggacagcagcatcagcaccctgaagagcagaatcaaggagctggtgaacgccggctgcaacctgagcaccctgaacatcaccctgctgagctggagcaagaagagatacgaggccaagctgaagaagctgagcagattcgcctag

SEQ ID NO: 89295 - DNA, 477 bp, synthetic construct
  misc_feature 1..477: note = Description of Artificial Sequence: Synthetic coding sequence
  source 1..477: mol_type = other DNA
atgcagagcctgagcctgggccagaccagcatcagcaagggcctgaactacctgaccatcatggcccccggcaacctgtggcacatgagaaacaacttcctgttcggcagcagatgctggatgaccagattcagcgccgagaacatcttcaagagcgtgagcttcagactgttcggcgtgaagtgccacaacaccgacagcgagcccctgaagaacgaggacctgctgaagaacctgctgaccatgggcgtggacatcgacatggccagaaagagacagcccggcgtgttccacagaatgatcaccaacgagcaggacctgaagatgttcctgctgagcaagggcgccagcaaggaggtgatcgccagcatcatcagcagataccccagagccatcaccagaacccccgagaacctgagcaagagatgggacctgtggagaaagatcgtgaccagcgacctggagatcgtgaactag

SEQ ID NO: 89296 - DNA, 2184 bp, synthetic construct
  misc_feature 1..2184: note = Description of Artificial Sequence: Synthetic coding sequence
  source 1..2184: mol_type = other DNA
atgaaccagaagctgctgaagctggagaacctgctgagattccacaccatctacagacagctgcacagcctgtgccagagaagagccctgagacagtggagacacggcttcagcagcgcctaccccgtgtggaccgcccagctgtgcgcctggccctggcccaccgacgtgctgaccggcgccgccctgagccagtacagactgctggtgaccaagaaggaggagggcccctggaagagccagctgagcagcaccaagagcaagaaggtggtggaggtgtggatcggcatgaccatcgaggagctggccagagccatggagaagaacaccgactacgtgtacgaggccctgctgaacaccgacatcgacatcgacagcctggaggccgacagccacctggacgaggtgtggatcaaggaggtgatcaccaaggccggcatgaagctgaagtggagcaagctgaagcaggacaaggtgagaaagaacaaggacgccgtgagaagaccccaggccgaccccgccctgctgacccccagaagccccgtggtgaccatcatgggccacgtggaccacggcaagaccaccctgctggacaagttcagaaagacccaggtggccgccgtggagaccggcggcatcacccagcacatcggcgccttcctggtgagcctgcccagcggcgagaagatcaccttcctggacacccccggccacgccgccttcagcgccatgagagccagaggcgcccaggtgaccgacatcgtggtgctggtggtggccgccgacgacggcgtgatgaagcagaccgtggagagcatccagcacgccaaggacgcccaggtgcccatcatcctggccgtgaacaagtgcgacaaggccgaggccgaccccgagaaggtgaagaaggagctgctggcctacgacgtggtgtgcgaggactacggcggcgacgtgcaggccgtgcccgtgagcgccctgaccggcgacaacctgatggccctggccgaggccaccgtggccctggccgagatgctggagctgaaggccgaccccaacggccccgtggagggcaccgtgatcgagagcttcaccgacaagggcagaggcctggtgaccaccgccatcatccagagaggcaccctgagaaagggcagcgtgctggtggccggcaagtgctgggccaaggtgagactgatgttcgacgagaacggcaagaccatcgacgaggcctaccccagcatgcccgtgggcatcaccggctggagagacctgcccagcgccggcgaggagatcctggaggtggagagcgagcccagagccagagaggtggtggactggagaaagtacgagcaggagcaggagaagggccaggaggacctgaagatcatcgaggagaagagaaaggagcacaaggaggcccaccagaaggccagagagaagtacggccacctgctgtggaagaagagaagcatcctgagattcctggagagaaaggagcagatccccctgaagcccaaggagaagagagagagagacagcaacgtgctgagcgtgatcatcaagggcgacgtggacggcagcgtggaggccatcctgaacatcatcgacacctacgacgccagccacgagtgcgagctggagctggtgcacttcggcgtgggcgacgtgagcgccaacgacgtgaacctggccgagaccttcgacggcgtgatctacggcttcaacgtgaacgccggcaacgtgatccagcagagcgccgccaagaagggcgtgaagatcaagctgcacaagatcatctacagactggtggaggacctgcaggaggagctgagcagcagactgccctgcgccgtggaggagcaccccgtgggcgaggccagcatcctggccaccttcagcgtgaccgagggcaagaagaaggtgcccgtggccggctgcagagtgcagaagggccagctggagaagcagaagaagttcaagctgaccagaaacggccacgtgatctggaagggcagcctgaccagcctgaagcaccacaaggacgacatcagcatcgtgaagaccggcatggactgcggcctgagcctggacgaggacaacatggagttccaggtgggcgacagaatcgtgtgctacgaggagaagcagatccaggccaagaccagctgggaccccggcttctag

SEQ ID NO: 89297 - DNA, 219 bp, synthetic construct
  misc_feature 1..219: note = Description of Artificial Sequence: Synthetic coding sequence
  source 1..219: mol_type = other DNA
atgaaccagaagctgctgaagctggagaacctgctgagattccacaccatctacagacagctgcacagcctgtgccagagaagagccctgagacagtggagacacggcttcagcagcgcctaccccgtgtggaccgcccagctgtgcgcctggccctggcccaccgacgtgctgaccggcgccgccctgagccagtacagactgctggtgaccaagtag

SEQ ID NO: 89298 - DNA, 2184 bp, synthetic construct; identical to SEQ ID NO: 89296
  misc_feature 1..2184: note = Description of Artificial Sequence: Synthetic coding sequence
  source 1..2184: mol_type = other DNA

SEQ ID NO: 89299 - DNA, 2184 bp, synthetic construct; identical to SEQ ID NO: 89296
  misc_feature 1..2184: note = Description of Artificial Sequence: Synthetic coding sequence
  source 1..2184: mol_type = other DNA

SEQ ID NO: 89300 - DNA, 213 bp, synthetic construct
  misc_feature 1..213: note = Description of Artificial Sequence: Synthetic coding sequence
  source 1..213: mol_type = other DNA
atgaaccagaagctgctgaagctggagaacctgctgagattccacaccatctacagacagctgcacagcctgtgccagagaagagccctgagacagtggagacacggcttcagcagcgcctaccccgtgtggaccgcccagctgtgcgcctggccctggcccaccgacgtgctgaccggcgccgccctgagccagtacagactgctggtgtag

SEQ ID NO: 89301 - DNA, 24 bp, synthetic construct
  misc_feature 1..24: note = Description of Artificial Sequence: Synthetic coding sequence
  source 1..24: mol_type = other DNA
atgaaccagaagctgctgaagtag

SEQ ID NO: 89302 - DNA, 33 bp, synthetic construct
  misc_feature 1..33: note = Description of Artificial Sequence: Synthetic coding sequence
  source 1..33: mol_type = other DNA
atgaaccagaagctgctgaagctggagaactag

SEQ ID NO: 89303 - DNA, 81 bp, synthetic construct
  misc_feature 1..81: note = Description of Artificial Sequence: Synthetic coding sequence
  source 1..81: mol_type = other DNA
atgaaccagaagctgctgaagctggagaacctgctgagattccacaccatctacagacagctgcacagcctgtgccagtag

SEQ ID NO: 89304 - DNA, 216 bp, synthetic construct
  misc_feature 1..216: note = Description of Artificial Sequence: Synthetic coding sequence
  source 1..216: mol_type = other DNA
atgaaccagaagctgctgaagctggagaacctgctgagattccacaccatctacagacagctgcacagcctgtgccagagaagagccctgagacagtggagacacggcttcagcagcgcctaccccgtgtggaccgcccagctgtgcgcctggccctggcccaccgacgtgctgaccggcgccgccctgagccagtacagactgctggtgacctag

SEQ ID NO: 89305 - DNA, 1398 bp, synthetic construct
  misc_feature 1..1398: note = Description of Artificial Sequence: Synthetic coding sequence
  source 1..1398: mol_type = other DNA
atgaaccagaagctgctgaagctggagaacctgctgagattccacaccatctacagacagctgcacagcctgtgccagagaagagccctgagacagtggagacacggcttcagcagcgcctaccccgtgtggaccgcccagctgtgcgcctggccctggcccaccgacgtgctgaccggcgccgccctgagccagtacagactgctggtgaccaagaaggaggagggcccctggaagagccagctgagcagcaccaagagcaagaaggtggtggaggtgtggatcggcatgaccatcgaggagctggccagagccatggagaagaacaccgactacgtgtacgaggccctgctgaacaccgacatcgacatcgacagcctggaggccgacagccacctggacgaggtgtggatcaaggaggtgatcaccaaggccggcatgaagctgaagtggagcaagctgaagcaggacaaggtgagaaagaacaaggacgccgtgagaagaccccaggccgaccccgccctgctgacccccagaagccccgtggtgaccatcatgggccacgtggaccacggcaagaccaccctgctggacaagttcagaaagacccaggtggccgccgtggagaccggcggcatcacccagcacatcggcgccttcctggtgagcctgcccagcggcgagaagatcaccttcctggacacccccggccacgccgccttcagcgccatgagagccagaggcgcccaggtgaccgacatcgtggtgctggtggtggccgccgacgacggcgtgatgaagcagaccgtggagagcatccagcacgccaaggacgcccaggtgcccatcatcctggccgtgaacaagtgcgacaaggccgaggccgaccccgagaaggtgaagaaggagctgctggcctacgacgtggtgtgcgaggactacggcggcgacgtgcaggccgtgcccgtgagcgccctgaccggcgacaacctgatggccctggccgaggccaccgtggccctggccgagatgctggagctgaaggccgaccccaacggccccgtggagggcaccgtgatcgagagcttcaccgacaagggcagaggcctggtgaccaccgccatcatccagagaggcaccctgagaaagggcagcgtgctggtggccggcaagtgctgggccaaggtgagactgatgttcgacgagaacggcaagaccatcgacgaggcctaccccagcatgcccgtgggcatcaccggctggagagacctgcccagcgccggcgaggagatcctggaggtggagagcgagcccagagccagagaggtggtggactggagaaagtacgagcaggagcaggagaagggccaggaggacctgaagaaggagaagaactag

SEQ ID NO: 89306 - DNA, 456 bp, synthetic construct
  misc_feature 1..456: note = Description of Artificial Sequence: Synthetic coding sequence
  source 1..456: mol_type = other DNA
atgaacagacacctgtgcgtgtggctgttcagacaccccagcctgaacggctacctgcagtgccacatccagctgcacagccaccagttcagacagatccacctggacaccagactgcaggtgttcagacagaacagaaactgcatcctgcacctgctgagcaagaactggagcagaagatactgccaccaggacaccaagatgctgtggaagcacaaggccctgcagaagtacatggagaacctgagcaaggagtaccagaccctggagcagtgcctgcagcacatccccgtgaacgaggagaacagaagaagcctgaacagaagacacgccgagctggcccccctggccgccatctaccaggagatccaggagaccgagcaggccatcgaggagctggagagcatgtgcaagaagaccgagagctgcagcgtggcccaggccggcatgcagtag

SEQ ID NO: 89307 - DNA, 1338 bp, synthetic construct
  misc_feature 1..1338: note = Description of Artificial Sequence: Synthetic coding sequence
  source 1..1338: mol_type = other DNA
atgaacagacacctgtgcgtgtggctgttcagacaccccagcctgaacggctacctgcagtgccacatccagctgcacagccaccagttcagacagatccacctggacaccagactgcaggtgttcagacagaacagaaactgcatcctgcacctgctgagcaagaactggagcagaagatactgccaccaggacaccaagatgctgtggaagcacaaggccctgcagaagtacatggagaacctgagcaaggagtaccagaccctggagcagtgcctgcagcacatccccgtgaacgaggagaacagaagaagcctgaacagaagacacgccgagctggcccccctggccgccatctaccaggagatccaggagaccgagcaggccatcgaggagctggagagcatgtgcaagagcctgaacaagcaggacgagaagcagctgcaggagctggccctggaggagagacagaccatcgaccagaagatcaacatgctgtacaacgagctgttccagagcctggtgcccaaggagaagtacgacaagaacgacgtgatcctggaggtgaccgccggcagaaccaccggcggcgacatctgccagcagttcaccagagagatcttcgacatgtaccagaactacagctgctacaagcactggcagttcgagctgctgaactacacccccgccgactacggcggcctgcaccacgccgccgccagaatcagcggcgacggcgtgtacaagcacctgaagtacgagggcggcatccacagagtgcagagaatccccgaggtgggcctgagcagcagaatgcagagaatccacaccggcaccatgagcgtgatcgtgctgccccagcccgacgaggtggacgtgaagctggaccccaaggacctgagaatcgacaccttcagagccaagggcgccggcggccagcacgtgaacaagaccgacagcgccgtgagactggtgcacatccccaccggcctggtggtggagtgccagcaggagagaagccagatcaagaacaaggagatcgccttcagagtgctgagagccagactgtaccagcagatcatcgagaaggacaagagacagcagcagagcgccagaaagctgcaggtgggcaccagagcccagagcgagagaatcagaacctacaacttcacccaggacagagtgagcgaccacagaatcgcctacgaggtgagagacatcaaggagttcctgtgcggcggcaagggcctggaccagctgatccagagactgctgcagagcgccgacgaggaggccatcgccgagctgctggacgagcacctgaagagcgccaagtag

SEQ ID NO: 89308 - DNA, 1338 bp, synthetic construct; identical to SEQ ID NO: 89307
  misc_feature 1..1338: note = Description of Artificial Sequence: Synthetic coding sequence
  source 1..1338: mol_type = other DNA

SEQ ID NO: 89309 - DNA, 1407 bp, synthetic construct
  misc_feature 1..1407: note = Description of Artificial Sequence: Synthetic coding sequence
  source 1..1407: mol_type = other DNA
atgggcaacggcgaggtggtgctgttcagcgacgccgagatgaacagacacctgtgcgtgtggctgttcagacaccccagcctgaacggctacctgcagtgccacatccagctgcacagccaccagttcagacagatccacctggacaccagactgcaggtgttcagacagaacagaaactgcatcctgcacctgctgagcaagaactggagcagaagatactgccaccaggacaccaagatgctgtggaagcacaaggccctgcagaagtacatggagaacctgagcaaggagtaccagaccctggagcagtgcctgcagcacatccccgtgaacgaggagaacagaagaagcctgaacagaagacacgccgagctggcccccctggccgccatctaccaggagatccaggagaccgagcaggccatcgaggagctggagagcatgtgcaagagcctgaacaagcaggacgagaagcagctgcaggagctggccctggaggagagacagaccatcgaccagaagatcaacatgctgtacaacgagctgttccagagcctggtgcccaaggagaagtacgacaagaacgacgtgatcctggaggtgaccgccggcagaaccaccggcggcgacatctgccagcagttcaccagagagatcttcgacatgtaccagaactacagctgctacaagcactggcagttcgagctgctgaactacacccccgccgactacggcggcctgcaccacgccgccgccagaatcagcggcgacggcgtgtacaagcacctgaagtacgagggcggcatccacagagtgcagagaatccccgaggtgggcctgagcagcagaatgcagagaatccacaccggcaccatgagcgtgatcgtgctgccccagcccgacgaggtggacgtgaagctggaccccaaggacctgagaatcgacaccttcagagccaagggcgccggcggccagcacgtgaacaagaccgacagcgccgtgagactggtgcacatccccaccggcctggtggtggagtgccagcaggagagaagccagatcaagaacaaggagatcgccttcagagtgctgagagccagactgtaccagcagatcatcgagaaggacaagagacagcagcagagcgccagaaagctgcaggtgggcaccagagcccagagcgagagaatcagaacctacaacttcacccaggacagagtgagcgaccacagaatcgcctacgaggtgagagacatcaaggcccagagccacagcaccggcggcagcagagaccccgcccacagcaccttcctgagcctggacagcgtgagaagccccggcatcctgatcatgaccagcagcgtgagaaacttctacgtggtgggcagagcctggatcagctag

SEQ ID NO: 89310 - DNA, 2274 bp, synthetic construct
  misc_feature 1..2274: note = Description of Artificial Sequence: Synthetic coding sequence
  source 1..2274: mol_type = other DNA
atgagcctgctgttcagcagatgcaacagcatcgtgaccgtgaagaagaacaagagacacatggccgaggtgaacgccagccccctgaagcacttcgtgaccgccaagaagaagatcaacggcatcttcgagcagctgggcgcctacatccaggagagcgccaccttcctggaggacacctacagaaacgccgagctggaccccgtgaccaccgaggagcaggtgctggacgtgaagggctacctgagcaaggtgagaggcatcagcgaggtgctggccagaagacacatgaaggtggccttcttcggcagaaccagcaacggcaagagcaccgtgatcaacgccatgctgtgggacaaggtgctgcccagcggcatcggccacaccaccaactgcttcctgagagtggagggcaccgacggccacgaggccttcctgctgaccgagggcagcgaggagaagagaagcgccaagaccgtgaaccagctggcccacgccctgcaccaggacaagcagctgcacgccggcagcctggtgagcgtgatgtggcccaacagcaagtgccccctgctgaaggacgacctggtgctgatggacagccccggcatcgacgtgaccaccgagctggacagctggatcgacaagttctgcctggacgccgacgtgttcgtgctggtggccaacagcgagagcaccctgatgcagaccgagaagcacttcttccacaaggtgagcgagagactgagcagacccaacatcttcatcctgaacaacagatgggacgccagcgccagcgagcccgagtacatggaggaggtgagaagacagcacatggagagatgcaccagcttcctggtggacgagctgggcgtggtggacagaagccaggccggcgacagaatcttcttcgtgagcgccaaggaggtgctgaacgccagaatccagaaggcccagggcatgcccgagggcggcggcgccctggccgagggcttccaggtgagaatgttcgagttccagaacttcgagagaagattcgaggagtgcatcagccagagcgccgtgaagaccaagttcgagcagcacaccgtgagagccaagcagatcgccgaggccgtgagactgatcatggacagcctgcacatggccgccagagagcagcaggtgtactgcgaggagatgagagaggagagacaggacagactgaagttcatcgacaagcagctggagctgctggcccaggactacaagctgagaatcaagcagatcaccgaggaggtggagagacaggtgagcaccgccatggccgaggagatcagaagactgagcgtgctggtggacgactaccagatggacttccaccccagccccgtggtgctgaaggtgtacaagaacgagctgcacagacacatcgaggagggcctgggcagaaacatgagcgacagatgcagcaccgccatcaccaacagcctgcagaccatgcagcaggacatgatcgacggcctgaagcccctgctgcccgtgagcgtgagaagccagatcgacatgctggtgcccagacagtgcttcagcctgaactacgacctgaactgcgacaagctgtgcgccgacttccaggaggacatcgagttccacttcagcctgggctggaccatgctggtgaacagattcctgggccccaagaacagcagaagagccctgatgggctacaacgaccaggtgcagagacccatccccctgacccccgccaaccccagcatgccccccctgccccagggcagcctgacccaggaggagttcatggtgagcatggtgaccggcctggccagcctgaccagcagaaccagcatgggcatcctggtggtgggcggcgtggtgtggaaggccgtgggctggagactgatcgccctgagcttcggcctgtacggcctgctgtacgtgtacgagagactgacctggaccaccaaggccaaggagagagccttcaagagacagttcgtggagcacgccagcgagaagctgcagctggtgatcagctacaccggcagcaactgcagccaccaggtgcagcaggagctgagcggcaccttcgcccacctgtgccagcaggtggacgtgaccagagagaacctggagcaggagatcgccgccatgaacaagaagatcgaggtgctggacagcctgcagagcaaggccaagctgctgagaaacaaggccggctggctggacagcgagctgaacatgttcacccaccagtacctgcagcccagcagatag

SEQ ID NO: 89311 - DNA, 1311 bp, synthetic construct
  misc_feature 1..1311: note = Description of Artificial Sequence: Synthetic coding sequence
  source 1..1311: mol_type = other DNA
atgcacccccacctgagcaccctgagcctgcccagaagaagaagcatggccttcctgagcagctggggcgccctggccgagggcttccaggtgagaatgttcgagttccagaacttcgagagaagattcgaggagtgcatcagccagagcgccgtgaagaccaagttcgagcagcacaccgtgagagccaagcagatcgccgaggccgtgagactgatcatggacagcctgcacatggccgccagagagcagcaggtgtactgcgaggagatgagagaggagagacaggacagactgaagttcatcgacaagcagctggagctgctggcccaggactacaagctgagaatcaagcagatcaccgaggaggtggagagacaggtgagcaccgccatggccgaggagatcagaagactgagcgtgctggtggacgactaccagatggacttccaccccagccccgtggtgctgaaggtgtacaagaacgagctgcacagacacatcgaggagggcctgggcagaaacatgagcgacagatgcagcaccgccatcaccaacagcctgcagaccatgcagcaggacatgatcgacggcctgaagcccctgctgcccgtgagcgtgagaagccagatcgacatgctggtgcccagacagtgcttcagcctgaactacgacctgaactgcgacaagctgtgcgccgacttccaggaggacatcgagttccacttcagcctgggctggaccatgctggtgaacagattcctgggccccaagaacagcagaagagccctgatgggctacaacgaccaggtgcagagacccatccccctgacccccgccaaccccagcatgccccccctgccccagggcagcctgacccaggaggagttcatggtgagcatggtgaccggcctggccagcctgaccagcagaaccagcatgggcatcctggtggtgggcggcgtggtgtggaaggccgtgggctggagactgatcgccctgagcttcggcctgtacggcctgctgtacgtgtacgagagactgacctggaccaccaaggccaaggagagagccttcaagagacagttcgtggagcacgccagcgagaagctgcagctggtgatcagctacaccggcagcaactgcagccaccaggtgcagcaggagctgagcggcaccttcgcccacctgtgccagcaggtggacggcgagaccctgagcgagagaagcatggccaagagcaccctgatgctgctgaccctgctgttcctgtgcagcttcgccggcgcccaggacgtgctgacccagtag

SEQ ID NO: 89312 - DNA, 297 bp, synthetic construct
  misc_feature 1..297: note = Description of Artificial Sequence: Synthetic coding sequence
  source 1..297: mol_type = other DNA
atgagcctgctgttcagcagatgcaacagcatcgtgaccgtgaagaagaacaagagacacatggccgaggtgaacgccagccccctgaagcacttcgtgaccgccaagaagaagatcaacggcatcttcgagcagctgggcgcctacatccaggagagcgccaccttcctggaggacacctacagaaacgccgagctggaccccgtgaccaccgaggagcaggtgctggacgtgaagggctacctgagcaaggtgagaggcatcagcgaggtgctggccagaagacacatgaagtag

SEQ ID NO: 89313 - DNA, 2274 bp, synthetic construct; identical to SEQ ID NO: 89310
  misc_feature 1..2274: note = Description of Artificial Sequence: Synthetic coding sequence
  source 1..2274: mol_type = other DNA

SEQ ID NO: 89314 - DNA, 1395 bp, synthetic construct
  misc_feature 1..1395: note = Description of Artificial Sequence: Synthetic coding sequence
  source 1..1395: mol_type = other DNA
atgagcctgcacttcctgtactactgcagcgagcccaccctggacgtgaagatcgccttctgccagggcttcgacaagcaggtggacgtgagctacatcgccaagcactacaacatgagcaagagcaaggtggacaaccagttctacagcgtggaggtgggcgacagcaccttcaccgtgctgaagagataccagaacctgaagcccatcggcagcggcgcccagggcatcgtgtgcgccgcctacgacgccgtgctggacagaaacgtggccatcaagaagctgagcagacccttccagaaccagacccacgccaagagagcctacagagagctggtgctgatgaagtgcgtgaaccacaagaacatcatcagcctgctgaacgtgttcaccccccagaagaccctggaggagttccaggacgtgtacctggtgatggagctgatggacgccaacctgtgccaggtgatccagatggagctggaccacgagagaatgagctacctgctgtaccagatgctgtgcggcatcaagcacctgcacagcgccggcatcatccacagagacctgaagcccagcaacatcgtggtgaagagcgactgcaccctgaagatcctggacttcggcctggccagaaccgccggcaccagcttcatgatgaccccctacgtggtgaccagatactacagagcccccgaggtgatcctgggcatgggctacaaggagaacgtggacatctggagcgtgggctgcatcatgggcgagatggtgagacacaagatcctgttccccggcagagactacatcgaccagtggaacaaggtgatcgagcagctgggcaccccctgccccgagttcatgaagaagctgcagcccaccgtgagaaactacgtggagaacagacccaagtacgccggcctgaccttccccaagctgttccccgacagcctgttccccgccgacagcgagcacaacaagctgaaggccagccaggccagagacctgctgagcaagatgctggtgatcgaccccgccaagagaatcagcgtggacgacgccctgcagcacccctacatcaacgtgtggtacgaccccgccgaggtggaggccccccccccccagatctacgacaagcagctggacgagagagagcacaccatcgaggagtggaaggagctgatctacaaggaggtgatgaacagcgaggagaagaccaagaacggcgtggtgaagggccagcccagccccagcggcgccgccgtgaacagcagcgagagcctgccccccagcagcagcgtgaacgacatcagcagcatgagcaccgaccagaccctggccagcgacaccgacagcagcctggaggccagcgccggccccctgggctgctgcagatag

SEQ ID NO: 89315 - DNA, 1269 bp, synthetic construct
  misc_feature 1..1269: note = Description of Artificial Sequence: Synthetic coding sequence
  source 1..1269: mol_type = other DNA
atgagcctgcacttcctgtactactgcagcgagcccaccctggacgtgaagatcgccttctgccagggcttcgacaagcaggtggacgtgagctacatcgccaagcactacaacatgagcaagagcaaggtggacaaccagttctacagcgtggaggtgggcgacagcaccttcaccgtgctgaagagataccagaacctgaagcccatcggcagcggcgcccagggcatcgtgtgcgccgcctacgacgccgtgctggacagaaacgtggccatcaagaagctgagcagacccttccagaaccagacccacgccaagagagcctacagagagctggtgctgatgaagtgcgtgaaccacaagaacatcatcagcctgctgaacgtgttcaccccccagaagaccctggaggagttccaggacgtgtacctggtgatggagctgatggacgccaacctgtgccaggtgatccagatggagctggaccacgagagaatgagctacctgctgtaccagatgctgtgcggcatcaagcacctgcacagcgccggcatcatccacagagacctgaagcccagcaacatcgtggtgaagagcgactgcaccctgaagatcctggacttcggcctggccagaaccgccggcaccagcttcatgatgaccccctacgtggtgaccagatactacagagcccccgaggtgatcctgggcatgggctacaaggagaacgtggacatctggagcgtgggctgcatcatgggcgagatggtgagacacaagatcctgttccccggcagagactacatcgaccagtggaacaaggtgatcgagcagctgggcaccccctgccccgagttcatgaagaagctgcagcccaccgtgagaaactacgtggagaacagacccaagtacgccggcctgaccttccccaagctgttccccgacagcctgttccccgccgacagcgagcacaacaagctgaaggccagccaggccagagacctgctgagcaagatgctggtgatcgaccccgccaagagaatcagcgtggacgacgccctgcagcacccctacatcaacgtgtggtacgaccccgccgaggtggaggccccccccccccagatctacgacaagcagctggacgagagagagcacaccatcgaggagtggaaggagctgatctacaaggaggtgatgaacagcgaggagaagaccaagaacggcgtggtgaagggccagcccagccccagcgcccaggtgcagcagtag

SEQ ID NO: 89316 - DNA, 960 bp, synthetic construct
  misc_feature 1..960: note = Description of Artificial Sequence: Synthetic coding sequence
  source 1..960: mol_type = other DNA
atggagctgatggacgccaacctgtgccaggtgatccagatggagctggaccacgagagaatgagctacctgctgtaccagatgctgtgcggcatcaagcacctgcacagcgccggcatcatccacagagacctgaagcccagcaacatcgtggtgaagagcgactgcaccctgaagatcctggacttcggcctggccagaaccgccggcaccagcttcatgatgaccccctacgtggtgaccagatactacagagcccccgaggtgatcctgggcatgggctacaaggagaacgtggacatctggagcgtgggctgcatcatgggcgagatggtgagacacaagatcctgttccccggcagagactacatcgaccagtggaacaaggtgatcgagcagctgggcaccccctgccccgagttcatgaagaagctgcagcccaccgtgagaaactacgtggagaacagacccaagtacgccggcctgaccttccccaagctgttccccgacagcctgttccccgccgacagcgagcacaacaagctgaaggccagccaggccagagacctgctgagcaagatgctggtgatcgaccccgccaagagaatcagcgtggacgacgccctgcagcacccctacatcaacgtgtggtacgaccccgccgaggtggaggccccccccccccagatctacgacaagcagctggacgagagagagcacaccatcgaggagtggaaggagctgatctacaaggaggtgatgaacagcgaggagaagaccaagaacggcgtggtgaagggccagcccagccccagcggcgccgccgtgaacagcagcgagagcctgccccccagcagcagcgtgaacgacatcagcagcatgagcaccgaccagaccctggccagcgacaccgacagcagcctggaggccagcgccggccccctgggctgctgcagatag

SEQ ID NO: 89317 - DNA, 834 bp, synthetic construct
  misc_feature 1..834: note = Description of Artificial Sequence: Synthetic coding sequence
  source 1..834: mol_type = other DNA
atggagctgatggacgccaacctgtgccaggtgatccagatggagctggaccacgagagaatgagctacctgctgtaccagatgctgtgcggcatcaagcacctgcacagcgccggcatcatccacagagacctgaagcccagcaacatcgtggtgaagagcgactgcaccctgaagatcctggacttcggcctggccagaaccgccggcaccagcttcatgatgaccccctacgtggtgaccagatactacagagcccccgaggtgatcctgggcatgggctacaaggagaacgtggacatctggagcgtgggctgcatcatgggcgagatggtgagacacaagatcctgttccccggcagagactacatcgaccagtggaacaaggtgatcgagcagctgggcaccccctgccccgagttcatgaagaagctgcagcccaccgtgagaaactacgtggagaacagacccaagtacgccggcctgaccttccccaagctgttccccgacagcctgttccccgccgacagcgagcacaacaagctgaaggccagccaggccagagacctgctgagcaagatgctggtgatcgaccccgccaagagaatcagcgtggacgacgccctgcagcacccctacatcaacgtgtggtacgaccccgccgaggtggaggccccccccccccagatctacgacaagcagctggacgagagagagcacaccatcgaggagtggaaggagctgatctacaaggaggtgatgaacagcgaggagaagaccaagaacggcgtggtgaagggccagcccagccccagcgcccaggtgcagcagtag

SEQ ID NO: 89318 - DNA, 1269 bp, synthetic construct; identical to SEQ ID NO: 89315
  misc_feature 1..1269: note = Description of Artificial Sequence: Synthetic coding sequence
  source 1..1269: mol_type = other DNA

SEQ ID NO: 89319 - DNA, 1281 bp, synthetic construct
  misc_feature 1..1281: note = Description of Artificial Sequence: Synthetic coding sequence
  source 1..1281: mol_type = other DNA
atgagcaagagcaaggtggacaaccagttctacagcgtggaggtgggcgacagcaccttcaccgtgctgaagagataccagaacctgaagcccatcggcagcggcgcccagggcatcgtgtgcgccgcctacgacgccgtgctggacagaaacgtggccatcaagaagctgagcagacccttccagaaccagacccacgccaagagagcctacagagagctggtgctgatgaagtgcgtgaaccacaagaacatcatcagcctgctgaacgtgttcaccccccagaagaccctggaggagttccaggacgtgtacctggtgatggagctgatggacgccaacctgtgccaggtgatccagatggagctggaccacgagagaatgagctacctgctgtaccagatgctgtgcggcatcaagcacctgcacagcgccggcatcatccacagagacctgaagcccagcaacatcgtggtgaagagcgactgcaccctgaagatcctggacttcggcctggccagaaccgccggcaccagcttcatgatgaccccctacgtggtgaccagatactacagagcccccgaggtgatcctgggcatgggctacaaggagaacgtggacatctggagcgtgggctgcatcatgggcgagatggtgagacacaagatcctgttccccggcagagactacatcgaccagtggaacaaggtgatcgagcagctgggcaccccctgccccgagttcatgaagaagctgcagcccaccgtgagaaactacgtggagaacagacccaagtacgccggcctgaccttccccaagctgttccccgacagcctgttccccgccgacagcgagcacaacaagctgaaggccagccaggccagagacctgctgagcaagatgctggtgatcgaccccgccaagagaatcagcgtggacgacgccctgcagcacccctacatcaacgtgtggtacgaccccgccgaggtggaggccccccccccccagatctacgacaagcagctggacgagagagagcacaccatcgaggagtggaaggagctgatctacaaggaggtgatgaacagcgaggagaagaccaagaacggcgtggtgaagggccagcccagccccagcggcgccgccgtgaacagcagcgagagcctgccccccagcagcagcgtgaacgacatcagcagcatgagcaccgaccagaccctggccagcgacaccgacagcagcctggaggccagcgccggccccctgggctgctgcagatag

SEQ ID NO: 89320 - DNA, 1281 bp, synthetic construct; identical to SEQ ID NO: 89319
  misc_feature 1..1281: note = Description of Artificial Sequence: Synthetic coding sequence
  source 1..1281: mol_type = other DNA

SEQ ID NO: 89321 - DNA, 960 bp, synthetic construct
  misc_feature 1..960: note = Description of Artificial Sequence: Synthetic coding sequence
  source 1..960: mol_type = other DNA
atggagctgatggacgccaacctgtgccaggtgatccagatggagctggaccacgagagaatgagctacctgctgtaccagatgctgtgcggcatcaagcacctgcacagcgccggcatcatccacagagacctgaagcccagcaacatcgtggtgaagagcgactgcaccctgaagatcctggacttcggcctggccagaaccgccggcaccagcttcatgatgaccccctacgtggtgaccagatactacagagcccccgaggtgatcctgggcatgggctacaaggagaacgtggacatgtggagcgtgggctgcatcatgggcgagatgatcaagggcgccgtgctgttccccggcaccgaccacatcgaccagtggaacaaggtgatcgagcagctgggcaccccctgccccgagttcatgaagaagctgcagcccaccgtgagaaactacgtggagaacagacccaagtacgccggcctgaccttccccaagctgttccccgacagcctgttccccgccgacagcgagcacaacaagctgaaggccagccaggccagagacctgctgagcaagatgctggtgatcgaccccgccaagagaatcagcgtggacgacgccctgcagcacccctacatcaacgtgtggtacgaccccgccgaggtggaggccccccccccccagatctacgacaagcagctggacgagagagagcacaccatcgaggagtggaaggagctgatctacaaggaggtgatgaacagcgaggagaagaccaagaacggcgtggtgaagggccagcccagccccagcggcgccgccgtgaacagcagcgagagcctgccccccagcagcagcgtgaacgacatcagcagcatgagcaccgaccagaccctggccagcgacaccgacagcagcctggaggccagcgccggccccctgggctgctgcagatag

SEQ ID NO: 89322 - DNA, 102 bp, synthetic construct
  misc_feature 1..102: note = Description of Artificial Sequence: Synthetic coding sequence
  source 1..102: mol_type = other DNA
atgagcaagagcaaggtggacaaccagttctacagcgtggaggtgggcgacagcaccttcaccgtgctgaagagataccagaacctgaagcccatcggctag

SEQ ID NO: 89323 - DNA, 156 bp, synthetic construct
  misc_feature 1..156: note = Description of Artificial Sequence: Synthetic coding sequence
  source 1..156: mol_type = other DNA
atgagcctgcacttcctgtactactgcagcgagcccaccctggacgtgaagatcgccttctgccagggcttcgacaagcaggtggacgtgagctacatcgccaagcactacaacatgagcaagagcaaggtggacaaccagttctacagcgtgtag

SEQ ID NO: 89324 - DNA, 276 bp, synthetic construct
  misc_feature 1..276: note = Description of Artificial Sequence: Synthetic coding sequence
  source 1..276: mol_type = other DNA
atgagcctgcacttcctgtactactgcagcgagcccaccctggacgtgaagatcgccttctgccagggcttcgacaagcaggtggacgtgagctacatcgccaagcactacaacatgagcaagagcaaggtggacaaccagttctacagcgtggaggtgggcgacagcaccttcaccgtgctgaagagataccagaacctgaagcccatcggcagcggcgcccagggcatcgtgtgcgccgcctacgacgccgtgctggacagaaacgtggcctag

SEQ ID NO: 89325 - DNA, 225 bp, synthetic construct
  misc_feature 1..225: note = Description of Artificial Sequence: Synthetic coding sequence
  source 1..225: mol_type = other DNA
atgagcaagagcaaggtggacaaccagttctacagcgtggaggtgggcgacagcaccttcaccgtgctgaagagataccagaacctgaagcccatcggcagcggcgcccagggcatcgtgtgcgccgcctacgacgccgtgctggacagaaacgtggccatcaagaagctgagcagacccttccagaaccagacccacgccaagagagcctacagagagctgtag

SEQ ID NO: 89326 - DNA, 366 bp, synthetic construct
  misc_feature 1..366: note = Description of Artificial Sequence: Synthetic coding sequence
  source 1..366: mol_type = other DNA
atgagcctgcacttcctgtactactgcagcgagcccaccctggacgtgaagatcgccttctgccagggcttcgacaagcaggtggacgtgagctacatcgccaagcactacaacatgagcaagagcaaggtggacaaccagttctacagcgtggaggtgggcgacagcaccttcaccgtgctgaagagataccagaacctgaagcccatcggcagcggcgcccagggcatcgtgtgcgccgcctacgacgccgtgctggacagaaacgtggccatcaagaagctgagcagacccttccagaaccagacccacgccaagagagcctacagagagctggtgctgatgaagtgcgtgaaccacaagtag

SEQ ID NO: 89327 - DNA, 354 bp, synthetic construct
  misc_feature 1..354: note = Description of Artificial Sequence: Synthetic coding sequence
  source 1..354: mol_type = other DNA
atgagcctgcacttcctgtactactgcagcgagcccaccctggacgtgaagatcgccttctgccagggcttcgacaagcaggtggacgtgagctacatcgccaagcactacaacatgagcaagagcaaggtggacaaccagttctacagcgtggaggtgggcgacagcaccttcaccgtgctgaagagataccagaacctgaagcccatcggcagcggcgcccagggcatcgtgtgcgccgcctacgacgccgtgctggacagaaacgtggccatcaagaagctgagcagacccttccagaaccagacccacgccaagagagcctacagagagctggtgctgatgaagtgctag

SEQ ID NO: 89328 - DNA, 426 bp, synthetic construct
  misc_feature 1..426: note = Description of Artificial Sequence: Synthetic coding sequence
  source 1..426: mol_type = other DNA
atgagcctgcacttcctgtactactgcagcgagcccaccctggacgtgaagatcgccttctgccagggcttcgacaagcaggtggacgtgagctacatcgccaagcactacaacatgagcaagagcaaggtggacaaccagttctacagcgtggaggtgggcgacagcaccttcaccgtgctgaagagataccagaacctgaagcccatcggcagcggcgcccagggcatcgtgtgcgccgcctacgacgccgtgctggacagaaacgtggccatcaagaagctgagcagacccttccagaaccagacccacgccaagagagcctacagagagctggtgctgatgaagtgcgtgaaccacaagaacatcatcagcctgctgaacgtgttcaccccccagaagaccctggaggagttccaggactag

SEQ ID NO: 89329 - DNA, 255 bp, synthetic construct
  misc_feature 1..255: note = Description of Artificial Sequence: Synthetic coding sequence
  source 1..255: mol_type = other DNA
atgagcaagagcaaggtggacaaccagttctacagcgtggaggtgggcgacagcaccttcaccgtgctgaagagataccagaacctgaagcccatcggcagcggcgcccagggcatcgtgtgcgccgcctacgacgccgtgctggacagaaacgtggccatcaagaagctgagcagacccttccagaaccagacccacgccaagagagcctacagagagctggtgctgatgaagtgcgtgaaccacaagaactag

SEQ ID NO: 89330 - DNA, 159 bp, synthetic construct
  misc_feature 1..159: note = Description of Artificial Sequence: Synthetic coding sequence
  source 1..159: mol_type = other DNA
atgagcaagagcaaggtggacaaccagttctacagcgtggaggtgggcgacagcaccttcaccgtgctgaagagataccagaacctgaagcccatcggcagcggcgcccagggcatcgtgtgcgccgcctacgacgccgtgctggacagaaacgtgtag

SEQ ID NO: 89331 - DNA, 147 bp, synthetic construct
  misc_feature 1..147: note = Description of Artificial Sequence: Synthetic coding sequence
  source 1..147: mol_type = other DNA
atgagcctgcacttcctgtactactgcagcgagcccaccctggacgtgaagatcgccttctgccagggcttcgacaagcaggtggacgtgagctacatcgccaagcactacaacatgagcaagagcaaggtggacaaccagttctag

SEQ ID NO: 89332 - DNA, 1008 bp, synthetic construct
  misc_feature 1..1008: note = Description of Artificial Sequence: Synthetic coding sequence
  source 1..1008: mol_type = other DNA
tgaaacgtggccatcaagaagctgagcagacccttccagaaccagacccacgccaagagagcctacagagagctggtgctgatgaagtgcgtgaaccacaagaacatcatcagcctgctgaacgtgttcaccccccagaagaccctggaggagttccaggacgtgtacctggtgatggagctgatggacgccaacctgtgccaggtgatccagatggagctggaccacgagagaatgagctacctgctgtaccagatgctgtgcggcatcaagcacctgcacagcgccggcatcatccacagagacctgaagcccagcaacatcgtggtgaagagcgactgcaccctgaagatcctggacttcggcctggccagaaccgccggcaccagcttcatgatgaccccctacgtggtgaccagatactacagagcccccgaggtgatcctgggcatgggctacaaggagaacgtggacatgtggagcgtgggctgcatcatgggcgagatgatcaagggcgccgtgctgttccccggcaccgaccacatcgaccagtggaacaaggtgatcgagcagctgggcaccccctgccccgagttcatgaagaagctgcagcccaccgtgagaaactacgtggagaacagacccaagtacgccggcctgaccttccccaagctgttccccgacagcctgttccccgccgacagcgagcacaacaagctgaaggccagccaggccagagacctgctgagcaagatgctggtgatcgaccccgccaagagaatcagcgtggacgacgccctgcagcacccctacatcaacgtgtggtacgaccccgccgaggtggaggccccccccccccagatctacgacaagcagctggacgagagagagcacaccatcgaggagtggaaggagctgatctacaaggaggtgatgaacagcgaggagaagaccaagaacggcgtggtgaagggccagcccagccccagcgcccaggtgcagcagtag

SEQ ID NO: 89333 - DNA, 1764 bp, synthetic construct
  misc_feature 1..1764: note = Description of Artificial Sequence: Synthetic coding sequence
  source 1..1764: mol_type = other DNA
atggccgagaagggcgactgcatcgccagcgtgtacggctacgacctgggcggcagattcgtggacttccagcccctgggcttcggcgtgaacggcctggtgctgagcgccgtggacagcagagcctgcagaaaggtggccgtgaagaagatcgccctgagcgacgccagaagcatgaagcacgccctgagagagatcaagatcatcagaagactggaccacgacaacatcgtgaaggtgtacgaggtgctgggccccaagggcaccgacctgcagggcgagctgttcaagttcagcgtggcctacatcgtgcaggagtacatggagaccgacctggccagactgctggagcagggcaccctggccgaggagcacgccaagctgttcatgtaccagctgctgagaggcctgaagtacatccacagcgccaacgtgctgcacagagacctgaagcccgccaacatcttcatcagcaccgaggacctggtgctgaagatcggcgacttcggcctggccagaatcgtggaccagcactacagccacaagggctacctgagcgagggcctggtgaccaagtggtacagaagccccagactgctgctgagccccaacaactacaccaaggccatcgacatgtgggccgccggctgcatcctggccgagatgctgaccggcagaatgctgttcgccggcgcccacgagctggagcagatgcagctgatcctggagaccatccccgtgatcagagaggaggacaaggacgagctgctgagagtgatgcccagcttcgtgagcagcacctgggaggtgaagagacccctgagaaagctgctgcccgaggtgaacagcgaggccatcgacttcctggagaagatcctgaccttcaaccccatggacagactgaccgccgagatgggcctgcagcacccctacatgagcccctacagctgccccgaggacgagcccaccagccagcaccccttcagaatcgaggacgagatcgacgacatcgtgctgatggccgccaaccagagccagctgagcaactgggacacctgcagcagcagataccccgtgagcctgagcagcgacctggagtggagacccgacagatgccaggacgccagcgaggtgcagagagaccccagagccggcagcgcccccctggccgaggacgtgcaggtggaccccagaaaggacagccacagcagcagcgagagattcctggagcagagccacagcagcatggagagagccttcgaggccgactacggcagaagctgcgactacaaggtgggcagccccagctacctggacaagctgctgtggagagacaacaagccccaccactacagcgagcccaagctgatcctggacctgagccactggaagcaggccgccggcgccccccccaccgccaccggcctggccgacaccggcgccagagaggacgagcccgccagcctgttcctggagatcgcccagtgggtgaagagcacccagggcggccccgagcacgccagcccccccgccgacgaccccgagagaagactgagcgccagcccccccggcagacccgcccccgtggacggcggcgccagcccccagttcgacctggacgtgttcatcagcagagccctgaagctgtgcaccaagcccgaggacctgcccgacaacaagctgggcgacctgaacggcgcctgcatccccgagcaccccggcgacctggtgcagaccgaggccttcagcaaggagagatggtag

SEQ ID NO: 89334 - DNA, 1131 bp, synthetic construct
  misc_feature 1..1131: note = Description of Artificial Sequence: Synthetic coding sequence
  source 1..1131: mol_type = other DNA
atgtgggccgccggctgcatcctggccgagatgctgaccggcagaatgctgttcgccggcgcccacgagctggagcagatgcagctgatcctggagaccatccccgtgatcagagaggaggacaaggacgagctgctgagagtgatgcccagcttcgtgagcagcacctgggaggtgaagagacccctgagaaagctgctgcccgaggtgaacagcgaggccatcgacttcctggagaagatcctgaccttcaaccccatggacagactgaccgccgagatgggcctgcagcacccctacatgagcccctacagctgccccgaggacgagcccaccagccagcaccccttcagaatcgaggacgagatcgacgacatcgtgctgatggccgccaaccagagccagctgagcaactgggacacctgcagcagcagataccccgtgagcctgagcagcgacctggagtggagacccgacagatgccaggacgccagcgaggtgcagagagaccccagagccggcagcgcccccctggccgaggacgtgcaggtggaccccagaaaggacagccacagcagcagcgagagattcctggagcagagccacagcagcatggagagagccttcgaggccgactacggcagaagctgcgactacaaggtgggcagccccagctacctggacaagctgctgtggagagacaacaagccccaccactacagcgagcccaagctgatcctggacctgagccactggaagcaggccgccggcgccccccccaccgccaccggcctggccgacaccggcgccagagaggacgagcccgccagcctgttcctggagatcgcccagtgggtgaagagcacccagggcggccccgagcacgccagcccccccgccgacgaccccgagagaagactgagcgccagcccccccggcagacccgcccccgtggacggcggcgccagcccccagttcgacctggacgtgttcatcagcagagccctgaagctgtgcaccaagcccgaggacctgcccgacaacaagctgggcgacctgaacggcgcctgcatccccgagcaccccggcgacctggtgcagaccgaggccttcagcaaggagagatggtag

SEQ ID NO: 89335 - DNA, 2034 bp, synthetic construct
  misc_feature 1..2034: note = Description of Artificial Sequence: Synthetic coding sequence
  source 1..2034: mol_type = other DNA
atggagagcgacctgcaccagatcatccacagcagccagcccctgaccctggagcacgtgagatacttcctgtaccagctgctgagaggcctgaagtacatgcacagcgcccaggtgatccacagagacctgaagcccagcaacctgctggtgaacgagaactgcgagctgaagatcggcgacttcggcatggccagaggcctgtgcaccagccccgccgagcaccagtacttcatgaccgagtacgtggccaccagatggtacagagcccccgagctgatgctgagcctgcacgagtacacccaggccatcgacctgtggagcgtgggctgcatcttcggcgagatgctggccagaagacagctgttccccggcaagaactacgtgcaccagctgcagctgatcatgatggtgctgggcacccccagccccgccgtgatccaggccgtgggcgccgagagagtgagagcctacatccagagcctgccccccagacagcccgtgccctgggagaccgtgtaccccggcgccgacagacaggccctgagcctgctgggcagaatgctgagattcgagcccagcgccagaatcagcgccgccgccgccctgagacaccccttcctggccaagtaccacgaccccgacgacgagcccgactgcgccccccccttcgacttcgccttcgacagagaggccctgaccagagagagaatcaaggaggccatcgtggccgagatcgaggacttccacgccagaagagagggcatcagacagcagatcagattccagcccagcctgcagcccgtggccagcgagcccggctgccccgacgtggagatgcccagcccctgggcccccagcggcgactgcgccatggagagccccccccccgccccccccccctgccccggccccgcccccgacaccatcgacctgaccctgcagccccccccccccgtgagcgagcccgccccccccaagaaggacggcgccatcagcgacaacaccaaggccgccctgaaggccgccctgctgaagagcctgagaagcagactgagagacggccccagcgcccccctggaggcccccgagcccagaaagcccgtgaccgcccaggagagacagagagagagagaggagaagagaagaagaagacaggagagagccaaggagagagagaagagaagacaggagagagagagaaaggagagaggcgccggcgccagcggcggccccagcaccgaccccctggccggcctggtgctgagcgacaacgacagaagcctgctggagagatggaccagaatggccagacccgccgcccccgccctgaccagcgtgcccgcccccgcccccgcccccacccccacccccacccccgtgcagcccaccagccccccccccggccccgtggcccagcccaccggcccccagccccagagcgccggcagcaccagcggccccgtgccccagcccgcctgccccccccccggccccgccccccaccccaccggcccccccggccccatccccgtgcccgcccccccccagatcgccaccagcaccagcctgctggccgcccagagcctggtgcccccccccggcctgcccggcagcagcacccccggcgtgctgccctacttcccccccggcctgcccccccccgacgccggcggcgccccccagagcagcatgagcgagagccccgacgtgaacctggtgacccagcagctgagcaagagccaggtggaggaccccctgccccccgtgttcagcggcacccccaagggcagcggcgccggctacggcgtgggcttcgacctggaggagttcctgaaccagagcttcgacatgggcgtggccgacggcccccaggacggccaggccgacagcgccagcctgagcgccagcctgctggccgactggctggagggccacggcatgaaccccgccgacatcgagagcctgcagagagagatccagatggacagccccatgctgctggccgacctgcccgacctgcaggacccctag

SEQ ID NO: 89336 - DNA, 2451 bp, synthetic construct
  misc_feature 1..2451: note = Description of Artificial Sequence: Synthetic coding sequence
  source 1..2451: mol_type = other DNA
atggccgagcccctgaaggaggaggacggcgaggacggcagcgccgagccccccggccccgtgaaggccgagcccgcccacaccgccgccagcgtggccgccaagaacctggccctgctgaaggccagaagcttcgacgtgaccttcgacgtgggcgacgagtacgagatcatcgagaccatcggcaacggcgcctacggcgtggtgagcagcgccagaagaagactgaccggccagcaggtggccatcaagaagatccccaacgccttcgacgtggtgaccaacgccaagagaaccctgagagagctgaagatcctgaagcacttcaagcacgacaacatcatcgccatcaaggacatcctgagacccaccgtgccctacggcgagttcaagagcgtgtacgtggtgctggacctgatggagagcgacctgcaccagatcatccacagcagccagcccctgaccctggagcacgtgagatacttcctgtaccagctgctgagaggcctgaagtacatgcacagcgcccaggtgatccacagagacctgaagcccagcaacctgctggtgaacgagaactgcgagctgaagatcggcgacttcggcatggccagaggcctgtgcaccagccccgccgagcaccagtacttcatgaccgagtacgtggccaccagatggtacagagcccccgagctgatgctgagcctgcacgagtacacccaggccatcgacctgtggagcgtgggctgcatcttcggcgagatgctggccagaagacagctgttccccggcaagaactacgtgcaccagctgcagctgatcatgatggtgctgggcacccccagccccgccgtgatccaggccgtgggcgccgagagagtgagagcctacatccagagcctgccccccagacagcccgtgccctgggagaccgtgtaccccggcgccgacagacaggccctgagcctgctgggcagaatgctgagattcgagcccagcgccagaatcagcgccgccgccgccctgagacaccccttcctggccaagtaccacgaccccgacgacgagcccgactgcgccccccccttcgacttcgccttcgacagagaggccctgaccagagagagaatcaaggaggccatcgtggccgagatcgaggacttccacgccagaagagagggcatcagacagcagatcagattccagcccagcctgcagcccgtggccagcgagcccggctgccccgacgtggagatgcccagcccctgggcccccagcggcgactgcgccatggagagccccccccccgccccccccccctgccccggccccgcccccgacaccatcgacctgaccctgcagccccccccccccgtgagcgagcccgccccccccaagaaggacggcgccatcagcgacaacaccaaggccgccctgaaggccgccctgctgaagagcctgagaagcagactgagagacggccccagcgcccccctggaggcccccgagcccagaaagcccgtgaccgcccaggagagacagagagagagagaggagaagagaagaagaagacaggagagagccaaggagagagagaagagaagacaggagagagagagaaaggagagaggcgccggcgccagcggcggccccagcaccgaccccctggccggcctggtgctgagcgacaacgacagaagcctgctggagagatggaccagaatggccagacccgccgcccccgccctgaccagcgtgcccgcccccgcccccgcccccacccccacccccacccccgtgcagcccaccagccccccccccggccccgtggcccagcccaccggcccccagccccagagcgccggcagcaccagcggccccgtgccccagcccgcctgccccccccccggccccgccccccaccccaccggcccccccggccccatccccgtgcccgcccccccccagatcgccaccagcaccagcctgctggccgcccagagcctggtgcccccccccggcctgcccggcagcagcacccccggcgtgctgccctacttcccccccggcctgcccccccccgacgccggcggcgccccccagagcagcatgagcgagagccccgacgtgaacctggtgacccagcagctgagcaagagccaggtggaggaccccctgccccccgtgttcagcggcacccccaagggcagcggcgccggctacggcgtgggcttcgacctggaggagttcctgaaccagagcttcgacatgggcgtggccgacggcccccaggacggccaggccgacagcgccagcctgagcgccagcctgctggccgactggctggagggccacggcatgaaccccgccgacatcgagagcctgcagagagagatccagatggacagccccatgctgctggccgacctgcccgacctgcaggacccctag

SEQ ID NO: 89337 - DNA, 2451 bp, synthetic construct; identical to SEQ ID NO: 89336
  misc_feature 1..2451: note = Description of Artificial Sequence: Synthetic coding sequence
  source 1..2451: mol_type = other DNA

SEQ ID NO: 89338 - DNA, 2451 bp, synthetic construct; identical to SEQ ID NO: 89336
  misc_feature 1..2451: note = Description of Artificial Sequence: Synthetic coding sequence
  source 1..2451: mol_type = other DNA

SEQ ID NO: 89339 - DNA, 726 bp, synthetic construct
  misc_feature 1..726: note = Description of Artificial Sequence: Synthetic coding sequence
  source 1..726: mol_type = other DNA
atggccgagcccctgaaggaggaggacggcgaggacggcagcgccgagccccccggccccgtgaaggccgagcccgcccacaccgccgccagcgtggccgccaagaacctggccctgctgaaggccagaagcttcgacgtgaccttcgacgtgggcgacgagtacgagatcatcgagaccatcggcaacggcgcctacggcgtggtgagcagcgccagaagaagactgaccggccagcaggtggccatcaagaagatccccaacgccttcgacgtggtgaccaacgccaagagaaccctgagagagctgaagatcctgaagcacttcaagcacgacaacatcatcgccatcaaggacatcctgagacccaccgtgccctacggcgagttcaagagcgtgtacgtggtgctggacctgatggagagcgacctgcaccagatcatccacagcagccagcccctgaccctggagcacgtgagatacttcctgtaccagctgctgagaggcctgaagtacatgcacagcgcccaggtgatccacagagacctgaagcccagcaacctgctggtgaacgagaactgcgagctgaagatcggcgacttcggcatggccagaggcctgtgcaccagccccgccgagcaccagtacttcatgaccgagtacgtggccaccagatggtacagagcccccgagctgatgctgagcctgcacgagtacacccagtag

SEQ ID NO: 89340 - DNA, 2136 bp, synthetic construct
  misc_feature 1..2136: note = Description of Artificial Sequence: Synthetic coding sequence
  source 1..2136: mol_type = other DNA
atggccgagagagagagcggcggcctgggcggcggcgccgccagcccccccgccgccagccccttcctgggcctgcacatcgccagcccccccaacttcagactgacccacgacatcagcctggaggagttcgaggacgaggacctgagcgagatcaccgacgagtgcggcatcagcctgcagtgcaaggacaccctgagcctgagaccccccagagccggcctgctgagcgccggcggcggcggcgccggcagcagactgcaggccgagatgctgcagatggacctgatcgacgccaccggcgacacccccggcgccgaggacgacgaggaggacgacgacgaggagagagccgccagaagacccggcgccggcccccccaaggccgagagcggccaggagcccgccagcagaggccagggccagagccagggccagagccagggccccggcagcggcgacacctacagacccaagagacccaccaccctgaacctgttcccccaggtgcccagaagccaggacaccctgaacaacaacagcctgggcaagaagcacagctggcaggacagagtgagcagaagcagcagccccctgaagaccggcgagcagacccccccccacgagcacatctgcctgagcgacgagctgcccccccagagcggccccgcccccaccaccgacagaggcaccagcaccgacagcccctgcagaagaagcaccgccacccagatggccccccccggcggcccccccgccgccccccccggcggcagaggccacagccacagagacagaatccactaccaggccgacgtgagactggaggccaccgaggagatctacctgacccccgtgcagagaccccccgacgccgccgagcccaccagcgccttcctgccccccaccgagagcagaatgagcgtgagcagcgaccccgaccccgccgcctaccccagcaccgccggcagaccccaccccagcatcagcgaggaggaggagggcttcgactgcctgagcagccccgagagagccgagccccccggcggcggctggagaggcagcctgggcgagcccccccccccccccagagccagcctgagcagcgacaccagcgccctgagctacgacagcgtgaagtacaccctggtggtggacgagcacgcccagctggagctggtgagcctgagaccctgcttcggcgactacagcgacgagagcgacagcgccaccgtgtacgacaactgcgccagcgtgagcagcccctacgagagcgccatcggcgaggagtacgaggaggcccccagaccccagccccccgcctgcctgagcgaggacagcacccccgacgagcccgacgtgcacttcagcaagaagttcctgaacgtgttcatgagcggcagaagcagaagcagcagcgccgagagcttcggcctgttcagctgcatcatcaacggcgaggagcaggagcagacccacagagccatcttcagattcgtgcccagacacgaggacgagctggagctggaggtggacgaccccctgctggtggagctgcaggccgaggactactggtacgaggcctacaacatgagaaccggcgccagaggcgtgttccccgcctactacgccatcgaggtgaccaaggagcccgagcacatggccgccctggccaagaacagcgactgggtggaccagttcagagtgaagttcctgggcagcgtgcaggtgccctaccacaagggcaacgacgtgctgtgcgccgccatgcagaagatcgccaccaccagaagactgaccgtgcacttcaacccccccagcagctgcgtgctggagatcagcgtgagaggcgtgaagatcggcgtgaaggccgacgacagccaggaggccaagggcaacaagtgcagccacttcttccagctgaagaacatcagcttctgcggctaccaccccaagaacaacaagtacttcggcttcatcaccaagcaccccgccgaccacagattcgcctgccacgtgttcgtgagcgaggacagcaccaaggccctggccgagagcgtgggcagagccttccagcagttctacaagcagttcgtggagtacacctgccccaccgaggacatctacctggagtag

SEQ ID NO: 89341 - DNA, 1797 bp, synthetic construct
  misc_feature 1..1797: note = Description of Artificial Sequence: Synthetic coding sequence
  source 1..1797: mol_type = other DNA
atgctgcccgacttccccagccccagcacctgggcccccggcctgctgctgcccagcggccccgccctgctgagccccagcgtgctgcaggacagcctgagcctgggcagaagcgagcagccccaccccatctgcagcttccaggacgacttccaggagttcgagatgatcgacgacaacgaggaggaggacgacgaggacgaggaggaggaggaggaggaggaggagggcgacggcgagggccaggagggcggcgaccccggcagcgaggcccccgcccccggccccctgatccccagccccagcgtggaggagccccacaagcacagacccaccaccctgagactgaccaccctgggcgcccaggacagccaggaccccgaggccgccgccggccccggcggcgtggagctggtggacatggagaccctgaaccccaccagagacaccatcacccccctgtgggccgcccccggcagagccgccagacccggcagagcctgcagcgccgcctgcagcgaggaggaggacgaggaggacgacgaggaggaggaggacgccgaggacagcgccggcagccccggcggcagaggcaccggccccagcgcccccagagacgccagcctggtgtacgacgccgtgaagtacaccctggtggtggacgagcacacccagctggagctggtgagcctgagaagatgcgccggcctgggccacgacagcgaggaggacagcggcggcgaggccagcgaggaggaggccggcgccgccctgctgggcggcggccaggtgagcggcgacaccagccccgacagccccgacctgaccttcagcaagaagttcctgaacgtgttcgtgaacagcaccagcagaagcagcagcaccgagagcttcggcctgttcagctgcctggtgaacggcgaggagagagagcagacccacagagccgtgttcagattcatccccagacaccccgacgagctggagctggacgtggacgaccccgtgctggtggaggccgaggaggacgacttctggttcagaggcttcaacatgagaaccggcgagagaggcgtgttccccgccttctacgcccacgccgtgcccggccccgccaaggacctgctgggcagcaagagaagcccctgctgggtggagagattcgacgtgcagttcctgggcagcgtggaggtgccctgccaccagggcaacggcatcctgtgcgccgccatgcagaagatcgccaccgccagaaagctgaccgtgcacctgagaccccccgccagctgcgacctggagatcagcctgagaggcgtgaagctgagcctgagcggcggcggccccgagttccagagatgcagccacttcttccagatgaagaacatcagcttctgcggctgccaccccagaaacagctgcgaggccccccagggcgccgccttccagtgggagagaggcgtggacagaaagagagtgctgcagaccagaggcaacgtgcagccccacctgggcgccggccagggcgccgccctgaacagagccaccgagggcagcagcaccggcagcgagaagggcgagtggacccccctggtgatcatggagctgacccagagcgtgaacagctgctacttcggcttcatcaccaagcaccccctgctgagcagattcgcctgccacgtgttcgtgagccaggagagcatgagacccgtggcccagagcgtgggcagagccttcctggagtactaccaggagcacctggcctacgcctgccccaccgaggacatctacctggagtag

SEQ ID NO: 89342 - DNA, 2472 bp, synthetic construct
  misc_feature 1..2472: note = Description of Artificial Sequence: Synthetic coding sequence
  source 1..2472: mol_type = other DNA
atggccgacagagccgagatgttcagcctgagcaccttccacagcctgagcccccccggctgcagacccccccaggacatcagcctggaggagttcgacgacgaggacctgagcgagatcaccgacgactgcggcctgggcctgagctacgacagcgaccactgcgagaaggacagcctgagcctgggcagaagcgagcagccccaccccatctgcagcttccaggacgacttccaggagttcgagatgatcgacgacaacgaggaggaggacgacgaggacgaggaggaggaggaggaggaggaggagggcgacggcgagggccaggagggcggcgaccccggcagcgaggcccccgcccccggccccctgatccccagccccagcgtggaggagccccacaagcacagacccaccaccctgagactgaccaccctgggcgcccaggacagcctgaacaacaacggcggcttcgacctggtgagacccgccagctggcaggagaccgccctgtgcagccccgcccccgaggccctgagagagctgcccggccccctgcccgccaccgacaccggccccggcggcgcccagagccccgtgagacccggctgcgactgcgagggcaacagacccgccgagccccccgcccccggcggcaccagccccagcagcgaccccggcatcgaggccgacctgagaagcagaagcagcggcggcagaggcggcagaagaagcagccaggagctgagcagccccggcagcgacagcgaggacgccggcggcagactgggcagaatgatcagcagcatcagcgagaccgagctggagctgagcagcgacggcggcagcagcagcagcggcagaagcagccacctgaccaacagcatcgaggaggccagcagccccgccagcgagcccgagccccccagagagccccccagaagacccgccttcctgcccgtgggccccgacgacaccaacagcgagtacgagagcggcagcgagagcgagcccgacctgagcgaggacgccgacagcccctggctgctgagcaacctggtgagcagaatgatcagcgagggcagcagccccatcagatgccccggccagtgcctgagccccgcccccagaccccccggcgagcccgtgagccccgccggcggcgccgcccaggacagccaggaccccgaggccgccgccggccccggcggcgtggagctggtggacatggagaccctgtgcgccccccccccccccgcccccgccgcccccagacccggccccgcccagcccggcccctgcctgttcctgagcaaccccaccagagacaccatcacccccctgtgggccgcccccggcagagccgccagacccggcagagcctgcagcgccgcctgcagcgaggaggaggacgaggaggacgacgaggaggaggaggacgccgaggacagcgccggcagccccggcggcagaggcaccggccccagcgcccccagagacgccagcctggtgtacgacgccgtgaagtacaccctggtggtggacgagcacacccagctggagctggtgagcctgagaagatgcgccggcctgggccacgacagcgaggaggacagcggcggcgaggccagcgaggaggaggccggcgccgccctgctgggcggcggccaggtgagcggcgacaccagccccgacagccccgacctgaccttcagcaagaagttcctgaacgtgttcgtgaacagcaccagcagaagcagcagcaccgagagcttcggcctgttcagctgcctggtgaacggcgaggagagagagcagacccacagagccgtgttcagattcatccccagacaccccgacgagctggagctggacgtggacgaccccgtgctggtggaggccgaggaggacgacttctggttcagaggcttcaacatgagaaccggcgagagaggcgtgttccccgccttctacgcccacgccgtgcccggccccgccaaggacctgctgggcagcaagagaagcccctgctgggtggagagattcgacgtgcagttcctgggcagcgtggaggtgccctgccaccagggcaacggcatcctgtgcgccgccatgcagaagatcgccaccgccagaaagctgaccgtgcacctgagaccccccgccagctgcgacctggagatcagcctgagaggcgtgaagctgagcctgagcggcggcggccccgagttccagagatgcagccacttcttccagatgaagaacatcagcttctgcggctgccaccccagaaacagctgctacttcggcttcatcaccaagcaccccctgctgagcagattcgcctgccacgtgttcgtgagccaggagagcatgagacccgtggcccagagcgtgggcagagccttcctggagtactaccaggagcacctggcctacgcctgccccaccgaggacatctacctggagtag

SEQ ID NO: 89343 - DNA, 1335 bp, synthetic construct
  misc_feature 1..1335: note = Description of Artificial Sequence: Synthetic coding sequence
  source 1..1335: mol_type = other DNA
atggccgacagagccgagatgttcagcctgagcaccttccacagcctgagcccccccggctgcagacccccccaggacatcagcctggaggagttcgacgacgaggacctgagcgagatcaccgacgactgcggcctgggcctgagctacgacagcgaccactgcgagaaggacagcctgagcctgggcagaagcgagcagccccaccccatctgcagcttccaggacgacttccaggagttcgagatgatcgacgacaacgaggaggaggaggacgaggaggacgacgaggaggaggaggacgccgaggacagcgccggcagccccggcggcagaggcaccggccccagcgcccccagagacgccagcctggtgtacgacgccgtgaagtacaccctggtggtggacgagcacacccagctggagctggtgagcctgagaagatgcgccggcctgggccacgacagcgaggaggacagcggcggcgaggccagcgaggaggaggccggcgccgccctgctgggcggcggccaggtgagcggcgacaccagccccgacagccccgacctgaccttcagcaagaagttcctgaacgtgttcgtgaacagcaccagcagaagcagcagcaccgagagcttcggcctgttcagctgcctggtgaacggcgaggagagagagcagacccacagagccgtgttcagattcatccccagacaccccgacgagctggagctggacgtggacgaccccgtgctggtggaggccgaggaggacgacttctggttcagaggcttcaacatgagaaccggcgagagaggcgtgttccccgccttctacgcccacgccgtgcccggccccgccaaggacctgctgggcagcaagagaagcccctgctgggtggagagattcgacgtgcagttcctgggcagcgtggaggtgccctgccaccagggcaacggcatcctgtgcgccgccatgcagaagatcgccaccgccagaaagctgaccgtgcacctgagaccccccgccagctgcgacctggagatcagcctgagaggcgtgaagctgagcctgagcggcggcggccccgagttccagagatgcagccacttcttccagatgaagaacatcagcttctgcggctgccaccccagaaacagctgctacttcggcttcatcaccaagcaccccctgctgagcagattcgcctgccacgtgttcgtgagccaggagagcatgagacccgtggcccagagcgtgggcagagccttcctggagtactaccaggagcacctggcctacgcctgccccaccgaggacatctacctggagtag

SEQ ID NO: 89344 - DNA, 1677 bp, synthetic construct
  misc_feature 1..1677: note = Description of Artificial Sequence: Synthetic coding sequence
  source 1..1677: mol_type = other DNA
atgatcagcagcatcagcgagaccgagctggagctgagcagcgacggcggcagcagcagcagcggcagaagcagccacctgaccaacagcatcgaggaggccagcagccccgccagcgagcccgagccccccagagagccccccagaagacccgccttcctgcccgtgggccccgacgacaccaacagcgagtacgagagcggcagcgagagcgagcccgacctgagcgaggacgccgacagcccctggctgctgagcaacctggtgagcagaatgatcagcgagggcagcagccccatcagatgccccggccagtgcctgagccccgcccccagaccccccggcgagcccgtgagccccgccggcggcgccgcccaggacagccaggaccccgaggccgccgccggccccggcggcgtggagctggtggacatggagaccctgtgcgccccccccccccccgcccccgccgcccccagacccggccccgcccagcccggcccctgcctgttcctgagcaaccccaccagagacaccatcacccccctgtgggccgcccccggcagagccgccagacccggcagagcctgcagcgccgcctgcagcgaggaggaggacgaggaggacgacgaggaggaggaggacgccgaggacagcgccggcagccccggcggcagaggcaccggccccagcgcccccagagacgccagcctggtgtacgacgccgtgaagtacaccctggtggtggacgagcacacccagctggagctggtgagcctgagaagatgcgccggcctgggccacgacagcgaggaggacagcggcggcgaggccagcgaggaggaggccggcgccgccctgctgggcggcggccaggtgagcggcgacaccagccccgacagccccgacctgaccttcagcaagaagttcctgaacgtgttcgtgaacagcaccagcagaagcagcagcaccgagagcttcggcctgttcagctgcctggtgaacggcgaggagagagagcagacccacagagccgtgttcagattcatccccagacaccccgacgagctggagctggacgtggacgaccccgtgctggtggaggccgaggaggacgacttctggttcagaggcttcaacatgagaaccggcgagagaggcgtgttccccgccttctacgcccacgccgtgcccggccccgccaaggacctgctgggcagcaagagaagcccctgctgggtggagagattcgacgtgcagttcctgggcagcgtggaggtgccctgccaccagggcaacggcatcctgtgcgccgccatgcagaagatcgccaccgccagaaagctgaccgtgcacctgagaccccccgccagctgcgacctggagatcagcctgagaggcgtgaagctgagcctgagcggcggcggccccgagttccagagatgcagccacttcttccagatgaagaacatcagcttctgcggctgccaccccagaaacagctgctacttcggcttcatcaccaagcaccccctgctgagcagattcgcctgccacgtgttcgtgagccaggagagcatgagacccgtggcccagagcgtgggcagagccttcctggagtactaccaggagcacctggcctacgcctgccccaccgaggacatctacctggagtag

SEQ ID NO: 89345 - DNA, 1677 bp, synthetic construct; identical to SEQ ID NO: 89344
  misc_feature 1..1677: note = Description of Artificial Sequence: Synthetic coding sequence
  source 1..1677: mol_type = other DNA

SEQ ID NO: 89346 - DNA, 1641 bp, synthetic construct
  misc_feature 1..1641: note = Description of Artificial Sequence: Synthetic coding sequence
  source 1..1641: mol_type = other DNA
atggccgacagagccgagatgttcagcctgagcaccttccacagcctgagcccccccggctgcagacccccccaggacatcagcctggaggagttcgacgacgaggacctgagcgagatcaccgacgactgcggcctgggcctgagctacgacagcgaccactgcgagaaggacagcctgagcctgggcagaagcgagcagccccaccccatctgcagcttccaggacgacttccaggagttcgagatgatcgacgacaacgaggaggaggacgacgaggacgaggaggaggaggaggaggaggaggagggcgacggcgagggccaggagggcggcgaccccggcagcgaggcccccgcccccggccccctgatccccagccccagcgtggaggagccccacaagcacagacccaccaccctgagactgaccaccctgggcgcccaggacagcctgaacaacaacggcggcttcgacctggtgagacccgccagctggcaggagaccgccctgtgcagccccgcccccgaggccctgagagagctgcccggccccctgcccgccaccgacaccggccccggcggcgcccagagccccgtgagacccggctgcgactgcgagggcaacagacccgccgagccccccgcccccggcggcaccagccccagcagcgaccccggcatcgaggccgacctgagaagcagaagcagcggcggcagaggcggcagaagaagcagccaggagctgagcagccccggcagcgacagcgaggacgccggcggcagactgggcagaatgatcagcagcatcagcgagaccgagctggagctgagcagcgacggcggcagcagcagcagcggcagaagcagccacctgaccttcagcaagaagttcctgaacgtgttcgtgaacagcaccagcagaagcagcagcaccgagagcttcggcctgttcagctgcctggtgaacggcgaggagagagagcagacccacagagccgtgttcagattcatccccagacaccccgacgagctggagctggacgtggacgaccccgtgctggtggaggccgaggaggacgacttctggttcagaggcttcaacatgagaaccggcgagagaggcgtgttccccgccttctacgcccacgccgtgcccggccccgccaaggacctgctgggcagcaagagaagcccctgctgggtggagagattcgacgtgcagttcctgggcagcgtggaggtgccctgccaccagggcaacggcatcctgtgcgccgccatgcagaagatcgccaccgccagaaagctgaccgtgcacctgagaccccccgccagctgcgacctggagatcagcctgagaggcgtgaagctgagcctgagcggcggcggccccgagttccagagatgcagccacttcttccagatgaagaacatcagcttctgcggctgccaccccagaaacagctgctacttcggcttcatcaccaagcaccccctgctgagcagattcgcctgccacgtgttcgtgagccaggagagcatgagacccgtggcccagagcgtgggcagagccttcctggagtactaccaggagcacctggcctacgcctgccccaccgaggacatctacctggagtag

SEQ ID NO: 89347 - DNA, 1149 bp, synthetic construct
  misc_feature 1..1149: note = Description of Artificial Sequence: Synthetic coding sequence
  source 1..1149: mol_type = other DNA
atgagcgacagcaagtgcgacagccagttctacagcgtgcaggtggccgacagcaccttcaccgtgctgaagagataccagcagctgaagcccatcggcagcggcgcccagggcatcgtgtgcgccgccttcgacaccgtgctgggcatcaacgtggccgtgaagaagctgagcagacccttccagaaccagacccacgccaagagagcctacagagagctggtgctgctgaagtgcgtgaaccacaagaacatcatcagcctgctgaacgtgttcaccccccagaagaccctggaggagttccaggacgtgtacctggtgatggagctgatggacgccaacctgtgccaggtgatccacatggagctggaccacgagagaatgagctacctgctgtaccagatgctgtgcggcatcaagcacctgcacagcgccggcatcatccacagagacctgaagcccagcaacatcgtggtgaagagcgactgcaccctgaagatcctggacttcggcctggccagaaccgcctgcaccaacttcatgatgaccccctacgtggtgaccagatactacagagcccccgaggtgatcctgggcatgggctacaaggagaacgtggacatctggagcgtgggctgcatcatggccgagatggtgctgcacaaggtgctgttccccggcagagactacatcgaccagtggaacaaggtgatcgagcagctgggcacccccagcgccgagttcatgaagaagctgcagcccaccgtgagaaactacgtggagaacagacccaagtaccccggcatcaagttcgaggagctgttccccgactggatcttccccagcgagagcgagagagacaagatcaagaccagccaggccagagacctgctgagcaagatgctggtgatcgaccccgacaagagaatcagcgtggacgaggccctgagacacccctacatcaccgtgtggtacgaccccgccgaggccgaggccccccccccccagatctacgacgcccagctggaggagagagagcacgccatcgaggagtggaaggagctgatctacaaggaggtgatggactgggaggagagaagcaagaacggcgtggtgaaggaccagcccagcgcccagatgcagcagtag

SEQ ID NO: 89348 - DNA, 1149 bp, synthetic construct
  misc_feature 1..1149: note = Description of Artificial Sequence: Synthetic coding sequence
  source 1..1149: mol_type = other DNA
atgagcgacagcaagtgcgacagccagttctacagcgtgcaggtggccgacagcaccttcaccgtgctgaagagataccagcagctgaagcccatcggcagcggcgcccagggcatcgtgtgcgccgccttcgacaccgtgctgggcatcaacgtggccgtgaagaagctgagcagacccttccagaaccagacccacgccaagagagcctacagagagctggtgctgctgaagtgcgtgaaccacaagaacatcatcagcctgctgaacgtgttcaccccccagaagaccctggaggagttccaggacgtgtacctggtgatggagctgatggacgccaacctgtgccaggtgatccacatggagctggaccacgagagaatgagctacctgctgtaccagatgctgtgcggcatcaagcacctgcacagcgccggcatcatccacagagacctgaagcccagcaacatcgtggtgaagagcgactgcaccctgaagatcctggacttcggcctggccagaaccgcctgcaccaacttcatgatgaccccctacgtggtgaccagatactacagagcccccgaggtgatcctgggcatgggctacaaggagaacgtggacatctggagcgtgggctgcatcatgggcgagctggtgaagggctgcgtgatcttccagggcaccgaccacatcgaccagtggaacaaggtgatcgagcagctgggcacccccagcgccgagttcatgaagaagctgcagcccaccgtgagaaactacgtggagaacagacccaagtaccccggcatcaagttcgaggagctgttccccgactggatcttccccagcgagagcgagagagacaagatcaagaccagccaggccagagacctgctgagcaagatgctggtgatcgaccccgacaagagaatcagcgtggacgaggccctgagacacccctacatcaccgtgtggtacgaccccgccgaggccgaggccccccccccccagatctacgacgcccagctggaggagagagagcacgccatcgaggagtggaaggagctgatctacaaggaggtgatggactgggaggagagaagcaagaacggcgtggtgaaggaccagcccagcgcccagatgcagcagtag

SEQ ID NO: 89349 - DNA, 375 bp, synthetic construct
  misc_feature 1..375: note = Description of Artificial Sequence: Synthetic coding sequence
  source 1..375: mol_type = other DNA
atgagcgacagcaagtgcgacagccagttctacagcgtgcaggtggccgacagcaccttcaccgtgctgaagagataccagcagctgaagcccatcggcagcggcgcccagggcatcgtgtggagacaccactgcagcgccctgcccttcatcggcagaatgagacccgtgagcgtgatcgtgaccccctggatcaaccaggagggcatgctgtgcgagggcctgggctggcccagcctgccctggtgcctgaccagcaccgtgtgccccgcccagaacgtgagaatcgtgagcctgaccctgaacgtgagcctgctgcacggcaagaccgtgagcagaagaagcatcaccggccagctgaagtgctgcatctag

SEQ ID NO: 89350 - DNA, 729 bp, synthetic construct
  misc_feature 1..729: note = Description of Artificial Sequence: Synthetic coding sequence
  source 1..729: mol_type = other DNA
atgagcgacagcaagtgcgacagccagttctacagcgtgcaggtggccgacagcaccttcaccgtgctgaagagataccagcagctgaagcccatcggcagcggcgcccagggcatcgtgtgcgccgccttcgacaccgtgctgggcatcaacgtggccgtgaagaagctgagcagacccttccagaaccagacccacgccaagagagcctacagagagctggtgctgctgaagtgcgtgaaccacaagaacatcatcagcctgctgaacgtgttcaccccccagaagaccctggaggagttccaggacgtgtacctggtgatggagctgatggacgccaacctgtgccaggtgatccacatggagctggaccacgagagaatgagctacctgctgtaccagatgctgtgcggcatcaagcacctgcacagcgccggcatcatccacagagacctgaagcccagcaacatcgtggtgaagagcgactgcaccctgaagatcctggacttcggcctggccagaaccgcctgcaccaacttcatgatgaccccctacgtggtgaccagatactacagagcccccgaggtgatcctgggcatgggctacaaggagaacgtggacatctggagcgtgggctgcatcatgggcgagctggtgaagggctgcgtgatcttccagggcaccgacagaatcctgcccagagacctgggccccgccatgctgagctag

SEQ ID NO: 89351 - DNA, 1275 bp, synthetic construct
  misc_feature 1..1275: note = Description of Artificial Sequence: Synthetic coding sequence
  source 1..1275: mol_type = other DNA
atgagcgacagcaagtgcgacagccagttctacagcgtgcaggtggccgacagcaccttcaccgtgctgaagagataccagcagctgaagcccatcggcagcggcgcccagggcatcgtgtgcgccgccttcgacaccgtgctgggcatcaacgtggccgtgaagaagctgagcagacccttccagaaccagacccacgccaagagagcctacagagagctggtgctgctgaagtgcgtgaaccacaagaacatcatcagcctgctgaacgtgttcaccccccagaagaccctggaggagttccaggacgtgtacctggtgatggagctgatggacgccaacctgtgccaggtgatccacatggagctggaccacgagagaatgagctacctgctgtaccagatgctgtgcggcatcaagcacctgcacagcgccggcatcatccacagagacctgaagcccagcaacatcgtggtgaagagcgactgcaccctgaagatcctggacttcggcctggccagaaccgcctgcaccaacttcatgatgaccccctacgtggtgaccagatactacagagcccccgaggtgatcctgggcatgggctacaaggagaacgtggacatctggagcgtgggctgcatcatgggcgagctggtgaagggctgcgtgatcttccagggcaccgaccacatcgaccagtggaacaaggtgatcgagcagctgggcacccccagcgccgagttcatgaagaagctgcagcccaccgtgagaaactacgtggagaacagacccaagtaccccggcatcaagttcgaggagctgttccccgactggatcttccccagcgagagcgagagagacaagatcaagaccagccaggccagagacctgctgagcaagatgctggtgatcgaccccgacaagagaatcagcgtggacgaggccctgagacacccctacatcaccgtgtggtacgaccccgccgaggccgaggccccccccccccagatctacgacgcccagctggaggagagagagcacgccatcgaggagtggaaggagctgatctacaaggaggtgatggactgggaggagagaagcaagaacggcgtggtgaaggaccagcccagcgacgccgccgtgagcagcaacgccacccccagccagagcagcagcatcaacgacatcagcagcatgagcaccgagcagaccctggccagcgacaccgacagcagcctggacgccagcaccggccccctggagggctgcagatag

SEQ ID NO: 89352 - DNA, 1275 bp, synthetic construct
  misc_feature 1..1275: note = Description of Artificial Sequence: Synthetic coding sequence
  source 1..1275: mol_type = other DNA
atgagcgacagcaagtgcgacagccagttctacagcgtgcaggtggccgacagcaccttcaccgtgctgaagagataccagcagctgaagcccatcggcagcggcgcccagggcatcgtgtgcgccgccttcgacaccgtgctgggcatcaacgtggccgtgaagaagctgagcagacccttccagaaccagacccacgccaagagagcctacagagagctggtgctgctgaagtgcgtgaaccacaagaacatcatcagcctgctgaacgtgttcaccccccagaagaccctggaggagttccaggacgtgtacctggtgatggagctgatggacgccaacctgtgccaggtgatccacatggagctggaccacgagagaatgagctacctgctgtaccagatgctgtgcggcatcaagcacctgcacagcgccggcatcatccacagagacctgaagcccagcaacatcgtggtgaagagcgactgcaccctgaagatcctggacttcggcctggccagaaccgcctgcaccaacttcatgatgaccccctacgtggtgaccagatactacagagcccccgaggtgatcctgggcatgggctacaaggagaacgtggacatctggagcgtgggctgcatcatggccgagatggtgctgcacaaggtgctgttccccggcagagactacatcgaccagtggaacaaggtgatcgagcagctgggcacccccagcgccgagttcatgaagaagctgcagcccaccgtgagaaactacgtggagaacagacccaagtaccccggcatcaagttcgaggagctgttccccgactggatcttccccagcgagagcgagagagacaagatcaagaccagccaggccagagacctgctgagcaagatgctggtgatcgaccccgacaagagaatcagcgtggacgaggccctgagacacccctacatcaccgtgtggtacgaccccgccgaggccgaggccccccccccccagatctacgacgcccagctggaggagagagagcacgccatcgaggagtggaaggagctgatctacaaggaggtgatggactgggaggagagaagcaagaacggcgtggtgaaggaccagcccagcgacgccgccgtgagcagcaacgccacccccagccagagcagcagcatcaacgacatcagcagcatgagcaccgagcagaccctggccagcgacaccgacagcagcctggacgccagcaccggccccctggagggctgcagatag

SEQ ID NO: 89353 - DNA, 315 bp, synthetic construct
  misc_feature 1..315: note = Description of Artificial Sequence: Synthetic coding sequence
  source 1..315: mol_type = other DNA
atgagcgacagcaagtgcgacagccagttctacagcgtgcaggtggccgacagcaccttcaccgtgctgaagagataccagcagctgaagcccatcggcagcggcgcccagggcatcgtgtgcgccgccttcgacaccgtgctgggcatcaacgtggccgtgaagaagctgagcagacccttccagaaccagacccacgccaagagagcctacagagagctggtgctgctgaagtgcgtgaaccacaagaacatcatcagcctgctgaacgtgttcaccccccagaagaccctggaggagttccaggacgtgtag

SEQ ID NO: 89354 - DNA, 645 bp, synthetic construct
  misc_feature 1..645: note = Description of Artificial Sequence: Synthetic coding sequence
  source 1..645: mol_type = other DNA
atgagcgacagcaagtgcgacagccagttctacagcgtgcaggtggccgacagcaccttcaccgtgctgaagagataccagcagctgaagcccatcggcagcggcgcccagggcatcgtgtgcgccgccttcgacaccgtgctgggcatcaacgtggccgtgaagaagctgagcagacccttccagaaccagacccacgccaagagagcctacagagagctggtgctgctgaagtgcgtgaaccacaagaacatcatcagcctgctgaacgtgttcaccccccagaagaccctggaggagttccaggacgtgtacctggtgatggagctgatggacgccaacctgtgccaggtgatccacatggagctggaccacgagagaatgagctacctgctgtaccagatgctgtgcggcatcaagcacctgcacagcgccggcatcatccacagagacctgaagcccagcaacatcgtggtgaagagcgactgcaccctgaagatcctggacttcggcctggccagaaccgcctgcaccaacttcatgatgaccccctacgtggtgaccagatactacagagcccccgaggtgatcctgggcatgggctacaaggagaacgccatcaagtactggaccctgtggcactag

SEQ ID NO: 89355 - DNA, 1347 bp, synthetic construct
  misc_feature 1..1347: note = Description of Artificial Sequence: Synthetic coding sequence
  source 1..1347: mol_type = other DNA
atgctgtggctggccctgggccccttccccgccatggagaaccaggtgctggtgatcagaatcaagatccccaacagcggcgccgtggactggaccgtgcacagcggcccccagctgctgttcagagacgtgctggacgtgatcggccaggtgctgcccgaggccaccaccaccgccttcgagtacgaggacgaggacggcgacagaatcaccgtgagaagcgacgaggagatgaaggccatgctgagctactactacagcaccgtgatggagcagcaggtgaacggccagctgatcgagcccctgcagatcttccccagagcctgcaagccccccggcgagagaaacatccacggcctgaaggtgaacaccagagccggccccagccagcacagcagccccgccgtgagcgacagcctgcccagcaacagcctgaagaagagcagcgccgagctgaagaagatcctggccaacggccagatgaacgagcaggacatcagatacagagacaccctgggccacggcaacggcggcaccgtgtacaaggcctaccacgtgcccagcggcaagatcctggccgtgaaggtgatcctgctggacatcaccctggagctgcagaagcagatcatgagcgagctggagatcctgtacaagtgcgacagcagctacatcatcggcttctacggcgccttcttcgtggagaacagaatcagcatctgcaccgagttcatggacggcggcagcctggacgtgtacagaaagatgcccgagcacgtgctgggcagaatcgccgtggccgtggtgaagggcctgacctacctgtggagcctgaagatcctgcacagagacgtgaagcccagcaacatgctggtgaacaccagaggccaggtgaagctgtgcgacttcggcgtgagcacccagctggtgaacagcatcgccaagacctacgtgggcaccaacgcctacatggcccccgagagaatcagcggcgagcagtacggcatccacagcgacgtgtggagcctgggcatcagcttcatggagctggccctgggcagattcccctacccccagatccagaagaaccagggcagcctgatgcccctgcagctgctgcagtgcatcgtggacgaggacagccccgtgctgcccgtgggcgagttcagcgagcccttcgtgcacttcatcacccagtgcatgagaaagcagcccaaggagagacccgcccccgaggagctgatgggccaccccttcatcgtgcagttcaacgacggcaacgccgccgtggtgagcatgtgggtgtgcagagccctggaggagagaagaagccagcagggccccccctag

SEQ ID NO: 89356 - DNA, 1317 bp, synthetic construct
  misc_feature 1..1317: note = Description of Artificial Sequence: Synthetic coding sequence
  source 1..1317: mol_type = other DNA
atgctgtggctggccctgggccccttccccgccatggagaaccaggtgctggtgatcagaatcaagatccccaacagcggcgccgtggactggaccgtgcacagcggcccccagctgctgttcagagacgtgctggacgtgatcggccaggtgctgcccgaggccaccaccaccgccttcgagtacgaggacgaggacggcgacagaatcaccgtgagaagcgacgaggagatgaaggccatgctgagctactactacagcaccgtgatggagcagcaggtgaacggccagctgatcgagcccctgcagatcttccccagagcctgcaagccccccggcgagagaaacatccacggcctgaaggtgaacaccagagccggccccagccagcacagcagccccgccgtgagcgacagcctgcccagcaacagcctgaagaagagcagcgccgagctgaagaagatcctggccaacggccagatgaacgagcaggacatcagatacagagacaccctgggccacggcaacggcggcaccgtgtacaaggcctaccacgtgcccagcggcaagatcctggccgtgaaggtgatcctgctggacatcaccctggagctgcagaagcagatcatgagcgagctggagatcctgtacaagtgcgacagcagctacatcatcggcttctacggcgccttcttcgtggagaacagaatcagcatctgcaccgagttcatggacggcggcagcctggacgtgtacagaaagatgcccgagcacgtgctgggcagaatcgccgtggccgtggtgaagggcctgacctacctgtggagcctgaagatcctgcacagagacgtgaagcccagcaacatgctggtgaacaccagaggccaggtgaagctgtgcgacttcggcgtgagcacccagctggtgaacagcatcgccaagacctacgtgggcaccaacgcctacatggcccccgagagaatcagcggcgagcagtacggcatccacagcgacgtgtggagcctgggcatcagcttcatggagatccagaagaaccagggcagcctgatgcccctgcagctgctgcagtgcatcgtggacgaggacagccccgtgctgcccgtgggcgagttcagcgagcccttcgtgcacttcatcacccagtgcatgagaaagcagcccaaggagagacccgcccccgaggagctgatgggccaccccttcatcgtgcagttcaacgacggcaacgccgccgtggtgagcatgtgggtgtgcagagccctggaggagagaagaagccagcagggccccccctag

SEQ ID NO: 89357 - DNA, 1335 bp, synthetic construct
  misc_feature 1..1335: note = Description of Artificial Sequence: Synthetic coding sequence
  source 1..1335: mol_type = other DNA
atgctgtggctggccctgggccccttccccgccatggagaaccaggtgctggtgatcagaatcaagatccccaacagcggcgccgtggactggaccgtgcacagcggcccccagctgctgttcagagacgtgctggacgtgatcggccaggtgctgcccgaggccaccaccaccgccttcgagtacgaggacgaggacggcgacagaatcaccgtgagaagcgacgaggagatgaaggccatgctgagctactactacagcaccgtgatggagcagcaggtgaacggccagctgatcgagcccctgcagatcttccccagagcctgcaagccccccggcgagagaaacatccacggcctgaaggtgaacaccagagccggccccagccagcacagcagccccgccgtgagcgacagcctgcccagcaacagcctgaagaagagcagcgccgagctgaagaagatcctggccaacggccagatgaacgagcaggacatcagatacagagacaccctgggccacggcaacggcggcaccgtgtacaaggcctaccacgtgcccagcggcaagatcctggccgtgaaggtgatcctgctggacatcaccctggagctgcagaagcagatcatgagcgagctggagatcctgtacaagtgcgacagcagctacatcatcggcttctacggcgccttcttcgtggagaacagaatcagcatctgcaccgagttcatggacggcggcagcctggacgtgtacagaaagatgcccgagcacgtgctgggcagaatcgccgtggccgtggtgaagggcctgacctacctgtggagcctgaagatcctgcacagagacgtgaagcccagcaacatgctggtgaacaccagaggccaggtgaagctgtgcgacttcggcgtgagcacccagctggtgaacagcatcgccaagacctacgtgggcaccaacgcctacatggcccccgagagaatcagcggcgagcagtacggcatccacagcgacgtgtggagcctgggcatcagcttcatggagatccagaagaaccagggcagcctgatgcccctgcagctgctgcagtgcatcgtggacgaggacagccccgtgctgcccgtgggcgagttcagcgagcccttcgtgcacttcatcacccagtgcatgagaaagcagcccaaggagagacccgcccccgaggagctgatgggccaccccttcatcgtgcagttcaacgacggcaacgccgccgtggtgagcatgtgggtgtgcagagccctggaggagagaagaagccccgccagcctgcccagccccagcagcagcatctag

SEQ ID NO: 89358 - DNA, 1239 bp, synthetic construct
  misc_feature 1..1239: note = Description of Artificial Sequence: Synthetic coding sequence
  source 1..1239: mol_type = other DNA
atgatggagggccacttcccccagagcgacgtgatcggccaggtgctgcccgaggccaccaccaccgccttcgagtacgaggacgaggacggcgacagaatcaccgtgagaagcgacgaggagatgaaggccatgctgagctactactacagcaccgtgatggagcagcaggtgaacggccagctgatcgagcccctgcagatcttccccagagcctgcaagccccccggcgagagaaacatccacggcctgaaggtgaacaccagagccggccccagccagcacagcagccccgccgtgagcgacagcctgcccagcaacagcctgaagaagagcagcgccgagctgaagaagatcctggccaacggccagatgaacgagcaggacatcagatacagagacaccctgggccacggcaacggcggcaccgtgtacaaggcctaccacgtgcccagcggcaagatcctggccgtgaaggtgatcctgctggacatcaccctggagctgcagaagcagatcatgagcgagctggagatcctgtacaagtgcgacagcagctacatcatcggcttctacggcgccttcttcgtggagaacagaatcagcatctgcaccgagttcatggacggcggcagcctggacgtgtacagaaagatgcccgagcacgtgctgggcagaatcgccgtggccgtggtgaagggcctgacctacctgtggagcctgaagatcctgcacagagacgtgaagcccagcaacatgctggtgaacaccagaggccaggtgaagctgtgcgacttcggcgtgagcacccagctggtgaacagcatcgccaagacctacgtgggcaccaacgcctacatggcccccgagagaatcagcggcgagcagtacggcatccacagcgacgtgtggagcctgggcatcagcttcatggagctggccctgggcagattcccctacccccagatccagaagaaccagggcagcctgatgcccctgcagctgctgcagtgcatcgtggacgaggacagccccgtgctgcccgtgggcgagttcagcgagcccttcgtgcacttcatcacccagtgcatgagaaagcagcccaaggagagacccgcccccgaggagctgatgggccaccccttcatcgtgcagttcaacgacggcaacgccgccgtggtgagcatgtgggtgtgcagagccctggaggagagaagaagccagcagggccccccctag

SEQ ID NO: 89359 - DNA, 1005 bp, synthetic construct
  misc_feature 1..1005: note = Description of Artificial Sequence: Synthetic coding sequence
  source 1..1005: mol_type = other DNA
atgagccagagcaagggcaagaagagaaaccccggcctgaagatccccaaggaggccttcgagcagccccagaccagcagcaccccccccagagacctggacagcaaggcctgcatcagcatcggcaaccagaacttcgaggtgaaggccgacgacctggagcccatcatggagctgggcagaggcgcctacggcgtggtggagaagatgagacacgtgcccagcggccagatcatggccgtgaagagaatcagagccaccgtgaacagccaggagcagaagagactgctgatggacctggacatcagcatgagaaccgtggactgccccttcaccgtgaccttctacggcgccctgttcagagagggcgacgtgtggatctgcatggagctgatggacaccagcctggacaagttctacaagcaggtgatcgacaagggccagaccatccccgaggacatcctgggcaagatcgccgtgagcatcgtgaaggccctggagcacctgcacagcaagctgagcgtgatccacagagacgtgaagcccagcaacgtgctgatcaacgccctgggccaggtgaagatgtgcgacttcggcatcagcggctacctggtggacagcgtggccaagaccatcgacgccggctgcaagccctacatggcccccgagagaatcaaccccgagctgaaccagaagggctacagcgtgaagagcgacatctggagcctgggcatcaccatgatcgagctggccatcctgagattcccctacgacagctggggcacccccttccagcagctgaagcaggtggtggaggagcccagcccccagctgcccgccgacaagttcagcgccgagttcgtggacttcaccagccagtgcctgaagaagaacagcaaggagagacccacctaccccgagctgatgcagcaccccttcttcaccctgcacgagagcaagggcaccgacgtggccagcttcgtgaagctgatcctgggcgactag

SEQ ID NO: 89360 - DNA, 1005 bp, synthetic construct; identical to SEQ ID NO: 89359
  misc_feature 1..1005: note = Description of Artificial Sequence: Synthetic coding sequence
  source 1..1005: mol_type = other DNA

SEQ ID NO: 89361 - DNA, 2865 bp, synthetic construct
  misc_feature 1..2865: note = Description of Artificial Sequence: Synthetic coding sequence
  source 1..2865: mol_type = other DNA
atggaggaggaggagggcgccgtggccaaggagtggggcaccacccccgccggccccgtgtggaccgccgtgttcgactacgaggccgccggcgacgaggagctgaccctgagaagaggcgacagagtgcaggtgctgagccaggactgcgccgtgagcggcgacgagggctggtggaccggccagctgcccagcggcagagtgggcgtgttccccagcaactacgtggcccccggcgcccccgccgcccccgccggcctgcagctgccccaggagatccccttccacgagctgcagctggaggagatcatcggcgtgggcggcttcggcaaggtgtacagagccctgtggagaggcgaggaggtggccgtgaaggccgccagactggaccccgagaaggaccccgccgtgaccgccgagcaggtgtgccaggaggccagactgttcggcgccctgcagcaccccaacatcatcgccctgagaggcgcctgcctgaaccccccccacctgtgcctggtgatggagtacgccagaggcggcgccctgagcagagtgctggccggcagaagagtgcccccccacgtgctggtgaactgggccgtgcaggtggccagaggcatgaactacctgcacaacgacgcccccgtgcccatcatccacagagacctgaagagcatcaacatcctgatcctggaggccatcgagaaccacaacctggccgacaccgtgctgaagatcaccgacttcggcctggccagagagtggcacaagaccaccaagatgagcgccgccggcacctacgcctggatggcccccgaggtgatcagactgagcctgttcagcaagagcagcgacgtgtggagcttcggcgtgctgctgtgggagctgctgaccggcgaggtgccctacagagagatcgacgccctggccgtggcctacggcgtggccatgaacaagctgaccctgcccatccccagcacctgccccgagcccttcgccagactgctggaggagtgctgggaccccgacccccacggcagacccgacttcggcagcatcctgaagagactggaggtgatcgagcagagcgccctgttccagatgcccctggagagcttccacagcctgcaggaggactggaagctggagatccagcacatgttcgacgacctgagaaccaaggagaaggagctgagaagcagagaggaggagctgctgagagccgcccaggagcagagattccaggaggagcagctgagaagaagagagcaggagctggccgagagagagatggacatcgtggagagagagctgcacctgctgatgtgccagctgagccaggagaagcccagagtgagaaagagaaagggcaacttcaagagaagcagactgctgaagctgagagagggcggcagccacatcagcctgcccagcggcttcgagcacaagatcaccgtgcaggccagccccaccctggacaagagaaagggcagcgacggcgccagcccccccgccagccccagcatcatccccagactgagagccatcagactgacccccgtggactgcggcggcagcagcagcggcagcagcagcggcggcagcggcacctggagcagaggcggcccccccaagaaggaggagctggtgggcggcaagaagaagggcagaacctggggccccagcagcaccctgcagaaggagagagtgggcggcgaggagagactgaagggcctgggcgagggcagcaagcagtggagcagcagcgcccccaacctgggcaagagccccaagcacacccccatcgcccccggcttcgccagcctgaacgagatggaggagttcgccgaggccgaggacggcggcagcagcgtgccccccagcccctacagcacccccagctacctgagcgtgcccctgcccgccgagcccagccccggcgccagagccccctgggagcccacccccagcgccccccccgccagatggggccacggcgccagaagaagatgcgacctggccctgctgggctgcgccaccctgctgggcgccgtgggcctgggcgccgacgtggccgaggccagagccgccgacggcgaggagcagagaagatggctggacggcctgttcttccccagagccggcagattccccagaggcctgagcccccccgccagaccccacggcagaagagaggacgtgggccccggcctgggcctggcccccagcgccaccctggtgagcctgagcagcgtgagcgactgcaacagcaccagaagcctgctgagaagcgacagcgacgaggccgcccccgccgcccccagccccccccccagcccccccgcccccacccccacccccagccccagcaccaaccccctggtggacctggagctggagagcttcaagaaggaccccagacagagcctgacccccacccacgtgaccgccgcctgcgccgtgagcagaggccacagaagaacccccagcgacggcgccctgggccagagaggcccccccgagcccgccggccacggccccggccccagagacctgctggacttccccagactgcccgacccccaggccctgttccccgccagaagaagaccccccgagttccccggcagacccaccaccctgaccttcgcccccagacccagacccgccgccagcagacccagactggacccctggaagctggtgagcttcggcagaaccctgaccatcagcccccccagcagacccgacacccccgagagccccggcccccccagcgtgcagcccaccctgctggacatggacatggagggccagaaccaggacagcaccgtgcccctgtgcggcgcccacggcagccactag

SEQ ID NO: 89362 - DNA, 2544 bp, synthetic construct
  misc_feature 1..2544: note = Description of Artificial Sequence: Synthetic coding sequence
  source 1..2544: mol_type = other DNA
atggagcccctgaagagcctgttcctgaagagccccctgggcagctggaacggcagcggcagcggcggcggcggcggcggcggcggcggcagacccgagggcagccccaaggccgccggctacgccaaccccgtgtggaccgccctgttcgactacgagcccagcggccaggacgagctggccctgagaaagggcgacagagtggaggtgctgagcagagacgccgccatcagcggcgacgagggctggtgggccggccaggtgggcggccaggtgggcatcttccccagcaactacgtgagcagaggcggcggcccccccccctgcgaggtggccagcttccaggagctgagactggaggaggtgatcggcatcggcggcttcggcaaggtgtacagaggcagctggagaggcgagctggtggccgtgaaggccgccagacaggaccccgacgaggacatcagcgtgaccgccgagagcgtgagacaggaggccagactgttcgccatgctggcccaccccaacatcatcgccctgaaggccgtgtgcctggaggagcccaacctgtgcctggtgatggagtacgccgccggcggccccctgagcagagccctggccggcagaagagtgcccccccacgtgctggtgaactgggccgtgcagatcgccagaggcatgcactacctgcactgcgaggccctggtgcccgtgatccacagagacctgaagagcaacaacatcctgctgctgcagcccatcgagagcgacgacatggagcacaagaccctgaagatcaccgacttcggcctggccagagagtggcacaagaccacccagatgagcgccgccggcacctacgcctggatggcccccgaggtgatcaaggccagcaccttcagcaagggcagcgacgtgtggagcttcggcgtgctgctgtgggagctgctgaccggcgaggtgccctacagaggcatcgactgcctggccgtggcctacggcgtggccgtgaacaagctgaccctgcccatccccagcacctgccccgagcccttcgcccagctgatggccgactgctgggcccaggacccccacagaagacccgacttcgccagcatcctgcagcagctggaggccctggaggcccaggtgctgagagagatgcccagagacagcttccacagcatgcaggagggctggaagagagagatccagggcctgttcgacgagctgagagccaaggagaaggagctgctgagcagagaggaggagctgaccagagccgccagagagcagagaagccaggccgagcagctgagaagaagagagcacctgctggcccagtgggagctggaggtgttcgagagagagctgaccctgctgctgcagcaggtggacagagagagaccccacgtgagaagaagaagaggcaccttcaagagaagcaagctgagagccagagacggcggcgagagaatcagcatgcccctggacttcaagcacagaatcaccgtgcaggccagccccggcctggacagaagaagaaacgtgttcgaggtgggccccggcgacagccccaccttccccagattcagagccatccagctggagcccgccgagcccggccaggcctggggcagacagagccccagaagactggaggacagcagcaacggcgagagaagagcctgctgggcctggggccccagcagccccaagcccggcgaggcccagaacggcagaagaagaagcagaatggacgaggccacctggtacctggacagcgacgacagcagccccctgggcagccccagcaccccccccgccctgaacggcaacccccccagacccagcctggagcccgaggagcccaagagacccgtgcccgccgagagaggcagcagcagcggcacccccaagctgatccagagagccctgctgagaggcaccgccctgctggccagcctgggcctgggcagagacctgcagccccccggcggccccggcagagagagaggcgagagccccaccaccccccccacccccacccccgccccctgccccaccgagcccccccccagccccctgatctgcttcagcctgaagacccccgacagcccccccacccccgcccccctgctgctggacctgggcatccccgtgggccagagaagcgccaagagccccagaagagaggaggagcccagaggcggcaccgtgagccccccccccggcaccagcagaagcgcccccggcacccccggcacccccagaagcccccccctgggcctgatcagcagacccagacccagccccctgagaagcagaatcgacccctggagcttcgtgagcgccggccccagacccagccccctgcccagcccccagcccgcccccagaagagccccctggaccctgttccccgacagcgaccccttctgggacagcccccccgccaaccccttccagggcggcccccaggactgcagagcccagaccaaggacatgggcgcccaggccccctgggtgcccgaggccggcccctag

SEQ ID NO: 89363 - DNA, 1773 bp, synthetic construct
  misc_feature 1..1773: note = Description of Artificial Sequence: Synthetic coding sequence
  source 1..1773: mol_type = other DNA
atggagcacaagaccctgaagatcaccgacttcggcctggccagagagtggcacaagaccacccagatgagcgccgccggcacctacgcctggatggcccccgaggtgatcaaggccagcaccttcagcaagggcagcgacgtgtggagcttcggcgtgctgctgtgggagctgctgaccggcgaggtgccctacagaggcatcgactgcctggccgtggcctacggcgtggccgtgaacaagctgaccctgcccatccccagcacctgccccgagcccttcgcccagctgatggccgactgctgggcccaggacccccacagaagacccgacttcgccagcatcctgcagcagctggaggccctggaggcccaggtgctgagagagatgcccagagacagcttccacagcatgcaggagggctggaagagagagatccagggcctgttcgacgagctgagagccaaggagaaggagctgctgagcagagaggaggagctgaccagagccgccagagagcagagaagccaggccgagcagctgagaagaagagagcacctgctggcccagtgggagctggaggtgttcgagagagagctgaccctgctgctgcagcaggtggacagagagagaccccacgtgagaagaagaagaggcaccttcaagagaagcaagctgagagccagagacggcggcgagagaatcagcatgcccctggacttcaagcacagaatcaccgtgcaggccagccccggcctggacagaagaagaaacgtgttcgaggtgggccccggcgacagccccaccttccccagattcagagccatccagctggagcccgccgagcccggccaggcctggggcagacagagccccagaagactggaggacagcagcaacggcgagagaagagcctgctgggcctggggccccagcagccccaagcccggcgaggcccagaacggcagaagaagaagcagaatggacgaggccacctggtacctggacagcgacgacagcagccccctgggcagccccagcaccccccccgccctgaacggcaacccccccagacccagcctggagcccgaggagcccaagagacccgtgcccgccgagagaggcagcagcagcggcacccccaagctgatccagagagccctgctgagaggcaccgccctgctggccagcctgggcctgggcagagacctgcagccccccggcggccccggcagagagagaggcgagagccccaccaccccccccacccccacccccgccccctgccccaccgagcccccccccagccccctgatctgcttcagcctgaagacccccgacagcccccccacccccgcccccctgctgctggacctgggcatccccgtgggccagagaagcgccaagagccccagaagagaggaggagcccagaggcggcaccgtgagccccccccccggcaccagcagaagcgcccccggcacccccggcacccccagaagcccccccctgggcctgatcagcagacccagacccagccccctgagaagcagaatcgacccctggagcttcgtgagcgccggccccagacccagccccctgcccagcccccagcccgcccccagaagagccccctggaccctgttccccgacagcgaccccttctgggacagcccccccgccaaccccttccagggcggcccccaggactgcagagcccagaccaaggacatgggcgcccaggccccctgggtgcccgaggccggcccctag

SEQ ID NO: 89364 - DNA, 2580 bp, synthetic construct
  misc_feature 1..2580: note = Description of Artificial Sequence: Synthetic coding sequence
  source 1..2580: mol_type = other DNA
atggcctgcctgcacgagaccagaacccccagccccagcttcggcggcttcgtgagcaccctgagcgaggccagcatgagaaagctggaccccgacaccagcgactgcacccccgagaaggacctgacccccacccacgtgctgcagctgcacgagcaggacgccggcggccccggcggcgccgccggcagccccgagagcagagccagcagagtgagagccgacgaggtgagactgcagtgccagagcggcagcggcttcctggagggcctgttcggctgcctgagacccgtgtggaccatgatcggcaaggcctacagcaccgagcacaagcagcagcaggaggacctgtgggaggtgcccttcgaggagatcctggacctgcagtgggtgggcagcggcgcccagggcgccgtgttcctgggcagattccacggcgaggaggtggccgtgaagaaggtgagagacctgaaggagaccgacatcaagcacctgagaaagctgaagcaccccaacatcatcaccttcaagggcgtgtgcacccaggccccctgctactgcatcctgatggagttctgcgcccagggccagctgtacgaggtgctgagagccggcagacccgtgacccccagcctgctggtggactggagcatgggcatcgccggcggcatgaactacctgcacctgcacaagatcatccacagagacctgaagagccccaacatgctgatcacctacgacgacgtggtgaagatcagcgacttcggcaccagcaaggagctgagcgacaagagcaccaagatgagcttcgccggcaccgtggcctggatggcccccgaggtgatcagaaacgagcccgtgagcgagaaggtggacatctggagcttcggcgtggtgctgtgggagctgctgaccggcgagatcccctacaaggacgtggacagcagcgccatcatctggggcgtgggcagcaacagcctgcacctgcccgtgcccagcagctgccccgacggcttcaagatcctgctgagacagtgctggaacagcaagcccagaaacagacccagcttcagacagatcctgctgcacctggacatcgccagcgccgacgtgctgagcaccccccaggagacctacttcaagagccaggccgagtggagagaggaggtgaagctgcacttcgagaagatcaagagcgagggcacctgcctgcacagactggaggaggagctggtgatgagaagaagagaggagctgagacacgccctggacatcagagagcactacgagagaaagctggagagagccaacaacctgtacatggagctgaacgccctgatgctgcagctggagctgaaggagagagagctgctgagaagagagcaggccctggagagaagatgccccggcctgctgaagccccaccccagcagaggcctgctgcacggcaacaccatggagaagctgatcaagaagagaaacgtgccccagaagctgagcccccacagcaagagacccgacatcctgaagaccgagagcctgctgcccaagctggacgccgccctgagcggcgtgggcctgcccggctgccccaagggcccccccagccccggcagaagcagaagaggcaagaccagacacagaaaggccagcgccaagggcagctgcggcgacctgcccggcctgagaaccgccgtgcccccccacgagcccggcggccccggcagccccggcggcctgggcggcggccccagcgcctgggaggcctgcccccccgccctgagaggcctgcaccacgacctgctgctgagaaagatgagcagcagcagccccgacctgctgagcgccgccctgggcagcagaggcagaggcgccaccggcggcgccggcgaccccggcagccccccccccgccagaggcgacaccccccccagcgagggcagcgcccccggcagcaccagccccgacagccccggcggcgccaagggcgagccccccccccccgtgggccccggcgagggcgtgggcctgctgggcaccggcagagagggcaccagcggcagaggcggcagcagagccggcagccagcacctgacccccgccgccctgctgtacagagccgccgtgaccagaagccagaagagaggcatcagcagcgaggaggaggagggcgaggtggacagcgaggtggagctgaccagcagccagagatggccccagagcctgaacatgagacagagcctgagcaccttcagcagcgagaaccccagcgacggcgaggagggcaccgccagcgagcccagccccagcggcacccccgaggtgggcagcaccaacaccgacgagagacccgacgagagaagcgacgacatgtgcagccagggcagcgagatccccctggaccccccccccagcgaggtgatccccggccccgagcccagcagcctgcccatcccccaccaggagctgctgagagagagaggcccccccaacagcgaggacagcgactgcgacagcaccgagctggacaacagcaacagcgtggacgccctgagaccccccgccagcctgcccccctag

SEQ ID NO: 89365 - DNA, 2901 bp, synthetic construct
  misc_feature 1..2901: note = Description of Artificial Sequence: Synthetic coding sequence
  source 1..2901: mol_type = other DNA
atggccaacttccaggagcacctgagctgcagcagcagcccccacctgcccttcagcgagagcaagaccttcaacggcctgcaggacgagctgaccgccatgggcaaccaccccagccccaagctgctggaggaccagcaggagaagggcatggtgagaaccgagctgatcgagagcgtgcacagccccgtgaccaccaccgtgctgaccagcgtgagcgaggacagcagagaccagttcgagaacagcgtgctgcagctgagagagcacgacgagagcgagaccgccgtgagccagggcaacagcaacaccgtggacggcgagagcaccagcggcaccgaggacatcaagatccagttcagcagaagcggcagcggcagcggcggcttcctggagggcctgttcggctgcctgagacccgtgtggaacatcatcggcaaggcctacagcaccgactacaagctgcagcagcaggacacctgggaggtgcccttcgaggagatcagcgagctgcagtggctgggcagcggcgcccagggcgccgtgttcctgggcaagttcagagccgaggaggtggccatcaagaaggtgagagagcagaacgagaccgacatcaagcacctgagaaagctgaagcaccccaacatcatcgccttcaagggcgtgtgcacccaggccccctgctactgcatcatcatggagtactgcgcccacggccagctgtacgaggtgctgagagccggcagaaagatcacccccagactgctggtggactggagcaccggcatcgccagcggcatgaactacctgcacctgcacaagatcatccacagagacctgaagagccccaacgtgctggtgacccacaccgacgccgtgaagatcagcgacttcggcaccagcaaggagctgagcgacaagagcaccaagatgagcttcgccggcaccgtggcctggatggcccccgaggtgatcagaaacgagcccgtgagcgagaaggtggacatctggagcttcggcgtggtgctgtgggagctgctgaccggcgagatcccctacaaggacgtggacagcagcgccatcatctggggcgtgggcagcaacagcctgcacctgcccgtgcccagcacctgccccgacggcttcaagatcctgatgaagcagacctggcagagcaagcccagaaacagacccagcttcagacagaccctgatgcacctggacatcgccagcgccgacgtgctggccaccccccaggagacctacttcaagagccaggccgagtggagagaggaggtgaagaagcacttcgagaagatcaagagcgagggcacctgcatccacagactggacgaggagctgatcagaagaagaagagaggagctgagacacgccctggacatcagagagcactacgagagaaagctggagagagccaacaacctgtacatggagctgagcgccatcatgctgcagctggagatgagagagaaggagctgatcaagagagagcaggccgtggagaagaagtaccccggcacctacaagagacaccccgtgagacccatcatccaccccaacgccatggagaagctgatgaagagaaagggcgtgccccacaagagcggcatgcagaccaagagacccgacctgctgagaagcgagggcatccccaccaccgaggtggcccccaccgccagccccctgagcggcagccccaagatgagcaccagcagcagcaagagcagatacagaagcaagcccagacacagaagaggcaacagcagaggcagccacagcgacttcgccgccatcctgaagaaccagcccgcccaggagaacagcccccaccccacctacctgcaccaggcccagagccagtaccccagcctgcaccaccacaacagcctgcagcagcagtaccagcagcccccccccgccatgagccagagccaccaccccagactgaacatgcacggccaggacatcgccacctgcgccaacaacctgagatacttcggccccgccgccgccctgagaagccccctgagcaaccacgcccagagacagctgcccggcagcagccccgacctgatcagcaccgccatggccgccgactgctggagaagcagcgagcccgacaagggccaggccggcccctggggctgctgccaggccgacgcctacgacccctgcctgcagtgcagacccgagcagtacggcagcctggacatccccagcgccgagcccgtgggcagaagccccgacctgagcaagagccccgcccacaaccccctgctggagaacgcccagagcagcgagaagaccgaggagaacgagttcagcggctgcagaagcgagagcagcctgggcaccagccacctgggcaccccccccgccctgcccagaaagaccagacccctgcagaagagcggcgacgacagcagcgaggaggaggagggcgaggtggacagcgaggtggagttccccagaagacagagaccccacagatgcatcagcagctgccagagctacagcaccttcagcagcgagaacttcagcgtgagcgacggcgaggagggcaacaccagcgaccacagcaacagccccgacgagctggccgacaagctggaggacagactggccgagaagctggacgacctgctgagccagacccccgagatccccatcgacatcagcagccacagcgacggcctgagcgacaaggagtgcgccgtgagaagagtgaagacccagatgagcctgggcaagctgtgcgtggaggagagaggctacgagaaccccatgcagttcgaggagagcgactgcgacagcagcgacggcgagtgcagcgacgccaccgtgagaaccaacaagcactacagcagcgccacctggtag

SEQ ID NO: 89366 - DNA, 2901 bp, synthetic construct; identical to SEQ ID NO: 89365
  misc_feature 1..2901: note = Description of Artificial Sequence: Synthetic coding sequence
  source 1..2901: mol_type = other DNA

SEQ ID NO: 89367 - DNA, 414 bp, synthetic construct
  misc_feature 1..414: note = Description of Artificial Sequence: Synthetic coding sequence
  source 1..414: mol_type = other DNA
atggccaacttccaggagcacctgagctgcagcagcagcccccacctgcccttcagcgagagcaagaccttcaacggcctgcaggacgagctgaccgccatgggcaaccaccccagccccaagctgctggaggaccagcaggagaagggcatggtgagaaccgagctgatcgagagcgtgcacagccccgtgaccaccaccgtgctgaccagcgtgagcgaggacagcagagaccagttcgagaacagcgtgctgcagctgagagagcacgacgagagcgagaccgccgtgagccagggcaacagcaacaccgtggacggcgagagcaccagcggcaccgaggacatcaagatccagttcagcagaagcggcagcggcagcggcggcttcctggagggcctgttcggctgctag

SEQ ID NO: 89368 - DNA, 342 bp, synthetic construct
  misc_feature 1..342: note = Description of Artificial Sequence: Synthetic coding sequence
  source 1..342: mol_type = other DNA
atggccaacttccaggagcacctgagctgcagcagcagcccccacctgcccttcagcgagagcaagaccttcaacggcctgcaggacgagctgaccgccatgggcaaccaccccagccccaagctgctggaggaccagcaggagaagggcatggtgagaaccgagctgatcgagagcgtgcacagccccgtgaccaccaccgtgctgaccagcgtgagcgaggacagcagagaccagttcgagaacagcgtgctgcagctgagagagcacgacgagagcgagaccgccgtgagccagggcaacagcaacaccgtggacggcgagagcaccagcggcacctag

SEQ ID NO: 89369 - DNA, 2469 bp, synthetic construct
  misc_feature 1..2469: note = Description of Artificial Sequence: Synthetic coding sequence
  source 1..2469: mol_type = other DNA
atgagctacgtggagtgcaagtgcctgcagctggagaacaagaacacctgggaggtgcccttcgaggagatcagcgagctgcagtggctgggcagcggcgcccagggcgccgtgttcctgggcaagttcagagccgaggaggtggccatcaagaaggtgagagagcagaacgagaccgacatcaagcacctgagaaagctgaagcaccccaacatcatcgccttcaagggcgtgtgcacccaggccccctgctactgcatcatcatggagtactgcgcccacggccagctgtacgaggtgctgagagccggcagaaagatcacccccagactgctggtggactggagcaccggcatcgccagcggcatgaactacctgcacctgcacaagatcatccacagagacctgaagagccccaacgtgctggtgacccacaccgacgccgtgaagatcagcgacttcggcaccagcaaggagctgagcgacaagagcaccaagatgagcttcgccggcaccgtggcctggatggcccccgaggtgatcagaaacgagcccgtgagcgagaaggtggacatctggagcttcggcgtggtgctgtgggagctgctgaccggcgagatcccctacaaggacgtggacagcagcgccatcatctggggcgtgggcagcaacagcctgcacctgcccgtgcccagcacctgccccgacggcttcaagatcctgatgaagcagacctggcagagcaagcccagaaacagacccagcttcagacagaccctgatgcacctggacatcgccagcgccgacgtgctggccaccccccaggagacctacttcaagagccaggccgagtggagagaggaggtgaagaagcacttcgagaagatcaagagcgagggcacctgcatccacagactggacgaggagctgatcagaagaagaagagaggagctgagacacgccctggacatcagagagcactacgagagaaagctggagagagccaacaacctgtacatggagctgagcgccatcatgctgcagctggagatgagagagaaggagctgatcaagagagagcaggccgtggagaagaagtaccccggcacctacaagagacaccccgtgagacccatcatccaccccaacgccatggagaagctgatgaagagaaagggcgtgccccacaagagcggcatgcagaccaagagacccgacctgctgagaagcgagggcatccccaccaccgaggtggcccccaccgccagccccctgagcggcagccccaagatgagcaccagcagcagcaagagcagatacagaagcaagcccagacacagaagaggcaacagcagaggcagccacagcgacttcgccgccatcctgaagaaccagcccgcccaggagaacagcccccaccccacctacctgcaccaggcccagagccagtaccccagcctgcaccaccacaacagcctgcagcagcagtaccagcagcccccccccgccatgagccagagccaccaccccagactgaacatgcacggccaggacatcgccacctgcgccaacaacctgagatacttcggccccgccgccgccctgagaagccccctgagcaaccacgcccagagacagctgcccggcagcagccccgacctgatcagcaccgccatggccgccgactgctggagaagcagcgagcccgacaagggccaggccggcccctggggctgctgccaggccgacgcctacgacccctgcctgcagtgcagacccgagcagtacggcagcctggacatccccagcgccgagcccgtgggcagaagccccgacctgagcaagagccccgcccacaaccccctgctggagaacgcccagagcagcgagaagaccgaggagaacgagttcagcggctgcagaagcgagagcagcctgggcaccagccacctgggcaccccccccgccctgcccagaaagaccagacccctgcagaagagcggcgacgacagcagcgaggaggaggagggcgaggtggacagcgaggtggagttccccagaagacagagaccccacagatgcatcagcagctgccagagctacagcaccttcagcagcgagaacttcagcgtgagcgacggcgaggagggcaacaccagcgaccacagcaacagccccgacgagctggccgacaagctggaggacagactggccgagaagctggacgacctgctgagccagacccccgagatccccatcgacatcagcagccacagcgacggcctgagcgacaaggagtgcgccgtgagaagagtgaagacccagatgagcctgggcaagctgtgcgtggaggagagaggctacgagaaccccatgcagttcgaggagagcgactgcgacagcagcgacggcgagtgcagcgacgccaccgtgagaaccaacaagcactacagcagcgccacctggtag

SEQ ID NO: 89370 - DNA, 2280 bp, synthetic construct
  misc_feature 1..2280: note = Description of Artificial Sequence: Synthetic coding sequence
  source 1..2280: mol_type = other DNA
atgtactgcggcatccagatcctggccctgtgggagagaggcgtgtgcacccaggccccctgctactgcatcatcatggagtactgcgcccacggccagctgtacgaggtgctgagagccggcagaaagatcacccccagactgctggtggactggagcaccggcatcgccagcggcatgaactacctgcacctgcacaagatcatccacagagacctgaagagccccaacgtgctggtgacccacaccgacgccgtgaagatcagcgacttcggcaccagcaaggagctgagcgacaagagcaccaagatgagcttcgccggcaccgtggcctggatggcccccgaggtgatcagaaacgagcccgtgagcgagaaggtggacatctggagcttcggcgtggtgctgtgggagctgctgaccggcgagatcccctacaaggacgtggacagcagcgccatcatctggggcgtgggcagcaacagcctgcacctgcccgtgcccagcacctgccccgacggcttcaagatcctgatgaagcagacctggcagagcaagcccagaaacagacccagcttcagacagaccctgatgcacctggacatcgccagcgccgacgtgctggccaccccccaggagacctacttcaagagccaggccgagtggagagaggaggtgaagaagcacttcgagaagatcaagagcgagggcacctgcatccacagactggacgaggagctgatcagaagaagaagagaggagctgagacacgccctggacatcagagagcactacgagagaaagctggagagagccaacaacctgtacatggagctgagcgccatcatgctgcagctggagatgagagagaaggagctgatcaagagagagcaggccgtggagaagaagtaccccggcacctacaagagacaccccgtgagacccatcatccaccccaacgccatggagaagctgatgaagagaaagggcgtgccccacaagagcggcatgcagaccaagagacccgacctgctgagaagcgagggcatccccaccaccgaggtggcccccaccgccagccccctgagcggcagccccaagatgagcaccagcagcagcaagagcagatacagaagcaagcccagacacagaagaggcaacagcagaggcagccacagcgacttcgccgccatcctgaagaaccagcccgcccaggagaacagcccccaccccacctacctgcaccaggcccagagccagtaccccagcctgcaccaccacaacagcctgcagcagcagtaccagcagcccccccccgccatgagccagagccaccaccccagactgaacatgcacggccaggacatcgccacctgcgccaacaacctgagatacttcggccccgccgccgccctgagaagccccctgagcaaccacgcccagagacagctgcccggcagcagccccgacctgatcagcaccgccatggccgccgactgctggagaagcagcgagcccgacaagggccaggccggcccctggggctgctgccaggccgacgcctacgacccctgcctgcagtgcagacccgagcagtacggcagcctggacatccccagcgccgagcccgtgggcagaagccccgacctgagcaagagccccgcccacaaccccctgctggagaacgcccagagcagcgagaagaccgaggagaacgagttcagcggctgcagaagcgagagcagcctgggcaccagccacctgggcaccccccccgccctgcccagaaagaccagacccctgcagaagagcggcgacgacagcagcgaggaggaggagggcgaggtggacagcgaggtggagttccccagaagacagagaccccacagatgcatcagcagctgccagagctacagcaccttcagcagcgagaacttcagcgtgagcgacggcgaggagggcaacaccagcgaccacagcaacagccccgacgagctggccgacaagctggaggacagactggccgagaagctggacgacctgctgagccagacccccgagatccccatcgacatcagcagccacagcgacggcctgagcgacaaggagtgcgccgtgagaagagtgaagacccagatgagcctgggcaagctgtgcgtggaggagagaggctacgagaaccccatgcagttcgaggagagcgactgcgacagcagcgacggcgagtgcagcgacgccaccgtgagaaccaacaagcactacagcagcgccacctggtag

SEQ ID NO: 89371 - DNA, 2841 bp, synthetic construct
  misc_feature 1..2841: note = Description of Artificial Sequence: Synthetic coding sequence
  source 1..2841: mol_type = other DNA
atggccgtgatggagatggcctgccccggcgcccccggcagcgccgtgggccagcagaaggagctgcccaaggccaaggagaagaccccccccctgggcaagaagcagagcagcgtgtacaagctggaggccgtggagaagagccccgtgttctgcggcaagtgggagatcctgaacgacgtgatcaccaagggcaccgccaaggagggcagcgaggccggccccgccgccatcagcatcatcgcccaggccgagtgcgagaacagccaggagttcagccccaccttcagcgagagaatcttcatcgccggcagcaagcagtacagccagagcgagagcctggaccagatccccaacaacgtggcccacgccaccgagggcaagatggccagagtgtgctggaagggcaagagaagaagcaaggccagaaagaagagaaagaagaagagcagcaagagcctggcccacgccggcgtggccctggccaagcccctgcccagaacccccgagcaggagagctgcaccatccccgtgcaggaggacgagagccccctgggcgccccctacgtgagaaacaccccccagttcaccaagcccctgaaggagcccggcctgggccagctgtgcttcaagcagctgggcgagggcctgagagccctgcccagaagcgagctgcacaagctgatcagccccctgcagtgcctgaaccacgtgtggaagctgcaccacccccaggacggcggccccctgcccctgcccacccaccccttcccctacagcagactgccccaccccttccccttccaccccctgcagccctggaagccccaccccctggagagcttcctgggcaagctggcctgcgtggacagccagaagcccctgcccgacccccacctgagcaagctggcctgcgtggacagccccaagcccctgcccggcccccacctggagcccagctgcctgagcagaggcgcccacgagaagttcagcgtggaggagtacctggtgcacgccctgcagggcagcgtgagcagcggccaggcccacagcctgaccagcctggccaagacctgggccgccagaggcagcagaagcagagagcccagccccaagaccgaggacaacgagggcgtgctgctgaccgagaagctgaagcccgtggactacgagtacagagaggaggtgcactgggccacccaccagctgagactgggcagaggcagcttcggcgaggtgcacagaatggaggacaagcagaccggcttccagtgcgccgtgaagaaggtgagactggaggtgttcagagccgaggagctgatggcctgcgccggcctgaccagccccagaatcgtgcccctgtacggcgccgtgagagagggcccctgggtgaacatcttcatggagctgctggagggcggcagcctgggccagctggtgaaggagcagggctgcctgcccgaggacagagccctgtactacctgggccaggccctggagggcctggagtacctgcacagcagaagaatcctgcacggcgacgtgaaggccgacaacgtgctgctgagcagcgacggcagccacgccgccctgtgcgacttcggccacgccgtgtgcctgcagcccgacggcctgggcaagagcctgctgaccggcgactacatccccggcaccgagacccacatggcccccgaggtggtgctgggcagaagctgcgacgccaaggtggacgtgtggagcagctgctgcatgatgctgcacatgctgaacggctgccacccctggacccagttcttcagaggccccctgtgcctgaagatcgccagcgagcccccccccgtgagagagatcccccccagctgcgcccccctgaccgcccaggccatccaggagggcctgagaaaggagcccatccacagagtgagcgccgccgagctgggcggcaaggtgaacagagccctgcagcaggtgggcggcctgaagagcccctggagaggcgagtacaaggagcccagacaccccccccccaaccaggccaactaccaccagaccctgcacgcccagcccagagagctgagccccagagcccccggccccagacccgccgaggagaccaccggcagagcccccaagctgcagccccccctgccccccgagccccccgagcccaacaagagcccccccctgaccctgagcaaggaggagagcggcatgtgggagcccctgcccctgagcagcctggagcccgcccccgccagaaaccccagcagccccgagagaaaggccaccgtgcccgagcaggagctgcagcagctggagatcgagctgttcctgaacagcctgagccagcccttcagcctggaggagcaggagcagatcctgagctgcctgagcatcgacagcctgagcctgagcgacgacagcgagaagaaccccagcaaggccagccagagcagcagagacaccctgagcagcggcgtgcacagctggagcagccaggccgaggccagaagcagcagctggaacatggtgctggccagaggcagacccaccgacacccccagctacttcaacggcgtgaaggtgcagatccagagcctgaacggcgagcacctgcacatcagagagttccacagagtgaaggtgggcgacatcgccaccggcatcagcagccagatccccgccgccgccttcagcctggtgaccaaggacggccagcccgtgagatacgacatggaggtgcccgacagcggcatcgacctgcagtgcaccctggcccccgacggcagcttcgcctggagctggagagtgaagcacggccagctggagaacagaccctag

SEQ ID NO: 89372 - DNA, 1302 bp, synthetic construct
  misc_feature 1..1302: note = Description of Artificial Sequence: Synthetic coding sequence
  source 1..1302: mol_type = other DNA
tgcttcaagcagctgggcgagggcctgagagccctgcccagaagcgagctgcacaagctgatcagccccctgcagtgcctgaaccacgtgtggaagctgcaccacccccaggacggcggccccctgcccctgcccacccaccaccccttccccttccaccccctgcagccctggaagccccaccccctggagagcttcctgggcaagctggcctgcgtggacagccagaagcccctgcccgacccccacctgagcaagctggcctgcgtggacagccccaagcccctgcccggcccccacctggagcccagctgcctgagcagaggcgcccacgagaagttcagcgtggaggagtacctggtgcacgccctgcagggcagcgtgagcagcggccaggcccacagcctgaccagcctggccaagacctgggccgccagaggcagcagaagcagagagcccagccccaagaccgaggacaacgagggcgtgctgctgaccgagaagctgaagcccgtggactacgagtacagagaggaggtgcactgggccacccaccagctgagactgggcagaggcagcttcggcgaggtgcacagaatggaggacaagcagaccggcttccagtgcgccgtgaagaaggtgagactggaggtgttcagagccgaggagctgatggcctgcgccggcctgaccagccccagaatcgtgcccctgtacggcgccgtgagagagggcccctgggtgaacatcttcatggagctgctggagggcggcagcctgggccagctggtgaaggagcagggctgcctgcccgaggacagagccctgtactacctgggccaggccctggagggcctggagtacctgcacagcagaagaatcctgcacggcgacgtgaaggccgacaacgtgctgctgagcagcgacggcagccacgccgccctgtgcgacttcggccacgccgtgtgcctgcagcccgacggcctgggcaagagcctgctgaccggcgactacatccccggcaccgagacccacatggcccccgaggtggtgctgggcagaagctgcgacgccaaggtggacgtgtggagcagctgctgcatgatgctgcacatgctgaacggctgccacccctggacccagttcttcagaggccccctgtgcctgaaggtgggcgacggcacccagcacggccagcagggcgagctgcagggccccggcgcccaggccgccggctggagaggctgcagcgccgtggccgacggcgccagaggcggcctggtgatccacgtgggcagctag

SEQ ID NO: 89373 - DNA, 3942 bp, synthetic construct
  misc_feature 1..3942: note = Description of Artificial Sequence: Synthetic coding sequence
  source 1..3942: mol_type = other DNA
atggagagcggcggcggcaacgcccccgccggcgccctgggcgccgccagcgagagcccccagtgcccccccccccccggcgtggagggcgccgccggccccgccgagcccgacggcgccgccgagggcgccgccggcggcagcggcgagggcgagagcggcggcggccccagaagagccctgagagccgtgtacgtgagaagcgagagcagccagggcggcgccgccggcggccccgaggccggcgccagacagtgcctgctgagagcctgcgaggccgagggcgcccacctgaccagcgtgcccttcggcgagctggacttcggcgagaccgccgtgctggacgccttctacgacgccgacgtggccgtggtggacatgagcgacgtgagcagacagcccagcctgttctaccacctgggcgtgagagagagcttcgacatggccaacaacgtgatcctgtaccacgacaccgacgccgacaccgccctgagcctgaaggacatggtgacccagaagaacaccgccagcagcggcaactactacttcatcccctacatcgtgaccccctgcgccgactacttctgctgcgagagcgacgcccagagaagagccagcgagtacatgcagcccaactgggacaacatcctgggccccctgtgcatgcccctggtggacagattcatcagcctgctgaaggacatccacgtgaccagctgcgtgtactacaaggagaccctgctgaacgacatcagaaaggccagagagaagtaccagggcgaggagctggccaaggagctggccagaatcaagctgagaatggacaacaccgaggtgctgaccagcgacatcatcatcaacctgctgctgagctacagagacatccaggactacgacgccatggtgaagctggtggagaccctggagatgctgcccacctgcgacctggccgaccagcacaacatcaagttccactacgccttcgccctgaacagaagaaacagcaccggcgacagagagaaggccctgcagatcatgctgcaggtgctgcagagctgcgaccaccccggccccgacatgttctgcctgtgcggcagaatctacaaggacatcttcctggacagcgactgcaaggacgacaccagcagagacagcgccatcgagtggtacagaaagggcttcgagctgcagagcagcctgtacagcggcatcaacctggccgtgctgctgatcgtggccggccagcagttcgagaccagcctggagctgagaaagatcggcgtgagactgaacagcctgctgggcagaaagggcagcctggagaagatgaacaactactgggacgtgggccagttcttcagcgtgagcatgctggcccacgacgtgggcaaggccgtgcaggccgccgagagactgttcaagctgaagccccccgtgtggtacctgagaagcctggtgcagaacctgctgctgatcagaagattcaagaagaccatcatcgagcacagccccagacaggagagactgaacttctggctggacatcatcttcgaggccaccaacgaggtgaccaacggcctgagattccccgtgctggtgatcgagcccaccaaggtgtaccagcccagctacgtgagcatcaacaacgaggccgaggagagaaccgtgagcctgtggcacgtgagccccaccgagatgaagcagatgcacgagtggaacttcaccgccagcagcatcaagggcatcagcctgagcaagttcgacgagagatgctgcttcctgtacgtgcacgacaacagcgacgacttccagatctacttcagcaccgaggagcagtgcagcagattcttcagcctggtgaaggagatgatcaccaacaccgccggcagcaccgtggagctggagggcgagaccgacggcgacaccctggagtacgagtacgaccacgacgccaacggcgagagagtggtgctgggcaagggcacctacggcatcgtgtacgccggcagagacctgagcaaccaggtgagaatcgccatcaaggagatccccgagagagacagcagatacagccagcccctgcacgaggagatcgccctgcacaagtacctgaagcacagaaacatcgtgcagtacctgggcagcgtgagcgagaacggctacatcaagatcttcatggagcaggtgcccggcggcagcctgagcgccctgctgagaagcaagtggggccccatgaaggagcccaccatcaagttctacaccaagcagatcctggagggcctgaagtacctgcacgagaaccagatcgtgcacagagacatcaagggcgacaacgtgctggtgaacacctacagcggcgtggtgaagatcagcgacttcggcaccagcaagagactggccggcgtgaacccctgcaccgagaccttcaccggcaccctgcagtacatggcccccgagatcatcgaccagggccccagaggctacggcgcccccgccgacatctggagcctgggctgcaccatcatcgagatggccaccagcaagccccccttccacgagctgggcgagccccaggccgccatgttcaaggtgggcatgttcaagatccaccccgagatccccgaggccctgagcgccgaggccagagccttcatcctgagctgcttcgagcccgacccccacaagagagccaccaccgccgagctgctgagagagggcttcctgagacaggtgaacaagggcaagaagaacagaatcgccttcaagcccagcgagggccccagaggcgtggtgctggccctgcccacccagggcgagcccatggccaccagcagcagcgagcacggcagcgtgagccccgacagcgacgcccagcccgacgccctgttcgagagaaccagagcccccagacaccacctgggccacctgctgagcgtgcccgacgagagcagcgccctggaggacagaggcctggccagcagccccgaggacagagaccagggcctgttcctgctgagaaaggacagcgagagaagagccatcctgtacaagatcctgtgggaggagcagaaccaggtggccagcaacctgcaggagtgcgtggcccagagcagcgaggagctgcacctgagcgtgggccacatcaagcagatcatcggcatcctgagagacttcatcagaagccccgagcacagagtgatggccaccaccatcagcaagctgaaggtggacctggacttcgacagcagcagcatcagccagatccacctggtgctgttcggcttccaggacgccgtgaacaagatcctgagaaaccacctgatcagaccccactggatgttcgccatggacaacatcatcagaagagccgtgcaggccgccgtgaccatcctgatccccgagctgagagcccacttcgagcccacctgcgagaccgagggcgtggacaaggacatggacgaggccgaggagggctacccccccgccaccggccccggccaggaggcccagccccaccagcagcacctgagcctgcagctgggcgagctgagacaggagaccaacagactgctggagcacctggtggagaaggagagagagtaccagaacctgctgagacagaccctggagcagaagacccaggagctgtaccacctgcagctgaagctgaagagcaactgcatcaccgagaaccccgccggcccctacggccagagaaccgacaaggagctgatcgactggctgagactgcagggcgccgacgccaagaccatcgagaagatcgtggaggagggctacaccctgagcgacatcctgaacgagatcaccaaggaggacctgagatacctgagactgagaggcggcctgctgtgcagactgtggagcgccgtgagccagtacagaagagcccaggaggccagcgagaccaaggacaaggcctag

SEQ ID NO: 89374 - DNA, 4677 bp, synthetic construct
  misc_feature 1..4677: note = Description of Artificial Sequence: Synthetic coding sequence
  source 1..4677: mol_type = other DNA
atgagagaggccgccgccgccctggtgcccccccccgccttcgccgtgacccccgccgccgccatggaggagccccccccccccccccccccccccccccccccccccgagcccgagaccgagagcgagcccgagtgctgcctggccgccagacaggagggcaccctgggcgacagcgcctgcaagagccccgagagcgacctggaggacttcagcgacgagaccaacaccgagaacctgtacggcaccagcccccccagcacccccagacagatgaagagaatgagcaccaagcaccagagaaacaacgtgggcagacccgccagcagaagcaacctgaaggagaagatgaacgcccccaaccagcccccccacaaggacaccggcaagaccgtggagaacgtggaggagtacagctacaagcaggagaagaagatcagagccgccctgagaaccaccgagagagacagaaagaagaacgtgcagtgcagcttcatgctggacagcgtgggcggcagcctgcccaagaagagcatccccgacgtggacctgaacaagccctacctgagcctgggctgcagcaacgccaagctgcccgtgagcgtgcccatgcccatcgccagacccgccagacagaccagcagaaccgactgccccgccgacagactgaagttcttcgagaccctgagactgctgctgaagctgaccagcgtgagcaagaagaaggacagagagcagagaggccaggagaacaccagcggcttctggctgaacagaagcaacgagctgatctggctggagctgcaggcctggcacgccggcagaaccatcaacgaccaggacttcttcctgtacaccgccagacaggccatccccgacatcatcaacgagatcctgaccttcaaggtggactacggcagcttcgccttcgtgagagacagagccggcttcaacggcaccagcgtggagggccagtgcaaggccacccccggcaccaagatcgtgggctacagcacccaccacgagcacctgcagagacagagagtgagcttcgagcaggtgaagagaatcatggagctgctggagtacatcgaggccctgtaccccagcctgcaggccctgcagaaggactacgagaagtacgccgccaaggacttccaggacagagtgcaggccctgtgcctgtggctgaacatcaccaaggacctgaaccagaagctgagaatcatgggcaccgtgctgggcatcaagaacctgagcgacatcggctggcccgtgttcgagatccccagccccagacccagcaagggcaacgagcccgagtacgagggcgacgacaccgagggcgagctgaaggagctggagagcagcaccgacgagagcgaggaggagcagatcagcgaccccagagtgcccgagatcagacagcccatcgacaacagcttcgacatccagagcagagactgcatcagcaagaagctggagagactggagagcgaggacgacagcctgggctggggcgcccccgactggagcaccgaggccggcttcagcagacactgcctgaccagcatctacagacccttcgtggacaaggccctgaagcagatgggcctgagaaagctgatcctgagactgcacaagctgatggacggcagcctgcagagagccagaatcgccctggtgaagaacgacagacccgtggagttcagcgagttccccgaccccatgtggggcagcgactacgtgcagctgagcagaaccccccccagcagcgaggagaagtgcagcgccgtgagctgggaggagctgaaggccatggacctgcccagcttcgagcccgccttcctggtgctgtgcagagtgctgctgaacgtgatccacgagtgcctgaagctgagactggagcagagacccgccggcgagcccagcctgctgagcatcaagcagctggtgagagagtgcaaggaggtgctgaagggcggcctgctgatgaagcagtactaccagttcatgctgcaggaggtgctggaggacctggagaagcccgactgcaacatcgacgccttcgaggaggacctgcacaagatgctgatggtgtacttcgactacatgagaagctggatccagatgctgcagcagctgccccaggccagccacagcctgaagaacctgctggaggaggagtggaacttcaccaaggagatcacccactacatcagaggcggcgaggcccaggccggcaagctgttctgcgacatcgccggcatgctgctgaagagcaccggcagcttcctggagttcggcctgcaggagagctgcgccgagttctggaccagcgccgacgacagcagcgccagcgacgagatcagaagaagcgtgatcgagatcagcagagccctgaaggagctgttccacgaggccagagagagagccagcaaggccctgggcttcgccaagatgctgagaaaggacctggagatcgccgccgagttcagactgagcgcccccgtgagagacctgctggacgtgctgaagagcaagcagtacgtgaaggtgcagatccccggcctggagaacctgcagatgttcgtgcccgacaccctggccgaggagaagagcatcatcctgcagctgctgaacgccgccgccggcaaggactgcagcaaggacagcgacgacgtgctgatcgacgcctacctgctgctgaccaagcacggcgacagagccagagacagcgaggacagctggggcacctgggaggcccagcccgtgaaggtggtgccccaggtggagaccgtggacaccctgagaagcatgcaggtggacaacctgctgctggtggtgatgcagagcgcccacctgaccatccagagaaaggccttccagcagagcatcgagggcctgatgaccctgtgccaggagcagaccagcagccagcccgtgatcgccaaggccctgcagcagctgaagaacgacgccctggagctgtgcaacagaatcagcaacgccatcgacagagtggaccacatgttcaccagcgagttcgacgccgaggtggacgagagcgagagcgtgaccctgcagcagtactacagagaggccatgatccagggctacaacttcggcttcgagtaccacaaggaggtggtgagactgatgagcggcgagttcagacagaagatcggcgacaagtacatcagcttcgccagaaagtggatgaactacgtgctgaccaagtgcgagagcggcagaggcaccagacccagatgggccacccagggcttcgacttcctgcaggccatcgagcccgccttcatcagcgccctgcccgaggacgacttcctgagcctgcaggccctgatgaacgagtgcatcggccacgtgatcggcaagccccacagccccgtgaccggcctgtacctggccatccacagaaacagccccagacccatgaaggtgcccagatgccacagcgacccccccaacccccacctgatcatccccacccccgagggcttcagaggcagcagcgtgcccgagaacgacagactggccagcatcgccgccgagctgcagttcagaagcctgagcagacacagcagccccaccgaggagagagacgagcccgcctaccccagaggcgacagcagcggcagcaccagaagaagctgggagctgagaaccctgatcagccagagcaaggacaccgccagcaagctgggccccatcgaggccatccagaagagcgtgagactgttcgaggagaagagatacagagagatgagaagaaagaacatcatcggccaggtgtgcgacacccccaagagctacgacaacgtgatgcacgtgggcctgagaaaggtgaccttcaagtggcagagaggcaacaagatcggcgagggccagtacggcaaggtgtacacctgcatcagcgtggacaccggcgagctgatggccatgaaggagatcagattccagcccaacgaccacaagaccatcaaggagaccgccgacgagctgaagatcttcgagggcatcaagcaccccaacctggtgagatacttcggcgtggagctgcacagagaggagatgtacatcttcatggagtactgcgacgagggcaccctggaggaggtgagcagactgggcctgcaggagcacgtgatcagactgtacagcaagcagatcaccatcgccatcaacgtgctgcacgagcacggcatcgtgcacagagacatcaagggcgccaacatcttcctgaccagcagcggcctgatcaagctgggcgacttcggctgcagcgtgaagctgaagaacaacgcccagaccatgcccggcgaggtgaacagcaccctgggcaccgccgcctacatggcccccgaggtgatcaccagagccaagggcgagggccacggcagagccgccgacatctggagcctgggctgcgtggtgatcgagatggtgaccggcaagagaccctggcacgagtacgagcacaacttccagatcatgtacaaggtgggcatgggccacaagccccccatccccgagagactgagccccgagggcaaggacttcctgagccactgcctggagagcgaccccaagatgagatggaccgccagccagctgctggaccacagcttcgtgaaggtgtgcaccgacgaggagtag

SEQ ID NO: 89375 - DNA, 4827 bp, synthetic construct
  misc_feature 1..4827: note = Description of Artificial Sequence: Synthetic coding sequence
  source 1..4827: mol_type = other DNA
atgagagaggccgccgccgccctggtgcccccccccgccttcgccgtgacccccgccgccgccatggaggagccccccccccccccccccccccccccccccccccccgagcccgagaccgagagcgagcccgagtgctgcctggccgccagacaggagggcaccctgggcgacagcgcctgcaagagccccgagagcgacctggaggacttcagcgacgagaccaacaccgagaacctgtacggcaccagcccccccagcacccccagacagatgaagagaatgagcaccaagcaccagagaaacaacgtgggcagacccgccagcagaagcaacctgaaggagaagatgaacgcccccaaccagcccccccacaaggacaccggcaagaccgtggagaacgtggaggagtacagctacaagcaggagaagaagatcagagccgccctgagaaccaccgagagagacagaaagaagaacgtgcagtgcagcttcatgctggacagcgtgggcggcagcctgcccaagaagagcatccccgacgtggacctgaacaagccctacctgagcctgggctgcagcaacgccaagctgcccgtgagcgtgcccatgcccatcgccagacccgccagacagaccagcagaaccgactgccccgccgacagactgaagttcttcgagaccctgagactgctgctgaagctgaccagcgtgagcaagaagaaggacagagagcagagaggccaggagaacaccagcggcttctggctgaacagaagcaacgagctgatctggctggagctgcaggcctggcacgccggcagaaccatcaacgaccaggacttcttcctgtacaccgccagacaggccatccccgacatcatcaacgagatcctgaccttcaaggtggactacggcagcttcgccttcgtgagagacagagccggcttcaacggcaccagcgtggagggccagtgcaaggccacccccggcaccaagatcgtgggctacagcacccaccacgagcacctgcagagacagagagtgagcttcgagcaggtgaagagaatcatggagctgctggagtacatcgaggccctgtaccccagcctgcaggccctgcagaaggactacgagaagtacgccgccaaggacttccaggacagagtgcaggccctgtgcctgtggctgaacatcaccaaggacctgaaccagaagctgagaatcatgggcaccgtgctgggcatcaagaacctgagcgacatcggctggcccgtgttcgagatccccagccccagacccagcaagggcaacgagcccgagtacgagggcgacgacaccgagggcgagctgaaggagctggagagcagcaccgacgagagcgaggaggagcagatcagcgaccccagagtgcccgagatcagacagcccatcgacaacagcttcgacatccagagcagagactgcatcagcaagaagctggagagactggagagcgaggacgacagcctgggctggggcgcccccgactggagcaccgaggccggcttcagcagacactgcctgaccagcatctacagacccttcgtggacaaggccctgaagcagatgggcctgagaaagctgatcctgagactgcacaagctgatggacggcagcctgcagagagccagaatcgccctggtgaagaacgacagacccgtggagttcagcgagttccccgaccccatgtggggcagcgactacgtgcagctgagcagaaccccccccagcagcgaggagaagtgcagcgccgtgagctgggaggagctgaaggccatggacctgcccagcttcgagcccgccttcctggtgctgtgcagagtgctgctgaacgtgatccacgagtgcctgaagctgagactggagcagagacccgccggcgagcccagcctgctgagcatcaagcagctggtgagagagtgcaaggaggtgctgaagggcggcctgctgatgaagcagtactaccagttcatgctgcaggaggtgctggaggacctggagaagcccgactgcaacatcgacgccttcgaggaggacctgcacaagatgctgatggtgtacttcgactacatgagaagctggatccagatgctgcagcagctgccccaggccagccacagcctgaagaacctgctggaggaggagtggaacttcaccaaggagatcacccactacatcagaggcggcgaggcccaggccggcaagctgttctgcgacatcgccggcatgctgctgaagagcaccggcagcttcctggagttcggcctgcaggagagctgcgccgagttctggaccagcgccgacgacagcagcgccagcgacgagatcagaagaagcgtgatcgagatcagcagagccctgaaggagctgttccacgaggccagagagagagccagcaaggccctgggcttcgccaagatgctgagaaaggacctggagatcgccgccgagttcagactgagcgcccccgtgagagacctgctggacgtgctgaagagcaagcagtacgtgaaggtgcagatccccggcctggagaacctgcagatgttcgtgcccgacaccctggccgaggagaagagcatcatcctgcagctgctgaacgccgccgccggcaaggactgcagcaaggacagcgacgacgtgctgatcgacgcctacctgctgctgaccaagcacggcgacagagccagagacagcgaggacagctggggcacctgggaggcccagcccgtgaaggtggtgccccaggtggagaccgtggacaccctgagaagcatgcaggtggacaacctgctgctggtggtgatgcagagcgcccacctgaccatccagagaaaggccttccagcagagcatcgagggcctgatgaccctgtgccaggagcagaccagcagccagcccgtgatcgccaaggccctgcagcagctgaagaacgacgccctggagctgtgcaacagaatcagcaacgccatcgacagagtggaccacatgttcaccagcgagttcgacgccgaggtggacgagagcgagagcgtgaccctgcagcagtactacagagaggccatgatccagggctacaacttcggcttcgagtaccacaaggaggtggtgagactgatgagcggcgagttcagacagaagatcggcgacaagtacatcagcttcgccagaaagtggatgaactacgtgctgaccaagtgcgagagcggcagaggcaccagacccagatgggccacccagggcttcgacttcctgcaggccatcgagcccgccttcatcagcgccctgcccgaggacgacttcctgagcctgcaggccctgatgaacgagtgcatcggccacgtgatcggcaagccccacagccccgtgaccggcctgtacctggccatccacagaaacagccccagacccatgaaggtgcccagatgccacagcgacccccccaacccccacctgatcatccccacccccgagggcttcagcaccagaagcatgcccagcgacgccagaagccacggcagccccgccgccgccgccgccgccgccgccgccgccgtggccgccagcagacccagccccagcggcggcgacagcgtgctgcccaagagcatcagcagcgcccacgacaccagaggcagcagcgtgcccgagaacgacagactggccagcatcgccgccgagctgcagttcagaagcctgagcagacacagcagccccaccgaggagagagacgagcccgcctaccccagaggcgacagcagcggcagcaccagaagaagctgggagctgagaaccctgatcagccagagcaaggacaccgccagcaagctgggccccatcgaggccatccagaagagcgtgagactgttcgaggagaagagatacagagagatgagaagaaagaacatcatcggccaggtgtgcgacacccccaagagctacgacaacgtgatgcacgtgggcctgagaaaggtgaccttcaagtggcagagaggcaacaagatcggcgagggccagtacggcaaggtgtacacctgcatcagcgtggacaccggcgagctgatggccatgaaggagatcagattccagcccaacgaccacaagaccatcaaggagaccgccgacgagctgaagatcttcgagggcatcaagcaccccaacctggtgagatacttcggcgtggagctgcacagagaggagatgtacatcttcatggagtactgcgacgagggcaccctggaggaggtgagcagactgggcctgcaggagcacgtgatcagactgtacagcaagcagatcaccatcgccatcaacgtgctgcacgagcacggcatcgtgcacagagacatcaagggcgccaacatcttcctgaccagcagcggcctgatcaagctgggcgacttcggctgcagcgtgaagctgaagaacaacgcccagaccatgcccggcgaggtgaacagcaccctgggcaccgccgcctacatggcccccgaggtgatcaccagagccaagggcgagggccacggcagagccgccgacatctggagcctgggctgcgtggtgatcgagatggtgaccggcaagagaccctggcacgagtacgagcacaacttccagatcatgtacaaggtgggcatgggccacaagccccccatccccgagagactgagccccgagggcaaggacttcctgagccactgcctggagagcgaccccaagatgagatggaccgccagccagctgctggaccacagcttcgtgaaggtgtgcaccgacgaggagtag

SEQ ID NO: 89376 - DNA, 4497 bp, synthetic construct
  misc_feature 1..4497: note = Description of Artificial Sequence: Synthetic coding sequence
  source 1..4497: mol_type = other DNA
atgagagaggccgccgccgccctggtgcccccccccgccttcgccgtgacccccgccgccgccatggaggagccccccccccccccccccccccccccccccccccccgagcccgagaccgagagcgagcccgagtgctgcctggccgccagacaggagggcaccctgggcgacagcgcctgcaagagccccgagagcgacctggaggacttcagcgacgagaccaacaccgagaacctgtacggcaccagcccccccagcacccccagacagatgaagagaatgagcaccaagcaccagagaaacaacgtgggcagacccgccagcagaagcaacctgaaggagaagatgaacgcccccaaccagcccccccacaaggacaccggcaagaccgtggagaacgtggaggagtacagctacaagcaggagaagaagatcagagccgccctgagaaccaccgagagagacagaaagaagaacgtgcagtgcagcttcatgctggacagcgtgggcggcagcctgcccaagaagagcatccccgacgtggacctgaacaagccctacctgagcctgggctgcagcaacgccaagctgcccgtgagcgtgcccatgcccatcgccagacccgccagacagaccagcagaaccgactgccccgccgacagactgaagttcttcgagaccctgagactgctgctgaagctgaccagcgtgagcaagaagaaggacagagagcagagaggccaggagaacaccagcggcttctggctgaacagaagcaacgagctgatctggctggagctgcaggcctggcacgccggcagaaccatcaacgaccaggacttcttcctgtacaccgccagacaggccatccccgacatcatcaacgagatcctgaccttcaaggtggactacggcagcttcgccttcgtgagagacagagccggcttcaacggcaccagcgtggagggccagtgcaaggccacccccggcaccaagatcgtgggctacagcacccaccacgagcacctgcagagacagagagtgagcttcgagcaggtgaagagaatcatggagctgctggagtacatcgaggccctgtaccccagcctgcaggccctgcagaaggactacgagaagtacgccgccaaggacttccaggacagagtgcaggccctgtgcctgtggctgaacatcaccaaggacctgaaccagaagctgagaatcatgggcaccgtgctgggcatcaagaacctgagcgacatcggctggcccgtgttcgagatccccagccccagacccagcaagggcaacgagcccgagtacgagggcgacgacaccgagggcgagctgaaggagctggagagcagcaccgacgagagcgaggaggagcagatcagcgaccccagagtgcccgagatcagacagcccatcgacaacagcttcgacatccagagcagagactgcatcagcaagaagctggagagactggagagcgaggacgacagcctgggctggggcgcccccgactggagcaccgaggccggcttcagcagacactgcctgaccagcatctacagacccttcgtggacaaggccctgaagcagatgggcctgagaaagctgatcctgagactgcacaagctgatggacggcagcctgcagagagccagaatcgccctggtgaagaacgacagacccgtggagttcagcgagttccccgaccccatgtggggcagcgactacgtgcagctgagcagaaccccccccagcagcgaggagaagtgcagcgccgtgagctgggaggagctgaaggccatggacctgcccagcttcgagcccgccttcctggtgctgtgcagagtgctgctgaacgtgatccacgagtgcctgaagctgagactggagcagagacccgccggcgagcccagcctgctgagcatcaagcagctggtgagagagtgcaaggaggtgctgaagggcggcctgctgatgaagcagtactaccagttcatgctgcaggaggtgctggaggacctggagaagcccgactgcaacatcgacgccttcgaggaggacctgcacaagatgctgatggtgtacttcgactacatgagaagctggatccagatgctgcagcagctgccccaggccagccacagcctgaagaacctgctggaggaggagtggaacttcaccaaggagatcacccactacatcagaggcggcgaggcccaggccggcaagctgttctgcgacatcgccggcatgctgctgaagagcaccggcagcttcctggagttcggcctgcaggagagctgcgccgagttctggaccagcgccgacgacagcagcgccagcgacgagatcagaagaagcgtgatcgagatcagcagagccctgaaggagctgttccacgaggccagagagagagccagcaaggccctgggcttcgccaagatgctgagaaaggacctggagatcgccgccgagttcagactgagcgcccccgtgagagacctgctggacgtgctgaagagcaagcagtacgtgaaggtgcagatccccggcctggagaacctgcagatgttcgtgcccgacaccctggccgaggagaagagcatcatcctgcagctgctgaacgccgccgccggcaaggactgcagcaaggacagcgacgacgtgctgatcgacgcctacctgctgctgaccaagcacggcgacagagccagagacagcgaggacagctggggcacctgggaggcccagcccgtgaaggtggtgccccaggtggagaccgtggacaccctgagaagcatgcaggtggacaacctgctgctggtggtgatgcagagcgcccacctgaccatccagagaaaggccttccagcagagcatcgagggcctgatgaccctgtgccaggagcagaccagcagccagcccgtgatcgccaaggccctgcagcagctgaagaacgacgccctggagctgtgcaacagaatcagcaacgccatcgacagagtggaccacatgttcaccagcgagttcgacgccgaggtggacgagagcgagagcgtgaccctgcagcagtactacagagaggccatgatccagggctacaacttcggcttcgagtaccacaaggaggtggtgagactgatgagcggcgagttcagacagaagatcggcgacaagtacatcagcttcgccagaaagtggatgaactacgtgctgaccaagtgcgagagcggcagaggcaccagacccagatgggccacccagggcttcgacttcctgcaggccatcgagcccgccttcatcagcgccctgcccgaggacgacttcctgagcctgcaggccctgatgaacgagtgcatcggccacgtgatcggcaagccccacagccccgtgaccggcctgtacctggccatccacagaaacagccccagacccatgaaggtgcccagatgccacagcgacccccccaacccccacctgatcatccccacccccgagggcttcagaggcagcagcgtgcccgagaacgacagactggccagcatcgccgccgagctgcagttcagaagcctgagcagacacagcagccccaccgaggagagagacgagcccgcctaccccagaggcgacagcagcggcagcaccagaagaagctgggagctgagaaccctgatcagccagagcaaggacaccgccagcaagctgggccccatcgaggccatccagaagagcgtgagactgttcgaggagaagagatacagagagatgagaagaaagaacatcatcggccaggtgtgcgacacccccaagagctacgacaacgtgatgcacgtgggcctgagaaaggtgaccttcaagtggcagagaggcaacaagatcggcgagggccagtacggcaaggtgtacacctgcatcagcgtggacaccggcgagctgatggccatgaaggagatcagattccagcccaacgaccacaagaccatcaaggagaccgccgacgagctgaagatcttcgagggcatcaagcaccccaacctggtgagatacttcggcgtggagctgcacagagaggagatgtacatcttcatggagtactgcgacgagggcaccctggaggaggtgagcagactgggcctgcaggagcacgtgatcagactgtacagcaagcagatcaccatcgccatcaacgtgctgcacgagcacggcatcgtgcacagagacatcaagggcgccaacatcttcctgaccagcagcggcctgatcaagctgggcgacttcggctgcagcgtgaagctgaagaacaacgcccagaccatgcccggcgaggtgaacagcaccctgggcaccgccgcctacatggcccccgaggtgatcaccagagccaagggcgagggccacggcagagccgccgacatctggagcctgggctgcgtggtgatcgagatggtgaccggcaagatctgcaaggacaccgagtag

SEQ ID NO: 89377 - DNA, 324 bp, synthetic construct
  misc_feature 1..324: note = Description of Artificial Sequence: Synthetic coding sequence
  source 1..324: mol_type = other DNA
atggaggagccccccccccccccccccccccccccccccccccccgagcccgagaccgagagcgagcccgagtgctgcctggccgccagacaggagggcaccctgggcgacagcgcctgcaagagccccgagagcgacctggaggacttcagcgacgagaccaacaccgagaacctgtacggcaccagcccccccagcacccccagacagatgaagagaatgagcaccaagcaccagagaaacaacgtgggcagacccgccagcagaagcaacctgaagggcgtgagacagatcagccacgccgtgagcagcagcctgaactag

SEQ ID NO: 89378 - DNA, 1866 bp, synthetic construct
  misc_feature 1..1866: note = Description of Artificial Sequence: Synthetic coding sequence
  source 1..1866: mol_type = other DNA
atggagcaggtgcccggcggcagcctgagcgccctgctgagaagcaagtggggccccctgaaggacaacgagcagaccatcggcttctacaccaagcagatcctggagggcctgaagtacctgcacgacaaccagatcgtgcacagagacatcaagggcgacaacgtgctgatcaacacctacagcggcgtgctgaagatcagcgacttcggcaccagcaagagactggccggcatcaacccctgcaccgagaccttcaccggcaccctgcagtacatggcccccgagatcatcgacaagggccccagaggctacggcaaggccgccgacatctggagcctgggctgcaccatcatcgagatggccaccggcaagccccccttctacgagctgggcgagccccaggccgccatgttcaaggtgggcatgttcaaggtgcaccccgagatccccgagagcatgagcgccgaggccaaggccttcatcctgaagtgcttcgagcccgaccccgacaagagagcctgcgccaacgacctgctggtggacgagttcctgaaggtgagcagcaagaagaagaagacccagcccaagctgagcgccctgagcgccggcagcaacgagtacctgagaagcatcagcctgcccgtgcccgtgctggtggaggacaccagcagcagcagcgagtacggcagcgtgagccccgacaccgagctgaaggtggaccccttcagcttcaagaccagagccaagagctgcggcgagagagacgtgaagggcatcagaaccctgttcctgggcatccccgacgagaacttcgaggaccacagcgccccccccagccccgaggagaaggacagcggcttcttcatgctgagaaaggacagcgagagaagagccaccctgcacagaatcctgaccgaggaccaggacaagatcgtgagaaacctgatggagagcctggcccagggcgccgaggagcccaagctgaagtgggagcacatcaccaccctgatcgccagcctgagagagttcgtgagaagcaccgacagaaagatcatcgccaccaccctgagcaagctgaagctggagctggacttcgacagccacggcatcagccaggtgcaggtggtgctgttcggcttccaggacgccgtgaacaaggtgctgagaaaccacaacatcaagccccactggatgttcgccctggacagcatcatcagaaaggccgtgcagaccgccatcaccatcctggtgcccgagctgagaccccacttcagcctggccagcgagagcgacaccgccgaccaggaggacctggacgtggaggacgaccacgaggagcagcccagcaaccagaccgtgagaagaccccaggccgtgatcgaggacgccgtggccaccagcggcgtgagcaccctgagcagcaccgtgagccacgacagccagagcgcccacagaagcctgaacgtgcagctgggcagaatgaagatcgagaccaacagactgctggaggagctggtgagaaaggagaaggagctgcaggccctgctgcacagagccatcgaggagaaggaccaggagatcaagcacctgaagctgaagagccagcccatcgagatccccgagctgcccgtgttccacctgaacagcagcggcaccaacaccgaggacagcgagctgaccgactggctgagagtgaacggcgccgacgaggacaccatcagcagattcctggccgaggactacaccctgctggacgtgctgtactacgtgaccagagacgacctgaagtgcctgagactgagaggcggcatgctgtgcaccctgtggaaggccatcatcgacttcagaaacaagcagacctag

SEQ ID NO: 89379 - DNA, 4125 bp, synthetic construct
  misc_feature 1..4125: note = Description of Artificial Sequence: Synthetic coding sequence
  source 1..4125: mol_type = other DNA
atgagcaccgaggccgacgagggcatcaccttcagcgtgccccccttcgcccccagcggcttctgcaccatccccgagggcggcatctgcagaagaggcggcgccgccgccgtgggcgagggcgaggagcaccagctgcccccccccccccccggcagcttctggaacgtggagagcgccgccgcccccggcatcggctgccccgccgccaccagcagcagcagcgccaccagaggcagaggcagcagcgtgggcggcggcagcagaagaaccaccgtggcctacgtgatcaacgaggccagccagggccagctggtggtggccgagagcgaggccctgcagagcctgagagaggcctgcgagaccgtgggcgccaccctggagaccctgcacttcggcaagctggacttcggcgagaccaccgtgctggacagattctacaacgccgacatcgccgtggtggagatgagcgacgccttcagacagcccagcctgttctaccacctgggcgtgagagagagcttcagcatggccaacaacatcatcctgtactgcgacaccaacagcgacagcctgcagagcctgaaggagatcatctgccagaagaacaccatgtgcaccggcaactacaccttcgtgccctacatgatcaccccccacaacaaggtgtactgctgcgacagcagcttcatgaagggcctgaccgagctgatgcagcccaacttcgagctgctgctgggccccatctgcctgcccctggtggacagattcatccagctgctgaaggtggcccaggccagcagcagccagtacttcagagagagcatcctgaacgacatcagaaaggccagaaacctgtacaccggcaaggagctggccgccgagctggccagaatcagacagagagtggacaacatcgaggtgctgaccgccgacatcgtgatcaacctgctgctgagctacagagacatccaggactacgacagcatcgtgaagctggtggagaccctggagaagctgcccaccttcgacctggccagccaccaccacgtgaagttccactacgccttcgccctgaacagaagaaacctgcccggcgacagagccaaggccctggacatcatgatccccatggtgcagagcgagggccaggtggccagcgacatgtactgcctggtgggcagaatctacaaggacatgttcctggacagcaacttcaccgacaccgagagcagagaccacggcgccagctggttcaagaaggccttcgagagcgagcccaccctgcagagcggcatcaactacgccgtgctgctgctggccgccggccaccagttcgagagcagcttcgagctgagaaaggtgggcgtgaagctgagcagcctgctgggcaagaagggcaacctggagaagctgcagagctactgggaggtgggcttcttcctgggcgccagcgtgctggccaacgaccacatgagagtgatccaggccagcgagaagctgttcaagctgaagacccccgcctggtacctgaagagcatcgtggagaccatcctgatctacaagcacttcgtgaagctgaccaccgagcagcccgtggccaagcaggagctggtggacttctggatggacttcctggtggaggccaccaagaccgacgtgaccgtggtgagattccccgtgctgatcctggagcccaccaagatctaccagcccagctacctgagcatcaacaacgaggtggaggagaagaccatcagcatctggcacgtgctgcccgacgacaagaagggcatccacgagtggaacttcagcgccagcagcgtgagaggcgtgagcatcagcaagttcgaggagagatgctgcttcctgtacgtgctgcacaacagcgacgacttccagatctacttctgcaccgagctgcactgcaagaagttcttcgagatggtgaacaccatcaccgaggagaagggcagaagcaccgaggagggcgactgcgagagcgacctgctggagtacgactacgagtacgacgagaacggcgacagagtggtgctgggcaagggcacctacggcatcgtgtacgccggcagagacctgagcaaccaggtgagaatcgccatcaaggagatccccgagagagacagcagatacagccagcccctgcacgaggagatcgccctgcacaagcacctgaagcacaagaacatcgtgcagtacctgggcagcttcagcgagaacggcttcatcaagatcttcatggagcaggtgcccggcggcagcctgagcgccctgctgagaagcaagtggggccccctgaaggacaacgagcagaccatcggcttctacaccaagcagatcctggagggcctgaagtacctgcacgacaaccagatcgtgcacagagacatcaagggcgacaacgtgctgatcaacacctacagcggcgtgctgaagatcagcgacttcggcaccagcaagagactggccggcatcaacccctgcaccgagaccttcaccggcaccctgcagtacatggcccccgagatcatcgacaagggccccagaggctacggcaaggccgccgacatctggagcctgggctgcaccatcatcgagatggccaccggcaagccccccttctacgagctgggcgagccccaggccgccatgttcaaggtgggcatgttcaaggtgcaccccgagatccccgagagcatgagcgccgaggccaaggccttcatcctgaagtgcttcgagcccgaccccgacaagagagcctgcgccaacgacctgctggtggacgagttcctgaaggtgagcagcaagaagaagaagacccagcccaagctgagcgccctgagcgccggcagcaacgagtacctgagaagcatcagcctgcccgtgcccgtgctggtggaggacaccagcagcagcagcgagtacggcagcgtgagccccgacaccgagctgaaggtggaccccttcagcttcaagaccagagccaagagctgcggcgagagagacgtgaagggcatcagaaccctgttcctgggcatccccgacgagaacttcgaggaccacagcgccccccccagccccgaggagaaggacagcggcttcttcatgctgagaaaggacagcgagagaagagccaccctgcacagaatcctgaccgaggaccaggacaagatcgtgagaaacctgatggagagcctggcccagggcgccgaggagcccaagctgaagtgggagcacatcaccaccctgatcgccagcctgagagagttcgtgagaagcaccgacagaaagatcatcgccaccaccctgagcaagctgaagctggagctggacttcgacagccacggcatcagccaggtgcaggtggtgctgttcggcttccaggacgccgtgaacaaggtgctgagaaaccacaacatcaagccccactggatgttcgccctggacagcatcatcagaaaggccgtgcagaccgccatcaccatcctggtgcccgagctgagaccccacttcagcctggccagcgagagcgacaccgccgaccaggaggacctggacgtggaggacgaccacgaggagcagcccagcaaccagaccgtgagaagaccccaggccgtgatcgaggacgccgtggccaccagcggcgtgagcaccctgagcagcaccgtgagccacgacagccagagcgcccacagaagcctgaacgtgcagctgggcagaatgaagatcgagaccaacagactgctggaggagctggtgagaaaggagaaggagctgcaggccctgctgcacagagccatcgaggagaaggaccaggagatcaagcacctgaagctgaagagccagcccatcgagatccccgagctgcccgtgttccacctgaacagcagcggcaccaacaccgaggacagcgagctgaccgactggctgagagtgaacggcgccgacgaggacaccatcagcagattcctggccgaggactacaccctgctggacgtgctgtactacgtgaccagagacgacctgaagtgcctgagactgagaggcggcatgctgtgcaccctgtggaaggccatcatcgacttcagaaacaagcagacctag

SEQ ID NO: 89380 - DNA, 3771 bp, synthetic construct
  misc_feature 1..3771: note = Description of Artificial Sequence: Synthetic coding sequence
  source 1..3771: mol_type = other DNA
accctgcagagagccagcggcgccgccaccgaggcccccagaagaagcgagcccccccccggcagcggcgtgcccagcggcgagagagcccccgagagaagaagaagaagaggcggcgagggcgccgccagagacggcagctgcctggccagaagagccagaagcagccccgagctgtggctggccagaagatgcggctgggccggcgacgccgccgccgtggccgccagacccggcgagatgagcaccgaggccgacgagggcatcaccttcagcgtgccccccttcgcccccagcggcttctgcaccatccccgagggcggcatctgcagaagaggcggcgccgccgccgtgggcgagggcgaggagcaccagctgcccccccccccccccggcagcttctggaacgtggagagcgccgccgcccccggcatcggctgccccgccgccaccagcagcagcagcgccaccagaggcagaggcagcagcgtgggcggcggcagcagaagaaccaccgtggcctacgtgatcaacgaggccagccagggccagctggtggtggccgagagcgaggccctgcagagcctgagagaggcctgcgagaccgtgggcgccaccctggagaccctgcacttcggcaagctggacttcggcgagaccaccgtgctggacagattctacaacgccgacatcgccgtggtggagatgagcgacgccttcagacagcccagcctgttctaccacctgggcgtgagagagagcttcagcatggccaacaacatcatcctgtactgcgacaccaacagcgacagcctgcagagcctgaaggagatcatctgccagaagaacaccatgtgcaccggcaactacaccttcgtgccctacatgatcaccccccacaacaaggtgtactgctgcgacagcagcttcatgaagggcctgaccgagctgatgcagcccaacttcgagctgctgctgggccccatctgcctgcccctggtggacagattcatccagctgctgaaggtggcccaggccagcagcagccagtacttcagagagagcatcctgaacgacatcagaaaggccagaaacctgtacaccggcaaggagctggccgccgagctggccagaatcagacagagagtggacaacatcgaggtgctgaccgccgacatcgtgatcaacctgctgctgagctacagagacatccaggactacgacagcatcgtgaagctggtggagaccctggagaagctgcccaccttcgacctggccagccaccaccacgtgaagttccactacgccttcgccctgaacagaagaaacctgcccggcgacagagccaaggccctggacatcatgatccccatggtgcagagcgagggccaggtggccagcgacatgtactgcctggtgggcagaatctacaaggacatgttcctggacagcaacttcaccgacaccgagagcagagaccacggcgccagctggttcaagaaggccttcgagagcgagcccaccctgcagagcggcatcaactacgccgtgctgctgctggccgccggccaccagttcgagagcagcttcgagctgagaaaggtgggcgtgaagctgagcagcctgctgggcaagaagggcaacctggagaagctgcagagctactgggaggtgggcttcttcctgggcgccagcgtgctggccaacgaccacatgagagtgatccaggccagcgagaagctgttcaagctgaagacccccgcctggtacctgaagagcatcgtggagaccatcctgatctacaagcacttcgtgaagctgaccaccgagcagcccgtggccaagcaggagctggtggacttctggatggacttcctggtggaggccaccaagaccgacgtgaccgtggtgagattccccgtgctgatcctggagcccaccaagatctaccagcccagctacctgagcatcaacaacgaggtggaggagaagaccatcagcatctggcacgtgctgcccgacgacaagaagggcatccacgagtggaacttcagcgccagcagcgtgagaggcgtgagcatcagcaagttcgaggagagatgctgcttcctgtacgtgctgcacaacagcgacgacttccagatctacttctgcaccgagctgcactgcaagaagttcttcgagatggtgaacaccatcaccgaggagaagggcagaagcaccgaggagggcgactgcgagagcgacctgctggagtacgactacgagtacgacgagaacggcgacagagtggtgctgggcaagggcacctacggcatcgtgtacgccggcagagacctgagcaaccaggtgagaatcgccatcaaggagatccccgagagagacagcagatacagccagcccctgcacgaggagatcgccctgcacaagcacctgaagcacaagaacatcgtgcagtacctgggcagcttcagcgagaacggcttcatcaagatcttcatggagcaggtgcccggcggcagcctgagcgccctgctgagaagcaagtggggccccctgaaggacaacgagcagaccatcggcttctacaccaagcagatcctggagggcctgaagtacctgcacgacaaccagatcgtgcacagagacatcaagggcgacaacgtgctgatcaacacctacagcggcgtgctgaagatcagcgacttcggcaccagcaagagactggccggcatcaacccctgcaccgagaccttcaccggcaccctgcagtacatggcccccgagatcatcgacaagggccccagaggctacggcaaggccgccgacatctggagcctgggctgcaccatcatcgagatggccaccggcaagccccccttctacgagctgggcgagccccaggccgccatgttcaaggtgggcatgttcaaggtgcaccccgagatccccgagagcatgagcgccgaggccaaggccttcatcctgaagtgcttcgagcccgaccccgacaagagagcctgcgccaacgacctgctggtggacgagttcctgaaggtgagcagcaagaagaagaagacccagcccaagctgagcgacctgagcatcgcccaggccgagtacctgagaagcatcagcctgcccgtgcccgtgctggtggaggacaccagcagcagcagcgagtacggcagcgtgagccccgacaccgagctgaaggtggaccccttcagcttcaagaccagagccaagagctgcggcgagagagacgtgaagggcatcagaaccctgttcctgggcatccccgacgagaacttcgaggaccacagcgccccccccagccccgaggagaaggacagcggcttcttcatgctgagaaaggacagcgagagaagagccaccctgcacagaatcctgaccgaggaccaggacaagatcgtgagaaacctgatggagagcctggcccagggcgccgaggagcccaagctgaagtgggagcacatcaccaccctgatcgccagcctgagagagttcgtgagaagcaccgacagaaagatcatcgccaccaccctgagcaagctgaagctggagctggacttcgacagccacggcatcagccaggtgcaggtggtgctgttcggcttccaggacgccgtgaacaaggtgctgagaaaccacaacatcaagccccactggatgttcgccctggacagcatcatcagaaaggccgtgcagaccgccatcaccatcctggtgcccggcatcaagccctag

SEQ ID NO: 89381 - DNA, 3867 bp, synthetic construct
  misc_feature 1..3867: note = Description of Artificial Sequence: Synthetic coding sequence
  source 1..3867: mol_type = other DNA
atggccggcccctgccccagaagcggcgccgagagagccggcagctgctggcaggaccccctggccgtggccctgagcagaggcagacagctggccgccccccccggcagaggctgcgccagaagcagacccctgagcgtggtgtacgtgctgaccagagagccccagcccggcctggagcccagagagggcaccgaggccgagcccctgcccctgagatgcctgagagaggcctgcgcccaggtgcccagacccagaccccccccccagctgagaagcctgcccttcggcaccctggagctgggcgacaccgccgccctggacgccttctacaacgccgacgtggtggtgctggaggtgagcagcagcctggtgcagcccagcctgttctaccacctgggcgtgagagagagcttcagcatgaccaacaacgtgctgctgtgcagccaggccgacctgcccgacctgcaggccctgagagaggacgtgttccagaagaacagcgactgcgtgggcagctacaccctgatcccctacgtggtgaccgccaccggcagagtgctgtgcggcgacgccggcctgctgagaggcctggccgacggcctggtgcaggccggcgtgggcaccgaggccctgctgacccccctggtgggcagactggccagactgctggaggccacccccaccgacagctgcggctacttcagagagaccatcagaagagacatcagacaggccagagagagattcagcggcccccagctgagacaggagctggccagactgcagagaagactggacagcgtggagctgctgagccccgacatcatcatgaacctgctgctgagctacagagacgtgcaggactacagcgccatcatcgagctggtggagaccctgcaggccctgcccacctgcgacgtggccgagcagcacaacgtgtgcttccactacaccttcgccctgaacagaagaaacagacccggcgacagagccaaggccctgagcgtgctgctgcccctggtgcagctggagggcagcgtggcccccgacctgtactgcatgtgcggcagaatctacaaggacatgttcttcagcagcggcttccaggacgccggccacagagagcaggcctaccactggtacagaaaggccttcgacgtggagcccagcctgcacagcggcatcaacgccgccgtgctgctgatcgccgccggccagcacttcgaggacagcaaggagctgagactgatcggcatgaagctgggctgcctgctggccagaaagggctgcgtggagaagatgcagtactactgggacgtgggcttctacctgggcgcccagatcctggccaacgaccccacccaggtggtgctggccgccgagcagctgtacaagctgaacgcccccatctggtacctggtgagcgtgatggagaccttcctgctgtaccagcacttcagacccacccccgagccccccggcggcccccccagaagagcccacttctggctgcacttcctgctgcagagctgccagcccttcaagaccgcctgcgcccagggcgaccagtgcctggtgctggtgctggagatgaacaaggtgctgctgcccgccaagctggaggtgagaggcaccgaccccgtgagcaccgtgaccctgagcctgctggagcccgagacccaggacatccccagcagctggaccttccccgtggccagcatctgcggcgtgagcgccagcaagagagacgagagatgctgcttcctgtacgccctgccccccgcccaggacgtgcagctgtgcttccccagcgtgggccactgccagtggttctgcggcctgatccaggcctgggtgaccaaccccgacagcaccgcccccgccgaggaggccgagggcgccggcgagatgctggagttcgactacgagtacaccgagaccggcgagagactggtgctgggcaagggcacctacggcgtggtgtacgccggcagagacagacacaccagagtgagaatcgccatcaaggagatccccgagagagacagcagattcagccagcccctgcacgaggagatcgccctgcacagaagactgagacacaagaacatcgtgagatacctgggcagcgccagccagggcggctacctgaagatcttcatggaggaggtgcccggcggcagcctgagcagcctgctgagaagcgtgtggggccccctgaaggacaacgagagcaccatcagcttctacaccagacagatcctgcagggcctgggctacctgcacgacaaccacatcgtgcacagagacatcaagggcgacaacgtgctgatcaacaccttcagcggcctgctgaagatcagcgacttcggcaccagcaagagactggccggcatcaccccctgcaccgagaccttcaccggcaccctgcagtacatggcccccgagatcatcgaccagggccccagaggctacggcaaggccgccgacatctggagcctgggctgcaccgtgatcgagatggccaccggcagaccccccttccacgagctgggcagcccccaggccgccatgttccaggtgggcatgtacaaggtgcacccccccatgcccagcagcctgagcgccgaggcccaggccttcctgctgagaaccttcgagcccgaccccagactgagagccagcgcccagaccctgctgggcgaccccttcctgcagcccggcaagagaagcagaagccccagcagccccagacacgcccccagacccagcgacgcccccagcgccagccccacccccagcgccaacagcaccacccagagccagaccttcccctgcccccaggcccccagccagcacccccccagcccccccaagagatgcctgagctacggcggcaccagccagctgagagtgcccgaggagcccgccgccgaggagcccgccagccccgaggagagcagcggcctgagcctgctgcaccaggagagcaagagaagagccatgctggccgccgtgctggagcaggagctgcccgccctggccgagaacctgcaccaggagcagaagcaggagcagggcgccagactgggcagaaaccacgtggaggagctgctgagatgcctgggcgcccacatccacacccccaacagaagacagctggcccaggagctgagagccctgcagggcagactgagagcccagggcctgggccccgccctgctgcacagacccctgttcgccttccccgacgccgtgaagcagatcctgagaaagagacagatcagaccccactggatgttcgtgctggacagcctgctgagcagagccgtgagagccgccctgggcgtgctgggccccgaggtggagaaggaggccgtgagccccagaagcgaggagctgagcaacgagggcgacagccagcagagccccggccagcagagccccctgcccgtggagcccgagcagggccccgcccccctgatggtgcagctgagcctgctgagagccgagaccgacagactgagagagatcctggccggcaaggagagagagtaccaggccctggtgcagagagccctgcagagactgaacgaggaggccagaacctacgtgctggcccccgagccccccaccgccctgagcaccgaccagggcctggtgcagtggctgcaggagctgaacgtggacagcggcaccatccagatgctgctgaaccacagcttcaccctgcacaccctgctgacctacgccaccagagacgacctgatctacaccagaatcagaggcggcatggtgtgcagaatctggagagccatcctggcccagagagccggcagcacccccgtgaccagcggcccctag

SEQ ID NO: 89382 - DNA, 315 bp, synthetic construct
  misc_feature 1..315: note = Description of Artificial Sequence: Synthetic coding sequence
  source 1..315: mol_type = other DNA
atggtgcagctgagcctgctgagagccgagaccgacagactgagagagatcctggccggcaaggagagagagtaccaggccctggtgcagagagccctgcagagactgaacgaggaggccagaacctacgtgctggcccccgagccccccaccgccctgagcaccgaccagggcctggtgcagtggctgcaggagctgaacgtggacagcggcaccatccagatgggcagagacggcatgccccacctggagggccacctgggcaccgccagcagaatccacaccagccacctgtggaccctgagagccgagtag

SEQ ID NO: 89383 - DNA, 3843 bp, synthetic construct
  misc_feature 1..3843: note = Description of Artificial Sequence: Synthetic coding sequence
  source 1..3843: mol_type = other DNA
atggccggcccctgccccagaagcggcgccgagagagccggcagctgctggcaggaccccctggccgtggccctgagcagaggcagacagctggccgccccccccggcagaggctgcgccagaagcagacccctgagcgtggtgtacgtgctgaccagagagccccagcccggcctggagcccagagagggcaccgaggccgagcccctgcccctgagatgcctgagagaggcctgcgcccaggtgcccagacccagaccccccccccagctgagaagcctgcccttcggcaccctggagctgggcgacaccgccgccctggacgccttctacaacgccgacgtggtggtgctggaggtgagcagcagcctggtgcagcccagcctgttctaccacctgggcgtgagagagagcttcagcatgaccaacaacgtgctgctgtgcagccaggccgacctgcccgacctgcaggccctgagagactgcgtgggcagctacaccctgatcccctacgtggtgaccgccaccggcagagtgctgtgcggcgacgccggcctgctgagaggcctggccgacggcctggtgcaggccggcgtgggcaccgaggccctgctgacccccctggtgggcagactggccagactgctggaggccacccccaccgacagctgcggctacttcagagagaccatcagaagagacatcagacaggccagagagagattcagcggcccccagctgagacaggagctggccagactgcagagaagactggacagcgtggagctgctgagccccgacatcatcatgaacctgctgctgagctacagagacgtgcaggactacagcgccatcatcgagctggtggagaccctgcaggccctgcccacctgcgacgtggccgagcagcacaacgtgtgcttccactacaccttcgccctgaacagaagaaacagacccggcgacagagccaaggccctgagcgtgctgctgcccctggtgcagctggagggcagcgtggcccccgacctgtactgcatgtgcggcagaatctacaaggacatgttcttcagcagcggcttccaggacgccggccacagagagcaggcctaccactggtacagaaaggccttcgacgtggagcccagcctgcacagcggcatcaacgccgccgtgctgctgatcgccgccggccagcacttcgaggacagcaaggagctgagactgatcggcatgaagctgggctgcctgctggccagaaagggctgcgtggagaagatgcagtactactgggacgtgggcttctacctgggcgcccagatcctggccaacgaccccacccaggtggtgctggccgccgagcagctgtacaagctgaacgcccccatctggtacctggtgagcgtgatggagaccttcctgctgtaccagcacttcagacccacccccgagccccccggcggcccccccagaagagcccacttctggctgcacttcctgctgcagagctgccagcccttcaagaccgcctgcgcccagggcgaccagtgcctggtgctggtgctggagatgaacaaggtgctgctgcccgccaagctggaggtgagaggcaccgaccccgtgagcaccgtgaccctgagcctgctggagcccgagacccaggacatccccagcagctggaccttccccgtggccagcatctgcggcgtgagcgccagcaagagagacgagagatgctgcttcctgtacgccctgccccccgcccaggacgtgcagctgtgcttccccagcgtgggccactgccagtggttctgcggcctgatccaggcctgggtgaccaaccccgacagcaccgcccccgccgaggaggccgagggcgccggcgagatgctggagttcgactacgagtacaccgagaccggcgagagactggtgctgggcaagggcacctacggcgtggtgtacgccggcagagacagacacaccagagtgagaatcgccatcaaggagatccccgagagagacagcagattcagccagcccctgcacgaggagatcgccctgcacagaagactgagacacaagaacatcgtgagatacctgggcagcgccagccagggcggctacctgaagatcttcatggaggaggtgcccggcggcagcctgagcagcctgctgagaagcgtgtggggccccctgaaggacaacgagagcaccatcagcttctacaccagacagatcctgcagggcctgggctacctgcacgacaaccacatcgtgcacagagacatcaagggcgacaacgtgctgatcaacaccttcagcggcctgctgaagatcagcgacttcggcaccagcaagagactggccggcatcaccccctgcaccgagaccttcaccggcaccctgcagtacatggcccccgagatcatcgaccagggccccagaggctacggcaaggccgccgacatctggagcctgggctgcaccgtgatcgagatggccaccggcagaccccccttccacgagctgggcagcccccaggccgccatgttccaggtgggcatgtacaaggtgcacccccccatgcccagcagcctgagcgccgaggcccaggccttcctgctgagaaccttcgagcccgaccccagactgagagccagcgcccagaccctgctgggcgaccccttcctgcagcccggcaagagaagcagaagccccagcagccccagacacgcccccagacccagcgacgcccccagcgccagccccacccccagcgccaacagcaccacccagagccagaccttcccctgcccccaggcccccagccagcacccccccagcccccccaagagatgcctgagctacggcggcaccagccagctgagagtgcccgaggagcccgccgccgaggagcccgccagccccgaggagagcagcggcctgagcctgctgcaccaggagagcaagagaagagccatgctggccgccgtgctggagcaggagctgcccgccctggccgagaacctgcaccaggagcagaagcaggagcagggcgccagactgggcagaaaccacgtggaggagctgctgagatgcctgggcgcccacatccacacccccaacagaagacagctggcccaggagctgagagccctgcagggcagactgagagcccagggcctgggccccgccctgctgcacagacccctgttcgccttccccgacgccgtgaagcagatcctgagaaagagacagatcagaccccactggatgttcgtgctggacagcctgctgagcagagccgtgagagccgccctgggcgtgctgggccccgaggtggagaaggaggccgtgagccccagaagcgaggagctgagcaacgagggcgacagccagcagagccccggccagcagagccccctgcccgtggagcccgagcagggccccgcccccctgatggtgcagctgagcctgctgagagccgagaccgacagactgagagagatcctggccggcaaggagagagagtaccaggccctggtgcagagagccctgcagagactgaacgaggaggccagaacctacgtgctggcccccgagccccccaccgccctgagcaccgaccagggcctggtgcagtggctgcaggagctgaacgtggacagcggcaccatccagatgctgctgaaccacagcttcaccctgcacaccctgctgacctacgccaccagagacgacctgatctacaccagaatcagaggcggcatggtgtgcagaatctggagagccatcctggcccagagagccggcagcacccccgtgaccagcggcccctag

SEQ ID NO: 89384 - DNA, 2397 bp, synthetic construct
  misc_feature 1..2397: note = Description of Artificial Sequence: Synthetic coding sequence
  source 1..2397: mol_type = other DNA
tgaatgaacctgctgctgagctacagagacgtgcaggactacagcgccatcatcgagctggtggagaccctgcaggccctgcccacctgcgacgtggccgagcagcacaacgtgtgcttccactacaccttcgccctgaacagaagaaacagacccggcgacagagccaaggccctgagcgtgctgctgcccctggtgcagctggagggcagcgtggcccccgacctgtactgcatgtgcggcagaatctacaaggacatgttcttcagcagcggcttccaggacgccggccacagagagcaggcctaccactggtacagaaaggccttcgacgtggagcccagcctgcacagcggcatcaacgccgccgtgctgctgatcgccgccggccagcacttcgaggacagcaaggagctgagactgatcggcatgaagctgggctgcctgctggccagaaagggctgcgtggagaagatgcagtactactgggacgtgggcttctacctgggcgcccagatcctggccaacgaccccacccaggtggtgctggccgccgagcagctgtacaagctgaacgcccccatctggtacctggtgagcgtgatggagaccttcctgctgtaccagcacttcagacccacccccgagccccccggcggcccccccagaagagcccacttctggctgcacttcctgctgcagagctgccagcccttcaagaccgcctgcgcccagggcgaccagtgcctggtgctggtgctggagatgaacaaggtgctgctgcccgccaagctggaggtgagaggcaccgaccccgtgagcaccgtgaccctgagcctgctggagcccgagacccaggacatccccagcagctggaccttccccgtggccagcatctgcggcgtgagcgccagcaagagagacgagagatgctgcttcctgtacgccctgccccccgcccaggacgtgcagctgtgcttccccagcgtgggccactgccagtggttctgcggcctgatccaggcctgggtgaccaaccccgacagcaccgcccccgccgaggaggccgagggcgccggcgagatgctggagttcgactacgagtacaccgagaccggcgagagactggtgctgggcaagggcacctacggcgtggtgtacgccggcagagacagacacaccagagtgagaatcgccatcaaggagatccccgagagagacagcagattcagccagcccctgcacgaggagatcgccctgcacagaagactgagacacaagaacatcgtgagatacctgggcagcgccagccagggcggctacctgaagatcttcatggaggaggtgcccggcggcagcctgagcagcctgctgagaagcgtgtggggccccctgaaggacaacgagagcaccatcagcttctacaccagacagatcctgcagggcctgggctacctgcacgacaaccacatcgtgcacagagacatcaagggcgacaacgtgctgatcaacaccttcagcggcctgctgaagatcagcgacttcggcaccagcaagagactggccggcatcaccccctgcaccgagaccttcaccggcaccctgcagtacatggcccccgagatcatcgaccagggccccagaggctacggcaaggccgccgacatctggagcctgggctgcaccgtgatcgagatggccaccggcagaccccccttccacgagctgggcagcccccaggccgccatgttccaggtgggcatgtacaaggtgcacccccccatgcccagcagcctgagcgccgaggcccaggccttcctgctgagaaccttcgagcccgaccccagactgagagccagcgcccagaccctgctgggcgaccccttcctgcagcccggcaagagaagcagaagccccagcagccccagacacgcccccagacccagcgacgcccccagcgccagccccacccccagcgccaacagcaccacccagagccagaccttcccctgcccccaggcccccagccagcacccccccagcccccccaagagatgcctgagctacggcggcaccagccagctgagagtgcccgaggagcccgccgccgaggagcccgccagccccgaggagagcagcggcctgagcctgctgcaccaggagagcaagagaagagccatgctggccgccgtgctggagcaggagctgcccgccctggccgagaacctgcaccaggagcagaagcaggagcagggcgccagactgggcagaaaccacgtggaggagctgctgagatgcctgggcgcccacatccacacccccaacagaagacagctggcccaggagctgagagccctgcagggctggatgaacggcgaggacaagggcagcttctag

SEQ ID NO: 89385 - DNA, 249 bp, synthetic construct
  misc_feature 1..249: note = Description of Artificial Sequence: Synthetic coding sequence
  source 1..249: mol_type = other DNA
tgagagtaccaggccctggtgcagagagccctgcagagactgaacgaggaggccagaacctacgtgctggcccccgagccccccaccgccctgagcaccgaccagggcctggtgcagtggctgcaggagctgaacgtggacagcggcaccatccagatgggcagagacggcatgccccacctggagggccacctgggcaccgccagcagaatccacaccagccacctgtggaccctgagagccgagtag

SEQ ID NO: 89386 - DNA, 3867 bp, synthetic construct; identical to SEQ ID NO: 89381
  misc_feature 1..3867: note = Description of Artificial Sequence: Synthetic coding sequence
  source 1..3867: mol_type = other DNA

SEQ ID NO: 89387 - DNA, 2394 bp, synthetic construct
  misc_feature 1..2394: note = Description of Artificial Sequence: Synthetic coding sequence
  source 1..2394: mol_type = other DNA
atgaacctgctgctgagctacagagacgtgcaggactacagcgccatcatcgagctggtggagaccctgcaggccctgcccacctgcgacgtggccgagcagcacaacgtgtgcttccactacaccttcgccctgaacagaagaaacagacccggcgacagagccaaggccctgagcgtgctgctgcccctggtgcagctggagggcagcgtggcccccgacctgtactgcatgtgcggcagaatctacaaggacatgttcttcagcagcggcttccaggacgccggccacagagagcaggcctaccactggtacagaaaggccttcgacgtggagcccagcctgcacagcggcatcaacgccgccgtgctgctgatcgccgccggccagcacttcgaggacagcaaggagctgagactgatcggcatgaagctgggctgcctgctggccagaaagggctgcgtggagaagatgcagtactactgggacgtgggcttctacctgggcgcccagatcctggccaacgaccccacccaggtggtgctggccgccgagcagctgtacaagctgaacgcccccatctggtacctggtgagcgtgatggagaccttcctgctgtaccagcacttcagacccacccccgagccccccggcggcccccccagaagagcccacttctggctgcacttcctgctgcagagctgccagcccttcaagaccgcctgcgcccagggcgaccagtgcctggtgctggtgctggagatgaacaaggtgctgctgcccgccaagctggaggtgagaggcaccgaccccgtgagcaccgtgaccctgagcctgctggagcccgagacccaggacatccccagcagctggaccttccccgtggccagcatctgcggcgtgagcgccagcaagagagacgagagatgctgcttcctgtacgccctgccccccgcccaggacgtgcagctgtgcttccccagcgtgggccactgccagtggttctgcggcctgatccaggcctgggtgaccaaccccgacagcaccgcccccgccgaggaggccgagggcgccggcgagatgctggagttcgactacgagtacaccgagaccggcgagagactggtgctgggcaagggcacctacggcgtggtgtacgccggcagagacagacacaccagagtgagaatcgccatcaaggagatccccgagagagacagcagattcagccagcccctgcacgaggagatcgccctgcacagaagactgagacacaagaacatcgtgagatacctgggcagcgccagccagggcggctacctgaagatcttcatggaggaggtgcccggcggcagcctgagcagcctgctgagaagcgtgtggggccccctgaaggacaacgagagcaccatcagcttctacaccagacagatcctgcagggcctgggctacctgcacgacaaccacatcgtgcacagagacatcaagggcgacaacgtgctgatcaacaccttcagcggcctgctgaagatcagcgacttcggcaccagcaagagactggccggcatcaccccctgcaccgagaccttcaccggcaccctgcagtacatggcccccgagatcatcgaccagggccccagaggctacggcaaggccgccgacatctggagcctgggctgcaccgtgatcgagatggccaccggcagaccccccttccacgagctgggcagcccccaggccgccatgttccaggtgggcatgtacaaggtgcacccccccatgcccagcagcctgagcgccgaggcccaggccttcctgctgagaaccttcgagcccgaccccagactgagagccagcgcccagaccctgctgggcgaccccttcctgcagcccggcaagagaagcagaagccccagcagccccagacacgcccccagacccagcgacgcccccagcgccagccccacccccagcgccaacagcaccacccagagccagaccttcccctgcccccaggcccccagccagcacccccccagcccccccaagagatgcctgagctacggcggcaccagccagctgagagtgcccgaggagcccgccgccgaggagcccgccagccccgaggagagcagcggcctgagcctgctgcaccaggagagcaagagaagagccatgctggccgccgtgctggagcaggagctgcccgccctggccgagaacctgcaccaggagcagaagcaggagcagggcgccagactgggcagaaaccacgtggaggagctgctgagatgcctgggcgcccacatccacacccccaacagaagacagctggcccaggagctgagagccctgcagggctggatgaacggcgaggacaagggcagcttctag

SEQ ID NO: 89388 - DNA, 783 bp, synthetic construct
  misc_feature 1..783: note = Description of Artificial Sequence: Synthetic coding sequence
  source 1..783: mol_type = other DNA
atggacatcgccagcaccaacaccagcaacaagagcgacaccaacatggagcaggtgcccgccaccaacgacaccatcaagagactggagagcaagctgctgaagaaccaggccaagcagcagagcgagagcggcagactgagcctgggcgccagcagaggcagcagcgtggagagcctgccccccaccagcgagggcaagagaatgagcgccgacatgagcgagatcgaggccagaatcgccgccaccaccggcaacggccagcccagaagaagaagcatccaggacctgaccgtgaccggcaccgagcccggccaggtgagcagcagaagcagcagccccagcgtgagaatgatcaccaccagcggccccaccagcgagaagcccaccagaagccacccctggacccccgacgacagcaccgacaccaacggcagcgacaacagcatccccatggcctacctgaccctggaccaccagctgcagcccctggccccctgccccaacagcaaggagagcatggccgtgttcgagcagcactgcaagatggcccaggagtacatgaaggtgcagaccgagatcgccctgctgctgcagagaaagcaggagctggtggccgagctggaccaggacgagaaggaccagcagaacaccagcagactggtgcaggagcacaagaagctgctggacgagaacaagagcctgagcacctactaccagcagtgcaagaagcagctggaggtgatcagaagccagcagcagaagagacagggcaccagctag

SEQ ID NO: 89389 - DNA, 1557 bp, synthetic construct
  misc_feature 1..1557: note = Description of Artificial Sequence: Synthetic coding sequence
  source 1..1557: mol_type = other DNA
atgagcaccgccagcgccgccagcagcagcagcagcagcagcgccggcgagatgatcgaggcccccagccaggtgctgaacttcgaggagatcgactacaaggagatcgaggtggaggaggtggtgggcagaggcgccttcggcgtggtgtgcaaggccaagtggagagccaaggacgtggccatcaagcagatcgagagcgagagcgagagaaaggccttcatcgtggagctgagacagctgagcagagtgaaccaccccaacatcgtgaagctgtacggcgcctgcctgaaccccgtgtgcctggtgatggagtacgccgagggcggcagcctgtacaacgtgctgcacggcgccgagcccctgccctactacaccgccgcccacgccatgagctggtgcctgcagtgcagccagggcgtggcctacctgcacagcatgcagcccaaggccctgatccacagagacctgaagccccccaacctgctgctggtggccggcggcaccgtgctgaagatctgcgacttcggcaccgcctgcgacatccagacccacatgaccaacaacaagggcagcgccgcctggatggcccccgaggtgttcgagggcagcaactacagcgagaagtgcgacgtgttcagctggggcatcatcctgtgggaggtgatcaccagaagaaagcccttcgacgagatcggcggccccgccttcagaatcatgtgggccgtgcacaacggcaccagaccccccctgatcaagaacctgcccaagcccatcgagagcctgatgaccagatgctggagcaaggaccccagccagagacccagcatggaggagatcgtgaagatcatgacccacctgatgagatacttccccggcgccgacgagcccctgcagtacccctgccagtacagcgacgagggccagagcaacagcgccaccagcaccggcagcttcatggacatcgccagcaccaacaccagcaacaagagcgacaccaacatggagcaggtgcccgccaccaacgacaccatcaagagactggagagcaagctgctgaagaaccaggccaagcagcagagcgagagcggcagactgagcctgggcgccagcagaggcagcagcgtggagagcctgccccccaccagcgagggcaagagaatgagcgccgacatgagcgagatcgaggccagaatcgccgccaccaccgcctacagcaagcccaagagaggccacagaaagaccgccagcttcggcaacatcctggacgtgcccgagatcgtgatcagcggcaacggccagcccagaagaagaagcatccaggacctgaccgtgaccggcaccgagcccggccaggtgagcagcagaagcagcagccccagcgtgagaatgatcaccaccagcggccccaccagcgagaagcccaccagaagccacccctggacccccgacgacagcaccgacaccaacggcagcgacaacagcatccccatggcctacctgaccctggaccaccagctgcaggccagaaccagctgcagaaccggccccggctag

SEQ ID NO: 89390 - DNA, 1476 bp, synthetic construct
  misc_feature 1..1476: note = Description of Artificial Sequence: Synthetic coding sequence
  source 1..1476: mol_type = other DNA
atgagcaccgccagcgccgccagcagcagcagcagcagcagcgccggcgagatgatcgaggcccccagccaggtgctgaacttcgaggagatcgactacaaggagatcgaggtggaggaggtggtgggcagaggcgccttcggcgtggtgtgcaaggccaagtggagagccaaggacgtggccatcaagcagatcgagagcgagagcgagagaaaggccttcatcgtggagctgagacagctgagcagagtgaaccaccccaacatcgtgaagctgtacggcgcctgcctgaaccccgtgtgcctggtgatggagtacgccgagggcggcagcctgtacaacgtgctgcacggcgccgagcccctgccctactacaccgccgcccacgccatgagctggtgcctgcagtgcagccagggcgtggcctacctgcacagcatgcagcccaaggccctgatccacagagacctgaagccccccaacctgctgctggtggccggcggcaccgtgctgaagatctgcgacttcggcaccgcctgcgacatccagacccacatgaccaacaacaagggcagcgccgcctggatggcccccgaggtgttcgagggcagcaactacagcgagaagtgcgacgtgttcagctggggcatcatcctgtgggaggtgatcaccagaagaaagcccttcgacgagatcggcggccccgccttcagaatcatgtgggccgtgcacaacggcaccagaccccccctgatcaagaacctgcccaagcccatcgagagcctgatgaccagatgctggagcaaggaccccagccagagacccagcatggaggagatcgtgaagatcatgacccacctgatgagatacttccccggcgccgacgagcccctgcagtacccctgccagtacagcgacgagggccagagcaacagcgccaccagcaccggcagcttcatggacatcgccagcaccaacaccagcaacaagagcgacaccaacatggagcaggtgcccgccaccaacgacaccatcaagagactggagagcaagctgctgaagaaccaggccaagcagcagagcgagagcggcagactgagcctgggcgccagcagaggcagcagcgtggagagcctgccccccaccagcgagggcaagagaatgagcgccgacatgagcgagatcgaggccagaatcgccgccaccaccggcaacggccagcccagaagaagaagcatccaggacctgaccgtgaccggcaccgagcccggccaggtgagcagcagaagcagcagccccagcgtgagaatgatcaccaccagcggccccaccagcgagaagcccaccagaagccacccctggacccccgacgacagcaccgacaccaacggcagcgacaacagcatccccatggcctacctgaccctggaccaccagctgcaggccagaaccagctgcagaaccggccccggctag

SEQ ID NO: 89391 - DNA, 1821 bp, synthetic construct
  misc_feature 1..1821: note = Description of Artificial Sequence: Synthetic coding sequence
  source 1..1821: mol_type = other DNA
atgagcaccgccagcgccgccagcagcagcagcagcagcagcgccggcgagatgatcgaggcccccagccaggtgctgaacttcgaggagatcgactacaaggagatcgaggtggaggaggtggtgggcagaggcgccttcggcgtggtgtgcaaggccaagtggagagccaaggacgtggccatcaagcagatcgagagcgagagcgagagaaaggccttcatcgtggagctgagacagctgagcagagtgaaccaccccaacatcgtgaagctgtacggcgcctgcctgaaccccgtgtgcctggtgatggagtacgccgagggcggcagcctgtacaacgtgctgcacggcgccgagcccctgccctactacaccgccgcccacgccatgagctggtgcctgcagtgcagccagggcgtggcctacctgcacagcatgcagcccaaggccctgatccacagagacctgaagccccccaacctgctgctggtggccggcggcaccgtgctgaagatctgcgacttcggcaccgcctgcgacatccagacccacatgaccaacaacaagggcagcgccgcctggatggcccccgaggtgttcgagggcagcaactacagcgagaagtgcgacgtgttcagctggggcatcatcctgtgggaggtgatcaccagaagaaagcccttcgacgagatcggcggccccgccttcagaatcatgtgggccgtgcacaacggcaccagaccccccctgatcaagaacctgcccaagcccatcgagagcctgatgaccagatgctggagcaaggaccccagccagagacccagcatggaggagatcgtgaagatcatgacccacctgatgagatacttccccggcgccgacgagcccctgcagtacccctgccagtacagcgacgagggccagagcaacagcgccaccagcaccggcagcttcatggacatcgccagcaccaacaccagcaacaagagcgacaccaacatggagcaggtgcccgccaccaacgacaccatcaagagactggagagcaagctgctgaagaaccaggccaagcagcagagcgagagcggcagactgagcctgggcgccagcagaggcagcagcgtggagagcctgccccccaccagcgagggcaagagaatgagcgccgacatgagcgagatcgaggccagaatcgccgccaccaccgcctacagcaagcccaagagaggccacagaaagaccgccagcttcggcaacatcctggacgtgcccgagatcgtgatcagcggcaacggccagcccagaagaagaagcatccaggacctgaccgtgaccggcaccgagcccggccaggtgagcagcagaagcagcagccccagcgtgagaatgatcaccaccagcggccccaccagcgagaagcccaccagaagccacccctggacccccgacgacagcaccgacaccaacggcagcgacaacagcatccccatggcctacctgaccctggaccaccagctgcagcccctggccccctgccccaacagcaaggagagcatggccgtgttcgagcagcactgcaagatggcccaggagtacatgaaggtgcagaccgagatcgccctgctgctgcagagaaagcaggagctggtggccgagctggaccaggacgagaaggaccagcagaacaccagcagactggtgcaggagcacaagaagctgctggacgagaacaagagcctgagcacctactaccagcagtgcaagaagcagctggaggtgatcagaagccagcagcagaagagacagggcaccagctag

SEQ ID NO: 89392 - DNA, 1740 bp, synthetic construct
  misc_feature 1..1740: note = Description of Artificial Sequence: Synthetic coding sequence
  source 1..1740: mol_type = other DNA
atgagcaccgccagcgccgccagcagcagcagcagcagcagcgccggcgagatgatcgaggcccccagccaggtgctgaacttcgaggagatcgactacaaggagatcgaggtggaggaggtggtgggcagaggcgccttcggcgtggtgtgcaaggccaagtggagagccaaggacgtggccatcaagcagatcgagagcgagagcgagagaaaggccttcatcgtggagctgagacagctgagcagagtgaaccaccccaacatcgtgaagctgtacggcgcctgcctgaaccccgtgtgcctggtgatggagtacgccgagggcggcagcctgtacaacgtgctgcacggcgccgagcccctgccctactacaccgccgcccacgccatgagctggtgcctgcagtgcagccagggcgtggcctacctgcacagcatgcagcccaaggccctgatccacagagacctgaagccccccaacctgctgctggtggccggcggcaccgtgctgaagatctgcgacttcggcaccgcctgcgacatccagacccacatgaccaacaacaagggcagcgccgcctggatggcccccgaggtgttcgagggcagcaactacagcgagaagtgcgacgtgttcagctggggcatcatcctgtgggaggtgatcaccagaagaaagcccttcgacgagatcggcggccccgccttcagaatcatgtgggccgtgcacaacggcaccagaccccccctgatcaagaacctgcccaagcccatcgagagcctgatgaccagatgctggagcaaggaccccagccagagacccagcatggaggagatcgtgaagatcatgacccacctgatgagatacttccccggcgccgacgagcccctgcagtacccctgccagtacagcgacgagggccagagcaacagcgccaccagcaccggcagcttcatggacatcgccagcaccaacaccagcaacaagagcgacaccaacatggagcaggtgcccgccaccaacgacaccatcaagagactggagagcaagctgctgaagaaccaggccaagcagcagagcgagagcggcagactgagcctgggcgccagcagaggcagcagcgtggagagcctgccccccaccagcgagggcaagagaatgagcgccgacatgagcgagatcgaggccagaatcgccgccaccaccggcaacggccagcccagaagaagaagcatccaggacctgaccgtgaccggcaccgagcccggccaggtgagcagcagaagcagcagccccagcgtgagaatgatcaccaccagcggccccaccagcgagaagcccaccagaagccacccctggacccccgacgacagcaccgacaccaacggcagcgacaacagcatccccatggcctacctgaccctggaccaccagctgcagcccctggccccctgccccaacagcaaggagagcatggccgtgttcgagcagcactgcaagatggcccaggagtacatgaaggtgcagaccgagatcgccctgctgctgcagagaaagcaggagctggtggccgagctggaccaggacgagaaggaccagcagaacaccagcagactggtgcaggagcacaagaagctgctggacgagaacaagagcctgagcacctactaccagcagtgcaagaagcagctggaggtgatcagaagccagcagcagaagagacagggcaccagctag

SEQ ID NO: 89393 - DNA, 1257 bp, synthetic construct
  misc_feature 1..1257: note = Description of Artificial Sequence: Synthetic coding sequence
  source 1..1257: mol_type = other DNA
atgagcaccgccagcgccgccagcagcagcagcagcagcagcgccggcgagatgatcgaggcccccagccaggtgctgaacttcgaggagatcgactacaaggagatcgaggtggaggaggtggtgggcagaggcgccttcggcgtggtgtgcaaggccaagtggagagccaaggacgtggccatcaagcagatcgagagcgagagcgagagaaaggccttcatcgtggagctgagacagctgagcagagtgaaccaccccaacctgctgctggtggccggcggcaccgtgctgaagatctgcgacttcggcaccgcctgcgacatccagacccacatgaccaacaacaagggcagcgccgcctggatggcccccgaggtgttcgagggcagcaactacagcgagaagtgcgacgtgttcagctggggcatcatcctgtgggaggtgatcaccagaagaaagcccttcgacgagatcggcggccccgccttcagaatcatgtgggccgtgcacaacggcaccagaccccccctgatcaagaacctgcccaagcccatcgagagcctgatgaccagatgctggagcaaggaccccagccagagacccagcatggaggagatcgtgaagatcatgacccacctgatgagatacttccccggcgccgacgagcccctgcagtacccctgccagtacagcgacgagggccagagcaacagcgccaccagcaccggcagcttcatggacatcgccagcaccaacaccagcaacaagagcgacaccaacatggagcaggtgcccgccaccaacgacaccatcaagagactggagagcaagctgctgaagaaccaggccaagcagcagagcgagagcggcagactgagcctgggcgccagcagaggcagcagcgtggagagcctgccccccaccagcgagggcaagagaatgagcgccgacatgagcgagatcgaggccagaatcgccgccaccaccggcaacggccagcccagaagaagaagcatccaggacctgaccgtgaccggcaccgagcccggccaggtgagcagcagaagcagcagccccagcgtgagaatgatcaccaccagcggccccaccagcgagaagcccaccagaagccacccctggacccccgacgacagcaccgacaccaacggcagcgacaacagcatccccatggcctacctgaccctggaccaccagctgcaggccagaaccagctgcagaaccggccccggctag

SEQ ID NO: 89394 - DNA, 1404 bp, synthetic construct
  misc_feature 1..1404: note = Description of Artificial Sequence: Synthetic coding sequence
  source 1..1404: mol_type = other DNA
atggagtacatgagcaccggcagcgacaacaaggaggagatcgacctgctgatcaagcacctgaacgtgagcgacgtgatcgacatcatggagaacctgtacgccagcgaggagcccgccgtgtacgagcccagcctgatgaccatgtgccaggacagcaaccagaacgacgagagaagcaagagcctgctgctgagcggccaggaggtgccctggctgagcagcgtgagatacggcaccgtggaggacctgctggccttcgccaaccacatcagcaacaccgccaagcacttctacggccagagaccccaggagagcggcatcctgctgaacatggtgatcaccccccagaacggcagataccagatcgacagcgacgtgctgctgatcccctggaagctgacctacagaaacatcggcagcgacttcatccccagaggcgccttcggcaaggtgtacctggcccaggacatcaagaccaagaagagaatggcctgcaagctgatccccgtggaccagttcaagcccagcgacgtggagatccaggcctgcttcagacacgagaacatcgccgagctgtacggcgccgtgctgtggggcgagaccgtgcacctgttcatggaggccggcgagggcggcagcgtgctggagaagctggagagctgcggccccatgagagagttcgagatcatctgggtgaccaagcacgtgctgaagggcctggacttcctgcacagcaagaaggtgatccaccacgacatcaagcccagcaacatcgtgttcatgagcaccaaggccgtgctggtggacttcggcctgagcgtgcagatgaccgaggacgtgtacttccccaaggacctgagaggcaccgagatctacatgagccccgaggtgatcctgtgcagaggccacagcaccaaggccgacatctacagcctgggcgccaccctgatccacatgcagaccggcacccccccctgggtgaagagataccccagaagcgcctaccccagctacctgtacatcatccacaagcaggccccccccctggaggacatcgccgacgactgcagccccggcatgagagagctgatcgaggccagcctggagagaaaccccaaccacagacccagagccgccgacctgctgaagcacgaggccctgaacccccccagagaggaccagcccagatgccagagcctggacagcgccctgctggagagaaagagactgctgagcagaaaggagctggagctgcccgagaacatcgccgacagcagctgcaccggcagcaccgaggagagcgagatgctgaagagacagagaagcctgtacatcgacctgggcgccctggccggctacttcaacctggtgagaggcccccccaccctggagtacggctag

SEQ ID NO: 89395 - DNA, 1404 bp, synthetic construct; identical to SEQ ID NO: 89394
  misc_feature 1..1404: note = Description of Artificial Sequence: Synthetic coding sequence
  source 1..1404: mol_type = other DNA

SEQ ID NO: 89396 - DNA, 399 bp, synthetic construct
  misc_feature 1..399: note = Description of Artificial Sequence: Synthetic coding sequence
  source 1..399: mol_type = other DNA
atggagtacatgagcaccggcagcgacaacaaggaggagatcgacctgctgatcaagcacctgaacgtgagcgacgtgatcgacatcatggagaacctgtacgccagcgaggagcccgccgtgtacgagcccagcctgatgaccatgtgccaggacagcaaccagaacgacgagagaagcaagagcctgctgctgagcggccaggaggtgccctggctgagcagcgtgagatacggcaccgtggaggacctgctggccttcgccaaccacatcagcaacaccgccaagcacttctacggccagagaccccaggagagcggcatcctgctgaacatggtgagattcttccccatcagctgggtgctgtgcgcccagctgagctactgcagcttcatctag

SEQ ID NO: 89397 - DNA, 1404 bp, synthetic construct; identical to SEQ ID NO: 89394
  misc_feature 1..1404: note = Description of Artificial Sequence: Synthetic coding sequence
  source 1..1404: mol_type = other DNA

SEQ ID NO: 89398 - DNA, 672 bp, synthetic construct
  misc_feature 1..672: note = Description of Artificial Sequence: Synthetic coding sequence
  source 1..672: mol_type = other DNA
atggagtacatgagcaccggcagcgacaacaaggaggagatcgacctgctgatcaagcacctgaacgtgagcgacgtgatcgacatcatggagaacctgtacgccagcgaggagcccgccgtgtacgagcccagcctgatgaccatgtgccaggacagcaaccagaacgacgagagaagcaagagcctgctgctgagcggccaggaggtgccctggctgagcagcgtgagatacggcaccgtggaggacctgctggccttcgccaaccacatcagcaacaccgccaagcacttctacggccagagaccccaggagagcggcatcctgctgaacatggtgatcaccccccagaacggcagataccagatcgacagcgacgtgctgctgatcccctggaagctgacctacagaaacatcggcagcgacttcatccccagaggcgccttcggcaaggtgtacctggcccaggacatcaagaccaagaagagaatggcctgcaagctgatccccgtggaccagttcaagcccagcgacgtggagatccaggcctgcttcagacacgagaacatcgccgagctgtacggcgccgtgctgtggggcgagaccgtgcacctgttcatggaggccggcgagggcggcagcgtgctggagaagctggagagctgcggctag

SEQ ID NO: 89399 - DNA, 768 bp, synthetic construct
  misc_feature 1..768: note = Description of Artificial Sequence: Synthetic coding sequence
  source 1..768: mol_type = other DNA
atggagtacatgagcaccggcagcgacaacaaggaggagatcgacctgctgatcaagcacctgaacgtgagcgacgtgatcgacatcatggagaacctgtacgccagcgaggagcccgccgtgtacgagcccagcctgatgaccatgtgccaggacagcaaccagaacgacgagagaagcaagagcctgctgctgagcggccaggaggtgccctggctgagcagcgtgagatacggcaccgtggaggacctgctggccttcgccaaccacatcagcaacaccgccaagcacttctacggccagagaccccaggagagcggcatcctgctgaacatggtgatcaccccccagaacggcagataccagatcgacagcgacgtgctgctgatcccctggaagctgacctacagaaacatcggcagcgacttcatccccagaggcgccttcggcaaggtgtacctggcccaggacatcaagaccaagaagagaatggcctgcaagctgatccccgtggaccagttcaagcccagcgacgtggagatccaggcctgcttcagacacgagaacatcgccgagctgtacggcgccgtgctgtggggcgagaccgtgcacctgttcatggaggccggcgagggcggcagcgtgctggagaagctggagagctgcggccccatgagagagttcgagatcatctgggtgaccaagcacgtgctgaagggcctggacttcctgcacagcaagaaggtgatccaccacgacatcaagtag

SEQ ID NO: 89400 - DNA, 573 bp, synthetic construct
  misc_feature 1..573: note = Description of Artificial Sequence: Synthetic coding sequence
  source 1..573: mol_type = other DNA
tgagtggaggacctgctggccttcgccaaccacatcagcaacaccgccaagcacttctacggccagagaccccaggagagcggcatcctgctgaacatggtgatcaccccccagaacggcagataccagatcgacagcgacgtgctgctgatcccctggaagctgacctacagaaacatcggcagcgacttcatccccagaggcgccttcggcaaggtgtacctggcccaggacatcaagaccaagaagagaatggcctgcaagctgatccccgtggaccagttcaagcccagcgacgtggagatccaggcctgcttcagacacgagaacatcgccgagctgtacggcgccgtgctgtggggcgagaccgtgcacctgttcatggaggccggcgagggcggcagcgtgctggagaagctggagagctgcggccccatgagagagttcgagatcatctgggtgaccaagcacgtgctgaagggcctggacttcctgcacagcaagaaggtgatccaccacgacatcaagagaaagtacctgtggacctacaccttcctggcccagagagactag

SEQ ID NO: 89401 - DNA, 1404 bp, synthetic construct; identical to SEQ ID NO: 89394
  misc_feature 1..1404: note = Description of Artificial Sequence: Synthetic coding sequence
  source 1..1404: mol_type = other DNA

SEQ ID NO: 89402 - DNA, 3357 bp, synthetic construct
  misc_feature 1..3357: note = Description of Artificial Sequence: Synthetic coding sequence
  source 1..3357: mol_type = other DNA
atggagcccagcagagccctgctgggctgcctggccagcgccgccgccgccgccccccccggcgaggacggcgccggcgccggcgccgaggaggaggaggaggaggaggaggaggccgccgccgccgtgggccccggcgagctgggctgcgacgcccccctgccctactggaccgccgtgttcgagtacgaggccgccggcgaggacgagctgaccctgagactgggcgacgtggtggaggtgctgagcaaggacagccaggtgagcggcgacgagggctggtggaccggccagctgaaccagagagtgggcatcttccccagcaactacgtgacccccagaagcgccttcagcagcagatgccagcccggcggcgaggaccccagctgctacccccccatccagctgctggagatcgacttcgccgagctgaccctggaggagatcatcggcatcggcggcttcggcaaggtgtacagagccttctggatcggcgacgaggtggccgtgaaggccgccagacacgaccccgacgaggacatcagccagaccatcgagaacgtgagacaggaggccaagctgttcgccatgctgaagcaccccaacatcatcgccctgagaggcgtgtgcctgaaggagcccaacctgtgcctggtgatggagttcgccagaggcggccccctgaacagagtgctgagcggcaagagaatcccccccgacatcctggtgaactgggccgtgcagatcgccagaggcatgaactacctgcacgacgaggccatcgtgcccatcatccacagagacctgaagagcagcaacatcctgatcctgcagaaggtggagaacggcgacctgagcaacaagatcctgaagatcaccgacttcggcctggccagagagtggcacagaaccaccaagatgagcgccgccggcacctacgcctggatggcccccgaggtgatcagagccagcatgttcagcaagggcagcgacgtgtggagctacggcgtgctgctgtgggagctgctgaccggcgaggtgcccttcagaggcatcgacggcctggccgtggcctacggcgtggccatgaacaagctggccctgcccatccccagcacctgccccgagcccttcgccaagctgatggaggactgctggaaccccgacccccacagcagacccagcttcaccaacatcctggaccagctgaccaccatcgaggagagcggcttcttcgagatgcccaaggacagcttccactgcctgcaggacaactggaagcacgagatccaggagatgttcgaccagctgagagccaaggagaaggagctgagaacctgggaggaggagctgaccagagccgccctgcagcagaagaaccaggaggagctgctgagaagaagagagcaggagctggccgagagagagatcgacatcctggagagagagctgaacatcatcatccaccagctgtgccaggagaagcccagagtgaagaagagaaagggcaagttcagaaagagcagactgaagctgaaggacggcaacagaatcagcctgcccagcgacttccagcacaagttcaccgtgcaggccagccccaccatggacaagagaaagagcctgatcaacagcagaagcagcccccccgccagccccaccatcatccccagactgagagccatccagctgacccccggcgagagcagcaagacctggggcagaagcagcgtggtgcccaaggaggagggcgaggaggaggagaagagagcccccaagaagaagggcagaacctggggccccggcaccctgggccagaaggagctggccagcggcgacgagggcagcccccagagaagagagaaggccaacggcctgagcacccccagcgagagcccccacttccacctgggcctgaagagcctggtggacggctacaagcagtggagcagcagcgcccccaacctggtgaagggccccagaagcagccccgccctgcccggcttcaccagcctgatggagatggccctgctggccgccagctgggtggtgcccatcgacatcgaggaggacgaggacagcgagggccccggcagcggcgagagcagactgcagcacagccccagccagagctacctgtgcatccccttccccagaggcgaggacggcgacggccccagcagcgacggcatccacgaggagcccacccccgtgaacagcgccaccagcaccccccagctgacccccaccaacagcctgaagagaggcggcgcccaccacagaagatgcgaggtggccctgctgggctgcggcgccgtgctggccgccaccggcctgggcttcgacctgctggaggccggcaagtgccagctgctgcccctggaggagcccgagccccccgccagagaggagaagaagagaagagagggcctgttccagagaagcagcagacccagaagaagcaccagcccccccagcagaaagctgttcaagaaggaggagcccatgctgctgctgggcgaccccagcgccagcctgaccctgctgagcctgagcagcatcagcgagtgcaacagcaccagaagcctgctgagaagcgacagcgacgagatcgtggtgtacgagatgcccgtgagccccgtggaggccccccccctgagcccctgcacccacaaccccctggtgaacgtgagagtggagagattcaagagagaccccaaccagagcctgacccccacccacgtgaccctgaccacccccagccagcccagcagccacagaagaacccccagcgacggcgccctgaagcccgagaccctgctggccagcagaagccccagcagcaacggcctgagccccagccccggcgccggcatgctgaagacccccagccccagcagagaccccggcgagttccccagactgcccgaccccaacgtggtgttcccccccacccccagaagatggaacacccagcaggacagcaccctggagagacccaagaccctggagttcctgcccagacccagacccagcgccaacagacagagactggacccctggtggttcgtgagccccagccacgccagaagcaccagccccgccaacagcagcagcaccgagacccccagcaacctggacagctgcttcgccagcagcagcagcaccgtggaggagagacccggcctgcccgccctgctgcccttccaggccggccccctgccccccaccgagagaaccctgctggacctggacgccgagggccagagccaggacagcaccgtgcccctgtgcagagccgagctgaacacccacagacccgccccctacgagatccagcaggagttctggagctag

SEQ ID NO: 89403 - DNA, 2463 bp, synthetic construct
  misc_feature 1..2463: note = Description of Artificial Sequence: Synthetic coding sequence
  source 1..2463: mol_type = other DNA
ctggtgctgatcctgcagaaggtggagaacggcgacctgagcaacaagatcctgaagatcaccgacttcggcctggccagagagtggcacagaaccaccaagatgagcgccgccggcacctacgcctggatggcccccgaggtgatcagagccagcatgttcagcaagggcagcgacgtgtggagctacggcgtgctgctgtgggagctgctgaccggcgaggtgcccttcagaggcatcgacggcctggccgtggcctacggcgtggccatgaacaagctggccctgcccatccccagcacctgccccgagcccttcgccaagctgatggaggactgctggaaccccgacccccacagcagacccagcttcaccaacatcctggaccagctgaccaccatcgaggagagcggcttcttcgagatgcccaaggacagcttccactgcctgcaggacaactggaagcacgagatccaggagatgttcgaccagctgagagccaaggagaaggagctgagaacctgggaggaggagctgaccagagccgccctgcagcagaagaaccaggaggagctgctgagaagaagagagcaggagctggccgagagagagatcgacatcctggagagagagctgaacatcatcatccaccagctgtgccaggagaagcccagagtgaagaagagaaagggcaagttcagaaagagcagactgaagctgaaggacggcaacagaatcagcctgcccagcgacttccagcacaagttcaccgtgcaggccagccccaccatggacaagagaaagagcctgatcaacagcagaagcagcccccccgccagccccaccatcatccccagactgagagccatccagctgacccccggcgagagcagcaagacctggggcagaagcagcgtggtgcccaaggaggagggcgaggaggaggagaagagagcccccaagaagaagggcagaacctggggccccggcaccctgggccagaaggagctggccagcggcgacgagggcctgaagagcctggtggacggctacaagcagtggagcagcagcgcccccaacctggtgaagggccccagaagcagccccgccctgcccggcttcaccagcctgatggagatggcctgcttcagcagcaccctggtgatcttcaccgaggacgaggacagcgagggccccggcagcggcgagagcagactgcagcacagccccagccagagctacctgtgcatccccttccccagaggcgaggacggcgacggccccagcagcgacggcatccacgaggagcccacccccgtgaacagcgccaccagcaccccccagctgacccccaccaacagcctgaagagaggcggcgcccaccacagaagatgcgaggtggccctgctgggctgcggcgccgtgctggccgccaccggcctgggcttcgacctgctggaggccggcaagtgccagctgctgcccctggaggagcccgagccccccgccagagaggagaagaagagaagagagggcctgttccagagaagcagcagacccagaagaagcaccagcccccccagcagaaagctgttcaagaaggaggagcccatgctgctgctgggcgaccccagcgccagcctgaccctgctgagcctgagcagcatcagcgagtgcaacagcaccagaagcctgctgagaagcgacagcgacgagatcgtggtgtacgagatgcccgtgagccccgtggaggccccccccctgagcccctgcacccacaaccccctggtgaacgtgagagtggagagattcaagagagaccccaaccagagcctgacccccacccacgtgaccctgaccacccccagccagcccagcagccacagaagaacccccagcgacggcgccctgaagcccgagaccctgctggccagcagaagccccagcagcaacggcctgagccccagccccggcgccggcatgctgaagacccccagccccagcagagaccccggcgagttccccagactgcccgaccccaacgtggtgttcccccccacccccagaagatggaacacccagcaggacagcaccctggagagacccaagaccctggagttcctgcccagacccagacccagcgccaacagacagagactggacccctggtggttcgtgagccccagccacgccagaagcaccagccccgccaacagcagcagcaccgagacccccagcaacctggacagctgcttcgccagcagcagcagcaccgtggaggagagacccggcctgcccgccctgctgcccttccaggccggccccctgccccccaccgagagaaccctgctggacctggacgccgagggccagagccaggacagcaccgtgcccctgtgcagagccgagctgaacacccacagacccgccccctacgagatccagcaggagttctggagctag

SEQ ID NO: 89404 - DNA, 3315 bp, synthetic construct
  misc_feature 1..3315: note = Description of Artificial Sequence: Synthetic coding sequence
  source 1..3315: mol_type = other DNA
atggagcccagcagagccctgctgggctgcctggccagcgccgccgccgccgccccccccggcgaggacggcgccggcgccggcgccgaggaggaggaggaggaggaggaggaggccgccgccgccgtgggccccggcgagctgggctgcgacgcccccctgccctactggaccgccgtgttcgagtacgaggccgccggcgaggacgagctgaccctgagactgggcgacgtggtggaggtgctgagcaaggacagccaggtgagcggcgacgagggctggtggaccggccagctgaaccagagagtgggcatcttccccagcaactacgtgacccccagaagcgccttcagcagcagatgccagcccggcggcgaggaccccagctgctacccccccatccagctgctggagatcgacttcgccgagctgaccctggaggagatcatcggcatcggcggcttcggcaaggtgtacagagccttctggatcggcgacgaggtggccgtgaaggccgccagacacgaccccgacgaggacatcagccagaccatcgagaacgtgagacaggaggccaagctgttcgccatgctgaagcaccccaacatcatcgccctgagaggcgtgtgcctgaaggagcccaacctgtgcctggtgatggagttcgccagaggcggccccctgaacagagtgctgagcggcaagagaatcccccccgacatcctggtgaactgggccgtgcagatcgccagaggcatgaactacctgcacgacgaggccatcgtgcccatcatccacagagacctgaagagcagcaacatcctgatcctgcagaaggtggagaacggcgacctgagcaacaagatcctgaagatcaccgacttcggcctggccagagagtggcacagaaccaccaagatgagcgccgccggcacctacgcctggatggcccccgaggtgatcagagccagcatgttcagcaagggcagcgacgtgtggagctacggcgtgctgctgtgggagctgctgaccggcgaggtgcccttcagaggcatcgacggcctggccgtggcctacggcgtggccatgaacaagctggccctgcccatccccagcacctgccccgagcccttcgccaagctgatggaggactgctggaaccccgacccccacagcagacccagcttcaccaacatcctggaccagctgaccaccatcgaggagagcggcttcttcgagatgcccaaggacagcttccactgcctgcaggacaactggaagcacgagatccaggagatgttcgaccagctgagagccaaggagaaggagctgagaacctgggaggaggagctgaccagagccgccctgcagcagaagaaccaggaggagctgctgagaagaagagagcaggagctggccgagagagagatcgacatcctggagagagagctgaacatcatcatccaccagctgtgccaggagaagcccagagtgaagaagagaaagggcaagttcagaaagagcagactgaagctgaaggacggcaacagaatcagcctgcccagcgacttccagcacaagttcaccgtgcaggccagccccaccatggacaagagaaagagcctgatcaacagcagaagcagcccccccgccagccccaccatcatccccagactgagagccatccagctgacccccggcgagagcagcaagacctggggcagaagcagcgtggtgcccaaggaggagggcgaggaggaggagaagagagcccccaagaagaagggcagaacctggggccccggcaccctgggccagaaggagctggccagcggcgacgagggcagcccccagagaagagagaaggccaacggcctgagcacccccagcgagagcccccacttccacctgggcctgaagagcctggtggacggctacaagcagtggagcagcagcgcccccaacctggtgaagggccccagaagcagccccgccctgcccggcttcaccagcctgatggagatggaggacgaggacagcgagggccccggcagcggcgagagcagactgcagcacagccccagccagagctacctgtgcatccccttccccagaggcgaggacggcgacggccccagcagcgacggcatccacgaggagcccacccccgtgaacagcgccaccagcaccccccagctgacccccaccaacagcctgaagagaggcggcgcccaccacagaagatgcgaggtggccctgctgggctgcggcgccgtgctggccgccaccggcctgggcttcgacctgctggaggccggcaagtgccagctgctgcccctggaggagcccgagccccccgccagagaggagaagaagagaagagagggcctgttccagagaagcagcagacccagaagaagcaccagcccccccagcagaaagctgttcaagaaggaggagcccatgctgctgctgggcgaccccagcgccagcctgaccctgctgagcctgagcagcatcagcgagtgcaacagcaccagaagcctgctgagaagcgacagcgacgagatcgtggtgtacgagatgcccgtgagccccgtggaggccccccccctgagcccctgcacccacaaccccctggtgaacgtgagagtggagagattcaagagagaccccaaccagagcctgacccccacccacgtgaccctgaccacccccagccagcccagcagccacagaagaacccccagcgacggcgccctgaagcccgagaccctgctggccagcagaagccccagcagcaacggcctgagccccagccccggcgccggcatgctgaagacccccagccccagcagagaccccggcgagttccccagactgcccgaccccaacgtggtgttcccccccacccccagaagatggaacacccagcaggacagcaccctggagagacccaagaccctggagttcctgcccagacccagacccagcgccaacagacagagactggacccctggtggttcgtgagccccagccacgccagaagcaccagccccgccaacagcagcagcaccgagacccccagcaacctggacagctgcttcgccagcagcagcagcaccgtggaggagagacccggcctgcccgccctgctgcccttccaggccggccccctgccccccaccgagagaaccctgctggacctggacgccgagggccagagccaggacagcaccgtgcccctgtgcagagccgagctgaacacccacagacccgccccctacgagatccagcaggagttctggagctag

SEQ ID NO: 89405 - DNA, 1005 bp, synthetic construct
  misc_feature 1..1005: note = Description of Artificial Sequence: Synthetic coding sequence
  source 1..1005: mol_type = other DNA
atggccctgagatggggcatcgtgagcgtgggcctgatcagcagcgacttcaccgccgtgctgcagaccctgcccagaagcgagcaccaggtggtggccgtggccgccagagacctgagcagagccaaggagttcgcccagaagcacgacatccccaaggcctacggcagctacgaggagctggccaaggaccccagcgtggaggtggcctacatcggcacccagcacccccagcacaaggccgccgtgatgctgtgcctggccgccggcaaggccgtgctgtgcgagaagcccaccggcgtgaacgccgccgaggtgagagagatggtggccgaggccagaagcagagccctgttcctgatggaggccatctggaccagattcttccccgccagcgaggccctgagaagcgtgctggcccagggcaccctgggcgacctgagagtggccagagccgagttcggcaagaacctgatccacgtgcccagagccgtggacagagcccaggccggcggcgccctgctggacatcggcatctactgcgtgcagttcaccagcatggtgttcggcggccagaagcccgagaagatcagcgtggtgggcagaagacacgagaccggcgtggacgacaccgtgaccgtgctgctgcagtaccccggcgaggtgcacggcagcttcacctgcagcatcaccgtgcagctgagcaacaccgccagcgtgagcggcaccaagggcatggtgcagctgctgaacccctgctggtgccccaccgagctggtggtgaagggcgagcacaaggagttccccctgccccccgtgcccaaggactgcaacttcgacaacggcgccggcatgagctacgaggccaagcacgtgtgggagtgcctgagaaagggcatgaaggagagccccgtgatccccctgagcgagagcgagctgctggccgacatcctggaggaggtgagaaaggccatcggcgtgaccttcccccaggacaagagatag

SEQ ID NO: 89406 - DNA, 2466 bp, synthetic construct
  misc_feature 1..2466: note = Description of Artificial Sequence: Synthetic coding sequence
  source 1..2466: mol_type = other DNA
atggacgtggtggaccccgacatcttcaacagagaccccagagaccactacgacctgctgcagagactgggcggcggcacctacggcgaggtgttcaaggccagagacaaggtgagcggcgacctggtggccctgaagatggtgaagatggagcccgacgacgacgtgagcaccctgcagaaggagatcctgatcctgaagacctgcagacacgccaacatcgtggcctaccacggcagctacctgtggctgcagaagctgtggatctgcatggagttctgcggcgccggcagcctgcaggacatctaccaggtgaccggcagcctgagcgagctgcagatcagctacgtgtgcagagaggtgctgcagggcctggcctacctgcacagccagaagaagatccacagagacatcaagggcgccaacatcctgatcaacgacgccggcgaggtgagactggccgacttcggcatcagcgcccagatcggcgccaccctggccagaagactgagcttcatcggcaccccctactggatggcccccgaggtggccgccgtggccctgaagggcggctacaacgagctgtgcgacatctggagcctgggcatcaccgccatcgagctggccgagctgcagccccccctgttcgacgtgcaccccctgagagtgctgttcctgatgaccaagagcggctaccagccccccagactgaaggagaagggcaagtggagcgccgccttccacaacttcatcaaggtgaccctgaccaagagccccaagaagagacccagcgccaccaagatgctgagccaccagctggtgagccagcccggcctgaacagaggcctgatcctggacctgctggacaagctgaagaaccccggcaagggccccagcatcggcgacatcgaggacgaggagcccgagctgccccccgccatccccagaagaatcagaagcacccacagaagcagcagcctgggcatccccgacgccgactgctgcagaagacacatggagttcagaaagctgagaggcatggagaccagaccccccgccaacaccgccagactgcagccccccagagacctgagaagcagcagccccagaaagcagctgagcgagagcagcgacgacgactacgacgacgtggacatccccacccccgccgaggacacccccccccccctgccccccaagcccaagttcagaagccccagcgacgagggccccggcagcatgggcgacgacggccagctgagccccggcgtgctggtgagatgcgccagcggccccccccccaacagccccagacccggccccccccccagcaccagcagcccccacctgaccgcccacagcgagcccagcctgtggaacccccccagcagagagctggacaagccccccctgctgccccccaagaaggagaagatgaagagaaagggctgcgccctgctggtgaagctgttcaacggctgccccctgagaatccacagcaccgccgcctggacccaccccagcaccaaggaccagcacctgctgctgggcgccgaggagggcatcttcatcctgaacagaaacgaccaggaggccaccctggagatgctgttccccagcagaaccacctgggtgtacagcatcaacaacgtgctgatgagcctgagcggcaagaccccccacctgtacagccacagcatcctgggcctgctggagagaaaggagaccagagccggcaaccccatcgcccacatcagcccccacagactgctggccagaaagaacatggtgagcaccaagatccaggacaccaagggctgcagagcctgctgcgtggccgagggcgccagcagcggcggccccttcctgtgcggcgccctggagaccagcgtggtgctgctgcagtggtaccagcccatgaacaagttcctgctggtgagacaggtgctgttccccctgcccacccccctgagcgtgttcgccctgctgaccggccccggcagcgagctgcccgccgtgtgcatcggcgtgagccccggcagacccggcaagagcgtgctgttccacaccgtgagattcggcgccctgagctgctggctgggcgagatgagcaccgagcacagaggccccgtgcaggtgacccaggtggaggaggacatggtgatggtgctgatggacggcagcgtgaagctggtgacccccgagggcagccccgtgagaggcctgagaacccccgagatccccatgaccgaggccgtggaggccgtggccatggtgggcggccagctgcaggccttctggaagcacggcgtgcaggtgtgggccctgggcagcgaccagctgctgcaggagctgagagaccccaccctgaccttcagactgctgggcagccccagacccgtggtggtggagaccagacccgtggacgaccccaccgcccccagcaacctgtacatccaggagtag

SEQ ID NO: 89407 - DNA, 720 bp, synthetic construct
  misc_feature 1..720: note = Description of Artificial Sequence: Synthetic coding sequence
  source 1..720: mol_type = other DNA
atggagttcagaaagctgagaggcatggagaccagaccccccgccaacaccgccagactgcagccccccagagacctgagaagcagcagccccagaaagcagctgagcgagagcagcgacgacgactacgacgacgtggacatccccacccccgccgaggacacccccccccccctgccccccaagcccaagttcagaagccccagcgacgagggccccggcagcatgggcgacgacggccagctgagccccggcgtgctggtgagatgcgccagcggccccccccccaacagccccagacccggccccccccccagcaccagcagcccccacctgaccgcccacagcgagcccagcctgtggaacccccccagcagagagctggacaagccccccctgctgccccccaagaaggagaagatgaagagaaagggctgcgccctgctggtgaagctgttcaacggctgccccctgagaatccacagcaccgccgcctggacccaccccagcaccaaggaccagcacctgctgctgggcgccgaggagggcatcttcatcctgaacagaaacgaccaggaggccaccctggagatggagagaccccccacctgcatcctgatcgccagcctggcctgctggaacggcaagagacccgagcaggagacccccagcctgaccctggcccccaccgcctactggcagggcaccagcagccagtag

SEQ ID NO: 89408 - DNA, 2502 bp, synthetic construct
  misc_feature 1..2502: note = Description of Artificial Sequence: Synthetic coding sequence
  source 1..2502: mol_type = other DNA
atggacgtggtggaccccgacatcttcaacagagaccccagagaccactacgacctgctgcagagactgggcggcggcacctacggcgaggtgttcaaggccagagacaaggtgagcggcgacctggtggccctgaagatggtgaagatggagcccgacgacgacgtgagcaccctgcagaaggagatcctgatcctgaagacctgcagacacgccaacatcgtggcctaccacggcagctacctgtggctgcagaagctgtggatctgcatggagttctgcggcgccggcagcctgcaggacatctaccaggtgaccggcagcctgagcgagctgcagatcagctacgtgtgcagagaggtgctgcagggcctggcctacctgcacagccagaagaagatccacagagacatcaagggcgccaacatcctgatcaacgacgccggcgaggtgagactggccgacttcggcatcagcgcccagatcggcgccaccctggccagaagactgagcttcatcggcaccccctactggatggcccccgaggtggccgccgtggccctgaagggcggctacaacgagctgtgcgacatctggagcctgggcatcaccgccatcgagctggccgagctgcagccccccctgttcgacgtgcaccccctgagagtgctgttcctgatgaccaagagcggctaccagccccccagactgaaggagaagggcaagtggagcgccgccttccacaacttcatcaaggtgaccctgaccaagagccccaagaagagacccagcgccaccaagatgctgagccaccagctggtgagccagcccggcctgaacagaggcctgatcctggacctgctggacaagctgaagaaccccggcaagggccccagcatcggcgacatcgaggacgaggagcccgagctgccccccgccatccccagaagaatcagaagcacccacagaagcagcagcctgggcatccccgacgccgactgctgcagaagacacatggagttcagaaagctgagaggcatggagaccagaccccccgccaacaccgccagactgcagccccccagagacctgagaagcagcagccccagaaagcagctgagcgagagcagcgacgacgactacgacgacgtggacatccccacccccgccgaggacacccccccccccctgccccccaagcccaagttcagaagccccagcgacgagggccccggcagcatgggcgacgacggccagctgagccccggcgtgctggtgagatgcgccagcggccccccccccaacagccccagacccggccccccccccagcaccagcagcccccacctgaccgcccacagcgagcccagcctgtggaacccccccagcagagagctggacaagccccccctgctgccccccaagaaggagaagatgaagagaaagggctgcgccctgctggtgaagctgttcaacggctgccccctgagaatccacagcaccgccgcctggacccaccccagcaccaaggaccagcacctgctgctgggcgccgaggagggcatcttcatcctgaacagaaacgaccaggaggccaccctggagatgctgttccccagcagaaccacctgggtgtacagcatcaacaacgtgctgatgagcctgagcggcaagaccccccacctgtacagccacagcatcctgggcctgctggagagaaaggagaccagagccggcaaccccatcgcccacatcagcccccacagactgctggccagaaagaacatggtgagcaccaagatccaggacaccaagggctgcagagcctgctgcgtggccgagggcgccagcagcggcggccccttcctgtgcggcgccctggagaccagcgtggtgctgctgcagtggtaccagcccatgaacaagttcctgctggtgagacaggtgctgttccccctgcccacccccctgagcgtgttcgccctgctgaccggccccggcagcgagctgcccgccgtgtgcatcggcgtgagccccggcagacccggcaagagcgtgctgttccacaccgtgagattcggcgccctgagctgctggctgggcgagatgagcaccgagcacagaggccccgtgcaggtgacccaggtggaggaggacatggtgatggtgctgatggacggcagcgtgaagctggtgacccccgagggcagccccgtgagaggcctgagaacccccgagatccccatgaccgaggccgtggaggccgtggccatggtgggcggccagctgcaggccttctggaagcacggcgtgcaggtgtgggccctgggcagcgaccagctgctgcaggagctgagagaccccaccctgaccttcagactgctgggcagccccagactggagtgcagcggcaccatcagcccccactgcaacctgctgctgcccggcagcagcaacagccccgccagcgccagcagagtggccggcatcaccggcctgtag

SEQ ID NO: 89409 - DNA, 2463 bp, synthetic construct
  misc_feature 1..2463: note = Description of Artificial Sequence: Synthetic coding sequence
  source 1..2463: mol_type = other DNA
atggccctgctgagagacgtgagcctgcaggaccccagagacagattcgagctgctgcagagagtgggcgccggcacctacggcgacgtgtacaaggccagagacaccgtgaccagcgagctggccgccgtgaagatcgtgaagctggaccccggcgacgacatcagcagcctgcagcaggagatcaccatcctgagagagtgcagacaccccaacgtggtggcctacatcggcagctacctgagaaacgacagactgtggatctgcatggagttctgcggcggcggcagcctgcaggagatctaccacgccaccggccccctggaggagagacagatcgcctacgtgtgcagagaggccctgaagggcctgcaccacctgcacagccagggcaagatccacagagacatcaagggcgccaacctgctgctgaccctgcagggcgacgtgaagctggccgacttcggcgtgagcggcgagctgaccgccagcgtggccaagagaagaagcttcatcggcaccccctactggatggcccccgaggtggccgccgtggagagaaagggcggctacaacgagctgtgcgacgtgtgggccctgggcatcaccgccatcgagctgggcgagctgcagccccccctgttccacctgcaccccatgagagccctgatgctgatgagcaagagcagcttccagccccccaagctgagagacaagaccagatggacccagaacttccaccacttcctgaagctggccctgaccaagaaccccaagaagagacccaccgccgagaagctgctgcagcaccccttcaccacccagcagctgcccagagccctgctgacccagctgctggacaaggccagcgacccccacctgggcacccccagccccgaggactgcgagctggagacctacgacatgttccccgacaccatccacagcagaggccagcacggccccgccgagagaacccccagcgagatccagttccaccaggtgaagttcggcgcccccagaagaaaggagaccgaccccctgaacgagccctgggaggaggagtggaccctgctgggcaaggaggagctgagcggcagcctgctgcagagcgtgcaggaggccctggaggagagaagcctgaccatcagaagcgccagcgagttccaggagctggacagccccgacgacaccatgggcaccatcaagagagcccccttcctgggccccctgcccaccgacccccccgccgaggagcccctgagcagcccccccggcaccctgccccccccccccagcggccccaacagcagccccctgctgcccaccgcctgggccaccatgaagcagagagaggaccccgagagaagcagctgccacggcctgccccccacccccaaggtgcacatgggcgcctgcttcagcaaggtgttcaacggctgccccctgagaatccacgccgccgtgacctggatccaccccgtgaccagagaccagttcctggtggtgggcgccgaggagggcatctacaccctgaacctgcacgagctgcacgaggacaccctggagaagctgatcagccacagatgcagctggctgtactgcgtgaacaacgtgctgctgagcctgagcggcaagagcacccacatctgggcccacgacctgcccggcctgttcgagcagagaagactgcagcagcaggtgcccctgagcatccccaccaacagactgacccagagaatcatccccagaagattcgccctgagcaccaagatccccgacaccaagggctgcctgcagtgcagagtggtgagaaacccctacaccggcgccaccttcctgctggccgccctgcccaccagcctgctgctgctgcagtggtacgagcccctgcagaagttcctgctgctgaagaacttcagcagccccctgcccagccccgccggcatgctggagcccctggtgctggacggcaaggagctgccccaggtgtgcgtgggcgccgagggccccgagggccccggctgcagagtgctgttccacgtgctgcccctggaggccggcctgacccccgacatcctgatcccccccgagggcatccccggcagcgcccagcaggtgatccaggtggacagagacaccatcctggtgagcttcgagagatgcgtgagaatcgtgaacatgcagggcgagcccaccgccaccctggcccccgagctgaccttcgacttccccatcgagaccgtggtgtgcctgcaggacagcgtgctggccttctggagccacggcatgcagggcagaagcctggacaccaacgaggtgacccaggagatcaccgacgagaccagaatcttcagagtgctgggcgcccacagagacatcatcctggagagcatccccaccgacaaccccgaggcccacagcaacctgtacatcctgaccggccaccagagcacctactag

SEQ ID NO: 89410 - DNA, 2541 bp, synthetic construct
  misc_feature 1..2541: note = Description of Artificial Sequence: Synthetic coding sequence
  source 1..2541: mol_type = other DNA
atggaggcccccctgagacccgccgccgacatcctgagaagaaacccccagcaggactacgagctggtgcagagagtgggcagcggcacctacggcgacgtgtacaaggccagaaacgtgcacaccggcgagctggccgccgtgaagatcatcaagctggagcccggcgacgacttcagcctgatccagcaggagatcttcatggtgaaggagtgcaagcactgcaacatcgtggcctacttcggcagctacctgagcagagagaagctgtggatctgcatggagtactgcggcggcggcagcctgcaggacatctaccacgtgaccggccccctgagcgagctgcagatcgcctacgtgtgcagagagaccctgcagggcctggcctacctgcacaccaagggcaagatgcacagagacatcaagggcgccaacatcctgctgaccgaccacggcgacgtgaagctggccgacttcggcgtggccgccaagatcaccgccaccatcgccaagagaaagagcttcatcggcaccccctactggatggcccccgaggtggccgccgtggagaagaacggcggctacaaccagctgtgcgacatctgggccgtgggcatcaccgccatcgagctgggcgagctgcagccccccatgttcgacctgcaccccatgagagccctgttcctgatgagcaagagcaacttccagccccccaagctgaaggacaagaccaagtggagcagcaccttccacaacttcgtgaagatcgccctgaccaagaaccccaagaagagacccaccgccgagagactgctgacccacaccttcgtggcccagcccggcctgagcagagccctggccgtggagctgctggacaaggtgaacaaccccgacaaccacgcccactacaccgaggccgacgacgacgacttcgagccccacgccatcatcagacacaccatcagaagcaccaacagaaacgccagagccgagagaaccgccagcgagatcaacttcgacaagctgcagttcgagccccccctgagaaaggagaccgaggccagagacgagatgggcctgagcagcgaccccaacttcatgctgcagtggaaccccttcgtggacggcgccaacaccggcaagagcaccagcaagagagccatccccccccccctgccccccaagcccagaatcagcagctaccccgaggacaacttccccgacgaggagaaggccagcaccatcaagcactgccccgacagcgagagcagagccccccagatcctgagaagacagagcagccccagctgcggccccgtggccgagaccagcagcatcggcaacggcgacggcatcagcaagctgatgagcgagaacaccgagggcagcgcccaggccccccagctgcccagaaagaaggacaagagagacttccccaagcccgccatcaacggcctgccccccacccccaaggtgctgatgggcgcctgcttcagcaaggtgttcgacggctgccccctgaagatcaactgcgccaccagctggatccaccccgacaccaaggaccagtacatcatcttcggcaccgaggacggcatctacaccctgaacctgaacgagctgcacgaggccaccatggagcagctgttccccagaaagtgcacctggctgtacgtgatcaacaacaccctgatgagcctgagcgtgggcaagaccttccagctgtacagccacaacctgatcgccctgttcgagcacgccaagaagcccggcctggccgcccacatccagacccacagattccccgacagaatcctgcccagaaagttcgccctgaccaccaagatccccgacaccaagggctgccacaagtgctgcatcgtgagaaacccctacaccggccacaagtacctgtgcggcgccctgcagagcggcatcgtgctgctgcagtggtacgagcccatgcagaagttcatgctgatcaagcacttcgacttccccctgcccagccccctgaacgtgttcgagatgctggtgatccccgagcaggagtaccccatggtgtgcgtggccatcagcaagggcaccgagagcaaccaggtggtgcagttcgagaccatcaacctgaacagcgccagcagctggttcaccgagatcggcgccggcagccagcagctggacagcatccacgtgacccagctggagagagacaccgtgctggtgtgcctggacaagttcgtgaagatcgtgaacctgcagggcaagctgaagagcagcaagaagctggccagcgagctgagcttcgacttcagaatcgagagcgtggtgtgcctgcaggacagcgtgctggccttctggaagcacggcatgcagggcaagagcttcaagagcgacgaggtgacccaggagatcagcgacgagaccagagtgttcagactgctgggcagcgacagagtggtggtgctggagagcagacccaccgagaaccccaccgcccacagcaacctgtacatcctggccggccacgagaacagctactag

SEQ ID NO: 89411 - DNA, 699 bp, synthetic construct
  misc_feature 1..699: note = Description of Artificial Sequence: Synthetic coding sequence
  source 1..699: mol_type = other DNA
atggccaccgccgagagcagagccctgcagttcgccgagggcgccgccttccccgcctacagagccccccacgccggcggcgccctgctgcccccccccagccccgccgccgccctgctgcccgccccccccgccggccccggccccgccaccttcgccggcttcctgggcagagaccccggccccgccccccccccccccgccagcctgggcagccccgccccccccaagggcgccgccgcccccagcgccagccagagaagaaagagaaccagcttcagcgccgagcagctgcagctgctggagctggtgttcagaagaaccagataccccgacatccacctgagagagagactggccgccctgaccctgctgcccgagagcagaatccaggtgtggttccagaacagaagagccaagagcagaagacagagcggcaagagcttccagcccctggccagacccgagatcatcctgaaccactgcgcccccggcaccgagaccaagtgcctgaagccccagctgcccctggaggtggacgtgaactgcctgcccgagcccaacggcgtgggcggcggcatcagcgacagcagcagccagggccagaacttcgagacctgcagccccctgagcgaggacatcggcagcaagctggacagctgggaggagcacatcttcagcgccttcggcaacttctag

SEQ ID NO: 89412 - DNA, 723 bp, synthetic construct
  misc_feature 1..723: note = Description of Artificial Sequence: Synthetic coding sequence
  source 1..723: mol_type = other DNA
atggccaccgccgagagcagagccctgcagttcgccgagggcgccgccttccccgcctacagagccccccacgccggcggcgccctgctgcccccccccagccccgccgccgccctgctgcccgccccccccgccggccccggccccgccaccttcgccggcttcctgggcagagaccccggccccgccccccccccccccgccagcctgggcagccccgccccccccaagggcgccgccgcccccagcgccagccagagaagaaagagaaccagcttcagcgccgagcagctgcagctgctggagctggtgttcagaagaaccagataccccgacatccacctgagagagagactggccgccctgaccctgctgcccgagagcagaatccagctgctgttcagccccctgttccaggtgtggttccagaacagaagagccaagagcagaagacagagcggcaagagcttccagcccctggccagacccgagatcatcctgaaccactgcgcccccggcaccgagaccaagtgcctgaagccccagctgcccctggaggtggacgtgaactgcctgcccgagcccaacggcgtgggcggcggcatcagcgacagcagcagccagggccagaacttcgagacctgcagccccctgagcgaggacatcggcagcaagctggacagctgggaggagcacatcttcagcgccttcggcaacttctag

SEQ ID NO: 89413 - DNA, 882 bp, synthetic construct
  misc_feature 1..882: note = Description of Artificial Sequence: Synthetic coding sequence
  source 1..882: mol_type = other DNA
atggccaccttcagcggccccgccggccccatcctgagcctgaacccccaggaggacgtggagttccagaaggaggtggcccaggtgagaaagagaatcacccagagaaagaagcaggagcagctgacccccggcgtggtgtacgtgagacacctgcccaacctgctggacgagacccagatcttcagctacttcagccagttcggcaccgtgaccagattcagactgagcagaagcaagagaaccggcaacagcaagggctacgccttcgtggagttcgagagcgaggacgtggccaagatcgtggccgagaccatgaacaactacctgttcggcgagagactgctggagtgccacttcatgccccccgagaaggtgcacaaggagctgttcaaggactggaacatccccttcaagcagcccagctaccccagcgtgaagagatacaacagaaacagaaccctgacccagaagctgagaatggaggagagattcaagaagaaggagagactgctgagaaagaagctggccaagaagggcatcgactacgacttccccagcctgatcctgcagaagaccgagagcatcagcaagaccaacagacagaccagcaccaagggccaggtgctgagaaagaagaagaagaaggtgagcggcaccctggacacccccgagaagaccgtggacagccagggccccacccccgtgtgcacccccaccttcctggagagaagaaagagccaggtggccgagctgaacgacgacgacaaggacgacgagatcgtgttcaagcagcccatcagctgcgtgaaggaggagatccaggagacccagacccccacccacagcagaaagaagagaagaagaagcagcaaccagtag

SEQ ID NO: 89414 - DNA, 1257 bp, synthetic construct
  misc_feature 1..1257: note = Description of Artificial Sequence: Synthetic coding sequence
  source 1..1257: mol_type = other DNA
atggcccccagaggcagaagaagacccagaccccacagaagcgagggcgccagaagaagcaagaacaccctggagagaacccacagcatgaaggacaaggccggccagaagtgcaagcccatcgacgtgttcgacttccccgacaacagcgacgtgagcagcatcggcagactgggcgagaacgagaaggacgaggagacctacgagaccttcgacccccccctgcacagcaccgccatctacgccgacgaggaggagttcagcaagcactgcggcctgagcctgagcagcaccccccccggcaaggaggccaagagaagcagcgacaccagcggcaacgaggccagcgagatcgagagcgtgaagatcagcgccaagaagcccggcagaaagctgagacccatcagcgacgacagcgagagcatcgaggagagcgacaccagaagaaaggtgaagagcgccgagaagatcagcacccagagacacgaggtgatcagaaccaccgccagcagcgagctgagcgagaagcccgccgagagcgtgaccagcaagaagaccggccccctgagcgcccagcccagcgtggagaaggagaacctggccatcgagagccagagcaagacccagaagaagggcaagatcagccacgacaagagaaagaagagcagaagcaaggccatcggcagcgacaccagcgacatcgtgcacatctggtgccccgagggcatgaagaccagcgacatcaaggagctgaacatcgtgctgcccgagttcgagaagacccacctggagcaccagcagagaatcgagagcaaggtgtgcaaggccgccatcgccaccttctacgtgaacgtgaaggagcagttcatcaagatgctgaaggagagccagatgctgaccaacctgaagagaaagaacgccaagatgatcagcgacatcgagaagaagagacagagaatgatcgaggtgcaggacgagctgctgagactggagccccagctgaagcagctgcagaccaagtacgacgagctgaaggagagaaagagcagcctgagaaacgccgcctacttcctgagcaacctgaagcagctgtaccaggactacagcgacgtgcaggcccaggagcccaacgtgaaggagacctacgacagcagcagcctgcccgccctgctgttcaaggccagaaccctgctgggcgccgagagccacctgagaaacatcaaccaccagctggagaagctgctggaccagggctag

SEQ ID NO: 89415 - DNA, 963 bp, synthetic construct
  misc_feature 1..963: note = Description of Artificial Sequence: Synthetic coding sequence
  source 1..963: mol_type = other DNA
atggcccccagaggcagaagaagacccagaccccacagaagcgagggcgccagaagaagcaagaacaccctggagagaacccacagcatgaaggacaaggccggccagaagtgcaagcccatcgacgtgttcgacttccccgacaacagcgacgtgagcagcatcggcagactgggcgagaacgagaaggacgaggagacctacgagaccttcgacccccccctgcacagcaccgccatctacgccgacgaggaggagttcagcaagcactgcggcctgagcctgagcagcaccccccccggcaaggaggccaagagaagcagcgacaccagcggcaacgaggccagcgagatcgagagcgtgaagatcagcgccaagaagcccggcagaaagctgagacccatcagcgacgacagcgagagcatcgaggagagcgacaccagaagaaaggtgaagagcgccgagaagatcagcacccagagacacgaggtgatcagaaccaccgccagcagcgagctgagcgagaagcccgccgagagcgtgaccagcaagaagaccggccccctgagcgcccagcccagcgtggagaaggagaacctggccatcgagagccagagcaagacccagaagaagggcaagatcagccacgacaagagaaagaagagcagaagcaaggccatcggcagcgacaccagcgacatcgtgcacatctggtgccccgagggcatgaagaccagcgacatcaaggagctgaacatcgtgctgcccgagttcgagaagacccacctggagcaccagcagagaatcgagagcaaggtgtgcaaggccgccatcgccaccttctacgtgaacgtgaaggagcagttcatcaagatgctgaaggagagccagatgctgaccaacctgaagagaaagaacgccaaggtgagagccaccgccgagaccaccaccaacaagatctag

SEQ ID NO: 89416 - DNA, 963 bp, synthetic construct
  misc_feature 1..963: note = Description of Artificial Sequence: Synthetic coding sequence
  source 1..963: mol_type = other DNA
atggcccccagaggcagaagaagacccagaccccacagaagcgagagcgccagaagaagcaagaacaccctggagagaacccacagcatgaaggacaaggccggccagaagtgcaagcccatcgacgtgttcgacttccccgacaacagcgacgtgagcagcatcggcagactgggcgagaacgagaaggacgaggagacctacgagaccttcgacccccccctgcacagcaccgccatctacgccgacgaggaggagttcagcaagcactgcggcctgagcctgagcagcaccccccccggcaaggaggccaagagaagcagcgacaccagcggcaacgaggccagcgagatcgagagcgtgaagatcagcgccaagaagcccggcagaaagctgagacccatcagcgacgacagcgagagcatcgaggagagcgacaccagaagaaaggtgaagagcgccgagaagatcagcacccagagacacgaggtgatcagaaccaccgccagcagcgagctgagcgagaagcccgccgagagcgtgaccagcaagaagaccggccccctgagcgcccagcccagcgtggagaaggagaacctggccatcgagagccagagcaagacccagaagaagggcaagatcagccacgacaagagaaagaagagcagaagcaaggccatcggcagcgacaccagcgacatcgtgcacatctggtgccccgagggcatgaagaccagcgacatcaaggagctgaacatcgtgctgcccgagttcgagaagacccacctggagcaccagcagagaatcgagagcaaggtgtgcaaggccgccatcgccaccttctacgtgaacgtgaaggagcagttcatcaagatgctgaaggagagccagatgctgaccaacctgaagagaaagaacgccaaggtgagagccaccgccgagaccaccaccaacaagatctag

SEQ ID NO: 89417 - DNA, 1014 bp, synthetic construct
  misc_feature 1..1014: note = Description of Artificial Sequence: Synthetic coding sequence
  source 1..1014: mol_type = other DNA
atggcccccagaggcagaagaagacccagaccccacagaagcgagggcgccagaagaagcaagaacaccctggagagaacccacagcatgaaggacaaggccggccagaagtgcaagcccatcgacgtgttcgacttccccgacaacagcgacgtgagcagcatcggcagactgggcgagaacgagaaggacgaggagacctacgagaccttcgacccccccctgcacagcaccgccatctacgccgacgaggaggagttcagcaagcactgcggcctgagcctgagcagcaccccccccggcaaggaggccaagagaagcagcgacaccagcggcaacgaggccagcgagatcgagagcgtgaagatcagcgccaagaagcccggcagaaagctgagacccatcagcgacgacagcgagagcatcgaggagagcgacaccagaagaaaggtgaagagcgccgagaagatcagcacccagagacacgaggtgatcagaaccaccgccagcagcgagctgagcgagaagcccgccgagagcgtgaccagcaagaagaccggccccctgagcgcccagcccagcgtggagaaggagaacctggccatcgagagccagagcaagacccagaagaagggcaagatcagccacgacaagagaaagaagagcagaagcaaggccatcggcagcgacaccagcgacatcgtgcacatctggtgccccgagggcatgaagaccagcgacatcaaggagctgaacatcgtgctgcccgagttcgagaagacccacctggagcaccagcagagaatcgagagcaaggtgtgcaaggccgccatcgccaccttctacgtgaacgtgaaggagcagttcatcaagatgctgaaggagagccagatgctgaccaacctgaagagaaagaacgccaagatgatcagcgacatcgagaagaagagacagagaatgatcgaggtgcaggacgagctgctgagactgtggaccggcgccggcctgtggtag

SEQ ID NO: 89418 - DNA, 2760 bp, synthetic construct
  misc_feature 1..2760: note = Description of Artificial Sequence: Synthetic coding sequence
  source 1..2760: mol_type = other DNA
atggccgccgacgtgttcatgtgcagccccagaagacccagaagcagaggcagacaggtgctgctgaagccccaggtgagcgaggacgacgacgacagcgacaccgacgagcccagccccccccccgccagcggcgccgccacccccgccagagcccacgccagcgccgccccccccccccccagagccggccccggcagagaggagccccccagaagacagcagatcatccacagcggccacttcatggtgagcagcccccacagagagcacccccccaagaagggctacgacttcgacaccgtgaacaagcagacctgccagacctacagcttcggcaagaccagcagctgccacctgagcatcgacgccagcctgaccaagctgttcgagtgcatgaccctggcctacagcggcaagctggtgagccccaagtggaagaacttcaagggcctgaagctgcagtggagagacaagatcagactgaacaacgccatctggagagcctggtacatgcagtacctggagaagagaaagaaccccgtgtgccacttcgtgacccccctggacggcagcgtggacgtggacgagcacagaagacccgaggccatcaccaccgagggcaagtactggaagagcagaatcgagatcgtgatcagagagtaccacaagtggagaacctacttcaagaagagactgcagcagcacaaggacgaggacctgagcagcctggtgcaggacgacgacatgctgtactggcacaagcacggcgacggctggaagacccccgtgcccatggaggaggaccccctgctggacaccgacatgctgatgagcgagttcagcgacaccctgttcagcaccctgagcagccaccagcccgtggcctggcccaaccccagagagatcgcccacctgggcaacgccgacatgatccagcccggcctgatccccctgcagcccaacctggacttcatggacaccttcgagcccttccaggacctgttcagcagcagcagaagcatcttcggcagcatgctgcccgccagcgccagcgcccccgtgcccgaccccaacaacccccccgcccaggagagcatcctgcccaccaccgccctgcccaccgtgagcctgcccgacagcctgatcgccccccccaccgcccccagcctggcccacatggacgagcagggctgcgagcacaccagcagaaccgaggaccccttcatccagcccaccgacttcggccccagcgagccccccctgagcgtgccccagcccttcctgcccgtgttcaccatgcccctgctgagccccagccccgcccccccccccatcagccccgtgctgcccctggtgcccccccccgccaccgccctgaacccccccgccccccccaccttccaccagccccagaagttcgccggcgtgaacaaggcccccagcgtgatcacccacaccgccagcgccaccctgacccacgacgcccccgccaccaccttcagccagagccagggcctggtgatcaccacccaccaccccgcccccagcgccgccccctgcggcctggccctgagccccgtgaccagacccccccagcccagactgaccttcgtgcaccccaagcccgtgagcctgaccggcggcagacccaagcagccccacaagatcgtgcccgcccccaagcccgagcccgtgagcctggtgctgaagaacgccagaatcgcccccgccgccttcagcggccagccccaggccgtgatcatgaccagcggccccctgaagagagagggcatgctggccagcaccgtgagccagagcaacgtggtgatcgcccccgccgccatcgccagagcccccggcgtgcccgagttccacagcagcatcctggtgaccgacctgggccacggcaccagcagcccccccgcccccgtgagcagactgttccccagcaccgcccaggaccccctgggcaagggcgagcaggtgcccctgcacggcggcagcccccaggtgaccgtgaccggccccagcagagactgccccaacagcggccaggccagcccctgcgccagcgagcagagccccagcccccagagcccccagaacaactgcagcggcaagagcgaccccaagaacgtggccgccctgaagaacagacagatgaagcacatcagcgccgagcagaagagaagattcaacatcaagatgtgcttcgacatgctgaacagcctgatcagcaacaacagcaagctgaccagccacgccatcaccctgcagaagaccgtggagtacatcaccaagctgcagcaggagagaggccagatgcaggaggaggccagaagactgagagaggagatcgaggagctgaacgccaccatcatcagctgccagcagctgctgcccgccaccggcgtgcccgtgaccagaagacagttcgaccacatgaaggacatgttcgacgagtacgtgaagaccagaaccctgcagaactggaagttctggatcttcagcatcatcatcaagcccctgttcgagagcttcaagggcatggtgagcaccagcagcctggaggagctgcacagaaccgccctgagctggctggaccagcactgcagcctgcccatcctgagacccatggtgctgagcaccctgagacagctgagcaccagcaccagcatcctgaccgaccccgcccagctgcccgagcaggccagcaaggccgtgaccagaatcggcaagagactgggcgagagctag

SEQ ID NO: 89419 - DNA, 657 bp, synthetic construct
  misc_feature 1..657: note = Description of Artificial Sequence: Synthetic coding sequence
  source 1..657: mol_type = other DNA
atggacgagcagggctgcgagcacaccagcagaaccgaggaccccttcatccagcccaccgacttcggccccagcgagccccccctgagcgtgccccccccccccatcagccccgtgctgcccctggtgcccccccccgccaccgccctgaacccccccgccccccccaccttccaccagccccagaagttcgccggcgtgaacaaggcccccagcgtgatcacccacaccgccagcgccaccctgacccacgacgcccccgccaccaccttcagccagagccagggcctggtgatcaccacccaccaccccgcccccagcgccgccccctgcggcctggccctgagccccgtgaccagacccccccagcccagactgaccttcgtgcaccccaagcccgtgagcctgaccggcggcagacccaagcagccccacaagatcgtgcccgcccccaagcccgagcccgtgagcctggtgctgaagaacgccagaatcgcccccggcgagcccggcggcgagacccagtgcggcgccccccccgaccccgagggctgcttccccatccccaaggccttcaagctggtgaccaccaccaccaccctggtgtgcacctgcatgagaacccacatccacctgaacgagaccaaggtgagctag

SEQ ID NO: 89420 - DNA, 1581 bp, synthetic construct
  misc_feature 1..1581: note = Description of Artificial Sequence: Synthetic coding sequence
  source 1..1581: mol_type = other DNA
atggacgagcagggctgcgagcacaccagcagaaccgaggaccccttcatccagcccaccgacttcggccccagcgagccccccctgagcgtgccccagcccttcctgcccgtgttcaccatgcccctgctgagccccagccccgcccccccccccatcagccccgtgctgcccctggtgcccccccccgccaccgccctgaacccccccgccccccccaccttccaccagccccagaagttcgccggcgtgaacaaggcccccagcgtgatcacccacaccgccagcgccaccctgacccacgacgcccccgccaccaccttcagccagagccagggcctggtgatcaccacccaccaccccgcccccagcgccgccccctgcggcctggccctgagccccgtgaccagacccccccagcccagactgaccttcgtgcaccccaagcccgtgagcctgaccggcggcagacccaagcagccccacaagatcgtgcccgcccccaagcccgagcccgtgagcctggtgctgaagaacgccagaatcgcccccgccgccttcagcggccagccccaggccgtgatcatgaccagcggccccctgaagagagagggcatgctggccagcaccgtgagccagagcaacgtggtgatcgcccccgccgccatcgccagagcccccggcgtgcccgagttccacagcagcatcctggtgaccgacctgggccacggcaccagcagcccccccgcccccgtgagcagactgttccccagcaccgcccaggaccccctgggcaagggcgagcaggtgcccctgcacggcggcagcccccaggtgaccgtgaccggccccagcagagactgccccaacagcggccaggccagcccctgcgccagcgagcagagccccagcccccagagcccccagaacaactgcagcggcaagagcgaccccaagaacgtggccgccctgaagaacagacagatgaagcacatcagcgccgagcagaagagaagattcaacatcaagatgtgcttcgacatgctgaacagcctgatcagcaacaacagcaagctgaccagccacgccatcaccctgcagaagaccgtggagtacatcaccaagctgcagcaggagagaggccagatgcaggaggaggccagaagactgagagaggagatcgaggagctgaacgccaccatcatcagctgccagcagctgctgcccgccaccggcgtgcccgtgaccagaagacagttcgaccacatgaaggacatgttcgacgagtacgtgaagaccagaaccctgcagaactggaagttctggatcttcagcatcatcatcaagcccctgttcgagagcttcaagggcatggtgagcaccagcagcctggaggagctgcacagaaccgccctgagctggctggaccagcactgcagcctgcccatcctgagacccatggtgctgagcaccctgagacagctgagcaccagcaccagcatcctgaccgaccccgcccagctgcccgagcaggccagcaaggccgtgaccagaatcggcaagagactgggcgagagctag

SEQ ID NO: 89421 - DNA, 2559 bp, synthetic construct
  misc_feature 1..2559: note = Description of Artificial Sequence: Synthetic coding sequence
  source 1..2559: mol_type = other DNA
atggccggcgccctggccggcctggccgccggcctgcaggtgcccagagtggcccccagccccgacagcgacagcgacaccgacagcgaggaccccagcctgagaagaagcgccggcggcctgctgagaagccaggtgatccacagcggccacttcatggtgagcagcccccacagcgacagcctgcccagaagaagagaccaggagggcagcgtgggccccagcgacttcggccccagaagcatcgaccccaccctgaccagactgttcgagtgcctgagcctggcctacagcggcaagctggtgagccccaagtggaagaacttcaagggcctgaagctgctgtgcagagacaagatcagactgaacaacgccatctggagagcctggtacatccagtacgtgaagagaagaaagagccccgtgtgcggcttcgtgacccccctgcagggccccgaggccgacgcccacagaaagcccgaggccgtggtgctggagggcaactactggaagagaagaatcgaggtggtgatgagagagtaccacaagtggagaatctactacaagaagagactgagaaagcccagcagagaggacgacctgctggcccccaagcaggccgagggcagatggcccccccccgagcagtggtgcaagcagctgttcagcagcgtggtgcccgtgctgctgggcgaccccgaggaggagcccggcggcagacagctgctggacctgaactgcttcctgagcgacatcagcgacaccctgttcaccatgacccagagcggccccagccccctgcagctgccccccgaggacgcctacgtgggcaacgccgacatgatccagcccgacctgacccccctgcagcccagcctggacgacttcatggacatcagcgacttcttcaccaacagcagactgccccagccccccatgcccagcaacttccccgagccccccagcttcagccccgtggtggacagcctgttcagcagcggcaccctgggccccgaggtgccccccgccagcagcgccatgacccacctgagcggccacagcagactgcaggccagaaacagctgccccggccccctggacagcagcgccttcctgagcagcgacttcctgctgcccgaggaccccaagcccagactgccccccccccccgtgcccccccccctgctgcactaccccccccccgccaaggtgcccggcctggagccctgcccccccccccccttcccccccatggccccccccaccgccctgctgcaggaggagcccctgttcagccccagattccccttccccaccgtgccccccgcccccggcgtgagccccctgcccgcccccgccgccttcccccccaccccccagagcgtgcccagccccgcccccacccccttccccatcgagctgctgcccctgggctacagcgagcccgccttcggcccctgcttcagcatgcccagaggcaagccccccgcccccagccccagaggccagaaggccagcccccccaccctggcccccgccaccgccagcccccccaccaccgccggcagcaacaacccctgcctgacccagctgctgaccgccgccaagcccgagcaggccctggagccccccctggtgagcagcaccctgctgagaagccccggcagcccccaggagaccgtgcccgagttcccctgcaccttcctgccccccacccccgcccccaccccccccagacccccccccggccccgccaccctggcccccagcagacccctgctggtgcccaaggccgagagactgagcccccccgcccccagcggcagcgagagaagactgagcggcgacctgagcagcatgcccggccccggcaccctgagcgtgagagtgagccccccccagcccatcctgagcagaggcagacccgacagcaacaagaccgagaacagaagaatcacccacatcagcgccgagcagaagagaagattcaacatcaagctgggcttcgacaccctgcacggcctggtgagcaccctgagcgcccagcccagcctgaaggtgagcaaggccaccaccctgcagaagaccgccgagtacatcctgatgctgcagcaggagagagccggcctgcaggaggaggcccagcagctgagagacgagatcgaggagctgaacgccgccatcaacctgtgccagcagcagctgcccgccaccggcgtgcccatcacccaccagagattcgaccagatgagagacatgttcgacgactacgtgagaaccagaaccctgcacaactggaagttctgggtgttcagcatcctgatcagacccctgttcgagagcttcaacggcatggtgagcaccgccagcgtgcacaccctgagacagaccagcctggcctggctggaccagtactgcagcctgcccgccctgagacccaccgtgctgaacagcctgagacagctgggcaccagcaccagcatcctgaccgaccccggcagaatccccgagcaggccaccagagccgtgaccgagggcaccctgggcaagcccctgtag

SEQ ID NO: 89422 - DNA, 2496 bp, synthetic construct
  misc_feature 1..2496: note = Description of Artificial Sequence: Synthetic coding sequence
  source 1..2496: mol_type = other DNA
atggccggcgccctggccggcctggccgccggcctgcaggtgcccagagtggcccccagccccgacagcgacagcgacaccgacagcgaggaccccagcctgagaagaagcgccggcggcctgctgagaagccaggtgatccacagcggccacttcatggtgagcagcccccacagcgacagcctgcccagaagaagagaccaggagggcagcgtgggccccagcgacttcggccccagaagcatcgaccccaccctgaccagactgttcgagtgcctgagcctggcctacagcggcaagctggtgagccccaagtggaagaacttcaagggcctgaagctgctgtgcagagacaagatcagactgaacaacgccatctggagagcctggtacatccagtacgtgaagagaagaaagagccccgtgtgcggcttcgtgacccccctgcagggccccgaggccgacgcccacagaaagcccgaggccgtggtgctggagggcaactactggaagagaagaatcgaggtggtgatgagagagtaccacaagtggagaatctactacaagaagagactgagaaagcccagcagagaggacgacctgctggcccccaagcaggccgagggcagatggcccccccccgagcagtggtgcaagcagctgttcagcagcgtggtgcccgtgctgctgggcgaccccgaggaggagcccggcggcagacagctgctggacctgaactgcttcctgagcgacatcagcgacaccctgttcaccatgacccagagcggccccagccccctgcagctgccccccgaggacgcctacgtgggcaacgccgacatgatccagcccgacctgacccccctgcagcccagcctggacgacttcatggacatcagcgacttcttcaccaacagcagactgccccagccccccatgcccagcaacttccccgagccccccagcttcagccccgtggtggacagcctgttcagcagcggcaccctgggccccgaggtgccccccgccagcagcgccatgacccacctgagcggccacagcagactgcaggccagaaacagctgccccggccccctggacagcagcgccttcctgagcagcgacttcctgctgcccgaggaccccaagcccagactgccccccccccccgtgcccccccccctgctgcactaccccccccccgccaaggtgcccggcctggagccctgcccccccccccccttcccccccatggccccccccaccgccctgctgcaggaggagcccctgttcagccccagattccccttccccaccgtgccccccgcccccggcgtgagccccctgcccgcccccgccgccttcccccccaccccccagagcgtgcccagccccgcccccacccccttccccatcgagctgctgcccctgggctacagcgagcccgccttcggcccctgcttcagcatgcccagaggcaagccccccgcccccagccccagaggccagaaggccagcccccccaccctggcccccgccaccgccagcccccccaccaccgccggcagcaacaacccctgcctgacccagctgctgaccgccgccaagcccgagcaggccctggagccccccctggtgagcagcaccctgctgagaagccccggcagcccccaggagaccgtgcccgagttcccctgcaccttcctgccccccacccccgcccccaccccccccagacccccccccggccccgccaccctggcccccagcagacccctgctggtgcccaaggccgagagactgagcccccccgcccccagcggcagcgagagaagactgagcggcgacctgagcagcatgcccggccccggcaccctgagcgtgagagtgagccccccccagcccatcctgagcagaggcagacccgacagcaacaagaacagaagaatcacccacatcagcgccgagcagaagagaagattcaacatcaagctgggcttcgacaccctgcacggcctggtgagcaccctgagcgcccagcccagcctgaaggagagagccggcctgcaggaggaggcccagcagctgagagacgagatcgaggagctgaacgccgccatcaacctgtgccagcagcagctgcccgccaccggcgtgcccatcacccaccagagattcgaccagatgagagacatgttcgacgactacgtgagaaccagaaccctgcacaactggaagttctgggtgttcagcatcctgatcagacccctgttcgagagcttcaacggcatggtgagcaccgccagcgtgcacaccctgagacagaccagcctggcctggctggaccagtactgcagcctgcccgccctgagacccaccgtgctgaacagcctgagacagctgggcaccagcaccagcatcctgaccgaccccggcagaatccccgagcaggccaccagagccgtgaccgagggcaccctgggcaagcccctgtag

SEQ ID NO: 89423 - DNA, 2280 bp, synthetic construct
  misc_feature 1..2280: note = Description of Artificial Sequence: Synthetic coding sequence
  source 1..2280: mol_type = other DNA
atggccggcgccctggccggcctggccgccggcctgcaggtgcccagagtggcccccagccccgacagcgacagcgacaccgacagcgaggaccccagcctgagaagaagcgccggcggcctgctgagaagccaggtgatccacagcggccacttcatggtgagcagcccccacagcgacagcctgcccagaagaagagaccaggagggcagcgtgggccccagcgacttcggccccagaagcatcgaccccaccctgaccagactgttcgagtgcctgagcctggcctacagcggcaagctggtgagccccaagtggaagaacttcaagggcctgaagctgctgtgcagagacaagatcagactgaacaacgccatctggagagcctggtacatccagtacgtgaagagaagaaagagccccgtgtgcggcttcgtgacccccctgcagggccccgaggccgacgcccacagaaagcccgaggccgtggtgctggagggcaactactggaagagaagaatcgagctgccccccgaggacgcctacgtgggcaacgccgacatgatccagcccgacctgacccccctgcagcccagcctggacgacttcatggacatcagcgacttcttcaccaacagcagactgccccagccccccatgcccagcaacttccccgagccccccagcttcagccccgtggtggacagcctgttcagcagcggcaccctgggccccgaggtgccccccgccagcagcgccatgacccacctgagcggccacagcagactgcaggccagaaacagctgccccggccccctggacagcagcgccttcctgagcagcgacttcctgctgcccgaggaccccaagcccagactgccccccccccccgtgcccccccccctgctgcactaccccccccccgccaaggtgcccggcctggagccctgcccccccccccccttcccccccatggccccccccaccgccctgctgcaggaggagcccctgttcagccccagattccccttccccaccgtgccccccgcccccggcgtgagccccctgcccgcccccgccgccttcccccccaccccccagagcgtgcccagccccgcccccacccccttccccatcgagctgctgcccctgggctacagcgagcccgccttcggcccctgcttcagcatgcccagaggcaagccccccgcccccagccccagaggccagaaggccagcccccccaccctggcccccgccaccgccagcccccccaccaccgccggcagcaacaacccctgcctgacccagctgctgaccgccgccaagcccgagcaggccctggagccccccctggtgagcagcaccctgctgagaagccccggcagcccccaggagaccgtgcccgagttcccctgcaccttcctgccccccacccccgcccccaccccccccagacccccccccggccccgccaccctggcccccagcagacccctgctggtgcccaaggccgagagactgagcccccccgcccccagcggcagcgagagaagactgagcggcgacctgagcagcatgcccggccccggcaccctgagcgtgagagtgagccccccccagcccatcctgagcagaggcagacccgacagcaacaagaccgagaacagaagaatcacccacatcagcgccgagcagaagagaagattcaacatcaagctgggcttcgacaccctgcacggcctggtgagcaccctgagcgcccagcccagcctgaaggtgagcaaggccaccaccctgcagaagaccgccgagtacatcctgatgctgcagcaggagagagccggcctgcaggaggaggcccagcagctgagagacgagatcgaggagctgaacgccgccatcaacctgtgccagcagcagctgcccgccaccggcgtgcccatcacccaccagagattcgaccagatgagagacatgttcgacgactacgtgagaaccagaaccctgcacaactggaagttctgggtgttcagcatcctgatcagacccctgttcgagagcttcaacggcatggtgagcaccgccagcgtgcacaccctgagacagaccagcctggcctggctggaccagtactgcagcctgcccgccctgagacccaccgtgctgaacagcctgagacagctgggcaccagcaccagcatcctgaccgaccccggcagaatccccgagcaggccaccagagccgtgaccgagggcaccctgggcaagcccctgtag

SEQ ID NO: 89424 - DNA, 2553 bp, synthetic construct
  misc_feature 1..2553: note = Description of Artificial Sequence: Synthetic coding sequence
  source 1..2553: mol_type = other DNA
atggccggcgccctggccggcctggccgccggcctgcaggtgcccagagtggcccccagccccgacagcgacagcgacaccgacagcgaggaccccagcctgagaagaagcgccggcggcctgctgagaagccaggtgatccacagcggccacttcatggtgagcagcccccacagcgacagcctgcccagaagaagagaccaggagggcagcgtgggccccagcgacttcggccccagaagcatcgaccccaccctgaccagactgttcgagtgcctgagcctggcctacagcggcaagctggtgagccccaagtggaagaacttcaagggcctgaagctgctgtgcagagacaagatcagactgaacaacgccatctggagagcctggtacatccagtacgtgaagagaagaaagagccccgtgtgcggcttcgtgacccccctgcagggccccgaggccgacgcccacagaaagcccgaggccgtggtgctggagggcaactactggaagagaagaatcgaggtggtgatgagagagtaccacaagtggagaatctactacaagaagagactgagaaagcccagcagagaggacgacctgctggcccccaagcaggccgagggcagatggcccccccccgagcagtggtgcaagcagctgttcagcagcgtggtgcccgtgctgctgggcgaccccgaggaggagcccggcggcagacagctgctggacctgaactgcttcctgagcgacatcagcgacaccctgttcaccatgacccagagcggccccagccccctgcagctgccccccgaggacgcctacgtgggcaacgccgacatgatccagcccgacctgacccccctgcagcccagcctggacgacttcatggacatcagcgacttcttcaccaacagcagactgccccagccccccatgcccagcaacttccccgagccccccagcttcagccccgtggtggacagcctgttcagcagcggcaccctgggccccgaggtgccccccgccagcagcgccatgacccacctgagcggccacagcagactgcaggccagaaacagctgccccggccccctggacagcagcgccttcctgagcagcgacttcctgctgcccgaggaccccaagcccagactgccccccccccccgtgcccccccccctgctgcactaccccccccccgccaaggtgcccggcctggagccctgcccccccccccccttcccccccatggccccccccaccgccctgctgcaggaggagcccctgttcagccccagattccccttccccaccgtgccccccgcccccggcgtgagccccctgcccgcccccgccgccttcccccccaccccccagagcgtgcccagccccgcccccacccccttccccatcgagctgctgcccctgggctacagcgagcccgccttcggcccctgcttcagcatgcccagaggcaagccccccgcccccagccccagaggccagaaggccagcccccccaccctggcccccgccaccgccagcccccccaccaccgccggcagcaacaacccctgcctgacccagctgctgaccgccgccaagcccgagcaggccctggagccccccctggtgagcagcaccctgctgagaagccccggcagcccccaggagaccgtgcccgagttcccctgcaccttcctgccccccacccccgcccccaccccccccagacccccccccggccccgccaccctggcccccagcagacccctgctggtgcccaaggccgagagactgagcccccccgcccccagcggcagcgagagaagactgagcggcgacctgagcagcatgcccggccccggcaccctgagcgtgagagtgagccccccccagcccatcctgagcagaggcagacccgacagcaacaagaacagaagaatcacccacatcagcgccgagcagaagagaagattcaacatcaagctgggcttcgacaccctgcacggcctggtgagcaccctgagcgcccagcccagcctgaaggtgagcaaggccaccaccctgcagaagaccgccgagtacatcctgatgctgcagcaggagagagccggcctgcaggaggaggcccagcagctgagagacgagatcgaggagctgaacgccgccatcaacctgtgccagcagcagctgcccgccaccggcgtgcccatcacccaccagagattcgaccagatgagagacatgttcgacgactacgtgagaaccagaaccctgcacaactggaagttctgggtgttcagcatcctgatcagacccctgttcgagagcttcaacggcatggtgagcaccgccagcgtgcacaccctgagacagaccagcctggcctggctggaccagtactgcagcctgcccgccctgagacccaccgtgctgaacagcctgagacagctgggcaccagcaccagcatcctgaccgaccccggcagaatccccgagcaggccaccagagccgtgaccgagggcaccctgggcaagcccctgtag

SEQ ID NO: 89425 - DNA, 2502 bp, synthetic construct
  misc_feature 1..2502: note = Description of Artificial Sequence: Synthetic coding sequence
  source 1..2502: mol_type = other DNA
atggccggcgccctggccggcctggccgccggcctgcaggtgcccagagtggcccccagccccgacagcgacagcgacaccgacagcgaggaccccagcctgagaagaagcgccggcggcctgctgagaagccaggtgatccacagcggccacttcatggtgagcagcccccacagcgacagcctgcccagaagaagagaccaggagggcagcgtgggccccagcgacttcggccccagaagcatcgaccccaccctgaccagactgttcgagtgcctgagcctggcctacagcggcaagctggtgagccccaagtggaagaacttcaagggcctgaagctgctgtgcagagacaagatcagactgaacaacgccatctggagagcctggtacatccagtacgtgaagagaagaaagagccccgtgtgcggcttcgtgacccccctgcagggccccgaggccgacgcccacagaaagcccgaggccgtggtgctggagggcaactactggaagagaagaatcgaggtggtgatgagagagtaccacaagtggagaatctactacaagaagagactgagaaagcccagcagagaggacgacctgctggcccccaagcaggccgagggcagatggcccccccccgagcagtggtgcaagcagctgttcagcagcgtggtgcccgtgctgctgggcgaccccgaggaggagcccggcggcagacagctgctggacctgaactgcttcctgagcgacatcagcgacaccctgttcaccatgacccagagcggccccagccccctgcagctgccccccgaggacgcctacgtgggcaacgccgacatgatccagcccgacctgacccccctgcagcccagcctggacgacttcatggacatcagcgacttcttcaccaacagcagactgccccagccccccatgcccagcaacttccccgagccccccagcttcagccccgtggtggacagcctgttcagcagcggcaccctgggccccgaggtgccccccgccagcagcgccatgacccacctgagcggccacagcagactgcaggccagaaacagctgccccggccccctggacagcagcgccttcctgagcagcgacttcctgctgcccgaggaccccaagcccagactgccccccccccccgtgcccccccccctgctgcactaccccccccccgccaaggtgcccggcctggagccctgcccccccccccccttcccccccatggccccccccaccgccctgctgcaggaggagcccctgttcagccccagattccccttccccaccgtgccccccgcccccggcgtgagccccctgcccgcccccgccgccttcccccccaccccccagagcgtgcccagccccgcccccacccccttccccatcgagctgctgcccctgggctacagcgagcccgccttcggcccctgcttcagcatgcccagaggcaagccccccgcccccagccccagaggccagaaggccagcccccccaccctggcccccgccaccgccagcccccccaccaccgccggcagcaacaacccctgcctgacccagctgctgaccgccgccaagcccgagcaggccctggagccccccctggtgagcagcaccctgctgagaagccccggcagcccccaggagaccgtgcccgagttcccctgcaccttcctgccccccacccccgcccccaccccccccagacccccccccggccccgccaccctggcccccagcagacccctgctggtgcccaaggccgagagactgagcccccccgcccccagcggcagcgagagaagactgagcggcgacctgagcagcatgcccggccccggcaccctgagcgtgagagtgagccccccccagcccatcctgagcagaggcagacccgacagcaacaagaccgagaacagaagaatcacccacatcagcgccgagcagaagagaagattcaacatcaagctgggcttcgacaccctgcacggcctggtgagcaccctgagcgcccagcccagcctgaaggagagagccggcctgcaggaggaggcccagcagctgagagacgagatcgaggagctgaacgccgccatcaacctgtgccagcagcagctgcccgccaccggcgtgcccatcacccaccagagattcgaccagatgagagacatgttcgacgactacgtgagaaccagaaccctgcacaactggaagttctgggtgttcagcatcctgatcagacccctgttcgagagcttcaacggcatggtgagcaccgccagcgtgcacaccctgagacagaccagcctggcctggctggaccagtactgcagcctgcccgccctgagacccaccgtgctgaacagcctgagacagctgggcaccagcaccagcatcctgaccgaccccggcagaatccccgagcaggccaccagagccgtgaccgagggcaccctgggcaagcccctgtag

SEQ ID NO: 89426 - DNA, 1059 bp, synthetic construct
  misc_feature 1..1059: note = Description of Artificial Sequence: Synthetic coding sequence
  source 1..1059: mol_type = other DNA
atgaacaccatcgtgttcaacaagctgagcggcgccgtgctgttcgaggacggcggcgccagcgagagagagagaggcggcagaccctacagcggcgtgctggacagcccccacgccagacccgaggtgggcatccccgacggcccccccctgaaggacaacctgggcctgagacacagaagaaccggcgccagacagaacggcggcaaggtgagacacaagagacaggccctgcaggacatggccagacccctgaagcagtggctgtacaagcacagagacaacccctaccccaccaagaccgagaagatcctgctggccctgggcagccagatgaccctggtgcaggtgagcaactggttcgccaacgccagaagaagactgaagaacaccgtgagacagcccgacctgagctgggccctgagaatcaagctgtacaacaagtacgtgcagggcaacgccgagagactgagcgtgagcagcgacgacagctgcagcgaggacggcgagaacccccccagaacccacatgaacgagggcggctacaacacccccgtgcaccaccccgtgatcaagagcgagaacagcgtgatcaaggccggcgtgagacccgagagcagagccagcgaggactacgtggccccccccaagtacaagagcagcctgctgaacagatacctgaacgacagcctgagacacgtgatggccaccaacaccaccatgatgggcaagaccagacagagaaaccacagcggcagcttcagcagcaacgagttcgaggaggagctggtgagccccagcagcagcgagaccgagggcaacttcgtgtacagaaccgacaccctggagaacggcagcaacaagggcgagagcgccgccaacagaaagggccccagcaaggacgacacctactggaaggagatcaacgccgccatggccctgaccaacctggcccagggcaaggacaagctgcagggcaccaccagctgcatcatccagaagagcagccacatcgccgaggtgaagaccgtgaaggtgcccctggtgcagcagttctag

SEQ ID NO: 89427 - DNA, 1059 bp, synthetic construct; identical to SEQ ID NO: 89426
  misc_feature 1..1059: note = Description of Artificial Sequence: Synthetic coding sequence
  source 1..1059: mol_type = other DNA

SEQ ID NO: 89428 - DNA, 177 bp, synthetic construct
  misc_feature 1..177: note = Description of Artificial Sequence: Synthetic coding sequence
  source 1..177: mol_type = other DNA
atgaacaccatcgtgttcaacaagctgagcggcgccgtgctgttcgaggacggcggcgccagcgagagagagagaggcggcagaccctacagcggcgtgctggacagcccccacgccagacccgaggtgggcatccccgacggcccccccctgaaggacaacctgggcctgagatag

SEQ ID NO: 89429 - DNA, 288 bp, synthetic construct
  misc_feature 1..288: note = Description of Artificial Sequence: Synthetic coding sequence
  source 1..288: mol_type = other DNA
atgaacttcgacttccccttcaagaagggcagcggcatccccctgctgaccaccaacctgagcccccagtgcctgagcctgctgcacgccatggtggcctacgaccccgacgagagaatcgccgcccaccaggccctgcagcacccctacttccaggagcagagaacccagaacggcagcgaggacgaggccagcgccgtgctgctgcccatccagaccagaagcagcctgaaccccctgctgagcacctgcatgctgcccggcagaagcgtgaccctgctggtgtag

SEQ ID NO: 89430 - DNA, 1260 bp, synthetic construct
  misc_feature 1..1260: note = Description of Artificial Sequence: Synthetic coding sequence
  source 1..1260: mol_type = other DNA
atgaagaactacaaggccatcggcaagatcggcgagggcaccttcagcgaggtgatgaagatgcagagcctgagagacggcaactactacgcctgcaagcagatgaagcagagattcgagagcatcgagcaggtgaacaacctgagagagatccaggccctgagaagactgaacccccaccccaacatcctgatgctgcacgaggtggtgttcgacagaaagagcggcagcctggccctgatctgcgagctgatggacatgaacatctacgagctgatcagaggcagaagataccccctgagcgagaagaagatcatgcactacatgtaccagctgtgcaagagcctggaccacatccacagaaacggcatcttccacagagacgtgaagcccgagaacatcctgatcaagcaggacgtgctgaagctgggcgacttcggcagctgcagaagcgtgtacagcaagcagccctacaccgagtacatcagcaccagatggtacagagcccccgagtgcctgctgaccgacggcttctacacctacaagatggacctgtggagcgccggctgcgtgttctacgagatcgccagcctgcagcccctgttccccggcgtgaacgagctggaccagatcagcaagatccacgacgtgatcggcacccccgcccagaagatcctgaccaagttcaagcagagcagagccatgaacttcgacttccccttcaagaagggcagcggcatccccctgctgaccaccaacctgagcccccagtgcctgagcctgctgcacgccatggtggcctacgaccccgacgagagaatcgccgcccaccaggccctgcagcacccctacttccaggagcagagaaagaccgagaagagagccctgggcagccacagaaaggccggcttccccgagcaccccgtggcccccgagcccctgagcaacagctgccagatcagcaaggagggcagaaagcagaagcagagcctgaagcaggaggaggacagacccaagagaagaggccccgcctacgtgatggagctgcccaagctgaagctgagcggcgtggtgagactgagcagctacagcagccccaccctgcagagcgtgctgggcagcggcaccaacggcagagtgcccgtgctgagacccctgaagtgcatccccgccagcaagaagaccgacccccagaaggacctgaagcccgccccccagcagtgcagactgcccaccatcgtgagaaagggcggcagatag

SEQ ID NO: 89431 - DNA, 2667 bp, synthetic construct
  misc_feature 1..2667: note = Description of Artificial Sequence: Synthetic coding sequence
  source 1..2667: mol_type = other DNA
atggccggcgccgccgccgagagcggcagagagctgtggaccttcgccggcagcagagaccccagcgcccccagactggcctacggctacggccccggcagcctgagagagctgagagccagagagttcagcagactggccggcaccgtgtacctggaccacgccggcgccaccctgttcagccagagccagctggagagcttcaccagcgacctgatggagaacacctacggcaacccccacagccagaacatcagcagcaagctgacccacgacaccgtggagcaggtgagatacagaatcctggcccacttccacaccaccgccgaggactacaccgtgatcttcaccgccggcagcaccgccgccctgaagctggtggccgaggccttcccctgggtgagccagggccccgagagcagcggcagcagattctgctacctgaccgacagccacaccagcgtggtgggcatgagaaacgtgaccatggccatcaacgtgatcagcacccccgtgagacccgaggacctgtggagcgccgaggagagaagcgccagcgccagcaaccccgactgccagctgccccacctgttctgctaccccgcccagagcaacttcagcggcgtgagataccccctgagctggatcgaggaggtgaagagcggcagactgcaccccgtgagcacccccggcaagtggttcgtgctgctggacgccgccagctacgtgagcaccagccccctggacctgagcgcccaccaggccgacttcgtgcccatcagcttctacaagatcttcggcttccccaccggcctgggcgccctgctggtgcacaacagagccgcccccctgctgagaaagacctacttcggcggcggcaccgccagcgcctacctggccggcgaggacttctacatccccagacagagcgtggcccagagattcgaggacggcaccatcagcttcctggacgtgatcgccctgaagcacggcttcgacaccctggagagactgaccggcggcatggagaacatcaagcagcacaccttcaccctggcccagtacacctacgtggccctgagcagcctgcagtaccccaacggcgcccccgtggtgagaatctacagcgacagcgagttcagcagccccgaggtgcagggccccatcatcaacttcaacgtgctggacgacaagggcaacatcatcggctacagccaggtggacaagatggccagcctgtacaacatccacctgagaaccggctgcttctgcaacaccggcgcctgccagagacacctgggcatcagcaacgagatggtgagaaagcacttccaggccggccacgtgtgcggcgacaacatggacctgatcgacggccagcccaccggcagcgtgagaatcagcttcggctacatgagcaccctggacgacgtgcaggccttcctgagattcatcatcgacaccagactgcacagcagcggcgactggcccgtgccccaggcccacgccgacaccggcgagaccggcgcccccagcgccgacagccaggccgacgtgatccccgccgtgatgggcagaagaagcctgagcccccaggaggacgccctgaccggcagcagagtgtggaacaacagcagcaccgtgaacgccgtgcccgtggccccccccgtgtgcgacgtggccagaacccagcccacccccagcgagaaggccgccggcgtgctggagggcgccctgggcccccacgtggtgaccaacctgtacctgtaccccatcaagagctgcgccgccttcgaggtgaccagatggcccgtgggcaaccagggcctgctgtacgacagaagctggatggtggtgaaccacaacggcgtgtgcctgagccagaagcaggagcccagactgtgcctgatccagcccttcatcgacctgagacagagaatcatggtgatcaaggccaagggcatggagcccatcgaggtgcccctggaggagaacagcgagagaacccagatcagacagagcagagtgtgcgccgacagagtgagcacctacgactgcggcgagaagatcagcagctggctgagcaccttcttcggcagaccctgccacctgatcaagcagagcagcaacagccagagaaacgccaagaagaagcacggcaaggaccagctgcccggcaccatggccaccctgagcctggtgaacgaggcccagtacctgctgatcaacaccagcagcatcctggagctgcacagacagctgaacaccagcgacgagaacggcaaggaggagctgttcagcctgaaggacctgagcctgagattcagagccaacatcatcatcaacggcaagagagccttcgaggaggagaagtgggacgagatcagcatcggcagcctgagattccaggtgctgggcccctgccacagatgccagatgatctgcatcgaccagcagaccggccagagaaaccagcacgtgttccagaagctgagcgagagcagagagaccaaggtgaacttcggcatgtacctgatgcacgccagcctggacctgagcagcccctgcttcctgagcgtgggcagccaggtgctgcccgtgctgaaggagaacgtggagggccacgacctgcccgccagcgagaagcaccaggacgtgaccagctag

SEQ ID NO: 89432 - DNA, 1863 bp, synthetic construct
  misc_feature 1..1863: note = Description of Artificial Sequence: Synthetic coding sequence
  source 1..1863: mol_type = other DNA
atggccgccagacccctgagcagaatgctgagaagactgctgagaagcagcgccagaagctgcagcagcggcgcccccgtgacccagccctgccccggcgagagcgccagagccgccagcgaggaggtgagcagaagaagacagttcctgagagagcacgccgcccccttcagcgccttcctgaccgacagcttcggcagacagcacagctacctgagaatcagcctgaccgagaagtgcaacctgagatgccagtactgcatgcccgaggagggcgtgcccctgacccccaaggccaacctgctgaccaccgaggagatcctgaccctggccagactgttcgtgaaggagggcatcgacaagatcagactgaccggcggcgagcccctgatcagacccgacgtggtggacatcgtggcccagctgcagagactggagggcctgagaaccatcggcgtgaccaccaacggcatcaacctggccagactgctgccccagctgcagaaggccggcctgagcgccatcaacatcagcctggacaccctggtgcccgccaagttcgagttcatcgtgagaagaaagggcttccacaaggtgatggagggcatccacaaggccatcgagctgggctacaaccccgtgaaggtgaactgcgtggtgatgagaggcctgaacgaggacgagctgctggacttcgccgccctgaccgagggcctgcccctggacgtgagattcatcgagtacatgcccttcgacggcaacaagtggaacttcaagaagatggtgagctacaaggagatgctggacaccgtgagacagcagtggcccgagctggagaaggtgcccgaggaggagagcagcaccgccaaggccttcaagatccccggcttccagggccagatcagcttcatcaccagcatgagcgagcacttctgcggcacctgcaacagactgagaatcaccgccgacggcaacctgaaggtgtgcctgttcggcaacagcgaggtgagcctgagagaccacctgagagccggcgccagcgagcaggagctgctgagaatcatcggcgccgccgtgggcagaaagaagagacagcacgccgagctgttcctgatgttccccaacagcccccccgccaaccccagcatcttcagctgggaccccctgcacgtgcagggcctgagacccagaatgagcttcagcagccaggtggccaccctgtggaagggctgcagagtgccccagaccccccccctggcccagcagagactgggcagcggcagcttccagagacactacaccagcagagccgacagcgacgccaacagcaagtgcctgagccccggcagctgggccagcgccgcccccagcggcccccagctgaccagcgagcagctgacccacgtggacagcgagggcagagccgccatggtggacgtgggcagaaagcccgacaccgagagagtggccgtggccagcgccgtggtgctgctgggccccgtggccttcaagctggtgcagcagaaccagctgaagaagggcgacgccctggtggtggcccagctggccggcgtgcaggccgccaaggtgaccagccagctgatccccctgtgccaccacgtggccctgagccacatccaggtgcagctggagctggacagcaccagacacgccgtgaagatccaggccagctgcagagccagaggccccaccggcgtggagatggaggccctgaccagcgccgccgtggccgccctgaccctgtacgacatgtgcaaggccgtgagcagagacatcgtgctggaggagatcaagctgatcagcaagaccggcggccagagaggcgacttccacagagcctag

SEQ ID NO: 89433 - DNA, 1911 bp, synthetic construct
  misc_feature 1..1911: note = Description of Artificial Sequence: Synthetic coding sequence
  source 1..1911: mol_type = other DNA
atggccgccagacccctgagcagaatgctgagaagactgctgagaagcagcgccagaagctgcagcagcggcgcccccgtgacccagccctgccccggcgagagcgccagagccgccagcgaggaggtgagcagaagaagacagttcctgagagagcacgccgcccccttcagcgccttcctgaccgacagcttcggcagacagcacagctacctgagaatcagcctgaccgagaagtgcaacctgagatgccagtactgcatgcccgaggagggcgtgcccctgacccccaaggccaacctgctgaccaccgaggagatcctgaccctggccagactgttcgtgaaggagggcatcgacaagatcagactgaccggcggcgagcccctgatcagacccgacgtggtggacatcgtggcccagctgcagagactggagggcctgagaaccatcggcgtgaccaccaacggcatcaacctggccagactgctgccccagctgcagaaggccggcctgagcgccatcaacatcagcctggacaccctggtgcccgccaagttcgagttcatcgtgagaagaaagggcttccacaaggtgatggagggcatccacaaggccatcgagctgggctacaaccccgtgaaggtgaactgcgtggtgatgagaggcctgaacgaggacgagctgctggacttcgccgccctgaccgagggcctgcccctggacgtgagattcatcgagtacatgcccttcgacggcaacaagtggaacttcaagaagatggtgagctacaaggagatgctggacaccgtgagacagcagtggcccgagctggagaaggtgcccgaggaggagagcagcaccgccaaggccttcaagatccccggcttccagggccagatcagcttcatcaccagcatgagcgagcacttctgcggcacctgcaacagactgagaatcaccgccgacggcaacctgaaggtgtgcctgttcggcaacagcgaggtgagcctgagagaccacctgagagccggcgccagcgagcaggagctgctgagaatcatcggcgccgccgtgggcagaaagaagagacagcacgccggcatgttcagcatcagccagatgaagaacagacccatgatcctgatcgagctgttcctgatgttccccaacagcccccccgccaaccccagcatcttcagctgggaccccctgcacgtgcagggcctgagacccagaatgagcttcagcagccaggtggccaccctgtggaagggctgcagagtgccccagaccccccccctggcccagcagagactgggcagcggcagcttccagagacactacaccagcagagccgacagcgacgccaacagcaagtgcctgagccccggcagctgggccagcgccgcccccagcggcccccagctgaccagcgagcagctgacccacgtggacagcgagggcagagccgccatggtggacgtgggcagaaagcccgacaccgagagagtggccgtggccagcgccgtggtgctgctgggccccgtggccttcaagctggtgcagcagaaccagctgaagaagggcgacgccctggtggtggcccagctggccggcgtgcaggccgccaaggtgaccagccagctgatccccctgtgccaccacgtggccctgagccacatccaggtgcagctggagctggacagcaccagacacgccgtgaagatccaggccagctgcagagccagaggccccaccggcgtggagatggaggccctgaccagcgccgccgtggccgccctgaccctgtacgacatgtgcaaggccgtgagcagagacatcgtgctggaggagatcaagctgatcagcaagaccggcggccagagaggcgacttccacagagcctag

SEQ ID NO: 89434 - DNA, 456 bp, synthetic construct
  misc_feature 1..456: note = Description of Artificial Sequence: Synthetic coding sequence
  source 1..456: mol_type = other DNA
atgcccttcgacggcaacaagtggaacttcaagaagatggtgagctacaaggagatgctggacaccgtgagacagcagtggcccgagctggagaaggtgcccgaggaggagagcagcaccgccaaggccttcaagatccccggcttccagggccagatcagcttcatcaccagcatcctgaccgtggccagaagctgctggcccctgttcctgtggccccccagcagcgagaccggctgcgcccacatgggccacagccccaaggacagctgccagaccacccagcccacccccggccccgtgcacggctgcagcacccaccccagcctgttctggagcatcagcggcaaggagaagctgatgatcgactgcctgcacccccacagcgcccagatcaagctgagatgccagctgtgcagatgcaagaacgaggacaccgtgtgggtgggccactag

SEQ ID NO: 89435 - DNA, 1071 bp, synthetic construct
  misc_feature 1..1071: note = Description of Artificial Sequence: Synthetic coding sequence
  source 1..1071: mol_type = other DNA
atgtggaagagctggaagctgagaaccgacgtgagagaggtgagcagaagaagacagttcctgagagagcacgccgcccccttcagcgccttcctgaccgacagcttcggcagacagcacagctacctgagaatcagcctgaccgagaagtgcaacctgagatgccagtactgcatgcccgaggagggcgtgcccctgacccccaaggccaacctgctgaccaccgaggagatcctgaccctggccagactgttcgtgaaggagggcatcgacaagatcagactgaccggcggcgagcccctgatcagacccgacgtggtggacatcgtggcccagctgcagagactggagggcctgagaaccatcggcgtgaccaccaacggcatcaacctggccagactgctgccccagctgcagaaggccggcctgagcgccatcaacatcagcctggacaccctggtgcccgccaagttcgagttcatcgtgagaagaaagggcttccacaaggtgatggagggcatccacaaggccatcgagctgggctacaaccccgtgaaggtgaactgcgtggtgatgagaggcctgaacgaggacgagctgctggacttcgccgccctgaccgagggcctgcccctggacgtgagattcatcgagtacatgcccttcgacggcaacaagtggaacttcaagaagatggtgagctacaaggagatgctggacaccgtgagacagcagtggcccgagctggagaaggtgcccgaggaggagagcagcaccgccaaggccttcaagatccccggcttccagggccagatcagcttcatcaccagcatgagcgagcacttctgcggcacctgcaacagactgagaatcaccgccgacggcaacctgaaggtgtgcctgttcggcaacagcgaggtgagcctgagagaccacctgagagccggcgccagcgagcaggagctgctgagaatcatcggcgccgccgtgggcagaaagaagagacagcacgccggcatgttcagcatcagccagatgaagaacagacccatgatcctgatcggcggctag

SEQ ID NO: 89436 - DNA, 1158 bp, synthetic construct
  misc_feature 1..1158: note = Description of Artificial Sequence: Synthetic coding sequence
  source 1..1158: mol_type = other DNA
atgtggaagagctggaagctgagaaccgacgtgagagtgagagagggcgccggcggcagcccctgcgccagcagccagcccggcagcagaggcccctgcttcctgcccggcctgagcagccaggaggtgagcagaagaagacagttcctgagagagcacgccgcccccttcagcgccttcctgaccgacagcttcggcagacagcacagctacctgagaatcagcctgaccgagaagtgcaacctgagatgccagtactgcatgcccgaggagggcgtgcccctgacccccaaggccaacctgctgaccaccgaggagatcctgaccctggccagactgttcgtgaaggagggcatcgacaagatcagactgaccggcggcgagcccctgatcagacccgacgtggtggacatcgtggcccagctgcagagactggagggcctgagaaccatcggcgtgaccaccaacggcatcaacctggccagactgctgccccagctgcagaaggccggcctgagcgccatcaacatcagcctggacaccctggtgcccgccaagttcgagttcatcgtgagaagaaagggcttccacaaggtgatggagggcatccacaaggccatcgagctgggctacaaccccgtgaaggtgaactgcgtggtgatgagaggcctgaacgaggacgagctgctggacttcgccgccctgaccgagggcctgcccctggacgtgagattcatcgagtacatgcccttcgacggcaacaagtggaacttcaagaagatggtgagctacaaggagatgctggacaccgtgagacagcagtggcccgagctggagaaggtgcccgaggaggagagcagcaccgccaaggccttcaagatccccggcttccagggccagatcagcttcatcaccagcatgagcgagcacttctgcggcacctgcaacagactgagaatcaccgccgacggcaacctgaaggtgtgcctgttcggcaacagcgaggtgagcctgagagaccacctgagagccggcgccagcgagcaggagctgctgagaatcatcggcgccgccgtgggcagaaagaagagacagcacgccggcatgttcagcatcagccagatgaagaacagacccatgatcctgatcggcggctag

SEQ ID NO: 89437 - DNA, 1158 bp, synthetic construct
  misc_feature 1..1158: note = Description of Artificial Sequence: Synthetic coding sequence
  source 1..1158: mol_type = other DNA
atggccgccagacccctgagcagaatgctgagaagactgctgagaagcagcgccagaagctgcagcagcggcgcccccgtgacccagccctgccccggcgagagcgccagagccgccagcgaggaggtgagcagaagaagacagttcctgagagagcacgccgcccccttcagcgccttcctgaccgacagcttcggcagacagcacagctacctgagaatcagcctgaccgagaagtgcaacctgagatgccagtactgcatgcccgaggagggcgtgcccctgacccccaaggccaacctgctgaccaccgaggagatcctgaccctggccagactgttcgtgaaggagggcatcgacaagatcagactgaccggcggcgagcccctgatcagacccgacgtggtggacatcgtggcccagctgcagagactggagggcctgagaaccatcggcgtgaccaccaacggcatcaacctggccagactgctgccccagctgcagaaggccggcctgagcgccatcaacatcagcctggacaccctggtgcccgccaagttcgagttcatcgtgagaagaaagggcttccacaaggtgatggagggcatccacaaggccatcgagctgggctacaaccccgtgaaggtgaactgcgtggtgatgagaggcctgaacgaggacgagctgctggacttcgccgccctgaccgagggcctgcccctggacgtgagattcatcgagtacatgcccttcgacggcaacaagtggaacttcaagaagatggtgagctacaaggagatgctggacaccgtgagacagcagtggcccgagctggagaaggtgcccgaggaggagagcagcaccgccaaggccttcaagatccccggcttccagggccagatcagcttcatcaccagcatgagcgagcacttctgcggcacctgcaacagactgagaatcaccgccgacggcaacctgaaggtgtgcctgttcggcaacagcgaggtgagcctgagagaccacctgagagccggcgccagcgagcaggagctgctgagaatcatcggcgccgccgtgggcagaaagaagagacagcacgccggcatgttcagcatcagccagatgaagaacagacccatgatcctgatcggcggctag

SEQ ID NO: 89438 - DNA, 1602 bp, synthetic construct
  misc_feature 1..1602: note = Description of Artificial Sequence: Synthetic coding sequence
  source 1..1602: mol_type = other DNA
atgcccgaggagggcgtgcccctgacccccaaggccaacctgctgaccaccgaggagatcctgaccctggccagactgttcgtgaaggagggcatcgacaagatcagactgaccggcggcgagcccctgatcagacccgacgtggtggacatcgtggcccagctgcagagactggagggcctgagaaccatcggcgtgaccaccaacggcatcaacctggccagactgctgccccagctgcagaaggccggcctgagcgccatcaacatcagcctggacaccctggtgcccgccaagttcgagttcatcgtgagaagaaagggcttccacaaggtgatggagggcatccacaaggccatcgagctgggctacaaccccgtgaaggtgaactgcgtggtgatgagaggcctgaacgaggacgagctgctggacttcgccgccctgaccgagggcctgcccctggacgtgagattcatcgagtacatgcccttcgacggcaacaagtggaacttcaagaagatggtgagctacaaggagatgctggacaccgtgagacagcagtggcccgagctggagaaggtgcccgaggaggagagcagcaccgccaaggccttcaagatccccggcttccagggccagatcagcttcatcaccagcatgagcgagcacttctgcggcacctgcaacagactgagaatcaccgccgacggcaacctgaaggtgtgcctgttcggcaacagcgaggtgagcctgagagaccacctgagagccggcgccagcgagcaggagctgctgagaatcatcggcgccgccgtgggcagaaagaagagacagcacgccgagctgttcctgatgttccccaacagcccccccgccaaccccagcatcttcagctgggaccccctgcacgtgcagggcctgagacccagaatgagcttcagcagccaggtggccaccctgtggaagggctgcagagtgccccagaccccccccctggcccagcagagactgggcagcggcagcttccagagacactacaccagcagagccgacagcgacgccaacagcaagtgcctgagccccggcagctgggccagcgccgcccccagcggcccccagctgaccagcgagcagctgacccacgtggacagcgagggcagagccgccatggtggacgtgggcagaaagcccgacaccgagagagtggccgtggccagcgccgtggtgctgctgggccccgtggccttcaagctggtgcagcagaaccagctgaagaagggcgacgccctggtggtggcccagctggccggcgtgcaggccgccaaggtgaccagccagctgatccccctgtgccaccacgtggccctgagccacatccaggtgcagctggagctggacagcaccagacacgccgtgaagatccaggccagctgcagagccagaggccccaccggcgtggagatggaggccctgaccagcgccgccgtggccgccctgaccctgtacgacatgtgcaaggccgtgagcagagacatcgtgctggaggagatcaagctgatcagcaagaccggcggccagagaggcgacttccacagagcctag

SEQ ID NO: 89439 - DNA, 1911 bp, synthetic construct
  misc_feature 1..1911: note = Description of Artificial Sequence: Synthetic coding sequence
  source 1..1911: mol_type = other DNA
atgtggaagagctggaagctgagaaccgacgtgagagtgagagagggcgccggcggcagcccctgcgccagcagccagcccggcagcagaggcccctgcttcctgcccggcctgagcagccaggaggtgagcagaagaagacagttcctgagagagcacgccgcccccttcagcgccttcctgaccgacagcttcggcagacagcacagctacctgagaatcagcctgaccgagaagtgcaacctgagatgccagtactgcatgcccgaggagggcgtgcccctgacccccaaggccaacctgctgaccaccgaggagatcctgaccctggccagactgttcgtgaaggagggcatcgacaagatcagactgaccggcggcgagcccctgatcagacccgacgtggtggacatcgtggcccagctgcagagactggagggcctgagaaccatcggcgtgaccaccaacggcatcaacctggccagactgctgccccagctgcagaaggccggcctgagcgccatcaacatcagcctggacaccctggtgcccgccaagttcgagttcatcgtgagaagaaagggcttccacaaggtgatggagggcatccacaaggccatcgagctgggctacaaccccgtgaaggtgaactgcgtggtgatgagaggcctgaacgaggacgagctgctggacttcgccgccctgaccgagggcctgcccctggacgtgagattcatcgagtacatgcccttcgacggcaacaagtggaacttcaagaagatggtgagctacaaggagatgctggacaccgtgagacagcagtggcccgagctggagaaggtgcccgaggaggagagcagcaccgccaaggccttcaagatccccggcttccagggccagatcagcttcatcaccagcatgagcgagcacttctgcggcacctgcaacagactgagaatcaccgccgacggcaacctgaaggtgtgcctgttcggcaacagcgaggtgagcctgagagaccacctgagagccggcgccagcgagcaggagctgctgagaatcatcggcgccgccgtgggcagaaagaagagacagcacgccggcatgttcagcatcagccagatgaagaacagacccatgatcctgatcgagctgttcctgatgttccccaacagcccccccgccaaccccagcatcttcagctgggaccccctgcacgtgcagggcctgagacccagaatgagcttcagcagccaggtggccaccctgtggaagggctgcagagtgccccagaccccccccctggcccagcagagactgggcagcggcagcttccagagacactacaccagcagagccgacagcgacgccaacagcaagtgcctgagccccggcagctgggccagcgccgcccccagcggcccccagctgaccagcgagcagctgacccacgtggacagcgagggcagagccgccatggtggacgtgggcagaaagcccgacaccgagagagtggccgtggccagcgccgtggtgctgctgggccccgtggccttcaagctggtgcagcagaaccagctgaagaagggcgacgccctggtggtggcccagctggccggcgtgcaggccgccaaggtgaccagccagctgatccccctgtgccaccacgtggccctgagccacatccaggtgcagctggagctggacagcaccagacacgccgtgaagatccaggccagctgcagagccagaggccccaccggcgtggagatggaggccctgaccagcgccgccgtggccgccctgaccctgtacgacatgtgcaaggccgtgagcagagacatcgtgctggaggagatcaagctgatcagcaagaccggcggccagagaggcgacttccacagagcctag

SEQ ID NO: 89440 - DNA, 1071 bp, synthetic construct; identical to SEQ ID NO: 89435
  misc_feature 1..1071: note = Description of Artificial Sequence: Synthetic coding sequence
  source 1..1071: mol_type = other DNA

SEQ ID NO: 89441 - DNA, 267 bp, synthetic construct
  misc_feature 1..267: note = Description of Artificial Sequence: Synthetic coding sequence
  source 1..267: mol_type = other DNA
atggtgcccctgtgccaggtggaggtgctgtacttcgccaagagcgccgagatcaccggcgtgagaagcgagaccatcagcgtgccccaggagatcaaggccctgcagctgtggaaggagatcgagaccagacaccccggcctggccgacgtgagaaaccagatcatcttcgccgtgagacaggagtacgtggagctgggcgaccagctgctggtgctgcagcccggcgacgagatcgccgtgatcccccccatcagcggcggctag

SEQ ID NO: 89442 - DNA, 567 bp, synthetic construct
  misc_feature 1..567: note = Description of Artificial Sequence: Synthetic coding sequence
  source 1..567: mol_type = other DNA
atgagcagcctggagatcagcagcagctgcttcagcctggagaccaagctgcccctgagcccccccctggtggaggacagcgccttcgagcccagcagaaaggacatggacgaggtggaggagaagagcaaggacgtgatcaacttcaccgccgagaagctgagcgtggacgaggtgagccagctggtgatcagccccctgtgcggcgccatcagcctgttcgtgggcaccaccagaaacaacttcgagggcaagaaggtgatcagcctggagtacgaggcctacctgcccatggccgagaacgaggtgagaaagatctgcagcgacatcagacagaagtggcccgtgaagcacatcgccgtgttccacagactgggcctggtgcccgtgagcgaggccagcatcatcatcgccgtgagcagcgcccacagagccgccagcctggaggccgtgagctacgccatcgacaccctgaaggccaaggtgcccatctggaagaaggagatctacgaggagagcagcacctggaagggcaacaaggagtgcttctgggccagcaacagctag

SEQ ID NO: 89443 - DNA, 267 bp, synthetic construct; identical to SEQ ID NO: 89441
  misc_feature 1..267: note = Description of Artificial Sequence: Synthetic coding sequence
  source 1..267: mol_type = other DNA

SEQ ID NO: 89444 - DNA, 267 bp, synthetic construct; identical to SEQ ID NO: 89441
  misc_feature 1..267: note = Description of Artificial Sequence: Synthetic coding sequence
  source 1..267: mol_type = other DNA

SEQ ID NO: 89445 - DNA, 267 bp, synthetic construct; identical to SEQ ID NO: 89441
  misc_feature 1..267: note = Description of Artificial Sequence: Synthetic coding sequence
  source 1..267: mol_type = other DNA

SEQ ID NO: 89446 - DNA, 462 bp, synthetic construct
  misc_feature 1..462: note = Description of Artificial Sequence: Synthetic coding sequence
  source 1..462: mol_type = other DNA
atgagcagcctggagatcagcagcagctgcttcagcctggagaccaagctgcccctgagcccccccctggtggaggacagcgccttcgagcccagcagaaaggacatggacgaggtggaggagaagagcaaggacgtgatcaacttcaccgccgagaagctgagcgtggacgaggtgagccagctggtgatcagccccctgtgcggcgccatcagcctgttcgtgggcaccaccagaaacaacttcgagggcaagaaggtgatcagcctggagtacgaggcctacctgcccatggccgagaacgaggtgagaaagatctgcagcgacatcagacagaagtggcccgtgaagcacatcgccgtgttccacagactgggcctggtgcccgtgagcgaggccagcatcatcatcgccgtgagcagcgcccacagagccgccagcctggaggccgtgagctactag

SEQ ID NO: 89447 - DNA, 1644 bp, synthetic construct
  misc_feature 1..1644: note = Description of Artificial Sequence: Synthetic coding sequence
  source 1..1644: mol_type = other DNA
atggaggtgggcggcgacaccgccgcccccgcccccggcggcgccgaggacctggaggacacccagttccccagcgaggaggccagagagggcggcggcgtgcacgccgtgccccccgaccccgaggacgagggcctggaggagaccggcagcaaggacaaggaccagccccccagccccagcccccccccccagagcgaggccctgagcagcaccagcagactgtggagccccgccgcccccgagaacagccccacctgcagccccgagagcagcagcggcggccagggcggcgaccccagcgacgaggagtggagaagccagagaaagcacgtgttcgtgctgagcgaggccggcaagcccatctacagcagatacggcagcgtggaggccctgagcgccaccatgggcgtgatgaccgccctggtgagcttcgtgcagagcgccggcgacgccatcagagccatctacgccgaggaccacaagctggtgttcctgcagcagggccccctgctgctggtggccatgagcagaaccagccagagcgccgcccagctgagaggcgagctgctggccgtgcacgcccagatcgtgagcaccctgaccagagccagcgtggccagaatcttcgcccacaagcagaactacgacctgagaagactgctggccggcagcgagagaaccctggacagactgctggacagcatggagcaggaccccggcgccctgctgctgggcgccgtgagatgcgtgcccctggccagacccctgagagacgccctgggcgccctgctgagaagatgcaccgcccccggcctggccctgagcgtgctggccgtgggcggcagactgatcaccgccgcccaggagagaaacgtgctggccgagtgcagactggaccccgccgacctgcagctgctgctggactgggtgggcgcccccgccttcgccgccggcgaggcctgggcccccgtgtgcctgcccagattcaaccccgacggcttcttctacgcctacgtggccagactggacgccatgcccgtgtgcctgctgctgctgggcacccagagagaggccttccacgccatggccgcctgcagaagactggtggaggacggcatgcacgccctgggcgccatgagagccctgggcgaggccgccagcttcagcaacgccagcagcgccagcgcccccgcctacagcgtgcaggccgtgggcgcccccggcctgagacacttcctgtacaagcccctggacatccccgaccaccacagacagctgccccagttcaccagccccgagctggaggccccctacagcagagaggaggagagacagagactgagcgacctgtaccacagactgcacgccagactgcacagcaccagcagacccctgagactgatctaccacgtggccgagaaggagaccctgctggcctgggtgaccagcaagttcgagctgtacacctgcctgagccccctggtgaccaaggccggcgccatcctggtggtgaccaagctgctgagatgggtgaagaaggaggaggacagactgttcatcagatacccccccaagtacagcaccccccccgccaccagcaccgaccaggccgcccacaacggcctgttcaccggcctgtag

SEQ ID NO: 89448 - DNA, 438 bp, synthetic construct
  misc_feature 1..438: note = Description of Artificial Sequence: Synthetic coding sequence
  source 1..438: mol_type = other DNA
atggaggtgggcggcgacaccgccgcccccgcccccggcggcgccgaggacctggaggacacccagttccccagcgaggaggccagagagggcggcggcgtgcacgccgtgccccccgaccccgaggacgagggcctggaggagaccggcagcaaggacaaggaccagccccccagccccagcccccccccccagagcgaggccctgagcagcaccagcagactgtggagccccgccgcccccgagaacagccccacctgcagccccgagagcagcagcggcggccagggcggcgaccccagcgacgaggagtggagaagccagagaaacggctgcagaacctgcaccaccgcctgcatgctggtgagcaccgccccccccgacccctgcgccagcttcaccacctggctgagaagaagacactactggcccggctag

SEQ ID NO: 89449 - DNA, 1317 bp, synthetic construct
  misc_feature 1..1317: note = Description of Artificial Sequence: Synthetic coding sequence
  source 1..1317: mol_type = other DNA
atggaggtgggcggcgacaccgccgcccccgcccccggcggcgccgaggacctggaggacacccagttccccagcgaggaggccagagagggcggcggcgtgcacgccgtgccccccgaccccgaggacgagggcctggaggagaccgaggaccacaagctggtgttcctgcagcagggccccctgctgctggtggccatgagcagaaccagccagagcgccgcccagctgagaggcgagctgctggccgtgcacgcccagatcgtgagcaccctgaccagagccagcgtggccagaatcttcgcccacaagcagaactacgacctgagaagactgctggccggcagcgagagaaccctggacagactgctggacagcatggagcaggaccccggcgccctgctgctgggcgccgtgagatgcgtgcccctggccagacccctgagagacgccctgggcgccctgctgagaagatgcaccgcccccggcctggccctgagcgtgctggccgtgggcggcagactgatcaccgccgcccaggagagaaacgtgctggccgagtgcagactggaccccgccgacctgcagctgctgctggactgggtgggcgcccccgccttcgccgccggcgaggcctgggcccccgtgtgcctgcccagattcaaccccgacggcttcttctacgcctacgtggccagactggacgccatgcccgtgtgcctgctgctgctgggcacccagagagaggccttccacgccatggccgcctgcagaagactggtggaggacggcatgcacgccctgggcgccatgagagccctgggcgaggccgccagcttcagcaacgccagcagcgccagcgcccccgcctacagcgtgcaggccgtgggcgcccccggcctgagacacttcctgtacaagcccctggacatccccgaccaccacagacagctgccccagttcaccagccccgagctggaggccccctacagcagagaggaggagagacagagactgagcgacctgtaccacagactgcacgccagactgcacagcaccagcagacccctgagactgatctaccacgtggccgagaaggagaccctgctggcctgggtgaccagcaagttcgagctgtacacctgcctgagccccctggtgaccaaggccggcgccatcctggtggtgaccaagctgctgagatgggtgaagaaggaggaggacagactgttcatcagatacccccccaagtacagcaccccccccgccaccagcaccgaccaggccgcccacaacggcctgttcaccggcctgtag

SEQ ID NO: 89450 - DNA, 1206 bp, synthetic construct
  misc_feature 1..1206: note = Description of Artificial Sequence: Synthetic coding sequence
  source 1..1206: mol_type = other DNA
atggtgagcggccagctgagattcggcgtgaagaccgaggaccacaagctggtgttcctgcagcagggccccctgctgctggtggccatgagcagaaccagccagagcgccgcccagctgagaggcgagctgctggccgtgcacgcccagatcgtgagcaccctgaccagagccagcgtggccagaatcttcgcccacaagcagaactacgacctgagaagactgctggccggcagcgagagaaccctggacagactgctggacagcatggagcaggaccccggcgccctgctgctgggcgccgtgagatgcgtgcccctggccagacccctgagagacgccctgggcgccctgctgagaagatgcaccgcccccggcctggccctgagcgtgctggccgtgggcggcagactgatcaccgccgcccaggagagaaacgtgctggccgagtgcagactggaccccgccgacctgcagctgctgctggactgggtgggcgcccccgccttcgccgccggcgaggcctgggcccccgtgtgcctgcccagattcaaccccgacggcttcttctacgcctacgtggccagactggacgccatgcccgtgtgcctgctgctgctgggcacccagagagaggccttccacgccatggccgcctgcagaagactggtggaggacggcatgcacgccctgggcgccatgagagccctgggcgaggccgccagcttcagcaacgccagcagcgccagcgcccccgcctacagcgtgcaggccgtgggcgcccccggcctgagacacttcctgtacaagcccctggacatccccgaccaccacagacagctgccccagttcaccagccccgagctggaggccccctacagcagagaggaggagagacagagactgagcgacctgtaccacagactgcacgccagactgcacagcaccagcagacccctgagactgatctaccacgtggccgagaaggagaccctgctggcctgggtgaccagcaagttcgagctgtacacctgcctgagccccctggtgaccaaggccggcgccatcctggtggtgaccaagctgctgagatgggtgaagaaggaggaggacagactgttcatcagatacccccccaagtacagcaccccccccgccaccagcaccgaccaggccgcccacaacggcctgttcaccggcctgtag

SEQ ID NO: 89451 - DNA, 1584 bp, synthetic construct
  misc_feature 1..1584: note = Description of Artificial Sequence: Synthetic coding sequence
  source 1..1584: mol_type = other DNA
atggagaaccaggagaaggccagcatcgccggccacatgttcgacgtggtggtgatcggcggcggcatcagcggcctgagcgccgccaagctgctgaccgagtacggcgtgagcgtgctggtgctggaggccagagacagagtgggcggcagaacctacaccatcagaaacgagcacgtggactacgtggacgtgggcggcgcctacgtgggccccacccagaacagaatcctgagactgagcaaggagctgggcatcgagacctacaaggtgaacgtgagcgagagactggtgcagtacgtgaagggcaagacctaccccttcagaggcgccttcccccccgtgtggaaccccatcgcctacctggactacaacaacctgtggagaaccatcgacaacatgggcaaggagatccccaccgacgccccctgggaggcccagcacgccgacaagtgggacaagatgaccatgaaggagctgatcgacaagatctgctggaccaagaccgccagaagattcgcctacctgttcgtgaacatcaacgtgaccagcgagccccacgaggtgagcgccctgtggttcctgtggtacgtgaagcagtgcggcggcaccaccagaatcttcagcgtgaccaacggcggccaggagagaaagttcgtgggcggcagcggccaggtgagcgagagaatcatggacctgctgggcgaccaggtgaagctgaaccaccccgtgacccacgtggaccagagcagcgacaacatcatcatcgagaccctgaaccacgagcactacgagtgcaagtacgtgatcaacgccatcccccccaccctgaccgccaagatccacttcagacccgagctgcccgccgagagaaaccagctgatccagagactgcccatgggcgccgtgatcaagtgcatgatgtactacaaggaggccttctggaagaagaaggactactgcggctgcatgatcatcgaggacgaggacgcccccatcagcatcaccctggacgacaccaagcccgacggcagcctgcccgccatcatgggcttcatcctggccagaaaggccgacagactggccaagctgcacaaggagatcagaaagaagaagatctgcgagctgtacgccaaggtgctgggcagccaggaggccctgcaccccgtgcactacgaggagaagaactggtgcgaggagcagtacagcggcggctgctacaccgcctacttcccccccggcatcatgacccagtacggcagagtgatcagacagcccgtgggcagaatcttcttcgccggcaccgagaccgccaccaagtggagcggctacatggagggcgccgtggaggccggcgagagagccgccagagaggtgctgaacggcctgggcaaggtgaccgagaaggacatctgggtgcaggagcccgagagcaaggacgtgcccgccgtggagatcacccacaccttctgggagagaaacctgcccagcgtgagcggcctgctgaagatcatcggcttcagcaccagcgtgaccgccctgggcttcgtgctgtacaagtacaagctgctgcccagaagctag

SEQ ID NO: 89452 - DNA, 1185 bp, synthetic construct
  misc_feature 1..1185: note = Description of Artificial Sequence: Synthetic coding sequence
  source 1..1185: mol_type = other DNA
atgggcaaggagatccccaccgacgccccctgggaggcccagcacgccgacaagtgggacaagatgaccatgaaggagctgatcgacaagatctgctggaccaagaccgccagaagattcgcctacctgttcgtgaacatcaacgtgaccagcgagccccacgaggtgagcgccctgtggttcctgtggtacgtgaagcagtgcggcggcaccaccagaatcttcagcgtgaccaacggcggccaggagagaaagttcgtgggcggcagcggccaggtgagcgagagaatcatggacctgctgggcgaccaggtgaagctgaaccaccccgtgacccacgtggaccagagcagcgacaacatcatcatcgagaccctgaaccacgagcactacgagtgcaagtacgtgatcaacgccatcccccccaccctgaccgccaagatccacttcagacccgagctgcccgccgagagaaaccagctgatccagagactgcccatgggcgccgtgatcaagtgcatgatgtactacaaggaggccttctggaagaagaaggactactgcggctgcatgatcatcgaggacgaggacgcccccatcagcatcaccctggacgacaccaagcccgacggcagcctgcccgccatcatgggcttcatcctggccagaaaggccgacagactggccaagctgcacaaggagatcagaaagaagaagatctgcgagctgtacgccaaggtgctgggcagccaggaggccctgcaccccgtgcactacgaggagaagaactggtgcgaggagcagtacagcggcggctgctacaccgcctacttcccccccggcatcatgacccagtacggcagagtgatcagacagcccgtgggcagaatcttcttcgccggcaccgagaccgccaccaagtggagcggctacatggagggcgccgtggaggccggcgagagagccgccagagaggtgctgaacggcctgggcaaggtgaccgagaaggacatctgggtgcaggagcccgagagcaaggacgtgcccgccgtggagatcacccacaccttctgggagagaaacctgcccagcgtgagcggcctgctgaagatcatcggcttcagcaccagcgtgaccgccctgggcttcgtgctgtacaagtacaagctgctgcccagaagctag

SEQ ID NO: 89453 - DNA, 1563 bp, synthetic construct
  misc_feature 1..1563: note = Description of Artificial Sequence: Synthetic coding sequence
  source 1..1563: mol_type = other DNA
atgagcaacaagtgcgacgtggtggtggtgggcggcggcatcagcggcatggccgccgccaagctgctgcacgacagcggcctgaacgtggtggtgctggaggccagagacagagtgggcggcagaacctacaccctgagaaaccagaaggtgaagtacgtggacctgggcggcagctacgtgggccccacccagaacagaatcctgagactggccaaggagctgggcctggagacctacaaggtgaacgaggtggagagactgatccaccacgtgaagggcaagagctaccccttcagaggccccttcccccccgtgtggaaccccatcacctacctggaccacaacaacttctggagaaccatggacgacatgggcagagagatccccagcgacgccccctggaaggcccccctggccgaggagtgggacaacatgaccatgaaggagctgctggacaagctgtgctggaccgagagcgccaagcagctggccaccctgttcgtgaacctgtgcgtgaccgccgagacccacgaggtgagcgccctgtggttcctgtggtacgtgaagcagtgcggcggcaccaccagaatcatcagcaccaccaacggcggccaggagagaaagttcgtgggcggcagcggccaggtgagcgagagaatcatggacctgctgggcgacagagtgaagctggagagacccgtgatctacatcgaccagaccagagagaacgtgctggtggagaccctgaaccacgagatgtacgaggccaagtacgtgatcagcgccatcccccccaccctgggcatgaagatccacttcaacccccccctgcccatgatgagaaaccagatgatcaccagagtgcccctgggcagcgtgatcaagtgcatcgtgtactacaaggagcccttctggagaaagaaggactactgcggcaccatgatcatcgacggcgaggaggcccccgtggcctacaccctggacgacaccaagcccgagggcaactacgccgccatcatgggcttcatcctggcccacaaggccagaaagctggccagactgaccaaggaggagagactgaagaagctgtgcgagctgtacgccaaggtgctgggcagcctggaggccctggagcccgtgcactacgaggagaagaactggtgcgaggagcagtacagcggcggctgctacaccacctacttcccccccggcatcctgacccagtacggcagagtgctgagacagcccgtggacagaatctacttcgccggcaccgagaccgccacccactggagcggctacatggagggcgccgtggaggccggcgagagagccgccagagagatcctgcacgccatgggcaagatccccgaggacgagatctggcagagcgagcccgagagcgtggacgtgcccgcccagcccatcaccaccaccttcctggagagacacctgcccagcgtgcccggcctgctgagactgatcggcctgaccaccatcttcagcgccaccgccctgggcttcctggcccacaagagaggcctgctggtgagagtgtag

SEQ ID NO: 89454 - DNA, 1515 bp, synthetic construct
  misc_feature 1..1515: note = Description of Artificial Sequence: Synthetic coding sequence
  source 1..1515: mol_type = other DNA
atggccgccgccaagctgctgcacgacagcggcctgaacgtggtggtgctggaggccagagacagagtgggcggcagaacctacaccctgagaaaccagaaggtgaagtacgtggacctgggcggcagctacgtgggccccacccagaacagaatcctgagactggccaaggagctgggcctggagacctacaaggtgaacgaggtggagagactgatccaccacgtgaagggcaagagctaccccttcagaggccccttcccccccgtgtggaaccccatcacctacctggaccacaacaacttctggagaaccatggacgacatgggcagagagatccccagcgacgccccctggaaggcccccctggccgaggagtgggacaacatgaccatgaaggagctgctggacaagctgtgctggaccgagagcgccaagcagctggccaccctgttcgtgaacctgtgcgtgaccgccgagacccacgaggtgagcgccctgtggttcctgtggtacgtgaagcagtgcggcggcaccaccagaatcatcagcaccaccaacggcggccaggagagaaagttcgtgggcggcagcggccaggtgagcgagagaatcatggacctgctgggcgacagagtgaagctggagagacccgtgatctacatcgaccagaccagagagaacgtgctggtggagaccctgaaccacgagatgtacgaggccaagtacgtgatcagcgccatcccccccaccctgggcatgaagatccacttcaacccccccctgcccatgatgagaaaccagatgatcaccagagtgcccctgggcagcgtgatcaagtgcatcgtgtactacaaggagcccttctggagaaagaaggactactgcggcaccatgatcatcgacggcgaggaggcccccgtggcctacaccctggacgacaccaagcccgagggcaactacgccgccatcatgggcttcatcctggcccacaaggccagaaagctggccagactgaccaaggaggagagactgaagaagctgtgcgagctgtacgccaaggtgctgggcagcctggaggccctggagcccgtgcactacgaggagaagaactggtgcgaggagcagtacagcggcggctgctacaccacctacttcccccccggcatcctgacccagtacggcagagtgctgagacagcccgtggacagaatctacttcgccggcaccgagaccgccacccactggagcggctacatggagggcgccgtggaggccggcgagagagccgccagagagatcctgcacgccatgggcaagatccccgaggacgagatctggcagagcgagcccgagagcgtggacgtgcccgcccagcccatcaccaccaccttcctggagagacacctgcccagcgtgcccggcctgctgagactgatcggcctgaccaccatcttcagcgccaccgccctgggcttcctggcccacaagagaggcctgctggtgagagtgtag

SEQ ID NO: 89455 - DNA, 1236 bp, synthetic construct
  misc_feature 1..1236: note = Description of Artificial Sequence: Synthetic coding sequence
  source 1..1236: mol_type = other DNA
atggccgccgccaagctgctgcacgacagcggcctgaacgtggtggtgctggaggccagagacagagtgggcggcagaacctacaccctgagaaaccagaaggtgaagtacgtggacctgggcggcagctacgtgggccccacccagaacagaatcctgagactggccaaggagctgggcctggagacctacaaggtgaacgaggtggagagactgatccaccacgtgaagggcaagagctaccccttcagaggccccttcccccccgtgtggaaccccatcacctacctggaccacaacaacttctggagaaccatggacgacatgggcagagagatccccagcgacgccccctggaaggcccccctggccgaggagtgggacaacatgaccatgaaggagctgctggacaagctgtgctggaccgagagcgccaagcagctggccaccctgttcgtgaacctgtgcgtgaccgccgagacccacgaggtgagcgccctgtggttcctgtggtacgtgaagcagtgcggcggcaccaccagaatcatcagcaccaccaacggcggccaggagagaaagttcgtgggcggcagcggccaggtgagcgagagaatcatggacctgctgggcgacagagtgaagctggagagacccgtgatctacatcgaccagaccagagagaacgtgctggtggagaccctgaaccacgagatgtacgaggccaagtacgtgatcagcgccatcccccccaccctgggcatgaagatccacttcaacccccccctgcccatgatgagaaaccagatgatcaccagagtgcccctgggcagcgtgatcaagtgcatcgtgtactacaaggagcccttctggagaaagaaggactactgcggcaccatgatcatcgacggcgaggaggcccccgtggcctacaccctggacgacaccaagcccgagggcaactacgccgccatcatgggcttcatcctggcccacaaggccagaaagctggccagactgaccaaggaggagagactgaagaagctgtgcgagctgtacgccaaggtgctgggcagcctggaggccctggagggcagcacccccgccagcggccaggacctgctgtgcagacacagagactgccacaccctggagagactgcacggcggcggctgcagaggcagaggcgagagcagccccagagaccccgcctgccacggcgaggacagcagaggctag

SEQ ID NO: 89456 - DNA, 741 bp, synthetic construct
  misc_feature 1..741: note = Description of Artificial Sequence: Synthetic coding sequence
  source 1..741: mol_type = other DNA
atgttcgcccccagactgctggacttccagaagaccaagtacgccagattcatgaaccacagagtgcccgcccacaagagataccagcccaccgagtacgagcacgccgccaactgcgccacccacgccttctggatcatccccagcatcctgggcagcagcaacctgtacttcctgagcgacgacgactgggagaccatcagcgcctggatctacggcctgggcctgtgcggcctgttcgtggtgagcaccgtgttccacaccatcagctggaagaagagccacctgagaatggtggagcactgcctgcacatgttcgacagaatggtgatctacttcttcatcgccgccagctacgccccctggctgaacctgagagagctgggcccctgggccagccacatgagatggctggtgtggatcatggccagcgtgggcaccatctacgtgttcttcttccacgagagatacaagctggtggagctgctgtgctacgtggtgatgggcttcttccccgccctggtgatcctgagcatgcccaacaccgagggcatctgggagctggtgaccggcggcgtgttctactgcctgggcatggtgttcttcaagagcgacggcagaatccccttcgcccacgccatctggcacctgttcgtggccttcggcgccggcacccactactacgccatctggagatacctgtacctgcccagcaccctgcagaccaaggtgagcaagtag

SEQ ID NO: 89457 - DNA, 813 bp, synthetic construct
  misc_feature 1..813: note = Description of Artificial Sequence: Synthetic coding sequence
  source 1..813: mol_type = other DNA
atgttcgcccccagactgctggacttccagaagaccaagtacgccagattcatgaaccacagagtgcccgcccacaagagataccagcccaccgagtacgagcacgccgccaactgcgccacccacgccttctggatcatccccagcatcctgggcagcagcaacctgtacttcctgagcgacgacgactgggagaccatcagcgcctggatctacggcctgggcctgtgcggcctgttcgtggtgagcaccgtgttccacaccatcagctggaagaagagccacctgagaatggtggagcactgcctgcacatgttcgacagaatggtgatctacttcttcatcgccgccagctacgccccctggctgaacctgagagagctgggcccctgggccagccacatgagatggctggtgtggatcatggccagcgtgggcaccatctacgtgttcttcttccacgagagaaccggcagctgcgtgcagttcctgagaggcgaggcctgccccaaggccggcaccgcctgcctgcccgccagatacaagctggtggagctgctgtgctacgtggtgatgggcttcttccccgccctggtgatcctgagcatgcccaacaccgagggcatctgggagctggtgaccggcggcgtgttctactgcctgggcatggtgttcttcaagagcgacggcagaatccccttcgcccacgccatctggcacctgttcgtggccttcggcgccggcacccactactacgccatctggagatacctgtacctgcccagcaccctgcagaccaaggtgagcaagtag

SEQ ID NO: 89458 - DNA, 582 bp, synthetic construct
  misc_feature 1..582: note = Description of Artificial Sequence: Synthetic coding sequence
  source 1..582: mol_type = other DNA
atgttcgcccccagactgctggacttccagaagaccaagtacgccagattcatgaaccacagagtgcccgcccacaagagataccagcccaccgagtacgagcacgccgccaactgcgccacccacgccttctggatcatccccagcatcctgggcagcagcaacctgtacttcctgagcgacgacgactgggagaccatcagcgcctggatctacggcctgggcctgtgcggcctgttcgtggtgagcaccgtgttccacaccatcagctggaagaagagccacctgagaatggtggagcactgcctgcacatgttcgacagaatggtgatctacttcttcatcgccgccagctacgccccctggctgaacctgagagagctgggcccctgggccagccacatgagatggctggtgtggatcatggccagcgtgggcaccatctacgtgttcttcttccacgagagatacaagctggtggagctgctgtgctacgtggtgatgggcttcttccccgccctggtgatcctgagcatggccggcaagctgagacccggcatgacctgcctgaagagacagtag

SEQ ID NO: 89459 - DNA, 942 bp, synthetic construct
  misc_feature 1..942: note = Description of Artificial Sequence: Synthetic coding sequence
  source 1..942: mol_type = other DNA
atggagaccggccccgaggaccccagcagcatgcccgaggagagcagccccagaagaaccccccagagcatcccctaccaggacctgccccacctggtgaacgccgacggccagtacctgttctgcagatactggaagcccaccggcacccccaaggccctgatcttcgtgagccacggcgccggcgagcacagcggcagatacgaggagctggccagaatgctgatgggcctggacctgctggtgttcgcccacgaccacgtgggccacggccagagcgagggcgagagaatggtggtgagcgacttccacgtgttcgtgagagacgtgctgcagcacgtggacagcatgcagaaggactaccccggcctgcccgtgttcctgctgggccacagcatgggcggcgccatcgccatcctgaccgccgccgagagacccggccacttcgccggcatggtgctgatcagccccctggtgctggccaaccccgagagcgccaccaccttcaaggtgctggccgccaaggtgctgaacctggtgctgcccaacctgagcctgggccccatcgacagcagcgtgctgagcagaaacaagaccgaggtggacatctacaacagcgaccccctgatctgcagagccggcctgaaggtgtgcttcggcatccagctgctgaacgccgtgagcagagtggagagagccctgcccaagctgaccgtgcccttcctgctgctgcagggcagcgccgacagactgtgcgacagcaagggcgcctacctgctgatggagctggccaagagccaggacaagaccctgaagatctacgagggcgcctaccacgtgctgcacaaggagctgcccgaggtgaccaacagcgtgttccacgagatcaacatgtgggtgagccagagaaccgccaccgccggcaccgccagccccccctag

SEQ ID NO: 89460 - DNA, 912 bp, synthetic construct
  misc_feature 1..912: note = Description of Artificial Sequence: Synthetic coding sequence
  source 1..912: mol_type = other DNA
atgcccgaggagagcagccccagaagaaccccccagagcatcccctaccaggacctgccccacctggtgaacgccgacggccagtacctgttctgcagatactggaagcccaccggcacccccaaggccctgatcttcgtgagccacggcgccggcgagcacagcggcagatacgaggagctggccagaatgctgatgggcctggacctgctggtgttcgcccacgaccacgtgggccacggccagagcgagggcgagagaatggtggtgagcgacttccacgtgttcgtgagagacgtgctgcagcacgtggacagcatgcagaaggactaccccggcctgcccgtgttcctgctgggccacagcatgggcggcgccatcgccatcctgaccgccgccgagagacccggccacttcgccggcatggtgctgatcagccccctggtgctggccaaccccgagagcgccaccaccttcaaggtgctggccgccaaggtgctgaacctggtgctgcccaacctgagcctgggccccatcgacagcagcgtgctgagcagaaacaagaccgaggtggacatctacaacagcgaccccctgatctgcagagccggcctgaaggtgtgcttcggcatccagctgctgaacgccgtgagcagagtggagagagccctgcccaagctgaccgtgcccttcctgctgctgcagggcagcgccgacagactgtgcgacagcaagggcgcctacctgctgatggagctggccaagagccaggacaagaccctgaagatctacgagggcgcctaccacgtgctgcacaaggagctgcccgaggtgaccaacagcgtgttccacgagatcaacatgtgggtgagccagagaaccgccaccgccggcaccgccagccccccctag

SEQ ID NO: 89461 - DNA, 912 bp, synthetic construct; identical to SEQ ID NO: 89460
  misc_feature 1..912: note = Description of Artificial Sequence: Synthetic coding sequence
  source 1..912: mol_type = other DNA

SEQ ID NO: 89462 - DNA, 852 bp, synthetic construct
  misc_feature 1..852: note = Description of Artificial Sequence: Synthetic coding sequence
  source 1..852: mol_type = other DNA
atggagaccggccccgaggaccccagcagcatgcccgaggagagcagccccagaagaaccccccagagcatcccctaccaggacctgccccacctggtgaacgccgacggccagtacctgttctgcagatactggaagcccaccggcacccccaaggccctgatcttcgtgagccacggcgccggcgagcacagcggcagatacgaggagctggccagaatgctgatgggcctggacctgctggtgttcgcccacgaccacgtgggccacggccagagcgagggcgagagaatggtggtgagcgacttccacgtgttcgtgagagacgtgctgcagcacgtggacagcatgcagaaggactaccccggcctgcccgtgttcctgctgggccacagcatgggcggcgccatcgccatcctgaccgccgccgagagacccggccacttcgccggcatggtgctgatcagccccctggtgctggccaaccccgagagcgccaccaccttcaaggtggacatctacaacagcgaccccctgatctgcagagccggcctgaaggtgtgcttcggcatccagctgctgaacgccgtgagcagagtggagagagccctgcccaagctgaccgtgcccttcctgctgctgcagggcagcgccgacagactgtgcgacagcaagggcgcctacctgctgatggagctggccaagagccaggacaagaccctgaagatctacgagggcgcctaccacgtgctgcacaaggagctgcccgaggtgaccaacagcgtgttccacgagatcaacatgtgggtgagccagagaaccgccaccgccggcaccgccagccccccctag

SEQ ID NO: 89463 - DNA, 234 bp, synthetic construct
  misc_feature 1..234: note = Description of Artificial Sequence: Synthetic coding sequence
  source 1..234: mol_type = other DNA
atgcccgaggagagcagccccagaagaaccccccagagcatcccctaccaggacctgccccacctggtgaacgccgacggccagtacctgttctgcagatactggaagcccaccggcacccccaaggccctgatcttcgtgagccacggcgccggcgagcacagcggcagatacgaggagctggccagaatgctgatgggcctggacctgctggtgttcgcccacgaccactag

SEQ ID NO: 89464 - DNA, 942 bp, synthetic construct
  misc_feature 1..942: note = Description of Artificial Sequence: Synthetic coding sequence
  source 1..942: mol_type = other DNA
atgaagaccagacccgaggaccccagcagcatgcccgaggagagcagccccagaagaaccccccagagcatcccctaccaggacctgccccacctggtgaacgccgacggccagtacctgttctgcagatactggaagcccaccggcacccccaaggccctgatcttcgtgagccacggcgccggcgagcacagcggcagatacgaggagctggccagaatgctgatgggcctggacctgctggtgttcgcccacgaccacgtgggccacggccagagcgagggcgagagaatggtggtgagcgacttccacgtgttcgtgagagacgtgctgcagcacgtggacagcatgcagaaggactaccccggcctgcccgtgttcctgctgggccacagcatgggcggcgccatcgccatcctgaccgccgccgagagacccggccacttcgccggcatggtgctgatcagccccctggtgctggccaaccccgagagcgccaccaccttcaaggtgctggccgccaaggtgctgaacctggtgctgcccaacctgagcctgggccccatcgacagcagcgtgctgagcagaaacaagaccgaggtggacatctacaacagcgaccccctgatctgcagagccggcctgaaggtgtgcttcggcatccagctgctgaacgccgtgagcagagtggagagagccctgcccaagctgaccgtgcccttcctgctgctgcagggcagcgccgacagactgtgcgacagcaagggcgcctacctgctgatggagctggccaagagccaggacaagaccctgaagatctacgagggcgcctaccacgtgctgcacaaggagctgcccgaggtgaccaacagcgtgttccacgagatcaacatgtgggtgagccagagaaccgccaccgccggcaccgccagccccccctag

SEQ ID NO: 89465 - DNA, 1842 bp, synthetic construct
  misc_feature 1..1842: note = Description of Artificial Sequence: Synthetic coding sequence
  source 1..1842: mol_type = other DNA
atgtgctgctggcccctgctgctgctgtggggcctgctgcccggcaccgccgccggcggcagcggcagaacctacccccacagaaccctgctggacagcgagggcaagtactggctgggctggagccagagaggcagccagatcgccttcagactgcaggtgagaaccgccggctacgtgggcttcggcttcagccccaccggcgccatggccagcgccgacatcgtggtgggcggcgtggcccacggcagaccctacctgcaggactacttcaccaacgccaacagagagctgaagaaggacgcccagcaggactaccacctggagtacgccatggagaacagcacccacaccatcatcgagttcaccagagagctgcacacctgcgacatcaacgacaagagcatcaccgacagcaccgtgagagtgatctgggcctaccaccacgaggacgccggcgaggccggccccaagtaccacgacagcaacagaggcaccaagagcctgagactgctgaaccccgagaagaccagcgtgctgagcaccgccctgccctacttcgacctggtgaaccaggacgtgcccatccccaacaaggacaccacctactggtgccagatgttcaagatccccgtgttccaggagaagcaccacgtgatcaaggtggagcccgtgatccagagaggccacgagagcctggtgcaccacatcctgctgtaccagtgcagcaacaacttcaacgacagcgtgctggagagcggccacgagtgctaccaccccaacatgcccgacgccttcctgacctgcgagaccgtgatcttcgcctgggccatcggcggcgagggcttcagctaccccccccacgtgggcctgagcctgggcacccccctggacccccactacgtgctgctggaggtgcactacgacaaccccacctacgaggagggcctgatcgacaacagcggcctgagactgttctacaccatggacatcagaaagtacgacgccggcgtgatcgaggccggcctgtgggtgagcctgttccacaccatcccccccggcatgcccgagttccagagcgagggccactgcaccctggagtgcctggaggaggccctggaggccgagaagcccagcggcatccacgtgttcgccgtgctgctgcacgcccacctggccggcagaggcatcagactgagacacttcagaaagggcaaggagatgaagctgctggcctacgacgacgacttcgacttcaacttccaggagttccagtacctgaaggaggagcagaccatcctgcccggcgacaacctgatcaccgagtgcagatacaacaccaaggacagagccgagatgacctggggcggcctgagcaccagaagcgagatgtgcctgagctacctgctgtactaccccagaatcaacctgaccagatgcgccagcatccccgacatcatggagcagctgcagttcatcggcgtgaaggagatctacagacccgtgaccacctggcccttcatcatcaagagccccaagcagtacaagaacctgagcttcatggacgccatgaacaagttcaagtggaccaagaaggagggcctgagcttcaacaagctggtgctgagcctgcccgtgaacgtgagatgcagcaagaccgacaacgccgagtggagcatccagggcatgaccgccctgccccccgacatcgagagaccctacaaggccgagcccctggtgtgcggcaccagcagcagcagcagcctgcacagagacttcagcatcaacctgctggtgtgcctgctgctgctgagctgcaccctgagcaccaagagcctgtag

SEQ ID NO: 89466 - DNA, 1023 bp, synthetic construct; identical to SEQ ID NO: 83891
  misc_feature 1..1023: note = Description of Artificial Sequence: Synthetic coding sequence
  source 1..1023: mol_type = other DNA

SEQ ID NO: 89467 - DNA, 1089 bp, synthetic construct
  misc_feature 1..1089: note = Description of Artificial Sequence: Synthetic coding sequence
  source 1..1089: mol_type = other DNA
atggcccccaagcaggaccccaagcccaagttccaggagggcgagagagtgctgtgcttccacggccccctgctgtacgaggccaagtgcgtgaaggtggccatcaaggacaagcaggtgaagtacttcatccactacagcggctggaacaagaagagcgccgtgagacccagaagaagcgagaagagcctgaagacccacgaggacatcgtggccctgttccccgtgcccgagggcgcccccagcgtgcaccaccccctgctgaccagcagctgggacgagtgggtgcccgagagcagagtgctgaagtacgtggacaccaacctgcagaagcagagagagctgcagaaggccaaccaggagcagtacgccgagggcaagatgagaggcgccgcccccggcaagaagaccagcggcctgcagcagaagaacgtggaggtgaagaccaagaagaacaagcagaagacccccggcaacggcgacggcggcagcaccagcgagaccccccagccccccagaaagaagagagccagagtggaccccaccgtggagaacgaggagaccttcatgaacagagtggaggtgaaggtgaagatccccgaggagctgaagccctggctggtggacgactgggacctgatcaccagacagaagcagctgttctacctgcccgccaagaagaacgtggacagcatcctggaggactacgccaactacaagaagagcagaggcaacaccgacaacaaggagtacgccgtgaacgaggtggtggccggcatcaaggagtacttcaacgtgatgctgggcacccagctgctgtacaagttcgagagaccccagtacgccgagatcctggccgaccaccccgacgcccccatgagccaggtgtacggcgccccccacctgctgagactgttcgtgagaatcggcgccatgctggcctacacccccctggacgagaagagcctggccctgctgctgaactacctgcacgacttcctgaagtacctggccaagaacagcgccaccctgttcagcgccagcgactacgaggtggccccccccgagtaccacagaaaggccgtgtag

SEQ ID NO: 89468 - DNA, 1047 bp, synthetic construct
  misc_feature 1..1047: note = Description of Artificial Sequence: Synthetic coding sequence
  source 1..1047: mol_type = other DNA
atgatccccttcccccacccccaggtgaccgacgccctgggcagatacagcaactacatcctgagcagcaccgtggagagccccagcctgagaagcatgaacttcgagaagcagggcgagagagtgctgtgcttccacggccccctgctgtacgaggccaagtgcgtgaaggtggccatcaaggacaagcaggtgaagtacttcatccactacagcggctggaacaagaactgggacgagtgggtgcccgagagcagagtgctgaagtacgtggacaccaacctgcagaagcagagagagctgcagaaggccaaccaggagcagtacgccgagggcaagatgagaggcgccgcccccggcaagaagaccagcggcctgcagcagaagaacgtggaggtgaagaccaagaagaacaagcagaagacccccggcaacggcgacggcggcagcaccagcgagaccccccagccccccagaaagaagagagccagagtggaccccaccgtggagaacgaggagaccttcatgaacagagtggaggtgaaggtgaagatccccgaggagctgaagccctggctggtggacgactgggacctgatcaccagacagaagcagctgttctacctgcccgccaagaagaacgtggacagcatcctggaggactacgccaactacaagaagagcagaggcaacaccgacaacaaggagtacgccgtgaacgaggtggtggccggcatcaaggagtacttcaacgtgatgctgggcacccagctgctgtacaagttcgagagaccccagtacgccgagatcctggccgaccaccccgacgcccccatgagccaggtgtacggcgccccccacctgctgagactgttcgtgagaatcggcgccatgctggcctacacccccctggacgagaagagcctggccctgctgctgaactacctgcacgacttcctgaagtacctggccaagaacagcgccaccctgttcagcgccagcgactacgaggtggccccccccgagtaccacagaaaggccgtgtag

SEQ ID NO: 89469 - DNA, 972 bp, synthetic construct
  misc_feature 1..972: note = Description of Artificial Sequence: Synthetic coding sequence
  source 1..972: mol_type = other DNA
atggcccccaagcaggaccccaagcccaagttccaggagggcgagagagtgctgtgcttccacggccccctgctgtacgaggccaagtgcgtgaaggtggccatcaaggacaagcaggtgaagtacttcatccactacagcggctggaacaagaactgggacgagtgggtgcccgagagcagagtgctgaagtacgtggacaccaacctgcagaagcagagagagctgcagaaggccaaccaggagcagtacgccgagggcaagatgagaggcgccgcccccggcaagaagaccagcggcctgcagcagaagaacgtggaggtgaagaccaagaagaacaagcagaagacccccggcaacggcgacggcggcagcaccagcgagaccccccagccccccagaaagaagagagccagagtggaccccaccgtggagaacgaggagaccttcatgaacagagtggaggtgaaggtgaagatccccgaggagctgaagccctggctggtggacgactgggacctgatcaccagacagaagcagctgttctacctgcccgccaagaagaacgtggacagcatcctggaggactacgccaactacaagaagagcagaggcaacaccgacaacaaggagtacgccgtgaacgaggtggtggccggcatcaaggagtacttcaacgtgatgctgggcacccagctgctgtacaagttcgagagaccccagtacgccgagatcctggccgaccaccccgacgcccccatgagccaggtgtacggcgccccccacctgctgagactgttcgtgagaatcggcgccatgctggcctacacccccctggacgagaagagcctggccctgctgctgaactacctgcacgacttcctgaagtacctggccaagaacagcgccaccctgttcagcgccagcgactacgaggtggccccccccgagtaccacagaaaggccgtgtag

SEQ ID NO: 89470 - DNA, 708 bp, synthetic construct
  misc_feature 1..708: note = Description of Artificial Sequence: Synthetic coding sequence
  source 1..708: mol_type = other DNA
atgagaggcgccgcccccggcaagaagaccagcggcctgcagcagaagaacgtggaggtgaagaccaagaagaacaagcagaagacccccggcaacggcgacggcggcagcaccagcgagaccccccagccccccagaaagaagagagccagagtggaccccaccgtggagaacgaggagaccttcatgaacagagtggaggtgaaggtgaagatccccgaggagctgaagccctggctggtggacgactgggacctgatcaccagacagaagcagctgttctacctgcccgccaagaagaacgtggacagcatcctggaggactacgccaactacaagaagagcagaggcaacaccgacaacaaggagtacgccgtgaacgaggtggtggccggcatcaaggagtacttcaacgtgatgctgggcacccagctgctgtacaagttcgagagaccccagtacgccgagatcctggccgaccaccccgacgcccccatgagccaggtgtacggcgccccccacctgctgagactgttcgtgagaatcggcgccatgctggcctacacccccctggacgagaagagcctggccctgctgctgaactacctgcacgacttcctgaagtacctggccaagaacagcgccaccctgttcagcgccagcgactacgaggtggccccccccgagtaccacagaaaggccgtgtag

SEQ ID NO: 89471 - DNA, 708 bp, synthetic construct; identical to SEQ ID NO: 89470
  misc_feature 1..708: note = Description of Artificial Sequence: Synthetic coding sequence
  source 1..708: mol_type = other DNA

SEQ ID NO: 89472 - DNA, 345 bp, synthetic construct
  misc_feature 1..345: note = Description of Artificial Sequence: Synthetic coding sequence
  source 1..345: mol_type = other DNA
atggtgagcagaaaggccgtggccgccctgctggtggtgcacgtggccgccatgctggccagccagaccgaggccttcgtgcccatcttcacctacggcgagctgcagagaatgcaggagaaggagagaaacaagggccagaagaagagcctgagcgtgtggcagagaagcggcgaggagggccccgtggaccccgccgagcccatcagagaggaggagaacgagatgatcaagctgaccgcccccctggagatcggcatgagaatgaacagcagacagctggagaagtaccccgccaccctggagggcctgctgagcgagatgctgccccagcacgccaagtag

SEQ ID NO: 89473 - DNA, 348 bp, synthetic construct
  misc_feature 1..348: note = Description of Artificial Sequence: Synthetic coding sequence
  source 1..348: mol_type = other DNA
atggtgagcagaaaggccgtggccgccctgctggtggtgcacgtggccgccatgctggccagccagaccgaggccttcgtgcccatcttcacctacggcgagctgcagagaatgcaggagaaggagagaaacaagggccagaagaagagcctgagcgtgtggcagagaagcggcgaggagggccccgtggaccccgccgagcccatcagagaggaggagaacgagatgatcaagctgaccgcccccctggagatcggcatgagaatgaacagcagacagctggagaagtaccccgccaccctggagggcctgctgagcgagatgctgccccagcacgccgccaagtag

SEQ ID NO: 89474 - DNA, 327 bp, synthetic construct
  misc_feature 1..327: note = Description of Artificial Sequence: Synthetic coding sequence
  source 1..327: mol_type = other DNA
atggtgagcagaaaggccgtggccgccctgctggtggtgcacgtggccgccatgctggccagccagaccgaggccttcgtgcccatcttcacctacggcgagctgcagagaatgcaggagaaggagagaaacaagggccagaagaagagcctgagcgtgtggcagagaagcggcgaggagggccccgtggaccccgccgagcccatcagagaggaggagaacgagatgatcaagctgaccgcccccctggagatcggcatgagaatgaacagcagacagctggagaagtaccccgccaccctggagggcctgctgaccgccaagtag

SEQ ID NO: 89475 - DNA, 1011 bp, synthetic construct
  misc_feature 1..1011: note = Description of Artificial Sequence: Synthetic coding sequence
  source 1..1011: mol_type = other DNA
atggccagaagaagaagccagagagtgtgcgccagcggccccagcatgctgaacagcgccagaggcgcccccgagctgctgagaggcaccgccaccaacgccgaggtgagcgccgccgccgccggcgccaccggcagcgaggagctgccccccggcgacagaggctgcagaaacggcggcggcagaggccccgccgccaccaccagcagcaccggcgtggccgtgggcgccgagcacggcgaggacagcctgagcagaaagcccgaccccgagcccggcagaatggaccaccaccagcccggcaccggcagataccaggtgctgctgaacgaggaggacaacagcgagagcagcgccatcgagcagccccccaccagcaaccccgccccccagatcgtgcaggccgccagcagcgcccccgccctggagaccgacagcagcccccccccctacagcagcatcaccgtggaggtgcccaccaccagcgacaccgaggtgtacggcgagttctaccccgtgccccccccctacagcgtggccaccagcctgcccacctacgacgaggccgagaaggccaaggccgccgccatggccgccgccgccgccgagaccagccagagaatccaggaggaggagtgcccccccagagacgacttcagcgacgccgaccagctgagagtgggcaacgacggcatcttcatgctggccttcttcatggccttcatcttcaactggctgggcttctgcctgagcttctgcatcaccaacaccatcgccggcagatacggcgccatctgcggcttcggcctgagcctgatcaagtggatcctgatcgtgagattcagcgactacttcaccggctacttcaacggccagtactggctgtggtggatcttcctggtgctgggcctgctgctgttcttcagaggcttcgtgaactacctgaaggtgagaaacatgagcgagagcatggccgccgcccacagaaccagatacttcttcctgctgtag

SEQ ID NO: 89476 - DNA, 1161 bp, synthetic construct
  misc_feature 1..1161: note = Description of Artificial Sequence: Synthetic coding sequence
  source 1..1161: mol_type = other DNA
atgggcagcccctggaacggcagcgacggccccgagggcgccagagagcccccctggcccgccctgcccccctgcgacgagagaagatgcagccccttccccctgggcgccctggtgcccgtgaccgccgtgtgcctgtgcctgttcgtggtgggcgtgagcggcaacgtggtgaccgtgatgctgatcggcagatacagagacatgagaaccaccaccaacctgtacctgggcagcatggccgtgagcgacctgctgatcctgctgggcctgcccttcgacctgtacagactgtggagaagcagaccctgggtgttcggccccctgctgtgcagactgagcctgtacgtgggcgagggctgcacctacgccaccctgctgcacatgaccgccctgagcgtggagagatacctggccatctgcagacccctgagagccagagtgctggtgaccagaagaagagtgagagccctgatcgccgtgctgtgggccgtggccctgctgagcgccggccccttcctgttcctggtgggcgtggagcaggaccccggcatcagcgtggtgcccggcctgaacggcaccgccagaatcgccagcagccccctggccagcagcccccccctgtggctgagcagagcccccccccccagcccccccagcggccccgagaccgccgaggccgccgccctgttcagcagagagtgcagacccagccccgcccagctgggcgccctgagagtgatgctgtgggtgaccaccgcctacttcttcctgcccttcctgtgcctgagcatcctgtacggcctgatcggcagagagctgtggagcagcagaagacccctgagaggccccgccgccagcggcagagagagaggccacagacagaccgtgagagtgctgagaaagtggagcagaagaggcagcaaggacgcctgcctgcagagcgccccccccggcaccgcccagaccctgggccccctgcccctgctggcccagctgtgggcccccctgcccgcccccttccccatcagcatccccgccagcaccagaagaggcggcggcagcggcatctacaacctgctggtggccctgcccagatggcagaaccacctgcacaagcacggcagattcgccgacgacgtgctgctgagcgtgctgtag

SEQ ID NO: 89477 - DNA, 1206 bp, synthetic construct
  misc_feature 1..1206: note = Description of Artificial Sequence: Synthetic coding sequence
  source 1..1206: mol_type = other DNA
atggagaagagcaagaacttcagaatcgacgccctgctggccgtggacccccccagagccgccagcgcccagagcgcccccctggccctggtgaccagcctggccgccgccgccagcggcaccggcggcggcggcggcggcggcggcgccagcggcggcaccagcggcagctgcagccccgccagcagcgagccccccgccgcccccgccgacagactgagagccgagagccccagcccccccagactgctggccgcccactgcgccctgctgcccaagcccggcttcctgggcgccggcggcggcggcggcggcaccggcggcggccacggcggcccccaccaccacgcccaccccggcgccgccgccgccgccgccgccgccgccgccgccgccgccgccggcggcctggccctgggcctgcaccccggcggcgcccagggcggcgccggcctgcccgcccaggccgccctgtacggccaccccgtgtacggctacagcgccgccgccgccgccgccgccctggccggccagcaccccgccctgagctacagctacccccaggtgcagggcgcccaccccgcccaccccgccgaccccatcaagctgggcgccggcaccttccagctggaccagtggctgagagccagcaccgccggcatgatcctgcccaagatgcccgacttcaacagccaggcccagagcaacctgctgggcaagtgcagaagacccagaaccgccttcaccagccagcagctgctggagctggagcaccagttcaagctgaacaagtacctgagcagacccaagagattcgaggtggccaccagcctgatgctgaccgagacccaggtgaagatctggttccagaacagaagaatgaagtggaagagaagcaagaaggccaaggagcaggccgcccaggaggccgagaagcagaagggcggcggcggcggcgccggcaagggcggcgccgaggagcccggcgccgaggagctgctgggcccccccgcccccggcgacaagggcagcggcagaagactgagagacctgagagacagcgaccccgaggaggacgaggacgaggacgacgaggaccacttcccctacagcaacggcgccagcgtgcacgccgccagcagcgactgcagcagcgaggacgacagccccccccccagacccagccaccagcccgccccccagtag

SEQ ID NO: 89478 - DNA, 696 bp, synthetic construct
  misc_feature 1..696: note = Description of Artificial Sequence: Synthetic coding sequence
  source 1..696: mol_type = other DNA
gccgccgccgccctggccggccagcaccccgccctgagctacagctacccccaggtgcagggcgcccaccccgcccaccccgccgaccccatcaagctgggcgccggcaccttccagctggaccagtggctgagagccagcaccgccggcatgatcctgcccaagatgcccgacttcaacagccaggcccagagcaacctgctgggcaagtgcagaagacccagaaccgccttcaccagccagcagctgctggagctggagcaccagttcaagctgaacaagtacctgagcagacccaagagattcgaggtggccaccagcctgatgctgaccgagacccaggtgaagatctggttccagaacagaagaatgaagtggaagagaagcaagaaggccaaggagcaggccgcccaggaggccgagaagcagaagggcggcggcggcggcgccggcaagggcggcgccgaggagcccggcgccgaggagctgctgggcccccccgcccccggcgacaagggcagcggcagaagactgagagacctgagagacagcgaccccgaggaggacgaggacgaggacgacgaggaccacttcccctacagcaacggcgccagcgtgcacgccgccagcagcgactgcagcagcgaggacgacagccccccccccagacccagccaccagcccgccccccagtag

SEQ ID NO: 89479 - DNA, 570 bp, synthetic construct
  misc_feature 1..570: note = Description of Artificial Sequence: Synthetic coding sequence
  source 1..570: mol_type = other DNA
atgggcggcctgagcaccgtgggcgcctgccccggcatcctgggcgcccagcaggcccaggcccagagcaacctgctgggcaagtgcagaagacccagaaccgccttcaccagccagcagctgctggagctggagcaccagttcaagctgaacaagtacctgagcagacccaagagattcgaggtggccaccagcctgatgctgaccgagacccaggtgaagatctggttccagaacagaagaatgaagtggaagagaagcaagaaggccaaggagcaggccgcccaggaggccgagaagcagaagggcggcggcggcggcgccggcaagggcggcgccgaggagcccggcgccgaggagctgctgggcccccccgcccccggcgacaagggcagcggcagaagactgagagacctgagagacagcgaccccgaggaggacgaggacgaggacgacgaggaccacttcccctacagcaacggcgccagcgtgcacgccgccagcagcgactgcagcagcgaggacgacagccccccccccagacccagccaccagcccgccccccagtag

SEQ ID NO: 89480 - DNA, 1692 bp, synthetic construct
  misc_feature 1..1692: note = Description of Artificial Sequence: Synthetic coding sequence
  source 1..1692: mol_type = other DNA
atgcccagcaagttcagctgcagacagctgagagaggccggccagtgcttcgagagcttcctggtggtgagaggcctggacatggagaccgacagagagagactgagaaccatctacaacagagacttcaagatcagcttcggcacccccgcccccggcttcagcagcatgctgtacggcatgaagatcgccaacctggcctacgtgaccaagaccagagtgagattcttcagactggacagatgggccgacgtgagattccccgagaagagaagaatgaagctgggcagcgacatcagcaagcaccacaagagcctgctggccaagatcttctacgacagagccgagtacctgcacggcaagcacggcgtggacgtggaggtgcagggcccccacgaggccagagacggccagctgctgatcagactggacctgaacagaaaggaggtgctgaccctgagactgagaaacggcggcacccagagcgtgaccctgacccacctgttccccctgtgcagaaccccccagttcgccttctacaacgaggaccaggagctgccctgccccctgggccccggcgagtgctacgagctgcacgtgcactgcaagaccagcttcgtgggctacttccccgccaccgtgctgtgggagctgctgggccccggcgagagcggcagcgagggcgccggcaccttctacatcgccagattcctggccgccgtggcccacagccccctggccgcccagctgaagcccatgacccccttcaagagaaccagaatcaccggcaaccccgtggtgaccaacagaatcgaggagggcgagagacccgacagagccaagggctacgacctggagctgagcatggccctgggcacctactaccccccccccagactgagacagctgctgcccatgctgctgcagggcaccagcatcttcaccgcccccaaggagatcgccgagatcaaggcccagctggagaccgccctgaagtggagaaactacgaggtgaagctgagactgctgctgcacctggaggagctgcagatggagcacgacatcagacactacgacctggagagcgtgcccatgacctgggaccccgtggaccagaaccccagactgctgaccctggaggtgcccggcgtgaccgagagcagacccagcgtgctgagaggcgaccacctgttcgccctgctgagcagcgagacccaccaggaggaccccatcacctacaagggcttcgtgcacaaggtggagctggacagagtgaagctgagcttcagcatgagcctgctgagcagattcgtggacggcctgaccttcaaggtgaacttcaccttcaacagacagcccctgagagtgcagcacagagccctggagctgaccggcagatggctgctgtggcccatgctgttccccgtggcccccagagacgtgcccctgctgcccagcgacgtgaagctgaagctgtacgacagaagcctggagagcaaccccgagcagctgcaggccatgagacacatcgtgaccggcaccaccagacccgccctgaccgcctgcctgaccctgaaccagaaccccgccgagctgcccctgcagggcaccggcagactgggcgagggcgtgtacaaccccagccacagcacccccagccccgccggcgagaacgacaccagcagctgctag

SEQ ID NO: 89481 - DNA, 3012 bp, synthetic construct
  misc_feature 1..3012: note = Description of Artificial Sequence: Synthetic coding sequence
  source 1..3012: mol_type = other DNA
atgcccagcaagttcagctgcagacagctgagagaggccggccagtgcttcgagagcttcctggtggtgagaggcctggacatggagaccgacagagagagactgagaaccatctacaacagagacttcaagatcagcttcggcacccccgcccccggcttcagcagcatgctgtacggcatgaagatcgccaacctggcctacgtgaccaagaccagagtgagattcttcagactggacagatgggccgacgtgagattccccgagaagagaagaatgaagctgggcagcgacatcagcaagcaccacaagagcctgctggccaagatcttctacgacagagccgagtacctgcacggcaagcacggcgtggacgtggaggtgcagggcccccacgaggccagagacggccagctgctgatcagactggacctgaacagaaaggaggtgctgaccctgagactgagaaacggcggcacccagagcgtgaccctgacccacctgttccccctgtgcagaaccccccagttcgccttctacaacgaggaccaggagctgccctgccccctgggccccggcgagtgctacgagctgcacgtgcactgcaagaccagcttcgtgggctacttccccgccaccgtgctgtgggagctgctgggccccggcgagagcggcagcgagggcgccggcaccttctacatcgccagattcctggccgccgtggcccacagccccctggccgcccagctgaagcccatgacccccttcaagagaaccagaatcaccggcaaccccgtggtgaccaacagaatcgaggagggcgagagacccgacagagccaagggctacgacctggagctgagcatggccctgggcacctactaccccccccccagactgagacagctgctgcccatgctgctgcagggcaccagcatcttcaccgcccccaaggagatcgccgagatcaaggcccagctggagaccgccctgaagtggagaaactacgaggtgaagctgagactgctgctgcacctggaggagctgcagatggagcacgacatcagacactacgacctggagagcgtgcccatgacctgggaccccgtggaccagaaccccagactgctgaccctggaggtgcccggcgtgaccgagagcagacccagcgtgctgagaggcgaccacctgttcgccctgctgagcagcgagacccaccaggaggaccccatcacctacaagggcttcgtgcacaaggtggagctggacagagtgaagctgagcttcagcatgagcctgctgagcagattcgtggacggcctgaccttcaaggtgaacttcaccttcaacagacagcccctgagagtgcagcacagagccctggagctgaccggcagatggctgctgtggcccatgctgttccccgtggcccccagagacgtgcccctgctgcccagcgacgtgaagctgaagctgtacgacagaagcctggagagcaaccccgagcagctgcaggccatgagacacatcgtgaccggcaccaccagacccgccccctacatcatcttcggcccccccggcaccggcaagaccgtgaccctggtggaggccatcaagcaggtggtgaagcacctgcccaaggcccacatcctggcctgcgcccccagcaacagcggcgccgacctgctgtgccagagactgagagtgcacctgcccagcagcatctacagactgctggcccccagcagagacatcagaatggtgcccgaggacatcaagccctgctgcaactgggacgccaagaagggcgagtacgtgttccccgccaagaagaagctgcaggagtacagagtgctgatcaccaccctgatcaccgccggcagactggtgagcgcccagttccccatcgaccacttcacccacatcttcatcgacgaggccggccactgcatggagcccgagagcctggtggccatcgccggcctgatggaggtgaaggagaccggcgaccccggcggccagctggtgctggccggcgaccccagacagctgggccccgtgctgagaagccccctgacccagaagcacggcctgggctacagcctgctggagagactgctgacctacaacagcctgtacaagaagggccccgacggctacgacccccagttcatcaccaagctgctgagaaactacagaagccaccccaccatcctggacatccccaaccagctgtactacgagggcgagctgcaggcctgcgccgacgtggtggacagagagagattctgcagatgggccggcctgcccagacagggcttccccatcatcttccacggcgtgatgggcaaggacgagagagagggcaacagccccagcttcttcaaccccgaggaggccgccaccgtgaccagctacctgaagctgctgctggcccccagcagcaagaagggcaaggccagactgagccccagaagcgtgggcgtgatcagcccctacagaaagcaggtggagaagatcagatactgcatcaccaagctggacagagagctgagaggcctggacgacatcaaggacctgaaggtgggcagcgtggaggagttccagggccaggagagaagcgtgatcctgatcagcaccgtgagaagcagccagagcttcgtgcagctggacctggacttcaacctgggcttcctgaagaaccccaagagattcaacgtggccgtgaccagagccaaggccctgctgatcatcgtgggcaaccccctgctgctgggccacgaccccgactggaaggtgttcctggagttctgcaaggagaacggcggctacaccggctgccccttccccgccaagctggacctgcagcagggccagaacctgctgcagggcctgagcaagctgagccccagcaccagcggcccccacagccacgactacctgccccaggagagagagggcgagggcggcctgagcctgcaggtggagcccgagtggagaaacgagctgtag

SEQ ID NO: 89482 - DNA, 2844 bp, synthetic construct
  misc_feature 1..2844: note = Description of Artificial Sequence: Synthetic coding sequence
  source 1..2844: mol_type = other DNA
atgctgtacggcatgaagatcgccaacctggcctacgtgaccaagaccagagtgagattcttcagactggacagatgggccgacgtgagattccccgagaagagaagaatgaagctgggcagcgacatcagcaagcaccacaagagcctgctggccaagatcttctacgacagagccgagtacctgcacggcaagcacggcgtggacgtggaggtgcagggcccccacgaggccagagacggccagctgctgatcagactggacctgaacagaaaggaggtgctgaccctgagactgagaaacggcggcacccagagcgtgaccctgacccacctgttccccctgtgcagaaccccccagttcgccttctacaacgaggaccaggagctgccctgccccctgggccccggcgagtgctacgagctgcacgtgcactgcaagaccagcttcgtgggctacttccccgccaccgtgctgtgggagctgctgggccccggcgagagcggcagcgagggcgccggcaccttctacatcgccagattcctggccgccgtggcccacagccccctggccgcccagctgaagcccatgacccccttcaagagaaccagaatcaccggcaaccccgtggtgaccaacagaatcgaggagggcgagagacccgacagagccaagggctacgacctggagctgagcatggccctgggcacctactaccccccccccagactgagacagctgctgcccatgctgctgcagggcaccagcatcttcaccgcccccaaggagatcgccgagatcaaggcccagctggagaccgccctgaagtggagaaactacgaggtgaagctgagactgctgctgcacctggaggagctgcagatggagcacgacatcagacactacgacctggagagcgtgcccatgacctgggaccccgtggaccagaaccccagactgctgaccctggaggtgcccggcgtgaccgagagcagacccagcgtgctgagaggcgaccacctgttcgccctgctgagcagcgagacccaccaggaggaccccatcacctacaagggcttcgtgcacaaggtggagctggacagagtgaagctgagcttcagcatgagcctgctgagcagattcgtggacggcctgaccttcaaggtgaacttcaccttcaacagacagcccctgagagtgcagcacagagccctggagctgaccggcagatggctgctgtggcccatgctgttccccgtggcccccagagacgtgcccctgctgcccagcgacgtgaagctgaagctgtacgacagaagcctggagagcaaccccgagcagctgcaggccatgagacacatcgtgaccggcaccaccagacccgccccctacatcatcttcggcccccccggcaccggcaagaccgtgaccctggtggaggccatcaagcaggtggtgaagcacctgcccaaggcccacatcctggcctgcgcccccagcaacagcggcgccgacctgctgtgccagagactgagagtgcacctgcccagcagcatctacagactgctggcccccagcagagacatcagaatggtgcccgaggacatcaagccctgctgcaactgggacgccaagaagggcgagtacgtgttccccgccaagaagaagctgcaggagtacagagtgctgatcaccaccctgatcaccgccggcagactggtgagcgcccagttccccatcgaccacttcacccacatcttcatcgacgaggccggccactgcatggagcccgagagcctggtggccatcgccggcctgatggaggtgaaggagaccggcgaccccggcggccagctggtgctggccggcgaccccagacagctgggccccgtgctgagaagccccctgacccagaagcacggcctgggctacagcctgctggagagactgctgacctacaacagcctgtacaagaagggccccgacggctacgacccccagttcatcaccaagctgctgagaaactacagaagccaccccaccatcctggacatccccaaccagctgtactacgagggcgagctgcaggcctgcgccgacgtggtggacagagagagattctgcagatgggccggcctgcccagacagggcttccccatcatcttccacggcgtgatgggcaaggacgagagagagggcaacagccccagcttcttcaaccccgaggaggccgccaccgtgaccagctacctgaagctgctgctggcccccagcagcaagaagggcaaggccagactgagccccagaagcgtgggcgtgatcagcccctacagaaagcaggtggagaagatcagatactgcatcaccaagctggacagagagctgagaggcctggacgacatcaaggacctgaaggtgggcagcgtggaggagttccagggccaggagagaagcgtgatcctgatcagcaccgtgagaagcagccagagcttcgtgcagctggacctggacttcaacctgggcttcctgaagaaccccaagagattcaacgtggccgtgaccagagccaaggccctgctgatcatcgtgggcaaccccctgctgctgggccacgaccccgactggaaggtgttcctggagttctgcaaggagaacggcggctacaccggctgccccttccccgccaagctggacctgcagcagggccagaacctgctgcagggcctgagcaagctgagccccagcaccagcggcccccacagccacgactacctgccccaggagagagagggcgagggcggcctgagcctgcaggtggagcccgagtggagaaacgagctgtag

SEQ ID NO: 89483 - DNA, 3012 bp, synthetic construct; identical to SEQ ID NO: 89481
  misc_feature 1..3012: note = Description of Artificial Sequence: Synthetic coding sequence
  source 1..3012: mol_type = other DNA

SEQ ID NO: 89484 - DNA, 2826 bp, synthetic construct
  misc_feature 1..2826: note = Description of Artificial Sequence: Synthetic coding sequence
  source 1..2826: mol_type = other DNA
atggagaccgacagagagagactgagaaccatctacaacagagacttcaagatcagcttcggcacccccgcccccggcttcagcagcatgctgtacggcatgaagatcgccaacctggcctacgtgaccaagaccagagtgagattcttcagactggacagatgggccgacgtgagattccccgagaagagaagaatgaagctgggcagcgacatcagcaagcaccacaagagcctgctggccaagatcttctacgacagagccgagtacctgcacggcaagcacggcggcacccagagcgtgaccctgacccacctgttccccctgtgcagaaccccccagttcgccttctacaacgaggaccaggagctgccctgccccctgggccccggcgagtgctacgagctgcacgtgcactgcaagaccagcttcgtgggctacttccccgccaccgtgctgtgggagctgctgggccccggcgagagcggcagcgagggcgccggcaccttctacatcgccagattcctggccgccgtggcccacagccccctggccgcccagctgaagcccatgacccccttcaagagaaccagaatcaccggcaaccccgtggtgaccaacagaatcgaggagggcgagagacccgacagagccaagggctacgacctggagctgagcatggccctgggcacctactaccccccccccagactgagacagctgctgcccatgctgctgcagggcaccagcatcttcaccgcccccaaggagatcgccgagatcaaggcccagctggagaccgccctgaagtggagaaactacgaggtgaagctgagactgctgctgcacctggaggagctgcagatggagcacgacatcagacactacgacctggagagcgtgcccatgacctgggaccccgtggaccagaaccccagactgctgaccctggaggtgcccggcgtgaccgagagcagacccagcgtgctgagaggcgaccacctgttcgccctgctgagcagcgagacccaccaggaggaccccatcacctacaagggcttcgtgcacaaggtggagctggacagagtgaagctgagcttcagcatgagcctgctgagcagattcgtggacggcctgaccttcaaggtgaacttcaccttcaacagacagcccctgagagtgcagcacagagccctggagctgaccggcagatggctgctgtggcccatgctgttccccgtggcccccagagacgtgcccctgctgcccagcgacgtgaagctgaagctgtacgacagaagcctggagagcaaccccgagcagctgcaggccatgagacacatcgtgaccggcaccaccagacccgccccctacatcatcttcggcccccccggcaccggcaagaccgtgaccctggtggaggccatcaagcaggtggtgaagcacctgcccaaggcccacatcctggcctgcgcccccagcaacagcggcgccgacctgctgtgccagagactgagagtgcacctgcccagcagcatctacagactgctggcccccagcagagacatcagaatggtgcccgaggacatcaagccctgctgcaactgggacgccaagaagggcgagtacgtgttccccgccaagaagaagctgcaggagtacagagtgctgatcaccaccctgatcaccgccggcagactggtgagcgcccagttccccatcgaccacttcacccacatcttcatcgacgaggccggccactgcatggagcccgagagcctggtggccatcgccggcctgatggaggtgaaggagaccggcgaccccggcggccagctggtgctggccggcgaccccagacagctgggccccgtgctgagaagccccctgacccagaagcacggcctgggctacagcctgctggagagactgctgacctacaacagcctgtacaagaagggccccgacggctacgacccccagttcatcaccaagctgctgagaaactacagaagccaccccaccatcctggacatccccaaccagctgtactacgagggcgagctgcaggcctgcgccgacgtggtggacagagagagattctgcagatgggccggcctgcccagacagggcttccccatcatcttccacggcgtgatgggcaaggacgagagagagggcaacagccccagcttcttcaaccccgaggaggccgccaccgtgaccagctacctgaagctgctgctggcccccagcagcaagaagggcaaggccagactgagccccagaagcgtgggcgtgatcagcccctacagaaagcaggtggagaagatcagatactgcatcaccaagctggacagagagctgagaggcctggacgacatcaaggacctgaaggtgggcagcgtggaggagttccagggccaggagagaagcgtgatcctgatcagcaccgtgagaagcagccagagcttcgtgcagctggacctggacttcaacctgggcttcctgaagaaccccaagagattcaacgtggccgtgaccagagccaaggccctgctgatcatcgtgggcaaccccctgctgctgggccacgaccccgactggaaggtgttcctggagttctgcaaggagaacggcggctacaccggctgccccttccccgccaagctggacctgcagcagggccagaacctgctgcagggcctgagcaagctgagccccagcaccagcggcccccacagccacgactacctgccccaggagagagagggcgagggcggcctgagcctgcaggtggagcccgagtggagaaacgagctgtag

SEQ ID NO: 89485 - DNA, 3012 bp, synthetic construct; identical to SEQ ID NO: 89481
  misc_feature 1..3012: note = Description of Artificial Sequence: Synthetic coding sequence
  source 1..3012: mol_type = other DNA

SEQ ID NO: 89486 - DNA, 171 bp, synthetic construct
  misc_feature 1..171: note = Description of Artificial Sequence: Synthetic coding sequence
  source 1..171: mol_type = other DNA
atgcccagcaagttcagctgcagacagctgagagaggccggccagtgcttcgagagcttcctggtggtgagaggcctggacatggagaccgacagagagagactgagaaccatctacaacagagacttcaagatcagcctggccagcagcaagagcatcctgcagagctag

SEQ ID NO: 89487 - DNA, 3636 bp, synthetic construct
  misc_feature 1..3636: note = Description of Artificial Sequence: Synthetic coding sequence
  source 1..3636: mol_type = other DNA
atgctgagcctggccgccaagctggtggccttcttctggagaaccgccgacacccccagagaggaggccggccagctggagcccgagctggccgagggcgacaccaagctgaagaccgtgagaggcgtggtgaccagatactgcagcgactacggcatgatcgacgacatgatctacttcagcagcgacgccgtgaccagcagagtgctgctgaacgtgggccaggaggtgatcgccgtggtggaggagaacaaggtgagcaacggcctgaaggccatcagagtggaggccgtgagcgacaagtgggaggacgacagcagaaaccacggcagccccagcgactgcggccccagagtgctgatcggctgcgtgaccagcctggtggagggcgccggctgcatcagccagaccacctacttcagcctggagagcgtgtgcgagggcttcgagccctgcaagggcgactgggtggaggccgagtacagaatcagacccggcacctggagcagcgaggccaccagcgtgaagcccctgagatacaagagagtggacaaggtgtgcatcagcagcctgtgcggcagaaacggcgtgctggaggagagcatcttcttcaccctggacagcctgaagctgcccgacggctacacccccagaagaggcgacgtggtgaacgccgtggtggtggagagcagccagagctgctacgtgtggagagccctgtgcatgaccctggtgaagagaagagacgccgcccccgtgcacgaggccacccacttctacggcaccatcctgctgaagaacaagggcgacatcgaggtgacccaggtgacccacttcggcaccctgaaggagggcagaagcaagaccatggtgatctggatcgagaacaagggcgacatcccccagaacctggtgagctgcaagctggccggctgggacaagagcaagcagttcagattccagatgctggacaaggaccagatgtgccccgtggtgagcttcgtgagcgtgcccgagaaggagaacagcagcgacgagaacatcaacagcctgaacagccacaccaagaacaagaccagccagatgagcgagagcagcctggtgaacaacagaggcatcagccccggcgactgcacctgcaagggcgagaacggcgagaaggacaacatcctgagcagaaagcagatgaccgagcccgagcccggcggcctggtgccccccggcggcaagaccttcatcgtggtgatctgcgacggcaagaaccccggcagatgcaaggagctgctgctgctgtgcttcagcgacttcctgatcggcagatacctggaggtgaacgtgatcagcggcgaggagagcctgatcgccgccagagagcccttcagctggaagaagctgaagagcagccaggccctgaccagcgccaagaccaccgtggtggtgaccgcccagaagagaaacagcagaagacagctgcccagcttcctgccccagtaccccatccccgacagactgagaaagtgcgtggagcagaagatcgacatcctgaccttccagcccctgctggccgagctgctgaacatgagcaactacaaggagaagttcagcaccctgctgtggctggaggagatctacgccgagatggagctgaaggagtacaacatgagcggcatcatcctgagaagaaacggcgacctgctggtgctggaggtgcccggcctggccgagggcagacccagcctgtacgccggcgacaagctgatcctgaagacccaggagtacaacggccacgccatcgagtacatcagctacgtgaccgagatccacgaggaggacgtgaccctgaagatcaaccccgagttcgagcaggcctacaacttcgagcccatggacgtggagttcacctacaacagaaccaccagcagaagatgccacttcgccctggagcacgtgatccacctgggcgtgaaggtgctgttccccgaggagatcatcctgcagagcccccaggtgaccggcaactggaaccacgcccaggacaccaagagcagcggccagagcaccagcaagaagaacagaaagaccatgaccgaccaggccgagcacggcaccgaggagagaagagtgggcgacaaggacctgcccgtgctggcccccttcaccgccgagatgagcgactgggtggacgagatccagacccccaaggccagaaagatggagttcttcaaccccgtgctgaacgagaaccagaagctggccgtgaagagaatcctgagcggcgactgcagacccctgccctacatcctgttcggcccccccggcaccggcaagaccgtgaccatcatcgaggccgtgctgcaggtgcacttcgccctgcccgacagcagaatcctggtgtgcgcccccagcaacagcgccgccgacctggtgtgcctgagactgcacgagagcaaggtgctgcagcccgccaccatggtgagagtgaacgccacctgcagattcgaggagatcgtgatcgacgccgtgaagccctactgcagagacggcgaggacatctggaaggccagcagattcagaatcatcatcaccacctgcagcagcagcggcctgttctaccagatcggcgtgagagtgggccacttcacccacgtgttcgtggacgaggccggccaggccagcgagcccgagtgcctgatccccctgggcctgatgagcgacatcagcggccagatcgtgctggccggcgaccccatgcagctgggccccgtgatcaagagcagactggccatggcctacggcctgaacgtgagcttcctggagagactgatgagcagacccgcctaccagagagacgagaacgccttcggcgcctgcggcgcccacaaccccctgctggtgaccaagctggtgaagaactacagaagccacgaggccctgctgatgctgcccagcagactgttctaccacagagagctggaggtgtgcgccgaccccaccgtggtgaccagcctgctgggctgggagaagctgcccaagaagggcttccccctgatcttccacggcgtgagaggcagcgaggccagagagggcaagagccccagctggttcaaccccgccgaggccgtgcaggtgctgagatactgctgcctgctggcccacagcatcagcagccaggtgagcgccagcgacatcggcgtgatcaccccctacagaaagcaggtggagaagatcagaatcctgctgagaaacgtggacctgatggacatcaaggtgggcagcgtggaggagttccagggccaggagtacctggtgatcatcatcagcaccgtgagaagcaacgaggacagattcgaggacgacagatacttcctgggcttcctgagcaacagcaagagattcaacgtggccatcaccagacccaaggccctgctgatcgtgctgggcaacccccacgtgctggtgagagacccctgcttcggcgccctgctggagtacagcatcaccaacggcgtgtacatgggctgcgacctgccccccgccctgcagagcctgcagaactgcggcgagggcgtggccgaccccagctaccccgtggtgcccgagagcaccggccccgagaagcaccaggagcccagctag

SEQ ID NO: 89488 - DNA, 378 bp, synthetic construct
  misc_feature 1..378: note = Description of Artificial Sequence: Synthetic coding sequence
  source 1..378: mol_type = other DNA
atgagcgacatcagcggccaggtgaccaagctggtgaagaactacagaagccacgaggccctgctgatgctgcccagcagactgttctaccacagagagctggaggtgtgcgccgaccccaccgtggtgaccagcctgctgggctgggagaagctgcccaagaagggcttccccctgatcttccacggcgtgagaggcagcgaggccagagagggcaagagccccagctggttcaaccccgccgaggccgtgcaggtgctgagatactgctgcctgctggcccacagcatcagcagccaggtgagcgccagcgacatcggcgtgatcaccccctacagaaagcaggtgagacccgcccaggccagactggtgctgtag

SEQ ID NO: 89489 - DNA, 378 bp, synthetic construct; identical to SEQ ID NO: 89488
  misc_feature 1..378: note = Description of Artificial Sequence: Synthetic coding sequence
  source 1..378: mol_type = other DNA

SEQ ID NO: 89490 - DNA, 1017 bp, synthetic construct
  misc_feature 1..1017: note = Description of Artificial Sequence: Synthetic coding sequence
  source 1..1017: mol_type = other DNA
atgttcagagtgggccacttcacccacgtgttcgtggacgaggccggccaggccagcgagcccgagtgcctgatccccctgggcctgatgagcgacatcagcggccagatcgtgctggccggcgaccccatgcagctgggccccgtgatcaagagcagactggccatggcctacggcctgaacgtgagcttcctggagagactgatgagcagacccgcctaccagagagacgagaacgccttcggcgcctgcggcgcccacaaccccctgctggtgaccaagctggtgaagaactacagaagccacgaggccctgctgatgctgcccagcagactgttctaccacagagagctggaggtgtgcgccgaccccaccgtggtgaccagcctgctgggctgggagaagctgcccaagaagggcttccccctgatcttccacggcgtgagaggcagcgaggccagagagggcaagagccccagctggttcaaccccgccgaggccgtgcaggtgctgagatactgctgcctgctggcccacagcatcagcagccaggtgagcgccagcgacatcggcgtgatcaccccctacagaaagcaggtggagaagatcagaatcctgctgagaaacgtggacctgatggacatcaaggtgggcagcgtggaggagttccagggccaggagtacctggtgatcatcatcagcaccgtgagaagcaacgaggacagattcgaggacgacagatacttcctgggcttcctgagcaacagcaagagattcaacgtggccatcaccagacccaaggccctgctgatcgtgctgggcaacccccacgtgctggtgagagacccctgcttcggcgccctgctggagtacagcatcaccaacggcgtgtacatgggctgcgacctgccccccgccctgcagagcctgcagaactgcggcgagggcgtggccgaccccagctaccccgtggtgcccgagagcaccggccccgagaagcaccaggagcccagctag

SEQ ID NO: 89491 - DNA, 3498 bp, synthetic construct
  misc_feature 1..3498: note = Description of Artificial Sequence: Synthetic coding sequence
  source 1..3498: mol_type = other DNA
atgctgagcctggccgccaagctggtggccttcttctggagaaccgccgacacccccagagaggaggccggccagctggagcccgagctggccgagggcgacaccaagctgaagaccgtgagaggcgtggtgaccagatactgcagcgactacggcatgatcgacgacatgatctacttcagcagcgacgccgtgaccagcagagtgctgctgaacgtgggccaggaggtgatcgccgtggtggaggagaacaaggtgagcaacggcctgaaggccatcagagtggaggccgtgagcgacaagtgggaggacgacagcagaaaccacggcagccccagcgactgcggccccagagtgctgatcggctgcgtgaccagcctggtggagggcgccggctgcatcagccagaccacctacttcagcctggagagcgtgtgcgagggcttcgagccctgcaagggcgactgggtggaggccgagtacagaatcagacccggcacctggagcagcgaggccaccagcgtgaagcccctgagatacaagagagtggacaaggtgtgcatcagcagcctgtgcggcagaaacggcgtgctggaggagagcatcttcttcaccctggacagcctgaagctgcccgacggctacacccccagaagaggcgacgtggtgaacgccgtggtggtggagagcagccagagctgctacgtgtggagagccctgtgcatgaccctggtgaagagaagagacgccgcccccgtgcacgaggccacccacttctacggcaccatcctgctgaagaacaagggcgacatcgaggtgacccaggtgacccacttcggcaccctgaaggagggcagaagcaagaccatggtgatctggatcgagaacaagggcgacatcccccagaacctggtgagctgcaagctggccggctgggacaagagcaagcagttcagattccagatgctggacaaggaccagatgtgccccgtggtgagcttcgtgagcgtgcccgagaaggagaacagcagcgacgagaacatcaacagcctgaacagccacaccaagaacaagaccagccagatgagcgagagcagcctggtgaacaacagaggcatcagccccggcgactgcacctgcaagggcgagaacggcgagaaggacaacatcctgagcagaaagcagatgaccgagcccgagcccggcggcctggtgccccccggcggcaagaccttcatcgtggtgatctgcgacggcaagaaccccggcagatgcaaggagctgctgctgctgtgcttcagcgacttcctgatcggcagatacctggaggtgaacgtgatcagcggcgaggagagcctgatcgccgccagagagcccttcagctggaagaagctgaagagcagccaggccctgaccagcgccaagaccaccgtggtggtgaccgcccagaagagaaacagcagaagacagctgcccagcttcctgccccagtaccccatccccgacagactgagaaagtgcgtggagcagaagatcgacatcctgaccttccagcccctgctggccgagctgctgaacatgagcaactacaaggagaagttcagcaccctgctgtggctggaggagatctacgccgagatggagctgaaggagtacaacatgagcggcatcatcctgagaagaaacggcgacctgctggtgctggaggtgcccggcctggccgagggcagacccagcctgtacgccggcgacaagctgatcctgaagacccaggagtacaacggccacgccatcgagtacatcagctacgtgaccgagatccacgaggaggacgtgaccctgaagatcaaccccgagttcgagcaggcctacaacttcgagcccatggacgtggagttcacctacaacagaaccaccagcagaagatgccacttcgccctggagcacgtgatccacctgggcgtgaaggtgctgttccccgaggagatcatcctgcagagcccccaggtgaccggcaactggaaccacgcccaggacaccaagagcagcggccagagcaccagcaagaagaacagaaagaccatgaccgaccaggccgagcacggcaccgaggagagaagagtgggcgacaaggacctgcccgtgctggcccccttcaccgccgagatgagcgactgggtggacgagatccagacccccaaggccagaaagatggagttcttcaaccccgtgctgaacgagaaccagaagctggccgtgaagagaatcctgagcggcgactgcagacccctgccctacatcctgttcggcccccccggcaccggcaagaccgtgaccatcatcgaggccgtgctgcaggtgcacttcgccctgcccgacagcagaatcctggtgtgcgcccccagcaacagcgccgccgacctggtgtgcctgagactgcacgagagcaaggtgctgcagcccgccaccatggtgagagtgaacgccacctgcagattcgaggagatcgtgatcgacgccgtgaagccctactgcagagacggcgaggacatctggaaggccagcagattcagaatcatcatcaccacctgcagcagcagcggcctgttctaccagatcggcgtgagagtgggccacttcacccacgtgttcgtggacgaggccggccaggccagcgagcccgagtgcctgatccccctgggcctgatgagcgacatcagcggccagatcgtgctggccggcgaccccatgcagctgggccccgtgatcaagagcagactggccatggcctacggcctgaacgtgagcttcctggagagactgatgagcagacccgcctaccagagagacgagaacgccttcggcgcctgcggcgcccacaaccccctgctggtgaccaagctggtgaagaactacagaagccacgaggccctgctgatgctgcccagcagactgttctaccacagagagctggaggtgtgcgccgaccccaccgtggtgaccagcctgctgggctgggagaagctgcccaagaagggcttccccctgatcttccacggcgtgagaggcagcgaggccagagagggcaagagccccagctggttcaaccccgccgaggccgtgcaggtgctgagatactgctgcctgctggcccacagcatcagcagccaggtgagcgccagcgacatcggcgtgatcaccccctacagaaagcaggtggagaagatcagaatcctgctgagaaacgtggacctgatggacatcaaggtgggcagcgtggaggagttccagggccaggagtacctggtgatcatcatcagcaccgacccctgcttcggcgccctgctggagtacagcatcaccaacggcgtgtacatgggctgcgacctgccccccgccctgcagagcctgcagaactgcggcgagggcgtggccgaccccagctaccccgtggtgcccgagagcaccggccccgagaagcaccaggagcccagctag

SEQ ID NO: 89492 - DNA, 636 bp, synthetic construct
  misc_feature 1..636: note = Description of Artificial Sequence: Synthetic coding sequence
  source 1..636: mol_type = other DNA
atgagcttcctgcccgtgagaagcgtgatcggcggcggcgacaccaagctgaagaccgtgagaggcgtggtgaccagatactgcagcgactacggcatgatcgacgacatgatctacttcagcagcgacgccgtgaccagcagagtgctgctgaacgtgggccaggaggtgatcgccgtggtggaggagaacaaggtgagcaacggcctgaaggccatcagagtggaggccgtgagcgacaagtgggaggacgacagcagaaaccacggcagccccagcgactgcggccccagagtgctgatcggctgcgtgaccagcctggtggagggcgccggctgcatcagccagaccacctacttcagcctggagagcgtgtgcgagggcttcgagccctgcaagggcgactgggtggaggccgagtacagaatcagacccggcacctggagcagcgaggccaccagcgtgaagcccctgagatacaagagagtggacaaggtggcctgcagactggtggcccccctgtgcgccagcggcagacccgccatcagaggcaacctgcacggccccggcttcagctgcatgtgctggaagcccggcaagatcaagctgtgccacggccagagagagaagaagtag

SEQ ID NO: 89493 - DNA, 3498 bp, synthetic construct
  misc_feature 1..3498: note = Description of Artificial Sequence: Synthetic coding sequence
  source 1..3498: mol_type = other DNA
atgagcttcctgcccgtgagaagcgtgatcggcggcggcgacaccaagctgaagaccgtgagaggcgtggtgaccagatactgcagcgactacggcatgatcgacgacatgatctacttcagcagcgacgccgtgaccagcagagtgctgctgaacgtgggccaggaggtgatcgccgtggtggaggagaacaaggtgagcaacggcctgaaggccatcagagtggaggccgtgagcgacaagtgggaggacgacagcagaaaccacggcagccccagcgactgcggccccagagtgctgatcggctgcgtgaccagcctggtggagggcgccggctgcatcagccagaccacctacttcagcctggagagcgtgtgcgagggcttcgagccctgcaagggcgactgggtggaggccgagtacagaatcagacccggcacctggagcagcgaggccaccagcgtgaagcccctgagatacaagagagtggacaaggtgtgcatcagcagcctgtgcggcagaaacggcgtgctggaggagagcatcttcttcaccctggacagcctgaagctgcccgacggctacacccccagaagaggcgacgtggtgaacgccgtggtggtggagagcagccagagctgctacgtgtggagagccctgtgcatgaccctggtgaagagaagagacgccgcccccgtgcacgaggccacccacttctacggcaccatcctgctgaagaacaagggcgacatcgaggtgacccaggtgacccacttcggcaccctgaaggagggcagaagcaagaccatggtgatctggatcgagaacaagggcgacatcccccagaacctggtgagctgcaagctggccggctgggacaagagcaagcagttcagattccagatgctggacaaggaccagatgtgccccgtggtgagcttcgtgagcgtgcccgagaaggagaacagcagcgacgagaacatcaacagcctgaacagccacaccaagaacaagaccagccagatgagcgagagcagcctggtgaacaacagaggcatcagccccggcgactgcacctgcaagggcgagaacggcgagaaggacaacatcctgagcagaaagcagatgaccgagcccgagcccggcggcctggtgccccccggcggcaagaccttcatcgtggtgatctgcgacggcaagaaccccggcagatgcaaggagctgctgctgctgtgcttcagcgacttcctgatcggcagatacctggaggtgaacgtgatcagcggcgaggagagcctgatcgccgccagagagcccttcagctggaagaagctgaagagcagccaggccctgaccagcgccaagaccaccgtggtggtgaccgcccagaagagaaacagcagaagacagctgcccagcttcctgccccagtaccccatccccgacagactgagaaagtgcgtggagcagaagatcgacatcctgaccttccagcccctgctggccgagctgctgaacatgagcaactacaaggagaagttcagcaccctgctgtggctggaggagatctacgccgagatggagctgaaggagtacaacatgagcggcatcatcctgagaagaaacggcgacctgctggtgctggaggtgcccggcctggccgagggcagacccagcctgtacgccggcgacaagctgatcctgaagacccaggagtacaacggccacgccatcgagtacatcagctacgtgaccgagatccacgaggaggacgtgaccctgaagatcaaccccgagttcgagcaggcctacaacttcgagcccatggacgtggagttcacctacaacagaaccaccagcagaagatgccacttcgccctggagcacgtgatccacctgggcgtgaaggtgctgttccccgaggagatcatcctgcagagcccccaggtgaccggcaactggaaccacgcccaggacaccaagagcagcggccagagcaccagcaagaagaacagaaagaccatgaccgaccaggccgagcacggcaccgaggagagaagagtgggcgacaaggacctgcccgtgctggcccccttcaccgccgagatgagcgactgggtggacgagatccagacccccaaggccagaaagatggagttcttcaaccccgtgctgaacgagaaccagaagctggccgtgaagagaatcctgagcggcgactgcagacccctgccctacatcctgttcggcccccccggcaccggcaagaccgtgaccatcatcgaggccgtgctgcaggtgcacttcgccctgcccgacagcagaatcctggtgtgcgcccccagcaacagcgccgccgacctggtgtgcctgagactgcacgagagcaaggtgctgcagcccgccaccatggtgagagtgaacgccacctgcagattcgaggagatcgtgatcgacgccgtgaagccctactgcagagacggcgaggacatctggaaggccagcagattcagaatcatcatcaccacctgcagcagcagcggcctgttctaccagatcggcgtgagagtgggccacttcacccacgtgttcgtggacgaggccggccaggccagcgagcccgagtgcctgatccccctgggcctgatgagcgacatcagcggccagatcgtgctggccggcgaccccatgcagctgggccccgtgatcaagagcagactggccatggcctacggcctgaacgtgagcttcctggagagactgatgagcagacccgcctaccagagagacgagaacgccttcggcgcctgcggcgcccacaaccccctgctggtgaccaagctggtgaagaactacagaagccacgaggccctgctgatgctgcccagcagactgttctaccacagagagctggaggtgtgcgccgaccccaccgtggtgaccagcctgctgggctgggagaagctgcccaagaagggcttccccctgatcttccacggcgtgagaggcagcgaggccagagagggcaagagccccagctggttcaaccccgccgaggccgtgcaggtgctgagatactgctgcctgctggcccacagcatcagcagccaggtgagcgccagcgacatcggcgtgatcaccccctacagaaagcaggtggagaagatcagaatcctgctgagaaacgtggacctgatggacatcaaggtgggcagcgtggaggagttccagggccaggagtacctggtgatcatcatcagcaccgtgagaagcaacgaggacagattcgaggacgacagatacttcctgggcttcctgagcaacagcaagagattcaacgtggccatcaccagacccaaggccctgctgatcgtgctgggcaacccccacgtgctggtgagactgtggagaggcggcggcagacccctgctgcccagcggcgccagaatccacagaaccagagaggccagcggcgcccagctgatctgcagcggctag

SEQ ID NO: 89494 - DNA, 3636 bp, synthetic construct; identical to SEQ ID NO: 89487
  misc_feature 1..3636: note = Description of Artificial Sequence: Synthetic coding sequence
  source 1..3636: mol_type = other DNA

SEQ ID NO: 89495 - DNA, 483 bp, synthetic construct
  misc_feature 1..483: note = Description of Artificial Sequence: Synthetic coding sequence
  source 1..483: mol_type = other DNA
atggccgccgagagaaagaccagactgagcaagaacctgctgagaatgaagttcatgcagagaggcctggacagcgagaccaagaagcagctggaggaggaggagaagaagatcatcagcgaggagcactggtacctggacctgcccgagctgaaggagaaggagagcttcatcatcgaggagcagagcttcctgctgtgcgaggacctgctgtacggcagaatgagcttcagaggcttcaaccccgaggtggagaagctgatgctgcagatgaacgccaagcacaaggccgaggaggtggaggacgagaccgtggagctggacgtgagcgacgaggagatggccagaagatacgagaccctggtgggcaccatcggcaagaagttcgccagaaagagagaccacgccaactacgaggaggacgagaacggcgacatcacccccatcaaggccaagaagatgttcctgaagccccaggactag

SEQ ID NO: 89496 - DNA, 627 bp, synthetic construct
  misc_feature 1..627: note = Description of Artificial Sequence: Synthetic coding sequence
  source 1..627: mol_type = other DNA
atgaaggcctgcaagagaggcaacagcgacatcgtgagactggtgatcgagtgcggcgccgactgcaacatcctgagcaagcaccagaacagcgccctgcacttcgccaagcagagcaacaacgtgctggtgtacgacctgctgaagaaccacctggagaccctgagcagagtggccgaggagaccatcaaggactacttcgaggccagactggccctgctggagcccgtgttccccatcgcctgccacagactgtgcgagggccccgacttcagcaccgacttcaactacaagcccccccagaacatccccgagggcagcggcatcctgctgttcatcttccacgccaacttcctgggcaaggaggtgatcgccagactgtgcggcccctgcagcgtgcaggccgtggtgctgaacgacaagttccagctgcccgtgttcctgaccggcagcagaagcgtggtgcaggccggcgtgcagtggagaggcctgcagctgaccggcgtgctgaccagccaggcccaggccatcctgcccccccagccccccaactacctgggcctgaagatgaccgtgatcctgttcacccacagcgccctgctgcaggtgcccatcaacagcagctag

SEQ ID NO: 89497 - DNA, 2583 bp, synthetic construct
  misc_feature 1..2583: note = Description of Artificial Sequence: Synthetic coding sequence
  source 1..2583: mol_type = other DNA
atggagcaggtggccgagggcgccagagtgaccgccgtgcccgtgagcgccgccgacagcaccgaggagctggccgaggtggaggagggcgtgggcgtggtgggcgaggacaacgacgccgccgccagaggcgccgaggccttcggcgacagcgaggaggacggcgaggacgtgttcgaggtggagaagatcctggacatgaagaccgagggcggcaaggtgctgtacaaggtgagatggaagggctacaccagcgacgacgacacctgggagcccgagatccacctggaggactgcaaggaggtgctgctggagttcagaaagaagatcgccgagaacaaggccaaggccgtgagaaaggacatccagagactgagcctgaacaacgacatcttcgaggccaacagcgacagcgaccagcagagcgagaccaaggaggacaccagccccaagaagaagaagaagaagctgagacagagagaggagaagagccccgacgacctgaagaagaagaaggccaaggccggcaagctgaaggacaagagcaagcccgacctggagagcagcctggagagcctggtgttcgacctgagaaccaagaagagaatcagcgaggccaaggaggagctgaaggagagcaagaagcccaagaaggacgaggtgaaggagaccaaggagctgaagaaggtgaagaagggcgagatcagagacctgaagaccaagaccagagaggaccccaaggagaacagaaagaccaagaaggagaagttcgtggagagccaggtggagagcgagagcagcgtgctgaacgacagccccttccccgaggacgacagcgagggcctgcacagcgacagcagagaggagaagcagaacaccaagagcgccagagagagagccggccaggacatgggcctggagcacggcttcgagaagcccctggacagcgccatgagcgccgaggaggacaccgacgtgagaggcagaagaaagaagaagacccccagaaaggccgaggacaccagagagaacagaaagctggagaacaagaacgccttcctggagaagaagaccgtgcccaagaagcagagaaaccaggacagaagcaagagcgccgccgagctggagaagctgatgcccgtgagcgcccagacccccaagggcagaagactgagcggcgaggagagaggcctgtggagcaccgacagcgccgaggaggacaaggagaccaagagaaacgagagcaaggagaagtaccagaagagacacgacagcgacaaggaggagaagggcagaaaggagcccaagggcctgaagaccctgaaggagatcagaaacgccttcgacctgttcaagctgacccccgaggagaagaacgacgtgagcgagaacaacagaaagagagaggagatccccctggacttcaagaccatcgacgaccacaagaccaaggagaacaagcagagcctgaaggagagaagaaacaccagagacgagaccgacacctgggcctacatcgccgccgagggcgaccaggaggtgctggacagcgtgtgccaggccgacgagaacagcgacggcagacagcagatcctgagcctgggcatggacctgcagctggagtggatgaagctggaggacttccagaagcacctggacggcaaggacgagaacttcgccgccaccgacgccatccccagcaacgtgctgagagacgccgtgaagaacggcgactacatcaccgtgaaggtggccctgaacagcaacgaggagtacaacctggaccaggaggacagcagcggcatgaccctggtgatgctggccgccgccggcggccaggacgacctgctgagactgctgatcaccaagggcgccaaggtgaacggcagacagaagaacggcaccaccgccctgatccacgccgccgagaagaacttcctgaccaccgtggccatcctgctggaggccggcgccttcgtgaacgtgcagcagagcaacggcgagaccgccctgatgaaggcctgcaagagaggcaacagcgacatcgtgagactggtgatcgagtgcggcgccgactgcaacatcctgagcaagcaccagaacagcgccctgcacttcgccaagcagagcaacaacgtgctggtgtacgacctgctgaagaaccacctggagaccctgagcagagtggccgaggagaccatcaaggactacttcgaggccagactggccctgctggagcccgtgttccccatcgcctgccacagactgtgcgagggccccgacttcagcaccgacttcaactacaagcccccccagaacatccccgagggcagcggcatcctgctgttcatcttccacgccaacttcctgggcaaggaggtgatcgccagactgtgcggcccctgcagcgtgcaggccgtggtgctgaacgacaagttccagctgcccgtgttcctggacagccacttcgtgtacagcttcagccccgtggccggccccaacaagctgttcatcagactgaccgaggcccccagcgccaaggtgaagctgctgatcggcgcctacagagtgcagctgcagtag

SEQ ID NO: 89498 - DNA, 2604 bp, synthetic construct
  misc_feature 1..2604: note = Description of Artificial Sequence: Synthetic coding sequence
  source 1..2604: mol_type = other DNA
atggagcaggtggccgagggcgccagagtgaccgccgtgcccgtgagcgccgccgacagcaccgaggagctggccgaggtggaggagggcgtgggcgtggtgggcgaggacaacgacgccgccgccagaggcgccgaggccttcggcgacagcgaggaggacggcgaggacgtgttcgaggtggagaagatcctggacatgaagaccgagggcggcaaggtgctgtacaaggtgagatggaagggctacaccagcgacgacgacacctgggagcccgagatccacctggaggactgcaaggaggtgctgctggagttcagaaagaagatcgccgagaacaaggccaaggccgtgagaaaggacatccagagactgagcctgaacaacgacatcttcgaggccaacagcgacagcgaccagcagagcgagaccaaggaggacaccagccccaagaagaagaagaagaagctgagacagagagaggagaagagccccgacgacctgaagaagaagaaggccaaggccggcaagctgaaggacaagagcaagcccgacctggagagcagcctggagagcctggtgttcgacctgagaaccaagaagagaatcagcgaggccaaggaggagctgaaggagagcaagaagcccaagaaggacgaggtgaaggagaccaaggagctgaagaaggtgaagaagggcgagatcagagacctgaagaccaagaccagagaggaccccaaggagaacagaaagaccaagaaggagaagttcgtggagagccaggtggagagcgagagcagcgtgctgaacgacagccccttccccgaggacgacagcgagggcctgcacagcgacagcagagaggagaagcagaacaccaagagcgccagagagagagccggccaggacatgggcctggagcacggcttcgagaagcccctggacagcgccatgagcgccgaggaggacaccgacgtgagaggcagaagaaagaagaagacccccagaaaggccgaggacaccagagagaacagaaagctggagaacaagaacgccttcctggagaagaagaccgtgcccaagaagcagagaaaccaggacagaagcaagagcgccgccgagctggagaagctgatgcccgtgagcgcccagacccccaagggcagaagactgagcggcgaggagagaggcctgtggagcaccgacagcgccgaggaggacaaggagaccaagagaaacgagagcaaggagaagtaccagaagagacacgacagcgacaaggaggagaagggcagaaaggagcccaagggcctgaagaccctgaaggagatcagaaacgccttcgacctgttcaagctgacccccgaggagaagaacgacgtgagcgagaacaacagaaagagagaggagatccccctggacttcaagaccatcgacgaccacaagaccaaggagaacaagcagagcctgaaggagagaagaaacaccagagacgagaccgacacctgggcctacatcgccgccgagggcgaccaggaggtgctggacagcgtgtgccaggccgacgagaacagcgacggcagacagcagatcctgagcctgggcatggacctgcagctggagtggatgaagctggaggacttccagaagcacctggacggcaaggacgagaacttcgccgccaccgacgccatccccagcaacgtgctgagagacgccgtgaagaacggcgactacatcaccgtgaaggtggccctgaacagcaacgaggagtacaacctggaccaggaggacagcagcggcatgaccctggtgatgctggccgccgccggcggccaggacgacctgctgagactgctgatcaccaagggcgccaaggtgaacggcagacagaagaacggcaccaccgccctgatccacgccgccgagaagaacttcctgaccaccgtggccatcctgctggaggccggcgccttcgtgaacgtgcagcagagcaacggcgagaccgccctgatgaaggcctgcaagagaggcaacagcgacatcgtgagactggtgatcgagtgcggcgccgactgcaacatcctgagcaagcaccagaacagcgccctgcacttcgccaagcagagcaacaacgtgctggtgtacgacctgctgaagaaccacctggagaccctgagcagagtggccgaggagaccatcaaggactacttcgaggccagactggccctgctggagcccgtgttccccatcgcctgccacagactgtgcgagggccccgacttcagcaccgacttcaactacaagcccccccagaacatccccgagggcagcggcatcctgctgttcatcttccacgccaacttcctgggcaaggaggtgatcgccagactgtgcggcccctgcagcgtgcaggccgtggtgctgaacgacaagttccagctgcccgtgttcctgaccggcagcagaagcgtggtgcaggccggcgtgcagtggagaggcctgcagctgaccggcgtgctgaccagccaggcccaggccatcctgcccccccagccccccaactacctgggcctgaagatgcacgccaccaccagcggctag

SEQ ID NO: 89499 - DNA, 1812 bp, synthetic construct
  misc_feature 1..1812: note = Description of Artificial Sequence: Synthetic coding sequence
  source 1..1812: mol_type = other DNA
atggagcaggtggccgagggcgccagagtgaccgccgtgcccgtgagcgccgccgacagcaccgaggagctggccgaggtggaggagggcgtgggcgtggtgggcgaggacaacgacgccgccgccagaggcgccgaggccttcggcgacagcgaggaggacggcgaggacgtgttcgaggtggagaagatcctggacatgaagaccgagggcggcaaggtgctgtacaaggtgagatggaagggctacaccagcgacgacgacacctgggagcccgagatccacctggaggactgcaaggaggtgctgctggagttcagaaagaagatcgccgagaacaaggccaaggccgtgagaaaggacatccagagactgagcctgaacaacgacatcttcgaggccaacagcgacagcgaccagcagagcgagaccaaggaggacaccagccccaagaagaagaagaagaagctgagacagagagaggagaagagccccgacgacctgaagaagaagaaggccaaggccggcaagctgaaggacaagagcaagcccgacctggagagcagcctggagagcctggtgttcgacctgagaaccaagaagagaatcagcgaggccaaggaggagctgaaggagagcaagaagcccaagaaggacgaggtgaaggagaccaaggagctgaagaaggtgaagaagggcgagatcagagacctgaagaccaagaccagagaggaccccaaggagaacagaaagaccaagaaggagaagttcgtggagagccaggtggagagcgagagcagcgtgctgaacgacagccccttccccgaggacgacagcgagggcctgcacagcgacagcagagaggagaagcagaacaccaagagcgccagagagagagccggccaggacatgggcctggagcacggcttcgagaagcccctggacagcgccatgagcgccgaggaggacaccgacgtgagaggcagaagaaagaagaagacccccagaaaggccgaggacaccagagagaacagaaagctggagaacaagaacgccttcctggagaagaagaccgtgcccaagaagcagagaaaccaggacagaagcaagagcgccgccgagctggagaagctgatgcccgtgagcgcccagacccccaagggcagaagactgagcggcgaggagagaggcctgtggagcaccgacagcgccgaggaggacaaggagaccaagagaaacgagagcaaggagaagtaccagaagagacacgacagcgacaaggaggagaagggcagaaaggagcccaagggcctgaagaccctgaaggagatcagaaacgccttcgacctgttcaagctgacccccgaggagaagaacgacgtgagcgagaacaacagaaagagagaggagatccccctggacttcaagaccatcgacgaccacaagaccaaggagaacaagcagagcctgaaggagagaagaaacaccagagacgagaccgacacctgggcctacatcgccgccgagggcgaccaggaggtgctggacagcgtgtgccaggccgacgagaacagcgacggcagacagcagatcctgagcctgggcatggacctgcagctggagtggatgaagctggaggacttccagaagcacctggacggcaaggacgagaacttcgccgccaccgacgccatccccagcaacgtgctgagagacgccgtgaagaagaagaagaagaagaagttcctgggcacctacaccttcttcctgttcttcttcttcgagaagcccgacctggtgcccctgttctag

SEQ ID NO: 89500 - DNA, 3087 bp, synthetic construct
  misc_feature 1..3087: note = Description of Artificial Sequence: Synthetic coding sequence
  source 1..3087: mol_type = other DNA
atgggcttcttcagcctgagcagcgagagaaacgagagcgtgatccactaccccgagagcaccgagcccgagatccagcaggagatgagcaccagccagcccgactgcaacgtggacagctgcagcgtgagcagcggctacggcaccttctgcatcagcgagctgaacctgtacaagagcaaggaccccaaggagttcatggagcacatcgacgtgcccaagggccagtacgtggcccccgccgtgcccgccgagagcctggtggacggcgtgaagaacgagaacttctacatccagacccccgaggagtgccacgtgagcctgaaggaggacgtgagcatcagccccggcgagttcgagcacaacttcctgggcgagaacaaggtgagcgaggtgtacagcggcaagaccaacagcaacgccatcaccagctgggcccagaagctgaagcagaaccagcccaagagagcccacgtggaggacggcggcagcagaagcaagcagggcaacgagcagagcaagaagacccccatcgagaagagcgacttcgccgccgccacccaccccagagccttctacctgagcaagcccgacgagacccccaacgcctggatgagcgacagcggcaccggcctgacctactggaagctggaggagaaggacatgcaccacagcctgcccgagaccctggagaagaccttcatcagcctgagcagcaccgacgtgagccccaaccagagcaacaccagcaacgagatgaagctgcccagcctgaaggacatctactacaagaagcagagagagaacaagcagctgcccgagagaaacctgaccagcgccagcaaccccaaccacccccccgaggtgctgaccctggaccccaccctgcacatgaagcccaagcagcagatcagcggcatccagccccacggcctgcccaacgccctggacgacagaatcagcttcagccccgacagcgtgctggagcccagcatgagcagccccagcgacatcgacagcttcagccaggccagcaacgtgaccagccagctgcccggcttccccaagtaccccagccacaccaaggccagccccgtggacagctggaagaaccagaccttccagaacgagagcagaaccagcagcaccttccccagcgtgtacaccatcaccagcaacgacatcagcgtgaacaccgtggacgaggagaacaccgtgatggtggccagcgccagcgtgagccagagccagctgcccggcaccgccaacagcgtgcccgagtgcatcagcctgaccagcctggaggaccccgtgatcctgagcaagatcagacagaacctgaaggagaagcacgccagacacatcgccgacctgagagcctactacgagagcgagatcaacagcctgaagcagaagctggaggccaaggagatcagcggcgtggaggactggaagatcaccaaccagatcctggtggacagatgcggccagctggacagcgccctgcacgaggccaccagcagagtgagaaccctggagaacaagaacaacctgctggagatcgaggtgaacgacctgagagagagattcagcgccgccagcagcgccagcaagatcctgcaggagagaatcgaggagatgagaaccagcagcaaggagaaggacaacaccatcatcagactgaagagcagactgcaggacctggaggaggccttcgagaacgcctacaagctgagcgacgacaaggaggcccagctgaagcaggagaacaagatgttccaggacctgctgggcgagtacgagagcctgggcaaggagcacagaagagtgaaggacgccctgaacaccaccgagaacaagctgctggacgcctacacccagatcagcgacctgaagagaatgatcagcaagctggaggcccaggtgaagcaggtggagcacgagaacatgctgagcctgagacacaacagcagaatccacgtgagacccagcagagccaacaccctggccaccagcgacgtgagcagaagaaagtggctgatccccggcgccgagtacagcatcttcaccggccagcccctggacacccaggacagcaacgtggacaaccagctggaggagacctgcagcctgggccacagaagccccctggagaaggacagcagccccggcagcagcagcaccagcctgctgatcaagaagcagagagagaccagcgacacccccatcatgagagccctgaaggagctggacgagggcaagatcttcaagaactggggcacccagaccgagaaggaggacaccagcaacatcaaccccagacagaccgagaccagcgtgaacgccagcagaagccccgagaagtgcgcccagcagagacagaagagactgaacagcgccagccagagaagcagcagcctgccccccagcaacagaaagagcagcacccccaccaagagagagatcatgctgacccccgtgaccgtggcctacagccccaagagaagccccaaggagaacctgagccccggcttcagccacctgctgagcaagaacgagagcagccccatcagattcgacatcctgctggacgacctggacaccgtgcccgtgagcaccctgcagagaaccaaccccagaaagcagctgcagttcctgcccctggacgacagcgaggagaagacctacagcgagaaggccaccgacaaccacgtgaaccacagcagctgccccgagcccgtgcccaacggcgtgaagaaggtgagcgtgagaaccgcctgggagaagaacaagagcgtgagctacgagcagtgcaagcccgtgagcgtgaccccccagggcaacgacttcgagtacaccgccaagatcagaaccctggccgagaccgagagattcttcgacgagctgaccaaggagaaggaccagatcgaggccgccctgagcagaatgcccagccccggcggcagaatcaccctgcagaccagactgaaccagaccccccagatctgcgaggagagcagccacaagtgcgccttcgccggccactacgtgccctgccacctgtacgactacagattccagggctag

SEQ ID NO: 89501 - DNA, 3096 bp, synthetic construct
  misc_feature 1..3096: note = Description of Artificial Sequence: Synthetic coding sequence
  source 1..3096: mol_type = other DNA
atgggcttcttcagcctgagcagcgagagaaacgagagcgtgatccactaccccgagagcaccgagcccgagatccagcaggagatgagcaccagccagcccgactgcaacgtggacagctgcagcgtgagcagcggctacggcaccttctgcatcagcgagctgaacctgtacaagagcaaggaccccaaggagttcatggagcacatcgacgtgcccaagggccagtacgtggcccccgccgtgcccgccgagagcctggtggacggcgtgaagaacgagaacttctacatccagacccccgaggagtgccacgtgagcctgaaggaggacgtgagcatcagccccggcgagttcgagcacaacttcctgggcgagaacaaggtgagcgaggtgtacagcggcaagaccaacagcaacgccatcaccagctgggcccagaagctgaagcagaaccagcccaagagagcccacgtggaggacggcggcagcagaagcaagcagggcaacgagcagagcaagaagacccccatcgagaagagcgacttcgccgccgccacccaccccagagccttctacctgagcaagcccgacgagacccccaacgcctggatgagcgacagcggcaccggcctgacctactggaagctggaggagaaggacatgcaccacagcctgcccgagaccctggagaagaccttcatcagcctgagcagcaccgacgtgagccccaaccagagcaacaccagcaacgagatgaagctgcccagcctgaaggacatctactacaagaagcagagagagaacaagcagctgcccgagagaaacctgaccagcgccagcaaccccaaccacccccccgaggtgctgaccctggaccccaccctgcacatgaagcccaagcagcagatcagcggcatccagccccacggcctgcccaacgccctggacgacagaatcagcttcagccccgacagcgtgctggagcccagcatgagcagccccagcgacatcgacagcttcagccaggccagcaacgtgaccagccagctgcccggcttccccaagtaccccagccacaccaaggccagccccgtggacagctggaagaaccagaccttccagaacgagagcagaaccagcagcaccttccccagcgtgtacaccatcaccagcaacgacatcagcgtgaacaccgtggacgaggagaacaccgtgatggtggccagcgccagcgtgagccagagccagctgcccggcaccgccaacagcgtgcccgagtgcatcagcctgaccagcctggaggaccccgtgatcctgagcaagatcagacagaacctgaaggagaagcacgccagacacatcgccgacctgagagcctactacgagagcgagatcaacagcctgaagcagaagctggaggccaaggagatcagcggcgtggaggactggaagatcaccaaccagatcctggtggacagatgcggccagctggacagcgccctgcacgaggccaccagcagagtgagaaccctggagaacaagaacaacctgctggagatcgaggtgaacgacctgagagagagattcagcgccgccagcagcgccagcaagatcctgcaggagagaatcgaggagatgagaaccagcagcaaggagaaggacaacaccatcatcagactgaagagcagactgcaggacctggaggaggccttcgagaacgcctacaagctgagcgacgacaaggaggcccagctgaagcaggagaacaagatgttccaggacctgctgggcgagtacgagagcctgggcaaggagcacagaagagtgaaggacgccctgaacaccaccgagaacaagctgctggacgcctacacccagatcagcgacctgaagagaatgatcagcaagctggaggcccaggtgaagcaggtggagcacgagaacatgctgagcctgagacacaacagcagaatccacgtgagacccagcagagccaacaccctggccaccagcgacgtgagcagaagaaagtggctgatccccggcgccgagtacagcatcttcaccggccagcccctggacacccaggacagcaacgtggacaaccagctggaggagacctgcagcctgggccacagaagccccctggagaaggacagcagccccggcagcagcagcaccagcctgctgatcaagaagcagagagagaccagcgacacccccatcatgagagccctgaaggagctggacgagggcaagatcttcaagaactggggcacccagaccgagaaggaggacaccagcaacatcaaccccagacagaccgagaccagcgtgaacgccagcagaagccccgagaagtgcgcccagcagagacagaagagactgaacagcgccagccagagaagcagcagcctgccccccagcaacagaaagagcagcacccccaccaagagagagatcatgctgacccccgtgaccgtggcctacagccccaagagaagccccaaggagaacctgagccccggcttcagccacctgctgagcaagaacgagagcagccccatcagattcgacatcctgctggacgacctggacaccgtgcccgtgagcaccctgcagagaaccaaccccagaaagcagctgcagttcctgcccctggacgacagcgaggagaagacctacagcgagaaggccaccgacaaccacgtgaaccacagcagctgccccgagcccgtgcccaacggcgtgaagaaggtgagcgtgagaaccgcctgggagaagaacaagagcgtgagctacgagcagtgcaagcccgtgagcgtgaccccccagggcaacgacttcgagtacaccgccaagatcagaaccctggccgagaccgagagattcttcgacgagctgaccaaggagaaggaccagatcgaggccgccctgagcagaatgcccagccccggcggcagaatcaccctgcagaccagactgaaccaggaggccctggaggacagactggagagaatcaacagagagctgggcagcgtgagaatgaccctgaagaagttccacgtgctgagaaccagcgccaacctgtag

SEQ ID NO: 89502 - DNA, 1167 bp, synthetic construct
  misc_feature 1..1167: note = Description of Artificial Sequence: Synthetic coding sequence
  source 1..1167: mol_type = other DNA
atggagcccagccccgccgccggcggcctggagaccaccagactggtgagccccagagacagaggcggcgccggcggcagcctgagactgaagagcctgttcaccgagcccagcgagcccctgcccgaggagagcaagcccgtggagatgcccttccaccactgccacagagaccccctgcccccccccggcctgacccccgagagactgcacgccagaagacagctgtacgccgcctgcgccgtgtgcttcgtgttcatggccggcgaggtggtgggcggctacctggcccacagcctggccatcatgaccgacgccgcccacctgctggccgacgtgggcagcatgatgggcagcctgttcagcctgtggctgagcaccagacccgccaccagaaccatgaccttcggctggcacagaagcgagaccctgggcgccctggccagcgtggtgagcctgtggatggtgaccggcatcctgctgtacctggccttcgtgagactgctgcacagcgactaccacatcgagggcggcgccatgctgctgaccgccagcatcgccgtgtgcgccaacctgctgatggccttcgtgctgcaccaggccggccccccccacagccacggcagcagaggcgccgagtacgcccccctggaggagggccccgaggagcccctgcccctgggcaacaccagcgtgagagccgccttcgtgcacgtgctgggcgacctgctgcagagcttcggcgtgctggccgccagcatcctgatctacttcaagccccagtacaaggccgccgaccccatcagcaccttcctgttcagcatctgcgccctgggcagcaccgcccccaccctgagagacgtgctgagaatcctgatggagggcacccccagaaacgtgggcttcgagcccgtgagagacaccctgctgagcgtgcccggcgtgagagccacccacgagctgcacctgtgggccctgaccctgacctaccacgtggccagcgcccacctggccatcgacagcaccgccgaccccgaggccgtgctggccgaggccagcagcagactgtacagcagattcggcttcagcagctgcaccctgcaggtggagcagtaccagcccgagatggcccagtgcctgagatgccaggagcccccccaggcctag

SEQ ID NO: 89503 - DNA, 363 bp, synthetic construct
  misc_feature 1..363: note = Description of Artificial Sequence: Synthetic coding sequence
  source 1..363: mol_type = other DNA
atgtgccacctgtacgagggccccgtggtgggcggctggtacaaggtgctggacagattcatccccggcaccaccaaggtggacgccctgaagaagatgctgctggaccagggcggcttcgccccctgcttcctgggctgcttcctgcccctggtgggcgccctgaacggcctgagcgcccaggacaactgggccaagctgcagagagactaccccgacgccctgatcaccaactactacctgtggcccgccgtgcagctggccaacttctacctggtgcccctgcactacagactggccgtggtgcagtgcgtggccgtgatctggaacagctacctgagctggaaggcccacagactgtag

SEQ ID NO: 89504 - DNA, 531 bp, synthetic construct
  misc_feature 1..531: note = Description of Artificial Sequence: Synthetic coding sequence
  source 1..531: mol_type = other DNA
atggccctgtggagagcctaccagagagccctggccgcccacccctggaaggtgcaggtgctgaccgccggcagcctgatgggcctgggcgacatcatcagccagcagctggtggagagaagaggcctgcaggagcaccagagaggcagaaccctgaccatggtgagcctgggctgcggcttcgtgggccccgtggtgggcggctggtacaaggtgctggacagattcatccccggcaccaccaaggtggacgccctgaagaagatgctgctggaccagggcggcttcgccccctgcttcctgggctgcttcctgcccctggtgggcgccctgaacggcctgagcgcccaggacaactgggccaagctgcagagagactaccccgacgccctgatcaccaactactacctgtggcccgccgtgcagctggccaacttctacctggtgcccctgcactacagactggccgtggtgcagtgcgtggccgtgatctggaacagctacctgagctggaaggcccacagactgtag

SEQ ID NO: 89505 - DNA, 513 bp, synthetic construct
  misc_feature 1..513: note = Description of Artificial Sequence: Synthetic coding sequence
  source 1..513: mol_type = other DNA
atggccctgtggagagcctaccagagagccctggccgcccacccctggaaggtgcaggtgctgaccgccggcagcctgatgggcctgggcgacatcatcagccagcagctggtggagagaagaggcctgcaggagcaccagagaggcagaaccctgaccatggtgagcctgggctgcggcttcgtgggccccgtggtgggcggctggtacaaggtgctggacagattcatccccggcaccaccaaggtggacgccctgaagaagatgctgctggaccagggcggcttcgccccctgcttcctgggctgcttcctgcccctggtgggcgccctgaacggcctgagcgcccaggacaactgggccaagctgcagagagactaccccgacgccctgatcaccaactactacgtgggcagatgccccatgtgctgctgctacctggagctgctgcccgtgctggagggcaccagcgccctgagcctgccccacagcatcgtgagcaccctgcagtag

SEQ ID NO: 89506 - DNA, 342 bp, synthetic construct
  misc_feature 1..342: note = Description of Artificial Sequence: Synthetic coding sequence
  source 1..342: mol_type = other DNA
atggccctgtggagagcctaccagagagccctggccgcccacccctggaaggtgcaggtgctgaccgccggcagcctgatgggcctgggcgacatcatcagccagcagctggtggagagaagaggcctgcaggagcaccagagaggcagaaccctgaccatggtgagcctgggctgcggcttcgtggactaccccgacgccctgatcaccaactactacctgtggcccgccgtgcagctggccaacttctacctggtgcccctgcactacagactggccgtggtgcagtgcgtggccgtgatctggaacagctacctgagctggaaggcccacagactgtag

SEQ ID NO: 89507 - DNA, 576 bp, synthetic construct
  misc_feature 1..576: note = Description of Artificial Sequence: Synthetic coding sequence
  source 1..576: mol_type = other DNA
atggccctgtggagagcctaccagagagccctggccgcccacccctggaaggtgcaggtgctgaccgccgcccaccccagaagatgccccgacaacacctgcgtgccctgcatcggcagcctgatgggcctgggcgacatcatcagccagcagctggtggagagaagaggcctgcaggagcaccagagaggcagaaccctgaccatggtgagcctgggctgcggcttcgtgggccccgtggtgggcggctggtacaaggtgctggacagattcatccccggcaccaccaaggtggacgccctgaagaagatgctgctggaccagggcggcttcgccccctgcttcctgggctgcttcctgcccctggtgggcgccctgaacggcctgagcgcccaggacaactgggccaagctgcagagagactaccccgacgccctgatcaccaactactacctgtggcccgccgtgcagctggccaacttctacctggtgcccctgcactacagactggccgtggtgcagtgcgtggccgtgatctggaacagctacctgagctggaaggcccacagactgtag

SEQ ID NO: 89508 - DNA, 348 bp, synthetic construct
  misc_feature 1..348: note = Description of Artificial Sequence: Synthetic coding sequence
  source 1..348: mol_type = other DNA
atgggcctgggcgacatcatcagccagcagctggtggagagaagaggcctgcaggagcaccagagaggcagaaccctgaccatggtgagcctgggctgcggcttcgtgggccccgtggtgggcggctggtacaaggtgctggacagattcatccccggcaccaccaaggtggacgccctgaagaagatgctgctggaccagggcggcttcgccccctgcttcctgggctgcttcctgcccctggtgggcgccctgaacggcctgagcgcccaggacaactgggccaagctgcagagagactaccccgacgccctgatcaccaactactacctgtggcccgccgtgtag

SEQ ID NO: 89509 - DNA, 366 bp, synthetic construct
  misc_feature 1..366: note = Description of Artificial Sequence: Synthetic coding sequence
  source 1..366: mol_type = other DNA
tgaagcctgatgggcctgggcgacatcatcagccagcagctggtggagagaagaggcctgcaggagcaccagagaggcagaaccctgaccatggtgagcctgggctgcggcttcgtgggccccgtggtgggcggctggtacaaggtgctggacagattcatccccggcaccaccaaggtggacgccctgaagaagatgctgctggaccaggactaccccgacgccctgatcaccaactactacctgtggcccgccgtgcagctggccaacttctacctggtgcccctgcactacagactggccgtggtgcagtgcgtggccgtgatctggaacagctacctgagctggaaggcccacagactgtag

SEQ ID NO: 89510 - DNA, 204 bp, synthetic construct
  misc_feature 1..204: note = Description of Artificial Sequence: Synthetic coding sequence
  source 1..204: mol_type = other DNA
tgagacagccagggcaagaagaccggcttcaccggcatcaagaagggcgactaccccgacgccctgatcaccaactactacctgtggcccgccgtgcagctggccaacttctacctggtgcccctgcactacagactggccgtggtgcagtgcgtggccgtgatctggaacagctacctgagctggaaggcccacagactgtag

SEQ ID NO: 89511 - DNA, 912 bp, synthetic construct
  misc_feature 1..912: note = Description of Artificial Sequence: Synthetic coding sequence
  source 1..912: mol_type = other DNA
atggcccccgccgccgacatgaccagcctgcccctgggcgtgaaggtggaggacagcgccttcggcaagcccgccggcggcggcgccggccaggcccccagcgccgccgccgccaccgccgccgccatgggcgccgacgaggagggcgccaagcccaaggtgagccccagcctgctgcccttcagcgtggaggccctgatggccgaccacagaaagcccggcgccaaggagagcgccctggcccccagcgagggcgtgcaggccgccggcggcagcgcccagcccctgggcgtgccccccggcagcctgggcgcccccgacgcccccagcagccccagacccctgggccacttcagcgtgggcggcctgctgaagctgcccgaggacgccctggtgaaggccgagagccccgagaagcccgagagaaccccctggatgcagagccccagattcagccccccccccgccagaagactgagcccccccgcctgcaccctgagaaagcacaagaccaacagaaagcccagaacccccttcaccaccgcccagctgctggccctggagagaaagttcagacagaagcagtacctgagcatcgccgagagagccgagttcagcagcagcctgagcctgaccgagacccaggtgaagatctggttccagaacagaagagccaaggccaagagactgcaggaggccgagctggagaagctgaagatggccgccaagcccatgctgccccccgccgccttcggcctgagcttccccctgggcggccccgccgccgtggccgccgccgccggcgccagcctgtacggcgccagcggccccttccagagagccgccctgcccgtggcccccgtgggcctgtacaccgcccacgtgggctacagcatgtaccacctgacctag

SEQ ID NO: 89512 - DNA, 804 bp, synthetic construct
  misc_feature 1..804: note = Description of Artificial Sequence: Synthetic coding sequence
  source 1..804: mol_type = other DNA
atggccagccccagcaagggcaacgacctgttcagccccgacgaggagggccccgccgtggtggccggccccggccccggccccggcggcgccgagggcgccgccgaggagagaagagtgaaggtgagcagcctgcccttcagcgtggaggccctgatgagcgacaagaagccccccaaggaggccagccccctgcccgccgagagcgccagcgccggcgccaccctgagacccctgctgctgagcggccacggcgccagagaggcccacagccccggccccctggtgaagcccttcgagaccgccagcgtgaagagcgagaacagcgaggacggcgccgcctggatgcaggagcccggcagatacagccccccccccagacacatgagccccaccacctgcaccctgagaaagcacaagaccaacagaaagcccagaacccccttcaccaccagccagctgctggccctggagagaaagttcagacagaagcagtacctgagcatcgccgagagagccgagttcagcagcagcctgaacctgaccgagacccaggtgaagatctggttccagaacagaagagccaaggccaagagactgcaggaggccgagctggagaagctgaagatggccgccaagcccatgctgcccagcagcttcagcctgcccttccccatcagcagccccctgcaggccgccagcatctacggcgccagctaccccttccacagacccgtgctgcccatcccccccgtgggcctgtacgccacccccgtgggctacggcatgtaccacctgagctag

SEQ ID NO: 89513 - DNA, 981 bp, synthetic construct
  misc_feature 1..981: note = Description of Artificial Sequence: Synthetic coding sequence
  source 1..981: mol_type = other DNA
atgaacaccagccccggcaccgtgggcagcgaccccgtgatcctggccaccgccggctacgaccacaccgtgagattctggcaggcccacagcggcatctgcaccagaaccgtgcagcaccaggacagccaggtgaacgccctggaggtgacccccgacagaagcatgatcgccgccgccggctaccagcacatcagaatgtacgacctgaacagcaacaaccccaaccccatcatcagctacgacggcgtgaacaagaacatcgccagcgtgggcttccacgaggacggcagatggatgtacaccggcggcgaggactgcaccgccagaatctgggacctgagaagcagaaacctgcagtgccagagaatcttccaggtgaacgcccccatcaactgcgtgtgcctgcaccccaaccaggccgagctgatcgtgggcgaccagagcggcgccatccacatctgggacctgaagaccgaccacaacgagcagctgatccccgagcccgaggtgagcatcaccagcgcccacatcgaccccgacgccagctacatggccgccgtgaacagcaccggcaactgctacgtgtggaacctgaccggcggcatcggcgacgaggtgacccagctgatccccaagaccaagatccccgcccacaccagatacgccctgcagtgcagattcagccccgacagcaccctgctggccacctgcagcgccgaccagacctgcaagatctggagaaccagcaacttcagcctgatgaccgagctgagcatcaagagcggcaaccccggcgagagcagcagaggctggatgtggggctgcgccttcagcggcgacagccagtacatcgtgaccgccagcagcgacaacctggccagactgtggtgcgtggagaccggcgagatcaagagagagtacggcggccaccagaaggccgtggtgtgcctggccttcaacgacagcgtgctgggctag

SEQ ID NO: 89514 - DNA, 981 bp, synthetic construct; identical to SEQ ID NO: 89513
  misc_feature 1..981: note = Description of Artificial Sequence: Synthetic coding sequence
  source 1..981: mol_type = other DNA

SEQ ID NO: 89515 - DNA, 984 bp, synthetic construct
  misc_feature 1..984: note = Description of Artificial Sequence: Synthetic coding sequence
  source 1..984: mol_type = other DNA
atgaacaccagccccggcaccgtgggcagcgaccccgtgatcctggccaccgccggctacgaccacaccgtgagattctggcaggcccacagcggcatctgcaccagaaccgtgcagcaccaggacagccaggtgaacgccctggaggtgacccccgacagaagcatgatcgccgccgccggctaccagcacatcagaatgtacgacctgaacagcaacaaccccaaccccatcatcagctacgacggcgtgaacaagaacatcgccagcgtgggcttccacgaggacggcagatggatgtacaccggcggcgaggactgcaccgccagaatctgggacctgagaagcagaaacctgcagtgccagagaatcttccaggtgaacgcccccatcaactgcgtgtgcctgcaccccaaccaggccgagctgatcgtgggcgaccagagcggcgccatccacatctgggacctgaagaccgaccacaacgagcagctgatccccgagcccgaggtgagcatcaccagcgcccacatcgaccccgacgccagctacatggccgccgtgaacagcaccggcaactgctacgtgtggaacctgaccggcggcatcggcgacgaggtgacccagctgatccccaagaccaagatccccgcccacaccagatacgccctgcagtgcagattcagccccgacagcaccctgctggccacctgcagcgccgaccagacctgcaagatctggagaaccagcaacttcagcctgatgaccgagctgagcatcaagagcggcaaccccggcgagagcagcagaggctggatgtggggctgcgccttcagcggcgacagccagtacatcgtgaccggcgagcccagacccggcctgccccacccctggccccccgccctggccagcagagccagcccccccagactgcagctgcccctgtgctggggcagactgctgggcctgcacctgagaagctag

SEQ ID NO: 89516 - DNA, 654 bp, synthetic construct
  misc_feature 1..654: note = Description of Artificial Sequence: Synthetic coding sequence
  source 1..654: mol_type = other DNA
atggagcacgccccctggagccccggcgccagcagcagagccagagccggccacaccatgaacaccagccccggcaccgtgggcagcgaccccgtgatcctggccaccgccggctacgaccacaccgtgagattctggcaggcccacagcggcatctgcaccagaaccgtgcagcaccaggacagccaggtgaacgccctggaggtgacccccgacagaagcatgatcgccgccgccggctaccagcacatcagaatgtacgacctgaacagcaacaaccccaaccccatcatcagctacgacggcgtgaacaagaacatcgccagcgtgggcttccacgaggacggcagatggatgtacaccggcggcgaggactgcaccgccagaatctgggacctgagaagcagaaacctgcagtgccagagaatcttccaggtgaacgcccccatcaactgcgtgtgcctgcaccccaaccaggccgagctgatcgtgggcgaccagagcggcgccatccacatctgggacctgaagaccgaccacaacgagcagctgatccccgagcccgaggtgagcatcaccagcgcccacatcgaccccgacgccagctacatggccgccgtgaacagcaccgcccccagacacctgctgggctag

SEQ ID NO: 89517 - DNA, 981 bp, synthetic construct; identical to SEQ ID NO: 89513
  misc_feature 1..981: note = Description of Artificial Sequence: Synthetic coding sequence
  source 1..981: mol_type = other DNA

SEQ ID NO: 89518 - DNA, 981 bp, synthetic construct; identical to SEQ ID NO: 89513
  misc_feature 1..981: note = Description of Artificial Sequence: Synthetic coding sequence
  source 1..981: mol_type = other DNA

SEQ ID NO: 89519 - DNA, 1473 bp, synthetic construct
  misc_feature 1..1473: note = Description of Artificial Sequence: Synthetic coding sequence
  source 1..1473: mol_type = other DNA
atggcccagagagccgtgtggctgatcagccacgagcccggcacccccctgtgcggcaccgtgagattcagcagaagataccccaccgtggagaagagagccagagtgttcaacggcgccagctacgtgcccgtgcccgaggacggccccttcctgaaggccctgctgttcgagctgagactgctggacgacgacaaggacttcgtggagagcagagacagctgcagcagaatcaacaagaccagcatctacggcctgctgatcggcggcgaggagctgtggcccgtggtggccttcctgaagaacgacatgatctacgcctgcgtgcccctggtggagcagaccctgagccccagaccccccctgatcagcgtgagcggcgtgagccagggcttcgagttcctgttcggcatccaggacttcctgtacagcggccagaagaacgacagcgagctgaacaccaagctgagccagctgcccgacctgctgctgcaggcctgccccttcggcaccctgctggacgccaacctgcagaacagcctggacaacaccaacttcgccagcgtgacccagccccagaagcagcccgcctggaagaccggcacctacaagggcaagccccaggtgagcatcagcatcaccgagaaggtgaagagcatgcagtacgacaagcagggcatcgccgacacctggcaggtggtgggcaccgtgacctgcaagtgcgacctggagggcatcatgcccaacgtgaccatcagcctgagcctgcccaccaacggcagccccctgcaggacatcctggtgcacccctgcgtgaccagcctggacagcgccatcctgaccagcagcagcatcgacgccatggacgacagcgccttcagcggcccctacaagttccccttcaccccccccctggagagcttcaacctgtgcttctacaccagccaggtgcccgtgccccccatcctgggcttctaccagatgaaggaggaggaggtgcagctgagaatcaccatcaacctgaagctgcacgagagcgtgaagaacaacttcgagttctgcgaggcccacatccccttctacaacagaggccccatcacccacctggagtacaagaccagcttcggccagctggaggtgttcagagagaagagcctgctgatctggatcatcggccagaagttccccaagagcatggagatcagcctgagcggcaccgtgaccttcggcgccaagagccacgagaagcagcccttcgaccccatctgcaccggcgagaccgcctacctgaagctgcacttcagaatcctggactacaccctgaccggctgctacgccgaccagcacagcgtgcaggtgttcgccagcggcaagcccaagatcagcgcccacagaaagctgatcagcagcgactactacatctggaacagcaaggcccccgcccccgtgacctacggcagcctgctgctgtag

SEQ ID NO: 89520 - DNA, 16437 bp, synthetic construct
  misc_feature 1..16437: note = Description of Artificial Sequence: Synthetic coding sequence
  source 1..16437: mol_type = other DNA
atgctggtgatctggatcctgaccctggccctgagactgtgcgccagcgtgaccaccgtgacccccgagggcagcgccgtgcacaaggccatcagccagcagggcaccctgtggaccggcgaggtgctggagaagcagaccgtggagcagggcaagagcaccctgagaagacagaagaaccacttccacagaagcgccggcgagctgagatgcagaaacgccctgaaggacgagggcgccagcgccggctggagcgtgatgttcgccggcgagagcgtggtggtgctggtgcacctgtggatgaccggcgccagagtgaagaacctgggcctggtggagttcgccagccccggcgacgacggcgacggcagagccgagggcttcagcctgggcctgcccctgagcgagcaggccagagccgccggcgccagagagaaggagagacaggagaccgtgatcaaccacagcaccttcagcggcttcagccagatcaccggcagcaccgtgaacaccagcatcggcggcaacaccaccagcgccagcacccccagcagcagcgaccccttcaccaccttcagcgactacggcgtgagcgtgaccttcatcaccggcagcaccgccaccaagcacttcctggacagcagcaccaacagcggccacagcgaggagagcaccgtgagccacagcggccccggcgccaccggcaccaccctgttccccagccacagcgccaccagcgtgttcgtgggcgagcccaagaccagccccatcaccagcgccagcatggagaccaccgccctgcccggcagcaccaccaccgccggcctgagcgagaagagcaccaccttctacagcagccccagaagccccgacagaaccctgagccccgccagaaccaccagcagcggcgtgagcgagaagagcaccaccagccacagcagacccggccccacccacaccatcgccttccccgacagcaccaccatgcccggcgtgagccaggagagcaccgccagccacagcatccccggcagcaccgacaccaccctgagccccggcaccaccacccccagcagcctgggccccgagagcaccaccttccacagcagccccggctacaccaagaccaccagactgcccgacaacaccaccaccagcggcctgctggaggccagcacccccgtgcacagcagcaccggcagcccccacaccaccctgagccccagcagcagcaccacccacgagggcgagcccaccaccttccagagctggcccagcagcaaggacaccagccccgcccccagcggcaccaccagcgccttcgtgaagctgagcaccacctaccacagcagccccagcagcacccccaccacccacttcagcgccagcagcaccaccctgggccacagcgaggagagcacccccgtgcacagcagccccgtggccaccgccaccacccccccccccgccagaagcgccaccagcggccacgtggaggagagcaccgcctaccacagaagccccggcagcacccagaccatgcacttccccgagagcagcaccaccagcggccacagcgaggagagcgccaccttccacggcagcaccacccacaccaagagcagcacccccagcaccaccgccgccctggcccacaccagctaccacagcagcctgggcagcaccgagaccacccacttcagagacagcagcaccatcagcggcagaagcgaggagagcaaggccagccacagcagccccgacgccatggccaccaccgtgctgcccgccggcagcacccccagcgtgctggtgggcgacagcacccccagccccatcagcagcggcagcatggagaccaccgccctgcccggcagcaccaccaagcccggcctgagcgagaagagcaccaccttctacagcagccccagaagccccgacaccacccacctgcccgccagcatgaccagcagcggcgtgagcgaggagagcaccaccagccacagcagacccggcagcacccacaccaccgccttccccggcagcaccaccatgcccggcctgagccaggagagcaccgccagccacagcagccccggccccaccgacaccaccctgagccccggcagcaccaccgccagcagcctgggccccgagtacaccaccttccacagcagacccggcagcaccgagaccaccctgctgcccgacaacaccaccgccagcggcctgctggaggccagcatgcccgtgcacagcagcaccagaagcccccacaccaccctgagccccgccggcagcaccaccagacagggcgagagcaccaccttccacagctggcccagcagcaaggacaccagacccgccccccccaccaccaccagcgccttcgtggagcccagcaccaccagccacggcagccccagcagcatccccaccacccacatcagcgccagaagcaccaccagcggcctggtggaggagagcaccacctaccacagcagccccggcagcacccagaccatgcacttccccgagagcgacaccaccagcggcagaggcgaggagagcaccaccagccacagcagcaccacccacaccatcagcagcgcccccagcaccaccagcgccctggtggaggagcccaccagctaccacagcagccccggcagcaccgccaccacccacttccccgacagcagcaccaccagcggcagaagcgaggagagcaccgccagccacagcagccaggacgccaccggcaccatcgtgctgcccgccagaagcaccaccagcgtgctgctgggcgagagcaccaccagccccatcagcagcggcagcatggagaccaccgccctgcccggcagcaccaccacccccggcctgagcgagagaagcaccaccttccacagcagccccagaagccccgccaccaccctgagccccgccagcaccaccagcagcggcgtgagcgaggagagcaccaccagcagaagcagacccggcagcacccacaccaccgccttccccgacagcaccaccacccccggcctgagcagacacagcaccaccagccacagcagccccggcagcaccgacaccaccctgctgcccgccagcaccaccaccagcggccccagccaggagagcaccaccagccacagcagcagcggcagcaccgacaccgccctgagccccggcagcaccaccgccctgagcttcggccaggagagcaccaccttccacagcaaccccggcagcacccacaccaccctgttccccgacagcaccaccagcagcggcatcgtggaggccagcaccagagtgcacagcagcaccggcagccccagaaccaccctgagccccgccagcagcaccagccccggcctgcagggcgagagcaccgccttccagacccaccccgccagcacccacaccacccccagcccccccagcaccgccaccgcccccgtggaggagagcaccacctaccacagaagccccggcagcacccccaccacccacttccccgccagcagcaccaccagcggccacagcgagaagagcaccatcttccacagcagccccgacgccagcggcaccacccccagcagcgcccacagcaccaccagcggcagaggcgagagcaccaccagcagaatcagccccggcagcaccgagatcaccaccctgcccggcagcaccaccacccccggcctgagcgaggccagcaccaccttctacagcagccccagaagccccaccaccaccctgagccccgccagcatgaccagcctgggcgtgggcgaggagagcaccaccagcagaagccagcccggcagcacccacagcaccgtgagccccgccagcaccaccacccccggcctgagcgaggagagcaccaccgtgtacagcagcagcagaggcagcaccgagaccaccgtgttcccccacagcaccaccaccagcgtgcacggcgaggagcccaccaccttccacagcagacccgccagcacccacaccaccctgttcaccgaggacagcaccaccagcggcctgaccgaggagagcaccgccttccccggcagccccgccagcacccagaccggcctgcccgccaccctgaccaccgccgacctgggcgaggagagcaccaccttccccagcagcagcggcagcaccggcaccaagctgagccccgccagaagcaccaccagcggcctggtgggcgagagcacccccagcagactgagccccagcagcaccgagaccaccaccctgcccggcagccccaccacccccagcctgagcgagaagagcaccaccttctacaccagccccagaagccccgacgccaccctgagccccgccaccaccaccagcagcggcgtgagcgaggagagcagcaccagccacagccagcccggcagcacccacaccaccgccttccccgacagcaccaccaccagcgacctgagccaggagcccaccaccagccacagcagccagggcagcaccgaggccaccctgagccccggcagcaccaccgccagcagcctgggccagcagagcaccaccttccacagcagccccggcgacaccgagaccaccctgctgcccgacgacaccatcaccagcggcctggtggaggccagcacccccacccacagcagcaccggcagcctgcacaccaccctgacccccgccagcagcaccagcgccggcctgcaggaggagagcaccaccttccagagctggcccagcagcagcgacaccacccccagcccccccggcaccaccgccgcccccgtggaggtgagcaccacctaccacagcagacccagcagcacccccaccacccacttcagcgccagcagcaccaccctgggcagaagcgaggagagcaccaccgtgcacagcagccccggcgccaccggcaccgccctgttccccaccagaagcgccaccagcgtgctggtgggcgagcccaccaccagccccatcagcagcggcagcaccgagaccaccgccctgcccggcagcaccaccaccgccggcctgagcgagaagagcaccaccttctacagcagccccagaagccccgacaccaccctgagccccgccagcaccaccagcagcggcgtgagcgaggagagcaccaccagccacagcagacccggcagcacccacaccaccgccttccccggcagcaccaccatgcccggcgtgagccaggagagcaccgccagccacagcagccccggcagcaccgacaccaccctgagccccggcagcaccaccgccagcagcctgggccccgagagcaccaccttccacagcagccccggcagcaccgagaccaccctgctgcccgacaacaccaccgccagcggcctgctggaggccagcacccccgtgcacagcagcaccggcagcccccacaccaccctgagccccgccggcagcaccaccagacagggcgagagcaccaccttccagagctggcccagcagcaaggacaccatgcccgccccccccaccaccaccagcgccttcgtggagctgagcaccaccagccacggcagccccagcagcacccccaccacccacttcagcgccagcagcaccaccctgggcagaagcgaggagagcaccaccgtgcacagcagccccgtggccaccgccaccacccccagccccgccagaagcaccaccagcggcctggtggaggagagcaccgcctaccacagcagccccggcagcacccagaccatgcacttccccgagagcagcaccgccagcggcagaagcgaggagagcagaaccagccacagcagcaccacccacaccatcagcagcccccccagcaccaccagcgccctggtggaggagcccaccagctaccacagcagccccggcagcaccgccaccacccacttccccgacagcagcaccaccagcggcagaagcgaggagagcaccgccagccacagcagccaggacgccaccggcaccatcgtgctgcccgccagaagcaccaccagcgtgctgctgggcgagagcaccaccagccccatcagcagcggcagcatggagaccaccgccctgcccggcagcaccaccacccccggcctgagcgagaagagcaccaccttccacagcagccccagaagccccgccaccaccctgagccccgccagcaccaccagcagcggcgtgagcgaggagagcaccaccagccacagcagacccggcagcacccacaccaccgccttccccgacagcaccaccacccccggcctgagcagacacagcaccaccagccacagcagccccggcagcaccgacaccaccctgctgcccgccagcaccaccaccagcggccccagccaggagagcaccaccagccacagcagccccggcagcaccgacaccgccctgagccccggcagcaccaccgccctgagcttcggccaggagagcaccaccttccacagcagccccggcagcacccacaccaccctgttccccgacagcaccaccagcagcggcatcgtggaggccagcaccagagtgcacagcagcaccggcagccccagaaccaccctgagccccgccagcagcaccagccccggcctgcagggcgagagcaccgccttccagacccaccccgccagcacccacaccacccccagcccccccagcaccgccaccgcccccgtggaggagagcaccacctaccacagaagccccggcagcacccccaccacccacttccccgccagcagcaccaccagcggccacagcgagaagagcaccatcttccacagcagccccgacgccagcggcaccacccccagcagcgcccacagcaccaccagcggcagaggcgagagcaccaccagcagaatcagccccggcagcaccgagatcaccaccctgcccggcagcaccaccacccccggcctgagcgaggccagcaccaccttctacagcagccccagaagccccaccaccaccctgagccccgccagcatgaccagcctgggcgtgggcgaggagagcaccaccagcagaagccagcccggcagcacccacagcaccgtgagccccgccagcaccaccacccccggcctgagcgaggagagcaccaccgtgtacagcagcagccccggcagcaccgagaccaccgtgttccccagaacccccaccaccagcgtgagaggcgaggagcccaccaccttccacagcagacccgccagcacccacaccaccctgttcaccgaggacagcaccaccagcggcctgaccgaggagagcaccgccttccccggcagccccgccagcacccagaccggcctgcccgccaccctgaccaccgccgacctgggcgaggagagcaccaccttccccagcagcagcggcagcaccggcaccaccctgagccccgccagaagcaccaccagcggcctggtgggcgagagcacccccagcagactgagccccagcagcaccgagaccaccaccctgcccggcagccccaccacccccagcctgagcgagaagagcaccaccttctacaccagccccagaagccccgacgccaccctgagccccgccaccaccaccagcagcggcgtgagcgaggagagcagcaccagccacagccagcccggcagcacccacaccaccgccttccccgacagcaccaccacccccggcctgagcagacacagcaccaccagccacagcagccccggcagcaccgacaccaccctgctgcccgccagcaccaccaccagcggccccagccaggagagcaccaccagccacagcagccccggcagcaccgacaccgccctgagccccggcagcaccaccgccctgagcttcggccaggagagcaccaccttccacagcagccccggcagcacccacaccaccctgttccccgacagcaccaccagcagcggcatcgtggaggccagcaccagagtgcacagcagcaccggcagccccagaaccaccctgagccccgccagcagcaccagccccggcctgcagggcgagagcaccaccttccagacccaccccgccagcacccacaccacccccagcccccccagcaccgccaccgcccccgtggaggagagcaccacctaccacagaagccccggcagcacccccaccacccacttccccgccagcagcaccaccagcggccacagcgagaagagcaccatcttccacagcagccccgacgccagcggcaccacccccagcagcgcccacagcaccaccagcggcagaggcgagagcaccaccagcagaatcagccccggcagcaccgagatcaccaccctgcccggcagcaccaccacccccggcctgagcgaggccagcaccaccttctacagcagccccagaagccccaccaccaccctgagccccgccagcatgaccagcctgggcgtgggcgaggagagcaccaccagcagaagccagcccggcagcacccacagcaccgtgagccccgccagcaccaccacccccggcctgagcgaggagagcaccaccgtgtacagcagcagccccggcagcaccgagaccaccgtgttccccagaagcaccaccaccagcgtgagaggcgaggagcccaccaccttccacagcagacccgccagcacccacaccaccctgttcaccgaggacagcaccaccagcggcctgaccgaggagagcaccgccttccccggcagccccgccagcacccagaccggcctgcccgccaccctgaccaccgccgacctgggcgaggagagcaccaccttccccagcagcagcggcagcaccggcaccaccctgagccccgccagaagcaccaccagcggcctggtgggcgagagcacccccagcagactgagccccagcagcaccgagaccaccaccctgcccggcagccccaccacccccagcctgagcgagaagagcaccaccttctacaccagccccagaagccccgacgccaccctgagccccgccaccaccaccagcagcggcgtgagcgaggagagcagcaccagccacagccagcccggcagcacccacaccaccgccttccccgacagcaccaccaccagcggcctgagccaggagcccaccgccagccacagcagccagggcagcaccgaggccaccctgagccccggcagcaccaccgccagcagcctgggccagcagagcaccaccttccacagcagccccggcgacaccgagaccaccctgctgcccgacgacaccatcaccagcggcctggtggaggccagcacccccacccacagcagcaccggcagcctgcacaccaccctgacccccgccagcagcaccagcgccggcctgcaggaggagagcaccaccttccagagctggcccagcagcagcgacaccacccccagcccccccggcaccaccgccgcccccgtggaggtgagcaccacctaccacagcagacccagcagcacccccaccacccacttcagcgccagcagcaccaccctgggcagaagcgaggagagcaccaccgtgcacagcagccccggcgccaccggcaccgccctgttccccaccagaagcgccaccagcgtgctggtgggcgagcccaccaccagccccatcagcagcggcagcaccgagaccaccgccctgcccggcagcaccaccaccgccggcctgagcgagaagagcaccaccttctacagcagccccagaagccccgacaccaccctgagccccgccagcaccaccagcagcggcgtgagcgaggagagcaccaccagccacagcagacccggcagcacccacaccaccgccttccccggcagcaccaccatgcccggcgtgagccaggagagcaccgccagccacagcagccccggcagcaccgacaccaccctgagccccggcagcaccaccgccagcagcctgggccccgagagcaccaccttccacagcggccccggcagcaccgagaccaccctgctgcccgacaacaccaccgccagcggcctgctggaggccagcacccccgtgcacagcagcaccggcagcccccacaccaccctgagccccgccggcagcaccaccagacagggcgagagcaccaccttccagagctggcccaacagcaaggacaccacccccgccccccccaccaccaccagcgccttcgtggagctgagcaccaccagccacggcagccccagcagcacccccaccacccacttcagcgccagcagcaccaccctgggcagaagcgaggagagcaccaccgtgcacagcagccccgtggccaccgccaccacccccagccccgccagaagcaccaccagcggcctggtggaggagagcaccacctaccacagcagccccggcagcacccagaccatgcacttccccgagagcgacaccaccagcggcagaggcgaggagagcaccaccagccacagcagcaccacccacaccatcagcagcgcccccagcaccaccagcgccctggtggaggagcccaccagctaccacagcagccccggcagcaccgccaccacccacttccccgacagcagcaccaccagcggcagaagcgaggagagcaccgccagccacagcagccaggacgccaccggcaccatcgtgctgcccgccagaagcaccaccagcgtgctgctgggcgagagcaccaccagccccatcagcagcggcagcatggagaccaccgccctgcccggcagcaccaccacccccggcctgagcgagaagagcaccaccttccacagcagccccagaagccccgccaccaccctgagccccgccagcaccaccagcagcggcgtgagcgaggagagcaccaccagccacagcagacccggcagcacccacaccaccgccttccccgacagcaccaccacccccggcctgagcagacacagcaccaccagccacagcagccccggcagcaccgacaccaccctgctgcccgccagcaccaccaccagcggcagcagccaggagagcaccaccagccacagcagcagcggcagcaccgacaccgccctgagccccggcagcaccaccgccctgagcttcggccaggagagcaccaccttccacagcagccccggcagcacccacaccaccctgttccccgacagcaccaccagcagcggcatcgtggaggccagcaccagagtgcacagcagcaccggcagccccagaaccaccctgagccccgccagcagcaccagccccggcctgcagggcgagagcaccgccttccagacccaccccgccagcacccacaccacccccagcccccccagcaccgccaccgcccccgtggaggagagcaccacctaccacagaagccccggcagcacccccaccacccacttccccgccagcagcaccaccagcggccacagcgagaagagcaccatcttccacagcagccccgacgccagcggcaccacccccagcagcgcccacagcaccaccagcggcagaggcgagagcaccaccagcagaatcagccccggcagcaccgagatcaccaccctgcccggcagcaccaccacccccggcctgagcgaggccagcaccaccttctacagcagccccagaagccccaccaccaccctgagccccgccagcatgaccagcctgggcgtgggcgaggagagcaccaccagcagaagccagcccggcagcacccacagcaccgtgagccccgccagcaccaccacccccggcctgagcgaggagagcaccaccgtgtacagcagcagccccggcagcaccgagaccaccgtgttccccagaagcaccaccaccagcgtgagaagagaggagcccaccaccttccacagcagacccgccagcacccacaccaccctgttcaccgaggacagcaccaccagcggcctgaccgaggagagcaccgccttccccggcagccccgccagcacccagaccggcctgcccgccaccctgaccaccgccgacctgggcgaggagagcaccaccttccccagcagcagcggcagcaccggcaccaagctgagccccgccagaagcaccaccagcggcctggtgggcgagagcacccccagcagactgagccccagcagcaccgagaccaccaccctgcccggcagccccaccacccccagcctgagcgagaagagcaccaccttctacaccagccccagaagccccgacgccaccctgagccccgccaccaccaccagcagcggcgtgagcgaggagagcagcaccagccacagccagcccggcagcacccacaccaccgccttccccgacagcaccaccaccagcggcctgagccaggagcccaccaccagccacagcagccagggcagcaccgaggccaccctgagccccggcagcaccaccgccagcagcctgggccagcagagcaccaccttccacagcagccccggcgacaccgagaccaccctgctgcccgacgacaccatcaccagcggcctggtggaggccagcacccccacccacagcagcaccggcagcctgcacaccaccctgacccccgccagcagcaccagcaccggcctgcaggaggagagcaccaccttccagagctggcccagcagcagcgacaccacccccagcccccccagcaccaccgccgtgcccgtggaggtgagcaccacctaccacagcagacccagcagcacccccaccacccacttcagcgccagcagcaccaccctgggcagaagcgaggagagcaccaccgtgcacagcagccccggcgccaccggcaccgccctgttccccaccagaagcgccaccagcgtgctggtgggcgagcccaccaccagccccatcagcagcggcagcaccgagaccaccgccctgcccggcagcaccaccaccgccggcctgagcgagaagagcaccaccttctacagcagccccagaagccccgacaccaccctgagccccgccagcaccaccagcagcggcgtgagcgaggagagcaccaccagccacagcagacccggcagcatgcacaccaccgccttccccagcagcaccaccatgcccggcgtgagccaggagagcaccgccagccacagcagccccggcagcaccgacaccaccctgagccccggcagcaccaccgccagcagcctgggccccgagagcaccaccttccacagcagccccggcagcaccgagaccaccctgctgcccgacaacaccaccgccagcggcctgctggaggccagcacccccgtgcacagcagcaccggcagcccccacaccaccctgagccccgccggcagcaccaccagacagggcgagagcaccaccttccagagctggcccaacagcaaggacaccacccccgccccccccaccaccaccagcgccttcgtggagctgagcaccaccagccacggcagccccagcagcacccccaccacccacttcagcgccagcagcaccaccctgggcagaagcgaggagagcaccaccgtgcacagcagccccgtggccaccgccaccacccccagccccgccagaagcaccaccagcggcctggtggaggagagcaccacctaccacagcagccccggcagcacccagaccatgcacttccccgagagcaacaccaccagcggcagaggcgaggagagcaccaccagccacagcagcaccacccacaccatcagcagcgcccccagcaccaccagcgccctggtggaggagcccaccagctaccacagcagccccggcagcaccgccaccacccacttccccgacagcagcaccaccagcggcagaagcgaggagagcaccgccagccacagcagccaggacgccaccggcaccatcgtgctgcccgccagaagcaccaccagcgtgctgctgggcgagagcaccaccagccccatcagcagcggcagcatggagaccaccgccctgcccggcagcaccaccacccccggcctgagcgagaagagcaccaccttccacagcagccccagcagcacccccaccacccacttcagcgccagcagcaccaccctgggcagaagcgaggagagcaccaccgtgcacagcagccccgtggccaccgccaccacccccagccccgccagaagcaccaccagcggcctggtggaggagagcaccgcctaccacagcagccccggcagcacccagaccatgcacttccccgagagcagcaccgccagcggcagaagcgaggagagcagaaccagccacagcagcaccacccacaccatcagcagcccccccagcaccaccagcgccctggtggaggagcccaccagctaccacagcagccccggcagcatcgccaccacccacttccccgagagcagcaccaccagcggcagaagcgaggagagcaccgccagccacagcagccccgacaccaacggcatcacccccctgcccgcccacttcaccaccagcggcagaatcgccgagagcaccaccttctacatcagccccggcagcatggagaccaccctggccagcaccgccaccacccccggcctgagcgccaagagcaccatcctgtacagcagcagcagaagccccgaccagaccctgagccccgccagcatgaccagcagcagcatcagcggcgagcccaccagcctgtacagccaggccgagagcacccacaccaccgccttccccgccagcaccaccaccagcggcctgagccaggagagcaccaccttccacagcaagcccggcagcaccgagaccaccctgagccccggcagcatcaccaccagcagcttcgcccaggagttcaccaccccccacagccagcccggcagcgccctgagcaccgtgagccccgccagcaccaccgtgcccggcctgagcgaggagagcaccaccttctacagcagccccggcagcaccgagaccaccgccttcagccacagcaacaccatgagcatccacagccagcagagcacccccttccccgacagccccggcttcacccacaccgtgctgcccgccaccctgaccaccaccgacatcggccaggagagcaccgccttccacagcagcagcgacgccaccggcaccacccccctgcccgccagaagcaccgccagcgacctggtgggcgagcccaccaccttctacatcagccccagccccacctacaccaccctgttccccgccagcagcagcaccagcggcctgaccgaggagagcaccaccttccacaccagccccagcttcaccagcaccatcgtgagcaccgagagcctggagaccctggcccccggcctgtgccaggagggccagatctggaacggcaagcagtgcgtgtgcccccagggctacgtgggctaccagtgcctgagccccctggagagcttccccgtggagacccccgagaagctgaacgccaccctgggcatgaccgtgaaggtgacctacagaaacttcaccgagaagatgaacgacgccagcagccaggagtaccagaacttcagcaccctgttcaagaacagaatggacgtggtgctgaagggcgacaacctgccccagtacagaggcgtgaacatcagaagactgctgaacggcagcatcgtggtgaagaacgacgtgatcctggaggccgactacaccctggagtacgaggagctgttcgagaacctggccgagatcgtgaaggccaagatcatgaacgagaccagaaccaccctgctggaccccgacagctgcagaaaggccatcctgtgctacagcgaggaggacaccttcgtggacagcagcgtgacccccggcttcgacttccaggagcagtgcacccagaaggccgccgagggctacacccagttctactacgtggacgtgctggacggcaagctggcctgcgtgaacaagtgcaccaagggcaccaagagccagatgaactgcaacctgggcacctgccagctgcagagaagcggccccagatgcctgtgccccaacaccaacacccactggtactggggcgagacctgcgagttcaacatcgccaagagcctggtgtacggcatcgtgggcgccgtgatggccgtgctgctgctggccctgatcatcctgatcatcctgttcagcctgagccagagaaagagacacagagagcagtacgacgtgccccaggagtggagaaaggagggcacccccggcatcttccagaagaccgccatctgggaggaccagaacctgagagagagcagattcggcctggagaacgcctacaacaacttcagacccaccctggagaccgtggacagcggcaccgagctgcacatccagagacccgagatggtggccagcaccgtgtag

SEQ ID NO: 89521 - DNA, 16008 bp, synthetic construct
  misc_feature 1..16008: note = Description of Artificial Sequence: Synthetic coding sequence
  source 1..16008: mol_type = other DNA
atgctggtgatctggatcctgaccctggccctgagactgtgcgccagcgtgaccaccgtgacccccggcagcaccgtgaacaccagcatcggcggcaacaccaccagcgccagcacccccagcagcagcgaccccttcaccaccttcagcgactacggcgtgagcgtgaccttcatcaccggcagcaccgccaccaagcacttcctggacagcagcaccaacagcggccacagcgaggagagcaccgtgagccacagcggccccggcgccaccggcaccaccctgttccccagccacagcgccaccagcgtgttcgtgggcgagcccaagaccagccccatcaccagcgccagcatggagaccaccgccctgcccggcagcaccaccaccgccggcctgagcgagaagagcaccaccttctacagcagccccagaagccccgacagaaccctgagccccgccagaaccaccagcagcggcgtgagcgagaagagcaccaccagccacagcagacccggccccacccacaccatcgccttccccgacagcaccaccatgcccggcgtgagccaggagagcaccgccagccacagcatccccggcagcaccgacaccaccctgagccccggcaccaccacccccagcagcctgggccccgagagcaccaccttccacagcagccccggctacaccaagaccaccagactgcccgacaacaccaccaccagcggcctgctggaggccagcacccccgtgcacagcagcaccggcagcccccacaccaccctgagccccagcagcagcaccacccacgagggcgagcccaccaccttccagagctggcccagcagcaaggacaccagccccgcccccagcggcaccaccagcgccttcgtgaagctgagcaccacctaccacagcagccccagcagcacccccaccacccacttcagcgccagcagcaccaccctgggccacagcgaggagagcacccccgtgcacagcagccccgtggccaccgccaccacccccccccccgccagaagcgccaccagcggccacgtggaggagagcaccgcctaccacagaagccccggcagcacccagaccatgcacttccccgagagcagcaccaccagcggccacagcgaggagagcgccaccttccacggcagcaccacccacaccaagagcagcacccccagcaccaccgccgccctggcccacaccagctaccacagcagcctgggcagcaccgagaccacccacttcagagacagcagcaccatcagcggcagaagcgaggagagcaaggccagccacagcagccccgacgccatggccaccaccgtgctgcccgccggcagcacccccagcgtgctggtgggcgacagcacccccagccccatcagcagcggcagcatggagaccaccgccctgcccggcagcaccaccaagcccggcctgagcgagaagagcaccaccttctacagcagccccagaagccccgacaccacccacctgcccgccagcatgaccagcagcggcgtgagcgaggagagcaccaccagccacagcagacccggcagcacccacaccaccgccttccccggcagcaccaccatgcccggcctgagccaggagagcaccgccagccacagcagccccggccccaccgacaccaccctgagccccggcagcaccaccgccagcagcctgggccccgagtacaccaccttccacagcagacccggcagcaccgagaccaccctgctgcccgacaacaccaccgccagcggcctgctggaggccagcatgcccgtgcacagcagcaccagaagcccccacaccaccctgagccccgccggcagcaccaccagacagggcgagagcaccaccttccacagctggcccagcagcaaggacaccagacccgccccccccaccaccaccagcgccttcgtggagcccagcaccaccagccacggcagccccagcagcatccccaccacccacatcagcgccagaagcaccaccagcggcctggtggaggagagcaccacctaccacagcagccccggcagcacccagaccatgcacttccccgagagcgacaccaccagcggcagaggcgaggagagcaccaccagccacagcagcaccacccacaccatcagcagcgcccccagcaccaccagcgccctggtggaggagcccaccagctaccacagcagccccggcagcaccgccaccacccacttccccgacagcagcaccaccagcggcagaagcgaggagagcaccgccagccacagcagccaggacgccaccggcaccatcgtgctgcccgccagaagcaccaccagcgtgctgctgggcgagagcaccaccagccccatcagcagcggcagcatggagaccaccgccctgcccggcagcaccaccacccccggcctgagcgagagaagcaccaccttccacagcagccccagaagccccgccaccaccctgagccccgccagcaccaccagcagcggcgtgagcgaggagagcaccaccagcagaagcagacccggcagcacccacaccaccgccttccccgacagcaccaccacccccggcctgagcagacacagcaccaccagccacagcagccccggcagcaccgacaccaccctgctgcccgccagcaccaccaccagcggccccagccaggagagcaccaccagccacagcagcagcggcagcaccgacaccgccctgagccccggcagcaccaccgccctgagcttcggccaggagagcaccaccttccacagcaaccccggcagcacccacaccaccctgttccccgacagcaccaccagcagcggcatcgtggaggccagcaccagagtgcacagcagcaccggcagccccagaaccaccctgagccccgccagcagcaccagccccggcctgcagggcgagagcaccgccttccagacccaccccgccagcacccacaccacccccagcccccccagcaccgccaccgcccccgtggaggagagcaccacctaccacagaagccccggcagcacccccaccacccacttccccgccagcagcaccaccagcggccacagcgagaagagcaccatcttccacagcagccccgacgccagcggcaccacccccagcagcgcccacagcaccaccagcggcagaggcgagagcaccaccagcagaatcagccccggcagcaccgagatcaccaccctgcccggcagcaccaccacccccggcctgagcgaggccagcaccaccttctacagcagccccagaagccccaccaccaccctgagccccgccagcatgaccagcctgggcgtgggcgaggagagcaccaccagcagaagccagcccggcagcacccacagcaccgtgagccccgccagcaccaccacccccggcctgagcgaggagagcaccaccgtgtacagcagcagcagaggcagcaccgagaccaccgtgttcccccacagcaccaccaccagcgtgcacggcgaggagcccaccaccttccacagcagacccgccagcacccacaccaccctgttcaccgaggacagcaccaccagcggcctgaccgaggagagcaccgccttccccggcagccccgccagcacccagaccggcctgcccgccaccctgaccaccgccgacctgggcgaggagagcaccaccttccccagcagcagcggcagcaccggcaccaagctgagccccgccagaagcaccaccagcggcctggtgggcgagagcacccccagcagactgagccccagcagcaccgagaccaccaccctgcccggcagccccaccacccccagcctgagcgagaagagcaccaccttctacaccagccccagaagccccgacgccaccctgagccccgccaccaccaccagcagcggcgtgagcgaggagagcagcaccagccacagccagcccggcagcacccacaccaccgccttccccgacagcaccaccaccagcgacctgagccaggagcccaccaccagccacagcagccagggcagcaccgaggccaccctgagccccggcagcaccaccgccagcagcctgggccagcagagcaccaccttccacagcagccccggcgacaccgagaccaccctgctgcccgacgacaccatcaccagcggcctggtggaggccagcacccccacccacagcagcaccggcagcctgcacaccaccctgacccccgccagcagcaccagcgccggcctgcaggaggagagcaccaccttccagagctggcccagcagcagcgacaccacccccagcccccccggcaccaccgccgcccccgtggaggtgagcaccacctaccacagcagacccagcagcacccccaccacccacttcagcgccagcagcaccaccctgggcagaagcgaggagagcaccaccgtgcacagcagccccggcgccaccggcaccgccctgttccccaccagaagcgccaccagcgtgctggtgggcgagcccaccaccagccccatcagcagcggcagcaccgagaccaccgccctgcccggcagcaccaccaccgccggcctgagcgagaagagcaccaccttctacagcagccccagaagccccgacaccaccctgagccccgccagcaccaccagcagcggcgtgagcgaggagagcaccaccagccacagcagacccggcagcacccacaccaccgccttccccggcagcaccaccatgcccggcgtgagccaggagagcaccgccagccacagcagccccggcagcaccgacaccaccctgagccccggcagcaccaccgccagcagcctgggccccgagagcaccaccttccacagcagccccggcagcaccgagaccaccctgctgcccgacaacaccaccgccagcggcctgctggaggccagcacccccgtgcacagcagcaccggcagcccccacaccaccctgagccccgccggcagcaccaccagacagggcgagagcaccaccttccagagctggcccagcagcaaggacaccatgcccgccccccccaccaccaccagcgccttcgtggagctgagcaccaccagccacggcagccccagcagcacccccaccacccacttcagcgccagcagcaccaccctgggcagaagcgaggagagcaccaccgtgcacagcagccccgtggccaccgccaccacccccagccccgccagaagcaccaccagcggcctggtggaggagagcaccgcctaccacagcagccccggcagcacccagaccatgcacttccccgagagcagcaccgccagcggcagaagcgaggagagcagaaccagccacagcagcaccacccacaccatcagcagcccccccagcaccaccagcgccctggtggaggagcccaccagctaccacagcagccccggcagcaccgccaccacccacttccccgacagcagcaccaccagcggcagaagcgaggagagcaccgccagccacagcagccaggacgccaccggcaccatcgtgctgcccgccagaagcaccaccagcgtgctgctgggcgagagcaccaccagccccatcagcagcggcagcatggagaccaccgccctgcccggcagcaccaccacccccggcctgagcgagaagagcaccaccttccacagcagccccagaagccccgccaccaccctgagccccgccagcaccaccagcagcggcgtgagcgaggagagcaccaccagccacagcagacccggcagcacccacaccaccgccttccccgacagcaccaccacccccggcctgagcagacacagcaccaccagccacagcagccccggcagcaccgacaccaccctgctgcccgccagcaccaccaccagcggccccagccaggagagcaccaccagccacagcagccccggcagcaccgacaccgccctgagccccggcagcaccaccgccctgagcttcggccaggagagcaccaccttccacagcagccccggcagcacccacaccaccctgttccccgacagcaccaccagcagcggcatcgtggaggccagcaccagagtgcacagcagcaccggcagccccagaaccaccctgagccccgccagcagcaccagccccggcctgcagggcgagagcaccgccttccagacccaccccgccagcacccacaccacccccagcccccccagcaccgccaccgcccccgtggaggagagcaccacctaccacagaagccccggcagcacccccaccacccacttccccgccagcagcaccaccagcggccacagcgagaagagcaccatcttccacagcagccccgacgccagcggcaccacccccagcagcgcccacagcaccaccagcggcagaggcgagagcaccaccagcagaatcagccccggcagcaccgagatcaccaccctgcccggcagcaccaccacccccggcctgagcgaggccagcaccaccttctacagcagccccagaagccccaccaccaccctgagccccgccagcatgaccagcctgggcgtgggcgaggagagcaccaccagcagaagccagcccggcagcacccacagcaccgtgagccccgccagcaccaccacccccggcctgagcgaggagagcaccaccgtgtacagcagcagccccggcagcaccgagaccaccgtgttccccagaacccccaccaccagcgtgagaggcgaggagcccaccaccttccacagcagacccgccagcacccacaccaccctgttcaccgaggacagcaccaccagcggcctgaccgaggagagcaccgccttccccggcagccccgccagcacccagaccggcctgcccgccaccctgaccaccgccgacctgggcgaggagagcaccaccttccccagcagcagcggcagcaccggcaccaccctgagccccgccagaagcaccaccagcggcctggtgggcgagagcacccccagcagactgagccccagcagcaccgagaccaccaccctgcccggcagccccaccacccccagcctgagcgagaagagcaccaccttctacaccagccccagaagccccgacgccaccctgagccccgccaccaccaccagcagcggcgtgagcgaggagagcagcaccagccacagccagcccggcagcacccacaccaccgccttccccgacagcaccaccacccccggcctgagcagacacagcaccaccagccacagcagccccggcagcaccgacaccaccctgctgcccgccagcaccaccaccagcggccccagccaggagagcaccaccagccacagcagccccggcagcaccgacaccgccctgagccccggcagcaccaccgccctgagcttcggccaggagagcaccaccttccacagcagccccggcagcacccacaccaccctgttccccgacagcaccaccagcagcggcatcgtggaggccagcaccagagtgcacagcagcaccggcagccccagaaccaccctgagccccgccagcagcaccagccccggcctgcagggcgagagcaccaccttccagacccaccccgccagcacccacaccacccccagcccccccagcaccgccaccgcccccgtggaggagagcaccacctaccacagaagccccggcagcacccccaccacccacttccccgccagcagcaccaccagcggccacagcgagaagagcaccatcttccacagcagccccgacgccagcggcaccacccccagcagcgcccacagcaccaccagcggcagaggcgagagcaccaccagcagaatcagccccggcagcaccgagatcaccaccctgcccggcagcaccaccacccccggcctgagcgaggccagcaccaccttctacagcagccccagaagccccaccaccaccctgagccccgccagcatgaccagcctgggcgtgggcgaggagagcaccaccagcagaagccagcccggcagcacccacagcaccgtgagccccgccagcaccaccacccccggcctgagcgaggagagcaccaccgtgtacagcagcagccccggcagcaccgagaccaccgtgttccccagaagcaccaccaccagcgtgagaggcgaggagcccaccaccttccacagcagacccgccagcacccacaccaccctgttcaccgaggacagcaccaccagcggcctgaccgaggagagcaccgccttccccggcagccccgccagcacccagaccggcctgcccgccaccctgaccaccgccgacctgggcgaggagagcaccaccttccccagcagcagcggcagcaccggcaccaccctgagccccgccagaagcaccaccagcggcctggtgggcgagagcacccccagcagactgagccccagcagcaccgagaccaccaccctgcccggcagccccaccacccccagcctgagcgagaagagcaccaccttctacaccagccccagaagccccgacgccaccctgagccccgccaccaccaccagcagcggcgtgagcgaggagagcagcaccagccacagccagcccggcagcacccacaccaccgccttccccgacagcaccaccaccagcggcctgagccaggagcccaccgccagccacagcagccagggcagcaccgaggccaccctgagccccggcagcaccaccgccagcagcctgggccagcagagcaccaccttccacagcagccccggcgacaccgagaccaccctgctgcccgacgacaccatcaccagcggcctggtggaggccagcacccccacccacagcagcaccggcagcctgcacaccaccctgacccccgccagcagcaccagcgccggcctgcaggaggagagcaccaccttccagagctggcccagcagcagcgacaccacccccagcccccccggcaccaccgccgcccccgtggaggtgagcaccacctaccacagcagacccagcagcacccccaccacccacttcagcgccagcagcaccaccctgggcagaagcgaggagagcaccaccgtgcacagcagccccggcgccaccggcaccgccctgttccccaccagaagcgccaccagcgtgctggtgggcgagcccaccaccagccccatcagcagcggcagcaccgagaccaccgccctgcccggcagcaccaccaccgccggcctgagcgagaagagcaccaccttctacagcagccccagaagccccgacaccaccctgagccccgccagcaccaccagcagcggcgtgagcgaggagagcaccaccagccacagcagacccggcagcacccacaccaccgccttccccggcagcaccaccatgcccggcgtgagccaggagagcaccgccagccacagcagccccggcagcaccgacaccaccctgagccccggcagcaccaccgccagcagcctgggccccgagagcaccaccttccacagcggccccggcagcaccgagaccaccctgctgcccgacaacaccaccgccagcggcctgctggaggccagcacccccgtgcacagcagcaccggcagcccccacaccaccctgagccccgccggcagcaccaccagacagggcgagagcaccaccttccagagctggcccaacagcaaggacaccacccccgccccccccaccaccaccagcgccttcgtggagctgagcaccaccagccacggcagccccagcagcacccccaccacccacttcagcgccagcagcaccaccctgggcagaagcgaggagagcaccaccgtgcacagcagccccgtggccaccgccaccacccccagccccgccagaagcaccaccagcggcctggtggaggagagcaccacctaccacagcagccccggcagcacccagaccatgcacttccccgagagcgacaccaccagcggcagaggcgaggagagcaccaccagccacagcagcaccacccacaccatcagcagcgcccccagcaccaccagcgccctggtggaggagcccaccagctaccacagcagccccggcagcaccgccaccacccacttccccgacagcagcaccaccagcggcagaagcgaggagagcaccgccagccacagcagccaggacgccaccggcaccatcgtgctgcccgccagaagcaccaccagcgtgctgctgggcgagagcaccaccagccccatcagcagcggcagcatggagaccaccgccctgcccggcagcaccaccacccccggcctgagcgagaagagcaccaccttccacagcagccccagaagccccgccaccaccctgagccccgccagcaccaccagcagcggcgtgagcgaggagagcaccaccagccacagcagacccggcagcacccacaccaccgccttccccgacagcaccaccacccccggcctgagcagacacagcaccaccagccacagcagccccggcagcaccgacaccaccctgctgcccgccagcaccaccaccagcggcagcagccaggagagcaccaccagccacagcagcagcggcagcaccgacaccgccctgagccccggcagcaccaccgccctgagcttcggccaggagagcaccaccttccacagcagccccggcagcacccacaccaccctgttccccgacagcaccaccagcagcggcatcgtggaggccagcaccagagtgcacagcagcaccggcagccccagaaccaccctgagccccgccagcagcaccagccccggcctgcagggcgagagcaccgccttccagacccaccccgccagcacccacaccacccccagcccccccagcaccgccaccgcccccgtggaggagagcaccacctaccacagaagccccggcagcacccccaccacccacttccccgccagcagcaccaccagcggccacagcgagaagagcaccatcttccacagcagccccgacgccagcggcaccacccccagcagcgcccacagcaccaccagcggcagaggcgagagcaccaccagcagaatcagccccggcagcaccgagatcaccaccctgcccggcagcaccaccacccccggcctgagcgaggccagcaccaccttctacagcagccccagaagccccaccaccaccctgagccccgccagcatgaccagcctgggcgtgggcgaggagagcaccaccagcagaagccagcccggcagcacccacagcaccgtgagccccgccagcaccaccacccccggcctgagcgaggagagcaccaccgtgtacagcagcagccccggcagcaccgagaccaccgtgttccccagaagcaccaccaccagcgtgagaagagaggagcccaccaccttccacagcagacccgccagcacccacaccaccctgttcaccgaggacagcaccaccagcggcctgaccgaggagagcaccgccttccccggcagccccgccagcacccagaccggcctgcccgccaccctgaccaccgccgacctgggcgaggagagcaccaccttccccagcagcagcggcagcaccggcaccaagctgagccccgccagaagcaccaccagcggcctggtgggcgagagcacccccagcagactgagccccagcagcaccgagaccaccaccctgcccggcagccccaccacccccagcctgagcgagaagagcaccaccttctacaccagccccagaagccccgacgccaccctgagccccgccaccaccaccagcagcggcgtgagcgaggagagcagcaccagccacagccagcccggcagcacccacaccaccgccttccccgacagcaccaccaccagcggcctgagccaggagcccaccaccagccacagcagccagggcagcaccgaggccaccctgagccccggcagcaccaccgccagcagcctgggccagcagagcaccaccttccacagcagccccggcgacaccgagaccaccctgctgcccgacgacaccatcaccagcggcctggtggaggccagcacccccacccacagcagcaccggcagcctgcacaccaccctgacccccgccagcagcaccagcaccggcctgcaggaggagagcaccaccttccagagctggcccagcagcagcgacaccacccccagcccccccagcaccaccgccgtgcccgtggaggtgagcaccacctaccacagcagacccagcagcacccccaccacccacttcagcgccagcagcaccaccctgggcagaagcgaggagagcaccaccgtgcacagcagccccggcgccaccggcaccgccctgttccccaccagaagcgccaccagcgtgctggtgggcgagcccaccaccagccccatcagcagcggcagcaccgagaccaccgccctgcccggcagcaccaccaccgccggcctgagcgagaagagcaccaccttctacagcagccccagaagccccgacaccaccctgagccccgccagcaccaccagcagcggcgtgagcgaggagagcaccaccagccacagcagacccggcagcatgcacaccaccgccttccccagcagcaccaccatgcccggcgtgagccaggagagcaccgccagccacagcagccccggcagcaccgacaccaccctgagccccggcagcaccaccgccagcagcctgggccccgagagcaccaccttccacagcagccccggcagcaccgagaccaccctgctgcccgacaacaccaccgccagcggcctgctggaggccagcacccccgtgcacagcagcaccggcagcccccacaccaccctgagccccgccggcagcaccaccagacagggcgagagcaccaccttccagagctggcccaacagcaaggacaccacccccgccccccccaccaccaccagcgccttcgtggagctgagcaccaccagccacggcagccccagcagcacccccaccacccacttcagcgccagcagcaccaccctgggcagaagcgaggagagcaccaccgtgcacagcagccccgtggccaccgccaccacccccagccccgccagaagcaccaccagcggcctggtggaggagagcaccacctaccacagcagccccggcagcacccagaccatgcacttccccgagagcaacaccaccagcggcagaggcgaggagagcaccaccagccacagcagcaccacccacaccatcagcagcgcccccagcaccaccagcgccctggtggaggagcccaccagctaccacagcagccccggcagcaccgccaccacccacttccccgacagcagcaccaccagcggcagaagcgaggagagcaccgccagccacagcagccaggacgccaccggcaccatcgtgctgcccgccagaagcaccaccagcgtgctgctgggcgagagcaccaccagccccatcagcagcggcagcatggagaccaccgccctgcccggcagcaccaccacccccggcctgagcgagaagagcaccaccttccacagcagccccagcagcacccccaccacccacttcagcgccagcagcaccaccctgggcagaagcgaggagagcaccaccgtgcacagcagccccgtggccaccgccaccacccccagccccgccagaagcaccaccagcggcctggtggaggagagcaccgcctaccacagcagccccggcagcacccagaccatgcacttccccgagagcagcaccgccagcggcagaagcgaggagagcagaaccagccacagcagcaccacccacaccatcagcagcccccccagcaccaccagcgccctggtggaggagcccaccagctaccacagcagccccggcagcatcgccaccacccacttccccgagagcagcaccaccagcggcagaagcgaggagagcaccgccagccacagcagccccgacaccaacggcatcacccccctgcccgcccacttcaccaccagcggcagaatcgccgagagcaccaccttctacatcagccccggcagcatggagaccaccctggccagcaccgccaccacccccggcctgagcgccaagagcaccatcctgtacagcagcagcagaagccccgaccagaccctgagccccgccagcatgaccagcagcagcatcagcggcgagcccaccagcctgtacagccaggccgagagcacccacaccaccgccttccccgccagcaccaccaccagcggcctgagccaggagagcaccaccttccacagcaagcccggcagcaccgagaccaccctgagccccggcagcatcaccaccagcagcttcgcccaggagttcaccaccccccacagccagcccggcagcgccctgagcaccgtgagccccgccagcaccaccgtgcccggcctgagcgaggagagcaccaccttctacagcagccccggcagcaccgagaccaccgccttcagccacagcaacaccatgagcatccacagccagcagagcacccccttccccgacagccccggcttcacccacaccgtgctgcccgccaccctgaccaccaccgacatcggccaggagagcaccgccttccacagcagcagcgacgccaccggcaccacccccctgcccgccagaagcaccgccagcgacctggtgggcgagcccaccaccttctacatcagccccagccccacctacaccaccctgttccccgccagcagcagcaccagcggcctgaccgaggagagcaccaccttccacaccagccccagcttcaccagcaccatcgtgagcaccgagagcctggagaccctggcccccggcctgtgccaggagggccagatctggaacggcaagcagtgcgtgtgcccccagggctacgtgggctaccagtgcctgagccccctggagagcttccccgtggagacccccgagaagctgaacgccaccctgggcatgaccgtgaaggtgacctacagaaacttcaccgagaagatgaacgacgccagcagccaggagtaccagaacttcagcaccctgttcaagaacagaatggacgtggtgctgaagggcgacaacctgccccagtacagaggcgtgaacatcagaagactgctgaacggcagcatcgtggtgaagaacgacgtgatcctggaggccgactacaccctggagtacgaggagctgttcgagaacctggccgagatcgtgaaggccaagatcatgaacgagaccagaaccaccctgctggaccccgacagctgcagaaaggccatcctgtgctacagcgaggaggacaccttcgtggacagcagcgtgacccccggcttcgacttccaggagcagtgcacccagaaggccgccgagggctacacccagttctactacgtggacgtgctggacggcaagctggcctgcgtgaacaagtgcaccaagggcaccaagagccagatgaactgcaacctgggcacctgccagctgcagagaagcggccccagatgcctgtgccccaacaccaacacccactggtactggggcgagacctgcgagttcaacatcgccaagagcctggtgtacggcatcgtgggcgccgtgatggccgtgctgctgctggccctgatcatcctgatcatcctgttcagcctgagccagagaaagagacacagagagcagtacgacgtgccccaggagtggagaaaggagggcacccccggcatcttccagaagaccgccatctgggaggaccagaacctgagagagagcagattcggcctggagaacgcctacaacaacttcagacccaccctggagaccgtggacagcggcaccgagctgcacatccagagacccgagatggtggccagcaccgtgtag

SEQ ID NO: 89522 - DNA, 1536 bp, synthetic construct
  misc_feature 1..1536: note = Description of Artificial Sequence: Synthetic coding sequence
  source 1..1536: mol_type = other DNA
atgaaggccatcatccacctgaccctgctggccctgctgagcgtgaacaccgccaccaaccagggcaacagcgccgacgccgtgaccaccaccgagaccgccaccagcggccccaccgtggccgccgccgacaccaccgagaccaacttccccgagaccgccagcaccaccgccaacacccccttccccaccgccaccagccccgccccccccatcatcagcacccacagcagcagcaccatccccacccccgccccccccatcatcagcacccacagcagcagcaccatccccatccccaccgccgccgacagcgagagcaccaccaacgtgaacagcctggccaccagcgacatcatcaccgccagcagccccaacgacggcctgatcaccatggtgcccagcgagacccagagcaacaacgagatgagccccaccaccgaggacaaccagagcagcggcccccccaccggcaccgccctgctggagaccagcaccctgaacagcaccggccccagcaacccctgccaggacgacccctgcgccgacaacagcctgtgcgtgaagctgcacaacaccagcttctgcctgtgcctggagggctactactacaacagcagcacctgcaagaagggcaaggtgttccccggcaagatcagcgtgaccgtgagcgagaccttcgaccccgaggagaagcacagcatggcctaccaggacctgcacagcgagatcaccagcctgttcaaggacgtgttcggcaccagcgtgtacggccagaccgtgatcctgaccgtgagcaccagcctgagccccagaagcgagatgagagccgacgacaagttcgtgaacgtgaccatcgtgaccatcctggccgagaccaccagcgacaacgagaagaccgtgaccgagaagatcaacaaggccatcagaagcagcagcagcaacttcctgaactacgacctgaccctgagatgcgactactacggctgcaaccagaccgccgacgactgcctgaacggcctggcctgcgactgcaagagcgacctgcagagacccaacccccagagccccttctgcgtggccagcagcctgaagtgccccgacgcctgcaacgcccagcacaagcagtgcctgatcaagaagagcggcggcgcccccgagtgcgcctgcgtgcccggctaccaggaggacgccaacggcaactgccagaagtgcgccttcggctacagcggcctggactgcaaggacaagttccagctgatcctgaccatcgtgggcaccatcgccggcatcgtgatcctgagcatgatcatcgccctgatcgtgaccgccagaagcaacaacaagaccaagcacatcgaggaggagaacctgatcgacgaggacttccagaacctgaagctgagaagcaccggcttcaccaacctgggcgccgagggcagcgtgttccccaaggtgagaatcaccgccagcagagacagccagatgcagaacccctacagcagacacagcagcatgcccagacccgactactag

SEQ ID NO: 89523 - DNA, 13482 bp, synthetic construct
  misc_feature 1..13482: note = Description of Artificial Sequence: Synthetic coding sequence
  source 1..13482: mol_type = other DNA
atgcccagacccggcaccatggccctgtgcctgctgaccctggtgctgagcctgctgcccccccaggccgccgccgagcaggacctgagcgtgaacagagccgtgtgggacggcggcggctgcatcagccagggcgacgtgctgaacagacagtgccagcagctgagccagcacgtgagaaccggcagcgccgccaacaccgccaccggcaccaccagcaccaacgtggtggagcccagaatgtacctgagctgcagcaccaaccccgagatgaccagcatcgagagcagcgtgaccagcgacacccccggcgtgagcagcaccagaatgacccccaccgagagcagaaccaccagcgagagcaccagcgacagcaccaccctgttccccagcagcaccgaggacaccagcagccccaccacccccgagggcaccgacgtgcccatgagcacccccagcgaggagagcatcagcagcaccatggccttcgtgagcaccgcccccctgcccagcttcgaggcctacaccagcctgacctacaaggtggacatgagcacccccctgaccaccagcacccaggccagcagcagccccaccacccccgagagcaccaccatccccaagagcaccaacagcgagggcagcacccccctgaccagcatgcccgccagcaccatgaaggtggccagcagcgaggccatcaccctgctgaccacccccgtggagatcagcacccccgtgaccatcagcgcccaggccagcagcagccccaccaccgccgagggccccagcctgagcaacagcgcccccagcggcggcagcacccccctgaccagaatgcccctgagcgtgatgctggtggtgagcagcgaggccagcaccctgagcaccacccccgccgccaccaacatccccgtgatcaccagcaccgaggccagcagcagccccaccaccgccgagggcaccagcatccccaccagcacctacaccgagggcagcacccccctgaccagcacccccgccagcaccatgcccgtggccaccagcgagatgagcaccctgagcatcacccccgtggacaccagcaccctggtgaccaccagcaccgagcccagcagcctgcccaccaccgccgaggccaccagcatgctgaccagcaccctgagcgagggcagcacccccctgaccaacatgcccgtgagcaccatcctggtggccagcagcgaggccagcaccaccagcaccatccccgtggacagcaagaccttcgtgaccaccgccagcgaggccagcagcagccccaccaccgccgaggacaccagcatcgccaccagcacccccagcgagggcagcacccccctgaccagcatgcccgtgagcaccacccccgtggccagcagcgaggccagcaacctgagcaccacccccgtggacagcaagacccaggtgaccaccagcaccgaggccagcagcagcccccccaccgccgaggtgaacagcatgcccaccagcacccccagcgagggcagcacccccctgaccagcatgagcgtgagcaccatgcccgtggccagcagcgaggccagcaccctgagcaccacccccgtggacaccagcacccccgtgaccaccagcagcgaggccagcagcagcagcaccacccccgagggcaccagcatccccaccagcacccccagcgagggcagcacccccctgaccaacatgcccgtgagcaccagactggtggtgagcagcgaggccagcaccaccagcaccacccccgccgacagcaacaccttcgtgaccaccagcagcgaggccagcagcagcagcaccaccgccgagggcaccagcatgcccaccagcacctacagcgagagaggcaccaccatcaccagcatgagcgtgagcaccaccctggtggccagcagcgaggccagcaccctgagcaccacccccgtggacagcaacacccccgtgaccaccagcaccgaggccaccagcagcagcaccaccgccgagggcaccagcatgcccaccagcacctacaccgagggcagcacccccctgaccagcatgcccgtgaacaccaccctggtggccagcagcgaggccagcaccctgagcaccacccccgtggacaccagcacccccgtgaccaccagcaccgaggccagcagcagccccaccaccgccgacggcgccagcatgcccaccagcacccccagcgagggcagcacccccctgaccagcatgcccgtgagcaagaccctgctgaccagcagcgaggccagcaccctgagcaccacccccctggacaccagcacccacatcaccaccagcaccgaggccagctgcagccccaccaccaccgagggcaccagcatgcccatcagcacccccagcgagggcagccccctgctgaccagcatccccgtgagcatcacccccgtgaccagccccgaggccagcaccctgagcaccacccccgtggacagcaacagccccgtgaccaccagcaccgaggtgagcagcagccccacccccgccgagggcaccagcatgcccaccagcacctacagcgagggcagaacccccctgaccagcatgcccgtgagcaccaccctggtggccaccagcgccatcagcaccctgagcaccacccccgtggacaccagcacccccgtgaccaacagcaccgaggccagaagcagccccaccaccagcgagggcaccagcatgcccaccagcacccccggcgagggcagcacccccctgaccagcatgcccgacagcaccacccccgtggtgagcagcgaggccagaaccctgagcgccacccccgtggacaccagcacccccgtgaccaccagcaccgaggccaccagcagccccaccaccgccgagggcaccagcatccccaccagcacccccagcgagggcaccacccccctgaccagcacccccgtgagccacaccctggtggccaacagcgaggccagcaccctgagcaccacccccgtggacagcaacacccccctgaccaccagcaccgaggccagcagccccccccccaccgccgagggcaccagcatgcccaccagcacccccagcgagggcagcacccccctgaccagaatgcccgtgagcaccaccatggtggccagcagcgagaccagcaccctgagcaccacccccgccgacaccagcacccccgtgaccacctacagccaggccagcagcagcagcaccaccgccgacggcaccagcatgcccaccagcacctacagcgagggcagcacccccctgaccagcgtgcccgtgagcaccagactggtggtgagcagcgaggccagcaccctgagcaccacccccgtggacaccagcatccccgtgaccaccagcaccgaggccagcagcagccccaccaccgccgagggcaccagcatccccaccagcccccccagcgagggcaccacccccctggccagcatgcccgtgagcaccaccctggtggtgagcagcgaggccaacaccctgagcaccacccccgtggacagcaagacccaggtggccaccagcaccgaggccagcagccccccccccaccgccgaggtgaccagcatgcccaccagcacccccggcgagagaagcacccccctgaccagcatgcccgtgagacacacccccgtggccagcagcgaggccagcaccctgagcaccagccccgtggacaccagcacccccgtgaccaccagcgccgagaccagcagcagccccaccaccgccgagggcaccagcctgcccaccagcaccaccagcgagggcagcaccctgctgaccagcatccccgtgagcaccaccctggtgaccagccccgaggccagcaccctgctgaccacccccgtggacaccaagggccccgtggtgaccagcaacgaggtgagcagcagccccacccccgccgagggcaccagcatgcccaccagcacctacagcgagggcagaacccccctgaccagcatccccgtgaacaccaccctggtggccagcagcgccatcagcatcctgagcaccacccccgtggacaacagcacccccgtgaccaccagcaccgaggcctgcagcagccccaccaccagcgagggcaccagcatgcccaacagcaaccccagcgagggcaccacccccctgaccagcatccccgtgagcaccacccccgtggtgagcagcgaggccagcaccctgagcgccacccccgtggacaccagcacccccggcaccaccagcgccgaggccaccagcagccccaccaccgccgagggcatcagcatccccaccagcacccccagcgagggcaagacccccctgaagagcatccccgtgagcaacacccccgtggccaacagcgaggccagcaccctgagcaccacccccgtggacagcaacagccccgtggtgaccagcaccgccgtgagcagcagccccacccccgccgagggcaccagcatcgccatcagcacccccagcgagggcagcaccgccctgaccagcatccccgtgagcaccaccaccgtggccagcagcgagatcaacagcctgagcaccacccccgccgtgaccagcacccccgtgaccacctacagccaggccagcagcagccccaccaccgccgacggcaccagcatgcagaccagcacctacagcgagggcagcacccccctgaccagcctgcccgtgagcaccatgctggtggtgagcagcgaggccaacaccctgagcaccacccccatcgacagcaagacccaggtgaccgccagcaccgaggccagcagcagcaccaccgccgagggcagcagcatgaccatcagcacccccagcgagggcagccccctgctgaccagcatccccgtgagcaccacccccgtggccagccccgaggccagcaccctgagcaccacccccgtggacagcaacagccccgtgatcaccagcaccgaggtgagcagcagccccacccccgccgagggcaccagcatgcccaccagcacctacaccgagggcagaacccccctgaccagcatcaccgtgagaaccacccccgtggccagcagcgccatcagcaccctgagcaccacccccgtggacaacagcacccccgtgaccaccagcaccgaggccagaagcagccccaccaccagcgagggcaccagcatgcccaacagcacccccagcgagggcaccacccccctgaccagcatccccgtgagcaccacccccgtgctgagcagcgaggccagcaccctgagcgccacccccatcgacaccagcacccccgtgaccaccagcaccgaggccaccagcagccccaccaccgccgagggcaccagcatccccaccagcaccctgagcgagggcatgacccccctgaccagcacccccgtgagccacaccctggtggccaacagcgaggccagcaccctgagcaccacccccgtggacagcaacagccccgtggtgaccagcaccgccgtgagcagcagccccacccccgccgagggcaccagcatcgccaccagcacccccagcgagggcagcaccgccctgaccagcatccccgtgagcaccaccaccgtggccagcagcgagaccaacaccctgagcaccacccccgccgtgaccagcacccccgtgaccacctacgcccaggtgagcagcagccccaccaccgccgacggcagcagcatgcccaccagcacccccagagagggcagaccccccctgaccagcatccccgtgagcaccaccaccgtggccagcagcgagatcaacaccctgagcaccaccctggccgacaccagaacccccgtgaccacctacagccaggccagcagcagccccaccaccgccgacggcaccagcatgcccacccccgcctacagcgagggcagcacccccctgaccagcatgcccctgagcaccaccctggtggtgagcagcgaggccagcaccctgagcaccacccccgtggacaccagcacccccgccaccaccagcaccgagggcagcagcagccccaccaccgccggcggcaccagcatccagaccagcacccccagcgagagaaccacccccctggccggcatgcccgtgagcaccaccctggtggtgagcagcgagggcaacaccctgagcaccacccccgtggacagcaagacccaggtgaccaacagcaccgaggccagcagcagcgccaccgccgagggcagcagcatgaccatcagcgcccccagcgagggcagccccctgctgaccagcatccccctgagcaccacccccgtggccagccccgaggccagcaccctgagcaccacccccgtggacagcaacagccccgtgatcaccagcaccgaggtgagcagcagccccatccccaccgagggcaccagcatgcagaccagcacctacagcgacagaagaacccccctgaccagcatgcccgtgagcaccaccgtggtggccagcagcgccatcagcaccctgagcaccacccccgtggacaccagcacccccgtgaccaacagcaccgaggccagaagcagccccaccaccagcgagggcaccagcatgcccaccagcacccccagcgagggcagcacccccttcaccagcatgcccgtgagcaccatgcccgtggtgaccagcgaggccagcaccctgagcgccacccccgtggacaccagcacccccgtgaccaccagcaccgaggccaccagcagccccaccaccgccgagggcaccagcatccccaccagcaccctgagcgagggcaccacccccctgaccagcatccccgtgagccacaccctggtggccaacagcgaggtgagcaccctgagcaccacccccgtggacagcaacacccccttcaccaccagcaccgaggccagcagccccccccccaccgccgagggcaccagcatgcccaccagcaccagcagcgagggcaacacccccctgaccagaatgcccgtgagcaccaccatggtggccagcttcgagaccagcaccctgagcaccacccccgccgacaccagcacccccgtgaccacctacagccaggccggcagcagccccaccaccgccgacgacaccagcatgcccaccagcacctacagcgagggcagcacccccctgaccagcgtgcccgtgagcaccatgcccgtggtgagcagcgaggccagcacccacagcaccacccccgtggacaccagcacccccgtgaccaccagcaccgaggccagcagcagccccaccaccgccgagggcaccagcatccccaccagcccccccagcgagggcaccacccccctggccagcatgcccgtgagcaccacccccgtggtgagcagcgaggccggcaccctgagcaccacccccgtggacaccagcacccccatgaccaccagcaccgaggccagcagcagccccaccaccgccgaggacatcgtggtgcccatcagcaccgccagcgagggcagcaccctgctgaccagcatccccgtgagcaccacccccgtggccagccccgaggccagcaccctgagcaccacccccgtggacagcaacagccccgtggtgaccagcaccgagatcagcagcagcgccaccagcgccgagggcaccagcatgcccaccagcacctacagcgagggcagcacccccctgagaagcatgcccgtgagcaccaagcccctggccagcagcgaggccagcaccctgagcaccacccccgtggacaccagcatccccgtgaccaccagcaccgagaccagcagcagccccaccaccgccaaggacaccagcatgcccatcagcacccccagcgaggtgagcaccagcctgaccagcatcctggtgagcaccatgcccgtggccagcagcgaggccagcaccctgagcaccacccccgtggacaccagaaccctggtgaccaccagcaccggcaccagcagcagccccaccaccgccgagggcagcagcatgcccaccagcacccccggcgagagaagcacccccctgaccaacatcctggtgagcaccaccctgctggccaacagcgaggccagcaccctgagcaccacccccgtggacaccagcacccccgtgaccaccagcgccgaggccagcagcagccccaccaccgccgagggcaccagcatgagaatcagcacccccagcgacggcagcacccccctgaccagcatcctggtgagcaccctgcccgtggccagcagcgaggccagcaccgtgagcaccaccgccgtggacaccagcatccccgtgaccaccagcaccgaggccagcagcagccccaccaccgccgaggtgaccagcatgcccaccagcacccccagcgagaccagcacccccctgaccagcatgcccgtgaaccacacccccgtggccagcagcgaggccggcaccctgagcaccacccccgtggacaccagcacccccgtgaccaccagcaccaaggccagcagcagccccaccaccgccgagggcatcgtggtgcccatcagcaccgccagcgagggcagcaccctgctgaccagcatccccgtgagcaccacccccgtggccagcagcgaggccagcaccctgagcaccacccccgtggacaccagcatccccgtgaccaccagcaccgagggcagcagcagccccaccaccgccgagggcaccagcatgcccatcagcacccccagcgaggtgagcacccccctgaccagcatcctggtgagcaccgtgcccgtggccggcagcgaggccagcaccctgagcaccacccccgtggacaccagaacccccgtgaccaccagcgccgaggccagcagcagccccaccaccgccgagggcaccagcatgcccatcagcacccccggcgagagaagaacccccctgaccagcatgagcgtgagcaccatgcccgtggccagcagcgaggccagcaccctgagcagaacccccgccgacaccagcacccccgtgaccaccagcaccgaggccagcagcagccccaccaccgccgagggcaccggcatccccatcagcacccccagcgagggcagcacccccctgaccagcatccccgtgagcaccacccccgtggccatccccgaggccagcaccctgagcaccacccccgtggacagcaacagccccgtggtgaccagcaccgaggtgagcagcagccccacccccgccgagggcaccagcatgcccatcagcacctacagcgagggcagcacccccctgaccggcgtgcccgtgagcaccacccccgtgaccagcagcgccatcagcaccctgagcaccacccccgtggacaccagcacccccgtgaccaccagcaccgaggcccacagcagccccaccaccagcgagggcaccagcatgcccaccagcacccccagcgagggcagcacccccctgacctacatgcccgtgagcaccatgctggtggtgagcagcgaggacagcaccctgagcgccacccccgtggacaccagcacccccgtgaccaccagcaccgaggccaccagcagcaccaccgccgagggcaccagcatccccaccagcacccccagcgagggcatgacccccctgaccagcgtgcccgtgagcaacacccccgtggccagcagcgaggccagcatcctgagcaccacccccgtggacagcaacacccccctgaccaccagcaccgaggccagcagcagcccccccaccgccgagggcaccagcatgcccaccagcacccccagcgagggcagcacccccctgaccagcatgcccgtgagcaccaccaccgtggccagcagcgagaccagcaccctgagcaccacccccgccgacaccagcacccccgtgaccacctacagccaggccagcagcagcccccccatcgccgacggcaccagcatgcccaccagcacctacagcgagggcagcacccccctgaccaacatgagcttcagcaccacccccgtggtgagcagcgaggccagcaccctgagcaccacccccgtggacaccagcacccccgtgaccaccagcaccgaggccagcctgagccccaccaccgccgagggcaccagcatccccaccagcagccccagcgagggcaccacccccctggccagcatgcccgtgagcaccacccccgtggtgagcagcgaggtgaacaccctgagcaccacccccgtggacagcaacaccctggtgaccaccagcaccgaggccagcagcagccccaccatcgccgagggcaccagcctgcccaccagcaccaccagcgagggcagcacccccctgagcatcatgcccctgagcaccacccccgtggccagcagcgaggccagcaccctgagcaccacccccgtggacaccagcacccccgtgaccaccagcagccccaccaacagcagccccaccaccgccgaggtgaccagcatgcccaccagcaccgccggcgagggcagcacccccctgaccaacatgcccgtgagcaccacccccgtggccagcagcgaggccagcaccctgagcaccacccccgtggacagcaacaccttcgtgaccagcagcagccaggccagcagcagccccgccaccctgcaggtgaccaccatgagaatgagcacccccagcgagggcagcagcagcctgaccaccatgctgctgagcagcacctacgtgaccagcagcgaggccagcacccccagcacccccagcgtggacagaagcacccccgtgaccaccagcacccagagcaacagcacccccaccccccccgaggtgatcaccctgcccatgagcacccccagcgaggtgagcacccccctgaccatcatgcccgtgagcaccaccagcgtgaccatcagcgaggccggcaccgccagcaccctgcccgtggacaccagcacccccgtgatcaccagcacccaggtgagcagcagccccgtgacccccgagggcaccaccatgcccatctggacccccagcgagggcagcacccccctgaccaccatgcccgtgagcaccaccagagtgaccagcagcgagggcagcaccctgagcacccccagcgtggtgaccagcacccccgtgaccaccagcaccgaggccatcagcagcagcgccaccctggacagcaccaccatgagcgtgagcatgcccatggagatcagcaccctgggcaccaccatcctggtgagcaccacccccgtgaccagattccccgagagcagcacccccagcatccccagcgtgtacaccagcatgagcatgaccaccgccagcgagggcagcagcagccccaccaccctggagggcaccaccaccatgcccatgagcaccaccagcgagagaagcaccctgctgaccaccgtgctgatcagccccatcagcgtgatgagccccagcgaggccagcaccctgagcaccccccccggcgacaccagcacccccctgctgaccagcaccaaggccggcagcttcagcatccccgccgaggtgaccaccatcagaatcagcatcaccagcgagagaagcacccccctgaccaccctgctggtgagcaccaccctgcccaccagcttccccggcgccagcatcgccagcaccccccccctggacaccagcaccaccttcacccccagcaccgacaccgccagcacccccaccatccccgtggccaccaccatcagcgtgagcgtgatcaccgagggcagcacccccggcaccaccatcttcatccccagcacccccgtgaccagcagcaccgccgacgtgttccccgccaccaccggcgccgtgagcacccccgtgatcaccagcaccgagctgaacacccccagcaccagcagcagcagcaccaccaccagcttcagcaccaccaaggagttcaccacccccgccatgaccaccgccgcccccctgacctacgtgaccatgagcaccgcccccagcacccccagaaccaccagcagaggctgcaccaccagcgccagcaccctgagcgccaccagcaccccccacaccagcaccagcgtgaccaccagacccgtgacccccagcagcgagagcagcagacccagcaccatcaccagccacaccatcccccccaccttcccccccgcccacagcagcaccccccccaccaccagcgccagcagcaccaccgtgaaccccgaggccgtgaccaccatgaccaccagaaccaagcccagcaccagaaccaccagcttccccaccgtgaccaccaccgccgtgcccaccaacaccaccatcaagagcaaccccaccagcacccccaccgtgcccagaaccaccacctgcttcggcgacggctgccagaacaccgccagcagatgcaagaacggcggcacctgggacggcctgaagtgccagtgccccaacctgtactacggcgagctgtgcgaggaggtggtgagcagcatcgacatcggcccccccgagaccatcagcgcccagatggagctgaccgtgaccgtgaccagcgtgaagttcaccgaggagctgaagaaccacagcagccaggagttccaggagttcaagcagaccttcaccgagcagatgaacatcgtgtacagcggcatccccgagtacgtgggcgtgaacatcaccaagctgagactgggcagcgtggtggtggagcacgacgtgctgctgagaaccaagtacacccccgagtacaagaccgtgctggacaacgccaccgaggtggtgaaggagaagatcaccaaggtgaccacccagcagatcatgatcaacgacatctgcagcgacatgatgtgcttcaacaccaccggcacccaggtgcagaacatcaccgtgacccagtacgaccccgaggaggactgcagaaagatggccaaggagtacggcgactacttcgtggtggagtacagagaccagaagccctactgcatcagcccctgcgagcccggcttcagcgtgagcaagaactgcaacctgggcaagtgccagatgagcctgagcggcccccagtgcctgtgcgtgaccaccgagacccactggtacagcggcgagacctgcaaccagggcacccagaagagcctggtgtacggcctggtgggcgccggcgtggtgctgatgctgatcatcctggtggccctgctgatgctggtgttcagaagcaagagagaggtgaagagacagaagtacagactgagccagctgtacaagtggcaggaggaggacagcggccccgcccccggcaccttccagaacatcggcttcgacatctgccaggacgacgacagcatccacctggagagcatctacagcaacttccagcccagcctgagacacatcgaccccgagaccaagatcagaatccagagaccccaggtgatgaccaccagcttctag

SEQ ID NO: 89524 - DNA, 843 bp, synthetic construct
  misc_feature 1..843: note = Description of Artificial Sequence: Synthetic coding sequence
  source 1..843: mol_type = other DNA
atgaccaccgccctgggcagccagctgagcagcagccagaccgtgatccccggcagcagcggcaccatcagccacaccaccgtggcccccggcagcagcgtgaccggcaccaccaccggcgccagcgacgaccaggtgaccggcagcaagaccggcaccaccggcgtggccctgagcaccaccgtggcccccggcagcagcagcaccgaggccaccaccagcaccggcgtgcacagaaccaccgtggtgggccagaagaccggcgccaccaccagaggcagcgccaagcagggcaccagaagcaccatcgaggccaccaccagcttcagaggcaccggcaccaccggcagcggcatgaacaccggcaccaccggcgtggtgagcggcaacaccatcagccccagcagcttcaacaccgaggccaccagcggcaccagcgagagacccaaccccggcagcgagatcggcaccaccggcatcgtgagcggcaccaccgtggcccccggcagcagcaacaccgaggccaccaccagcctgggcaacggcggcaccaccgaggccggcagcaagatcgtgaccaccggcatcaccaccggcaccaccatcgtgcccggcagcttcaacaccaaggccaccaccagcaccgacgtgggcgtggccaccggcgtgggcatggccaccggcatcaccaacatcatcagcggcagaagccagcccaccggcagcaagaccggctacaccgtgaccggcagcggcaccaccgccctgcccggcggcttcagaaccgacagccccagcttccccctgttcctgatctgcagctacagaggccacaacttctag

SEQ ID NO: 89525 - DNA, 837 bp, synthetic construct
  misc_feature 1..837: note = Description of Artificial Sequence: Synthetic coding sequence
  source 1..837: mol_type = other DNA
cccaccggcacccagacccccacccccacccccatcagcaccaccaccaccgtgacccccacccccacccccaccggcacccagacccccaccaccacccccatcaccaccaccaccaccgtgacccccacccccacccccaccggcacccagacccccaccaccgtgctgatcaccaccaccaccaccatgacccccacccccacccccaccagcaccaagagcaccaccgtgacccccatcaccaccaccaccaccgtgaccgccacccccacccccaccggcacccagacccccaccatgatccccatcagcaccaccaccaccgtgacccccacccccacccccaccaccggcagcaccggcccccccacccacaccagcaccgcccccatcgccgagctgaccaccagcaaccccccccccgagagcagcaccccccagaccagcagaagcaccagcagccccctgaccgagagcaccaccctgctgagcaccctgccccccgccatcgagatgaccagcaccgccccccccagcacccccaccgcccccaccaccaccagcggcggccacaccctgagccccccccccagcaccaccaccagcccccccggcacccccaccagaggcaccaccaccggcagcagcagcgcccccacccccagcaccgtgcagaccaccaccaccagcgcctggacccccacccccacccccctgagcacccccagcatcatcagaaccaccggcctgagaccctaccccagcagcgtgctgatctgctgcgtgctgaacgacacctactacgcccccggcgaggaggtgtacaacggctag

SEQ ID NO: 89526 - DNA, 5343 bp, synthetic construct
  misc_feature 1..5343: note = Description of Artificial Sequence: Synthetic coding sequence
  source 1..5343: mol_type = other DNA
atgggcctgcccctggccagactggccgccgtgtgcctggccctgagcctggccggcggcagcgagctgcagaccgagggcagaaccagaaaccacggccacaacgtgtgcagcacctggggcaacttccactacaagaccttcgacggcgacgtgttcagattccccggcctgtgcgactacaacttcgccagcgactgcagaggcagctacaaggagttcgccgtgcacctgaagagaggccccggccaggccgaggcccccgccggcgtggagagcatcctgctgaccatcaaggacgacaccatctacctgaccagacacctggccgtgctgaacggcgccgtggtgagcaccccccactacagccccggcctgctgatcgagaagagcgacgcctacaccaaggtgtacagcagagccggcctgaccctgatgtggaacagagaggacgccctgatgctggagctggacaccaagttcagaaaccacacctgcggcctgtgcggcgactacaacggcctgcagagctacagcgagttcctgagcgacggcgtgctgttcagccccctggagttcggcaacatgcagaagatcaaccagcccgacgtggtgtgcgaggaccccgaggaggaggtggcccccgccagctgcagcgagcacagagccgagtgcgagagactgctgaccgccgaggccttcgccgactgccaggacctggtgcccctggagccctacctgagagcctgccagcaggacagatgcagatgccccggcggcgacacctgcgtgtgcagcaccgtggccgagttcagcagacagtgcagccacgccggcggcagacccggcaactggagaaccgccaccctgtgccccaagacctgccccggcaacctggtgtacctggagagcggcagcccctgcatggacacctgcagccacctggaggtgagcagcctgtgcgaggagcacagaatggacggctgcttctgccccgagggcaccgtgtacgacgacatcggcgacagcggctgcgtgcccgtgagccagtgccactgcagactgcacggccacctgtacacccccggccaggagatcaccaacgactgcgagcagtgcgtgtgcaacgccggcagatgggtgtgcaaggacctgccctgccccggcacctgcgccctggagggcggcagccacatcaccaccttcgacggcaagacctacaccttccacggcgactgctactacgtgctggccaagggcgaccacaacgacagctacgccctgctgggcgagctggccccctgcggcagcaccgacaagcagacctgcctgaagaccgtggtgctgctggccgacaagaagaagaacgtggtggtgttcaagagcgacggcagcgtgctgctgaacgagctgcaggtgaacctgccccacgtgaccgccagcttcagcgtgttcagacccagcagctaccacatcatggtgagcatggccatcggcgtgagactgcaggtgcagctggcccccgtgatgcagctgttcgtgaccctggaccaggccagccagggccaggtgcagggcctgtgcggcaacttcaacggcctggagggcgacgacttcaagaccgccagcggcctggtggaggccaccggcgccggcttcgccaacacctggaaggcccagagcagctgccacgacaagctggactggctggacgacccctgcagcctgaacatcgagagcgccaactacgccgagcactggtgcagcctgctgaagaagaccgagacccccttcggcagatgccacagcgccgtggaccccgccgagtactacaagagatgcaagtacgacacctgcaactgccagaacaacgaggactgcctgtgcgccgccctgagcagctacgccagagcctgcaccgccaagggcgtgatgctgtggggctggagagagcacgtgtgcaacaaggacgtgggcagctgccccaacagccaggtgttcctgtacaacctgaccacctgccagcagacctgcagaagcctgagcgaggccgacagccactgcctggagggcttcgcccccgtggacggctgcggctgccccgaccacaccttcctggacgagaagggcagatgcgtgcccctggccaagtgcagctgctaccacagaggcctgtacctggaggccggcgacgtggtggtgagacaggaggagagatgcgtgtgcagagacggcagactgcactgcagacagatcagactgatcggccagagctgcaccgcccccaagatccacatggactgcagcaacctgaccgccctggccaccagcaagcccagagccctgagctgccagaccctggccgccggctactaccacaccgagtgcgtgagcggctgcgtgtgccccgacggcctgatggacgacggcagaggcggctgcgtggtggagaaggagtgcccctgcgtgcacaacaacgacctgtacagcagcggcgccaagatcaaggtggactgcaacacctgcacctgcaagagaggcagatgggtgtgcacccaggccgtgtgccacggcacctgcagcatctacggcagcggccactacatcaccttcgacggcaagtactacgacttcgacggccactgcagctacgtggccgtgcaggactactgcggccagaacagcagcctgggcagcttcagcatcatcaccgagaacgtgccctgcggcaccaccggcgtgacctgcagcaaggccatcaagatcttcatgggcagaaccgagctgaagctggaggacaagcacagagtggtgatccagagagacgagggccaccacgtggcctacaccaccagagaggtgggccagtacctggtggtggagagcagcaccggcatcatcgtgatctgggacaagagaaccaccgtgttcatcaagctggcccccagctacaagggcaccgtgtgcggcctgtgcggcaacttcgaccacagaagcaacaacgacttcaccaccagagaccacatggtggtgagcagcgagctggacttcggcaacagctggaaggaggcccccacctgccccgacgtgagcaccaaccccgagccctgcagcctgaacccccacagaagaagctgggccgagaagcagtgcagcatcctgaagagcagcgtgttcagcatctgccacagcaaggtggaccccaagcccttctacgaggcctgcgtgcacgacagctgcagctgcgacaccggcggcgactgcgagtgcttctgcagcgccgtggccagctacgcccaggagtgcaccaaggagggcgcctgcgtgttctggagaacccccgacctgtgccccatcttctgcgactactacaaccccccccacgagtgcgagtggcactacgagccctgcggcaacagaagcttcgagacctgcagaaccatcaacggcatccacagcaacatcagcgtgagctacctggagggctgctaccccagatgccccaaggacagacccatctacgaggaggacctgaagaagtgcgtgaccgccgacaagtgcggctgctacgtggaggacacccactacccccccggcgccagcgtgcccaccgaggagacctgcaagagctggtgcacctgcacccagacccacaccgcctaccacgtgcacacccacggcaagatcctgaaccagacccaggacggcgccttctgctactgggagatctgcggccccaacggcaccgtggagaagcacttcaacatctgcagcatcaccaccagacccagcaccctgaccaccttcaccaccatcaccctgcccaccacccccaccaccttcaccaccaccaccaccaccaccacccccaccagcagcaccgtgctgagcaccacccccaagctgtgctgcctgtggagcgactggatcaacgaggaccaccccagcagcggcagcgacgacggcgacagagagaccttcgacggcgtgtgcggcgcccccgaggacatcgagtgcagaagcgtgaaggacccccacctgagcctggagcagctgggccagaaggtgcagtgcgacgtgagcgtgggcttcatctgcaagaacgaggaccagttcggcaacggccccttcggcctgtgctacgactacaagatcagagtgaactgctgctggcccatggacaagtgcatcaccacccccagcccccccaccaccacccccagccccccccccaccagcaccaccaccctgccccccaccaccacccccagcccccccaccaccaccaccaccacccccccccccaccaccacccccagcccccccatcaccaccaccaccacccccccccccaccaccacccccagcccccccatcagcaccaccaccacccccccccccaccaccacccccagcccccccaccaccacccccagcccccccaccaccacccccagcccccccaccaccaccaccaccacccccccccccaccaccacccccagcccccccaccaccacccccatcaccccccccgccagcaccaccaccctgccccccaccaccacccccagcccccccaccaccaccaccaccacccccccccccaccaccacccccatcaccaccaccaccaccgtgacccccacccccacccccaccggcacccagacccccaccaccacccccatcaccaccaccaccaccgtgacccccacccccacccccaccggcacccagacccccaccagcacccccatcaccaccaccaccaccacccccacccccaccgccatcaccaccaccaccaccgtgacccccacccccacccccaccggcacccagacccccaccaccacccccatcaccaccaccaccaccgtgacccccacccccacccccaccggcacccagagccccacccccaccgccatcaccaccaccaccaccgtgacccccacccccacccccaccggcacccagacccccaccagcacccccatcaccaccaccaccaccgtgacccccacccccacccccaccggcacccagacccccacccccacccccatcagcaccaccaccaccgtgacccccacccccacccccaccggcacccagacccccaccaccacccccatcaccaccaccaccaccgtgacccccacccccacccccaccggcacccagacccccaccaccacccccacccccaccagcaccaagagcaccaccgtgacccccatcaccaccaccaccaccgtgaccgccacccccacccccaccggcacccagacccccaccatgatccccatcagcaccaccaccaccgtgaccccctag

SEQ ID NO: 89527 - DNA, 1230 bp, synthetic construct
  misc_feature 1..1230: note = Description of Artificial Sequence: Synthetic coding sequence
  source 1..1230: mol_type = other DNA
gacatcgagtgcagaagcgtgaaggacccccacctgagcctggagcagctgggccagaaggtgcagtgcgacgtgagcgtgggcttcatctgcaagaacgaggaccagttcggcaacggccccttcggcctgtgctacgactacaagatcagagtgaactgctgctgcacccccaccagaggcaccaccaccggcagcagcagcgcccccacccccagcaccgtgcagaccaccaccaccagcgcctggacccccacccccacccccctgagcacccccagcatcatcagaaccaccggcctgagaccctaccccagcagcgtgctgatctgctgcgtgctgaacgacacctactacgcccccggcgaggaggtgtacaacggcacctacggcgacacctgctacttcgtgaactgcagcctgagctgcaccctggagttctacaactggagctgccccagcacccccagccccacccccacccccagcaagagcacccccacccccagcaagcccagcagcacccccagcaagcccacccccggcaccaagccccccgagtgccccgacttcgacccccccagacaggagaacgagacctggtggctgtgcgactgcttcatggccacctgcaagtacaacaacaccgtggagatcgtgaaggtggagtgcgagcccccccccatgcccacctgcagcaacggcctgcagcccgtgagagtggaggaccccgacggctgctgctggcactgggagtgcgactgctactgcaccggctggggcgacccccactacgtgaccttcgacggcctgtactacagctaccagggcaactgcacctacgtgctggtggaggagatcagccccagcgtggacaacttcggcgtgtacatcgacaactaccactgcgaccccaacgacaaggtgagctgccccagaaccctgatcgtgagacacgagacccaggaggtgctgatcaagaccgtgcacatgatgcccatgcaggtgcaggtgcaggtgaacagacaggccgtggccctgccctacaagaagtacggcctggaggtgtaccagagcggcatcaactacgtggtggacatccccgagctgggcgtgctggtgagctacaacggcctgagcttcagcgtgagactgccctaccacagattcggcaacaacaccaagggccagtgcggcacctgcaccaacaccaccagcgacgactgctag

SEQ ID NO: 89528 - DNA, 8454 bp, synthetic construct
  misc_feature 1..8454: note = Description of Artificial Sequence: Synthetic coding sequence
  source 1..8454: mol_type = other DNA
atgggcctgcccctggccagactggccgccgtgtgcctggccctgagcctggccggcggcagcgagctgcagaccgagggcagaaccagaaaccacggccacaacgtgtgcagcacctggggcaacttccactacaagaccttcgacggcgacgtgttcagattccccggcctgtgcgactacaacttcgccagcgactgcagaggcagctacaaggagttcgccgtgcacctgaagagaggccccggccaggccgaggcccccgccggcgtggagagcatcctgctgaccatcaaggacgacaccatctacctgaccagacacctggccgtgctgaacggcgccgtggtgagcaccccccactacagccccggcctgctgatcgagaagagcgacgcctacaccaaggtgtacagcagagccggcctgaccctgatgtggaacagagaggacgccctgatgctggagctggacaccaagttcagaaaccacacctgcggcctgtgcggcgactacaacggcctgcagagctacagcgagttcctgagcgacggcgtgctgttcagccccctggagttcggcaacatgcagaagatcaaccagcccgacgtggtgtgcgaggaccccgaggaggaggtggcccccgccagctgcagcgagcacagagccgagtgcgagagactgctgaccgccgaggccttcgccgactgccaggacctggtgcccctggagccctacctgagagcctgccagcaggacagatgcagatgccccggcggcgacacctgcgtgtgcagcaccgtggccgagttcagcagacagtgcagccacgccggcggcagacccggcaactggagaaccgccaccctgtgccccaagacctgccccggcaacctggtgtacctggagagcggcagcccctgcatggacacctgcagccacctggaggtgagcagcctgtgcgaggagcacagaatggacggctgcttctgccccgagggcaccgtgtacgacgacatcggcgacagcggctgcgtgcccgtgagccagtgccactgcagactgcacggccacctgtacacccccggccaggagatcaccaacgactgcgagcagtgcgtgtgcaacgccggcagatgggtgtgcaaggacctgccctgccccggcacctgcgccctggagggcggcagccacatcaccaccttcgacggcaagacctacaccttccacggcgactgctactacgtgctggccaagggcgaccacaacgacagctacgccctgctgggcgagctggccccctgcggcagcaccgacaagcagacctgcctgaagaccgtggtgctgctggccgacaagaagaagaacgtggtggtgttcaagagcgacggcagcgtgctgctgaacgagctgcaggtgaacctgccccacgtgaccgccagcttcagcgtgttcagacccagcagctaccacatcatggtgagcatggccatcggcgtgagactgcaggtgcagctggcccccgtgatgcagctgttcgtgaccctggaccaggccagccagggccaggtgcagggcctgtgcggcaacttcaacggcctggagggcgacgacttcaagaccgccagcggcctggtggaggccaccggcgccggcttcgccaacacctggaaggcccagagcagctgccacgacaagctggactggctggacgacccctgcagcctgaacatcgagagcgccaactacgccgagcactggtgcagcctgctgaagaagaccgagacccccttcggcagatgccacagcgccgtggaccccgccgagtactacaagagatgcaagtacgacacctgcaactgccagaacaacgaggactgcctgtgcgccgccctgagcagctacgccagagcctgcaccgccaagggcgtgatgctgtggggctggagagagcacgtgtgcaacaaggacgtgggcagctgccccaacagccaggtgttcctgtacaacctgaccacctgccagcagacctgcagaagcctgagcgaggccgacagccactgcctggagggcttcgcccccgtggacggctgcggctgccccgaccacaccttcctggacgagaagggcagatgcgtgcccctggccaagtgcagctgctaccacagaggcctgtacctggaggccggcgacgtggtggtgagacaggaggagagatgcgtgtgcagagacggcagactgcactgcagacagatcagactgatcggccagagctgcaccgcccccaagatccacatggactgcagcaacctgaccgccctggccaccagcaagcccagagccctgagctgccagaccctggccgccggctactaccacaccgagtgcgtgagcggctgcgtgtgccccgacggcctgatggacgacggcagaggcggctgcgtggtggagaaggagtgcccctgcgtgcacaacaacgacctgtacagcagcggcgccaagatcaaggtggactgcaacacctgcacctgcaagagaggcagatgggtgtgcacccaggccgtgtgccacggcacctgcagcatctacggcagcggccactacatcaccttcgacggcaagtactacgacttcgacggccactgcagctacgtggccgtgcaggactactgcggccagaacagcagcctgggcagcttcagcatcatcaccgagaacgtgccctgcggcaccaccggcgtgacctgcagcaaggccatcaagatcttcatgggcagaaccgagctgaagctggaggacaagcacagagtggtgatccagagagacgagggccaccacgtggcctacaccaccagagaggtgggccagtacctggtggtggagagcagcaccggcatcatcgtgatctgggacaagagaaccaccgtgttcatcaagctggcccccagctacaagggcaccgtgtgcggcctgtgcggcaacttcgaccacagaagcaacaacgacttcaccaccagagaccacatggtggtgagcagcgagctggacttcggcaacagctggaaggaggcccccacctgccccgacgtgagcaccaaccccgagccctgcagcctgaacccccacagaagaagctgggccgagaagcagtgcagcatcctgaagagcagcgtgttcagcatctgccacagcaaggtggaccccaagcccttctacgaggcctgcgtgcacgacagctgcagctgcgacaccggcggcgactgcgagtgcttctgcagcgccgtggccagctacgcccaggagtgcaccaaggagggcgcctgcgtgttctggagaacccccgacctgtgccccatcttctgcgactactacaaccccccccacgagtgcgagtggcactacgagccctgcggcaacagaagcttcgagacctgcagaaccatcaacggcatccacagcaacatcagcgtgagctacctggagggctgctaccccagatgccccaaggacagacccatctacgaggaggacctgaagaagtgcgtgaccgccgacaagtgcggctgctacgtggaggacacccactacccccccggcgccagcgtgcccaccgaggagacctgcaagagctgcgtgtgcaccaacagcagccaggtggtgtgcagacccgaggagggcaagatcctgaaccagacccaggacggcgccttctgctactgggagatctgcggccccaacggcaccgtggagaagcacttcaacatctgcagcatcaccaccagacccagcaccctgaccaccttcaccaccatcaccctgcccaccacccccaccaccttcaccaccaccaccaccaccaccacccccaccagcagcaccgtgctgagcaccacccccaagctgtgctgcctgtggagcgactggatcaacgaggaccaccccagcagcggcagcgacgacggcgacagagagaccttcgacggcgtgtgcggcgcccccgaggacatcgagtgcagaagcgtgaaggacccccacctgagcctggagcagctgggccagaaggtgcagtgcgacgtgagcgtgggcttcatctgcaagaacgaggaccagttcggcaacggccccttcggcctgtgctacgactacaagatcagagtgaactgctgctggcccatggacaagtgcatcaccacccccagcccccccaccaccacccccagccccccccccaccagcaccaccaccctgccccccaccaccacccccagcccccccaccaccaccaccaccacccccccccccaccaccacccccagcccccccatcaccaccaccaccacccccccccccaccaccacccccagcccccccatcagcaccaccaccacccccccccccaccaccacccccagcccccccaccaccacccccagcccccccaccaccacccccagcccccccaccaccaccaccaccacccccccccccaccaccacccccagcccccccaccaccacccccatcaccccccccgccagcaccaccaccctgccccccaccaccacccccagcccccccaccaccaccaccaccacccccccccccaccaccacccccatcaccaccaccaccaccgtgacccccacccccacccccaccggcacccagacccccaccaccacccccatcaccaccaccaccaccgtgacccccacccccacccccaccggcacccagacccccaccagcacccccatcaccaccaccaccaccgtgacccccacccccacccccaccggcacccagacccccaccaccacccccatcaccaccaccaccaccgtgacccccacccccacccccaccggcacccagacccccacccccaccgccatcaccaccaccaccaccgtgacccccacccccacccccaccggcacccagacccccaccaccacccccatcaccaccaccaccaccgtgacccccacccccacccccaccggcacccagagccccacccccaccgccatcaccaccaccaccaccgtgacccccacccccacccccaccggcacccagacccccaccagcacccccatcaccaccaccaccaccgtgacccccacccccacccccaccggcacccagacccccacccccacccccatcagcaccaccaccaccgtgacccccacccccacccccaccggcacccagacccccaccaccacccccatcaccaccaccaccaccgtgacccccacccccacccccaccggcacccagacccccaccaccgtgctgatcaccaccaccaccaccatgacccccacccccacccccaccagcaccaagagcaccaccgtgacccccatcaccaccaccaccaccgtgaccgccacccccacccccaccggcacccagacccccaccatgatccccatcagcaccaccaccaccgtgacccccacccccacccccaccaccggcagcaccggcccccccacccacaccagcaccgcccccatcgccgagctgaccaccagcaaccccccccccgagagcagcaccccccagaccagcagaagcaccagcagccccctgaccgagagcaccaccctgctgagcaccctgccccccgccatcgagatgaccagcaccgccccccccagcacccccaccgcccccaccaccaccagcggcggccacaccctgagccccccccccagcaccaccaccagcccccccggcacccccaccagaggcaccaccaccggcagcagcagcgcccccacccccagcaccgtgcagaccaccaccaccagcgcctggacccccacccccacccccctgagcacccccagcatcatcagaaccaccggcctgagaccctaccccagcagcgtgctgatctgctgcgtgctgaacgacacctactacgcccccggcgaggaggtgtacaacggcacctacggcgacacctgctacttcgtgaactgcagcctgagctgcaccctggagttctacaactggagctgccccagcacccccagccccacccccacccccagcaagagcacccccacccccagcaagcccagcagcacccccagcaagcccacccccggcaccaagccccccgagtgccccgacttcgacccccccagacaggagaacgagacctggtggctgtgcgactgcttcatggccacctgcaagtacaacaacaccgtggagatcgtgaaggtggagtgcgagcccccccccatgcccacctgcagcaacggcctgcagcccgtgagagtggaggaccccgacggctgctgctggcactgggagtgcgactgctactgcaccggctggggcgacccccactacgtgaccttcgacggcctgtactacagctaccagggcaactgcacctacgtgctggtggaggagatcagccccagcgtggacaacttcggcgtgtacatcgacaactaccactgcgaccccaacgacaaggtgagctgccccagaaccctgatcgtgagacacgagacccaggaggtgctgatcaagaccgtgcacatgatgcccatgcaggtgcaggtgcaggtgaacagacaggccgtggccctgccctacaagaagtacggcctggaggtgtaccagagcggcatcaactacgtggtggacatccccgagctgggcgtgctggtgagctacaacggcctgagcttcagcgtgagactgccctaccacagattcggcaacaacaccaagggccagtgcggcacctgcaccaacaccaccagcgacgactgcatcctgcccagcggcgagatcgtgagcaactgcgaggccgccgccgaccagtggctggtgaacgaccccagcaagccccactgcccccacagcagcagcaccaccaagagacccgccgtgaccgtgcccggcggcggcaagaccaccccccacaaggactgcacccccagccccctgtgccagctgatcaaggacagcctgttcgcccagtgccacgccctggtgcccccccagcactactacgacgcctgcgtgttcgacagctgcttcatgcccggcagcagcctggagtgcgccagcctgcaggcctacgccgccctgtgcgcccagcagaacatctgcctggactggagaaaccacacccacggcgcctgcctggtggagtgccccagccacagagagtaccaggcctgcggccccgccgaggagcccacctgcaagagcagcagcagccagcagaacaacaccgtgctggtggagggctgcttctgccccgagggcaccatgaactacgcccccggcttcgacgtgtgcgtgaagacctgcggctgcgtgggccccgacaacgtgcccagagagttcggcgagcacttcgagttcgactgcaagaactgcgtgtgcctggagggcggcagcggcatcatctgccagcccaagagatgcagccagaagcccgtgacccactgcgtggaggacggcacctacctggccaccgaggtgaaccccgccgacacctgctgcaacatcaccgtgtgcaagtgcaacaccagcctgtgcaaggagaagcccagcgtgtgccccctgggcttcgaggtgaagagcaagatggtgcccggcagatgctgccccttctactggtgcgagagcaagggcgtgtgcgtgcacggcaacgccgagtaccagcccggcagccccgtgtacagcagcaagtgccaggactgcgtgtgcaccgacaaggtggacaacaacaccctgctgaacgtgatcgcctgcacccacgtgccctgcaacaccagctgcagccccggcttcgagctgatggaggcccccggcgagtgctgcaagaagtgcgagcagacccactgcatcatcaagagacccgacaaccagcacgtgatcctgaagcccggcgacttcaagagcgaccccaagaacaactgcaccttcttcagctgcgtgaagatccacaaccagctgatcagcagcgtgagcaacatcacctgccccaacttcgacgccagcatctgcatccccggcagcatcaccttcatgcccaacggctgctgcaagacctgcacccccagaaacgagaccagagtgccctgcagcaccgtgcccgtgaccaccgaggtgagctacgccggctgcaccaagaccgtgctgatgaaccactgcagcggcagctgcggcaccttcgtgatgtacagcgccaaggcccaggccctggaccacagctgcagctgctgcaaggaggagaagaccagccagagagaggtggtgctgagctgccccaacggcggcagcctgacccacacctacacccacatcgagagctgccagtgccaggacaccgtgtgcggcctgcccaccggcaccagcagaagagccagaagaagccccagacacctgggcagcggctag

SEQ ID NO: 89529 - DNA, 2631 bp, synthetic construct
  misc_feature 1..2631: note = Description of Artificial Sequence: Synthetic coding sequence
  source 1..2631: mol_type = other DNA
atctacagcaccgtgagcaccagcaccaccgccatcaccagccacttcaccaccagcgagaccgccgtgacccccacccccgtgacccccagcagcctgagcaccgacatccccaccaccagcctgagaaccctgacccccagcagcgtgggcaccagcaccagcctgaccaccaccaccgacttccccagcatccccaccgacatcagcaccctgcccaccagaacccacatcatcagcagcagccccagcatccagagcaccgagaccagcagcctggtgggcaccaccagccccaccatgagcaccgtgagaatgaccctgagaatcaccgagaacacccccatcagcagcttcagcaccagcatcgtggtgatccccgagacccccacccagaccccccccgtgctgaccagcgccaccggcacccagaccagccccgcccccaccaccgtgaccttcggcagcaccgacagcagcaccagcaccctgcacaccctgacccccagcaccgccctgagcaccatcgtgagcaccagccaggtgcccatccccagcacccacagcagcaccctgcagaccacccccagcacccccagcctgcagaccagcctgaccagcaccagcgagttcaccaccgagagcttcaccagaggcagcaccagcaccaacgccatcctgaccagcttcagcaccatcatctggagcagcacccccaccatcatcatgagcagcagccccagcagcgccagcatcacccccgtgttcagcaccaccatccacagcgtgcccagcagcccctacatcttcagcaccgagaacgtgggcagcgccagcatcaccggcttccccagcctgagcagcagcgccaccaccagcaccagcagcaccagcagcagcctgaccaccgccctgaccgagatcacccccttcagctacatcagcctgcccagcaccaccccctgccccggcaccatcaccatcaccatcgtgcccgccagccccaccgacccctgcgtggagatggaccccagcaccgaggccaccagcccccccaccacccccctgaccgtgttccccttcaccaccgagatggtgacctgccccaccagcatcagcatccagaccaccctgaccacctacatggacaccagcagcatgatgcccgagagcgagagcagcatcagccccaacgccagcagcagcaccggcaccggcaccgtgcccaccaacaccgtgttcaccagcaccagactgcccaccagcgagacctggctgagcaacagcagcgtgatccccctgcccctgcccggcgtgagcaccatccccctgaccatgaagcccagcagcagcctgcccaccatcctgagaaccagcagcaagagcacccaccccagcccccccaccaccagaaccagcgagacccccgtggccaccacccagacccccaccaccctgaccagcagaagaaccaccagaatcaccagccagatgaccacccagagcaccctgaccaccaccgccggcacctgcgacaacggcggcacctgggagcagggccagtgcgcctgcctgcccggcttcagcggcgacagatgccagctgcagaccagatgccagaacggcggccagtgggacggcctgaagtgccagtgccccagcaccttctacggcagcagctgcgagttcgccgtggagcaggtggacctggacgtggtggagaccgaggtgggcatggaggtgagcgtggaccagcagttcagccccgacctgaacgacaacaccagccaggcctacagagacttcaacaagaccttctggaaccagatgcagaagatcttcgccgacatgcagggcttcaccttcaagggcgtggagatcctgagcctgagaaacggcagcatcgtggtggactacctggtgctgctggagatgcccttcagcccccagctggagagcgagtacgagcaggtgaagaccaccctgaaggagggcctgcagaacgccagccaggacgccaacagctgccaggacagccagaccctgtgcttcaagcccgacagcatcaaggtgaacaacaacagcaagaccgagctgacccccgaggccatctgcagaagagccgcccccaccggctacgaggagttctacttccccctggtggaggccaccagactgagatgcgtgaccaagtgcaccagcggcgtggacaacgccatcgactgccaccagggccagtgcgtgctggagaccagcggccccgcctgcagatgctacagcaccgacacccactggttcagcggccccagatgcgaggtggccgtgcactggagagccctggtgggcggcctgaccgccggcgccgccctgctggtgctgctgctgctggccctgggcgtgagagccgtgagaagcggctggtggggcggccagagaagaggcagaagctgggaccaggacagaaagtggttcgagacctgggacgaggaggtggtgggcaccttcagcaactggggcttcgaggacgacggcaccgacaaggacaccaacttccacgtggccctggagaacgtggacaccaccatgaaggtgcacatcaagagacccgagatgaccagcagcagcgtgtag

SEQ ID NO: 89530 - DNA, 927 bp, synthetic construct
  misc_feature 1..927: note = Description of Artificial Sequence: Synthetic coding sequence
  source 1..927: mol_type = other DNA
tgcgacaacggcggcacctgggagcagggccagtgcgcctgcctgcccggcttcagcggcgacagatgccagctgcagaccagatgccagaacggcggccagtgggacggcctgaagtgccagtgccccagcaccttctacggcagcagctgcgagttcgccgtggagcaggtggacctggacgtggtggagaccgaggtgggcatggaggtgagcgtggaccagcagttcagccccgacctgaacgacaacaccagccaggcctacagagacttcaacaagaccttctggaaccagatgcagaagatcttcgccgacatgcagggcttcaccttcaagggcgtggagatcctgagcctgagaaacggcagcatcgtggtggactacctggtgctgctggagatgcccttcagcccccagctggagagcgagtacgagcaggtgaagaccaccctgaaggagggcctgcagaacgccagccaggacgccaacagctgccaggacagccagaccctgtgcttcaagcccgacagcatcaaggtgaacaacaacagcaagaccgagctgacccccgaggccatctgcagaagagccgcccccaccggctacgaggagttctacttccccctggtggaggccaccagactgagatgcgtgaccaagtgcaccagcggcgtggacaacgccatcgactgccaccagggccagtgcgtgctggagaccagcggccccgcctgcagaagctgggaccaggacagaaagtggttcgagacctgggacgaggaggtggtgggcaccttcagcaactggggcttcgaggacgacggcaccgacaaggacaccaacttccacgtggccctggagaacgtggacaccaccatgaaggtgcacatcaagagacccgagatgaccagcagcagcgtgtag

SEQ ID NO: 89531 - DNA, 3531 bp, synthetic construct
  misc_feature 1..3531: note = Description of Artificial Sequence: Synthetic coding sequence
  source 1..3531: mol_type = other DNA
atgaagggcgccagatggagaagagtgccctgggtgagcctgagctgcctgtgcctgtgcctgctgccccacgtggtgcccggcatgaccacccccagcctgaagaccgacggcggcagaagaaccgccaccagccccccccccaccaccagccagaccatcatcagcaccatccccagcaccgccatgcacaccagaagcaccgccgcccccatccccatcctgcccgagagaggcgtgagcctgttcccctacggcgccggcgccggcgacctggagttcgtgagaagaaccgtggacttcaccagccccctgttcaagcccgccaccggcttccccctgggcagcagcctgagagacagcctgtacttcaccgacaacggccagatcatcttccccgagagcgactaccagatcttcagctaccccaaccccctgcccaccggcttcaccggcagagaccccgtggccctggtggcccccttctgggacgacgccgacttcagcaccggcagaggcaccaccttctaccaggagtacgagaccttctacggcgagcacagcctgctggtgcagcaggccgagagctggatcagaaagatgaccaacaacggcggctacaaggccagatgggccctgaaggtgacctgggtgaacgcccacgcctaccccgcccagtggaccctgggcagcaacacctaccaggccatcctgagcaccgacggcagcagaagctacgccctgttcctgtaccagagcggcggcatgcagtgggacgtggcccagagaagcggcaaccccgtgctgatgggcttcagcagcggcgacggctacttcgagaacagccccctgatgagccagcccgtgtgggagagatacagacccgacagattcctgaacagcaacagcggcctgcagggcctgcagttctacagactgcacagagaggagagacccaactacagactggagtgcctgcagtggctgaagagccagcccagatggcccagctggggctggaaccaggtgagctgcccctgcagctggcagcagggcagaagagacctgagattccagcccgtgagcatcggcagatggggcctgggcagcagacagctgtgcagcttcaccagctggagaggcggcgtgtgctgcagctacggcccctggggcgagttcagagagggctggcacgtgcagagaccctggcagctggcccaggagctggagccccagagctggtgctgcagatggaacgacaagccctacctgtgcgccctgtaccagcagagaagaccccacgtgggctgcgccacctacagacccccccagcccgcctggatgttcggcgacccccacatcaccaccctggacggcgtgagctacaccttcaacggcctgggcgacttcctgctggtgggcgcccaggacggcaacagcagcttcctgctgcagggcagaaccgcccagaccggcagcgcccaggccaccaacttcatcgccttcgccgcccagtacagaagcagcagcctgggccccgtgaccgtgcagtggctgctggagccccacgacgccatcagagtgctgctggacaaccagaccgtgaccttccagcccgaccacgaggacggcggcggccaggagaccttcaacgccaccggcgtgctgctgagcagaaacggcagcgaggtgagcgccagcttcgacggctgggccaccgtgagcgtgatcgccctgagcaacatcctgcacgccagcgccagcctgccccccgagtaccagaacagaaccgagggcctgctgggcgtgtggaacaacaaccccgaggacgacttcagaatgcccaacggcagcaccatcccccccggcagccccgaggagatgctgttccacttcggcatgacctggcagatcaacggcaccggcctgctgggcaagagaaacgaccagctgcccagcaacttcacccccgtgttctacagccagctgcagaagaacagcagctgggccgagcacctgatcagcaactgcgacggcgacagcagctgcatctacgacaccctggccctgagaaacgccagcatcggcctgcacaccagagaggtgagcaagaactacgagcaggccaacgccaccctgaaccagtacccccccagcatcaacggcggcagagtgatcgaggcctacaagggccagaccaccctgatccagtacaccagcaacgccgaggacgccaacttcaccctgagagacagctgcaccgacctggagctgttcgagaacggcaccctgctgtggacccccaagagcctggagcccttcaccctggagatcctggccagaagcgccaagatcggcctggccagcgccctgcagcccagaaccgtggtgtgccactgcaacgccgagagccagtgcctgtacaaccagaccagcagagtgggcaacagcagcctggaggtggccggctgcaagtgcgacggcggcaccttcggcagatactgcgagggcagcgaggacgcctgcgaggagccctgcttccccagcgtgcactgcgtgcccggcaagggctgcgaggcctgcccccccaacctgaccggcgacggcagacactgcgccgccctgggcagcagcttcctgtgccagaaccagagctgccccgtgaactactgctacaaccagggccactgctacatcagccagaccctgggctgccagcccatgtgcacctgcccccccgccttcaccgacagcagatgcttcctggccggcaacaacttcagccccaccgtgaacctggagctgcccctgagagtgatccagctgctgctgagcgaggaggagaacgccagcatggccgaggtgaacgccagcgtggcctacagactgggcaccctggacatgagagccttcctgagaaacagccaggtggagagaatcgacagcgccgcccccgccagcggcagccccatccagcactggatggtgatcagcgagttccagtacagacccagaggccccgtgatcgacttcctgaacaaccagctgctggccgccgtggtggaggccttcctgtaccacgtgcccagaagaagcgaggagcccagaaacgacgtggtgttccagcccatcagcggcgaggacgtgagagacgtgaccgccctgaacgtgagcaccctgaaggcctacttcagatgcgacggctacaagggctacgacctggtgtacagcccccagagcggcttcacctgcgtgagcccctgcagcagaggctactgcgaccacggcggccagtgccagcacctgcccagcggccccagatgcagctgcgtgagcttcagcatctacaccgcctggggcgagcactgcgagcacctgagcatgaagctggacgccttcttcggcatcttcttcggcgccctgggcggcctgctgctgctgggcgtgggcaccttcgtggtgctgagattctggggctgcagcggcgccagattcagctacttcctgaacagcgccgaggccctgccctag

SEQ ID NO: 89532 - DNA, 3378 bp, synthetic construct
  misc_feature 1..3378: note = Description of Artificial Sequence: Synthetic coding sequence
  source 1..3378: mol_type = other DNA
atgaagggcgccagatggagaagagtgccctgggtgagcctgagctgcctgtgcctgtgcctgctgccccacgtggtgcccggcgtgagcctgttcccctacggcgccggcgccggcgacctggagttcgtgagaagaaccgtggacttcaccagccccctgttcaagcccgccaccggcttccccctgggcagcagcctgagagacagcctgtacttcaccgacaacggccagatcatcttccccgagagcgactaccagatcttcagctaccccaaccccctgcccaccggcttcaccggcagagaccccgtggccctggtggcccccttctgggacgacgccgacttcagcaccggcagaggcaccaccttctaccaggagtacgagaccttctacggcgagcacagcctgctggtgcagcaggccgagagctggatcagaaagatgaccaacaacggcggctacaaggccagatgggccctgaaggtgacctgggtgaacgcccacgcctaccccgcccagtggaccctgggcagcaacacctaccaggccatcctgagcaccgacggcagcagaagctacgccctgttcctgtaccagagcggcggcatgcagtgggacgtggcccagagaagcggcaaccccgtgctgatgggcttcagcagcggcgacggctacttcgagaacagccccctgatgagccagcccgtgtgggagagatacagacccgacagattcctgaacagcaacagcggcctgcagggcctgcagttctacagactgcacagagaggagagacccaactacagactggagtgcctgcagtggctgaagagccagcccagatggcccagctggggctggaaccaggtgagctgcccctgcagctggcagcagggcagaagagacctgagattccagcccgtgagcatcggcagatggggcctgggcagcagacagctgtgcagcttcaccagctggagaggcggcgtgtgctgcagctacggcccctggggcgagttcagagagggctggcacgtgcagagaccctggcagctggcccaggagctggagccccagagctggtgctgcagatggaacgacaagccctacctgtgcgccctgtaccagcagagaagaccccacgtgggctgcgccacctacagacccccccagcccgcctggatgttcggcgacccccacatcaccaccctggacggcgtgagctacaccttcaacggcctgggcgacttcctgctggtgggcgcccaggacggcaacagcagcttcctgctgcagggcagaaccgcccagaccggcagcgcccaggccaccaacttcatcgccttcgccgcccagtacagaagcagcagcctgggccccgtgaccgtgcagtggctgctggagccccacgacgccatcagagtgctgctggacaaccagaccgtgaccttccagcccgaccacgaggacggcggcggccaggagaccttcaacgccaccggcgtgctgctgagcagaaacggcagcgaggtgagcgccagcttcgacggctgggccaccgtgagcgtgatcgccctgagcaacatcctgcacgccagcgccagcctgccccccgagtaccagaacagaaccgagggcctgctgggcgtgtggaacaacaaccccgaggacgacttcagaatgcccaacggcagcaccatcccccccggcagccccgaggagatgctgttccacttcggcatgacctggcagatcaacggcaccggcctgctgggcaagagaaacgaccagctgcccagcaacttcacccccgtgttctacagccagctgcagaagaacagcagctgggccgagcacctgatcagcaactgcgacggcgacagcagctgcatctacgacaccctggccctgagaaacgccagcatcggcctgcacaccagagaggtgagcaagaactacgagcaggccaacgccaccctgaaccagtacccccccagcatcaacggcggcagagtgatcgaggcctacaagggccagaccaccctgatccagtacaccagcaacgccgaggacgccaacttcaccctgagagacagctgcaccgacctggagctgttcgagaacggcaccctgctgtggacccccaagagcctggagcccttcaccctggagatcctggccagaagcgccaagatcggcctggccagcgccctgcagcccagaaccgtggtgtgccactgcaacgccgagagccagtgcctgtacaaccagaccagcagagtgggcaacagcagcctggaggtggccggctgcaagtgcgacggcggcaccttcggcagatactgcgagggcagcgaggacgcctgcgaggagccctgcttccccagcgtgcactgcgtgcccggcaagggctgcgaggcctgcccccccaacctgaccggcgacggcagacactgcgccgccctgggcagcagcttcctgtgccagaaccagagctgccccgtgaactactgctacaaccagggccactgctacatcagccagaccctgggctgccagcccatgtgcacctgcccccccgccttcaccgacagcagatgcttcctggccggcaacaacttcagccccaccgtgaacctggagctgcccctgagagtgatccagctgctgctgagcgaggaggagaacgccagcatggccgaggtgaacgccagcgtggcctacagactgggcaccctggacatgagagccttcctgagaaacagccaggtggagagaatcgacagcgccgcccccgccagcggcagccccatccagcactggatggtgatcagcgagttccagtacagacccagaggccccgtgatcgacttcctgaacaaccagctgctggccgccgtggtggaggccttcctgtaccacgtgcccagaagaagcgaggagcccagaaacgacgtggtgttccagcccatcagcggcgaggacgtgagagacgtgaccgccctgaacgtgagcaccctgaaggcctacttcagatgcgacggctacaagggctacgacctggtgtacagcccccagagcggcttcacctgcgtgagcccctgcagcagaggctactgcgaccacggcggccagtgccagcacctgcccagcggccccagatgcagctgcgtgagcttcagcatctacaccgcctggggcgagcactgcgagcacctgagcatgaagctggacgccttcttcggcatcttcttcggcgccctgggcggcctgctgctgctgggcgtgggcaccttcgtggtgctgagattctggggctgcagcggcgccagattcagctacttcctgaacagcgccgaggccctgccctag

SEQ ID NO: 89533 - DNA, 5739 bp, synthetic construct
  misc_feature 1..5739: note = Description of Artificial Sequence: Synthetic coding sequence
  source 1..5739: mol_type = other DNA
cccggcaccaccgaggacaccctgatcaccggcagcaagaccgccgcccccgtgaccagcaccggcagcaccaccgccaccctggagggccagagcaccgccgccagcagcagaaccagcaaccaggacatcagcgccagcagccagaaccaccagaccaagagcaccgagaccaccagcaaggcccagaccgacaccctgacccagatgatgaccagcaccctgttcagcagccccagcgtgcacaacgtgatggagaccgccccccccgacgagatgaccaccagcttccccagcagcgtgaccaacaccctgatgatgaccagcaagaccatcaccatgaccaccagcaccgacagcaccctgggcaacaccgaggagaccagcaccgccggcaccgagagcagcacccccgtgaccagcgccgtgagcatcaccgccggccaggagggccagagcagaaccaccagctggagaaccagcatccaggacaccagcgccagcagccagaaccactggaccagaagcacccagaccaccagagagagccagaccagcaccctgacccacagaaccaccagcacccccagcttcagccccagcgtgcacaacgtgaccggcaccgtgagccagaagaccagccccagcggcgagaccgccaccagcagcctgtgcagcgtgaccaacaccagcatgatgaccagcgagaagatcaccgtgaccaccagcaccggcagcaccctgggcaaccccggcgagaccagcagcgtgcccgtgaccggcagcctgatgcccgtgaccagcgccgccctggtgaccttcgaccccgagggccagagccccgccaccttcagcagaaccagcacccaggacaccaccgccttcagcaagaaccaccagacccagagcgtggagaccaccagagtgagccagatcaacaccctgaacaccctgacccccgtgaccaccagcaccgtgctgagcagccccagcggcttcaaccccagcggcaccgtgagccaggagaccttccccagcggcgagaccaccaccagcagccccagcagcgtgagcaacaccttcctggtgaccagcaaggtgttcagaatgcccaccagcagagacagcaccctgggcaacaccgaggagaccagcctgagcgtgagcggcaccatcagcgccatcaccagcaaggtgagcaccatctggtggagcgacaccctgagcaccgccctgagccccagcagcctgccccccaagatcagcaccgccttccacacccagcagagcgagggcgccgagaccaccggcagaccccacgagagaagcagcttcagccccggcgtgagccaggagatcttcaccctgcacgagaccaccacctggcccagcagcttcagcagcaagggccacaccacctggagccagaccgagctgcccagcaccagcaccggcgccgccaccagactggtgaccggcaaccccagcaccggcaccgccggcaccatccccagagtgcccagcaaggtgagcgccatcggcgagcccggcgagcccaccacctacagcagccacagcaccaccctgcccaagaccaccggcgccggcgcccagacccagtggacccaggagaccggcaccaccggcgaggccctgctgagcagccccagctacagcgtgacccagatgatcaagaccgccaccagccccagcagcagccccatgctggacagacacaccagccagcagatcaccaccgcccccagcaccaaccacagcaccatccacagcaccagcaccagcccccaggagagccccgccgtgagccagagaggccacacccaggccccccagaccacccaggagagccagaccaccagaagcgtgagccccatgaccgacaccaagaccgtgaccacccccggcagcagcttcaccgccagcggccacagccccagcgagatcgtgccccaggacgcccccaccatcagcgccgccaccaccttcgcccccgcccccaccggcgacggccacaccacccaggcccccaccaccgccctgcaggccgcccccagcagccacgacgccaccctgggccccagcggcggcaccagcctgagcaagaccggcgccctgaccctggccaacagcgtggtgagcacccccggcggccccgagggccagtggaccagcgccagcgccagcaccagccccgacaccgccgccgccatgacccacacccaccaggccgagagcaccgaggccagcggccagacccagaccagcgagcccgccagcagcggcagcagaaccaccagcgccggcaccgccacccccagcagcagcggcgccagcggcaccacccccagcggcagcgagggcatcagcaccagcggcgagaccaccagattcagcagcaaccccagcagagacagccacaccacccagagcaccaccgagctgctgagcgccagcgccagccacggcgccatccccgtgagcaccggcatggccagcagcatcgtgcccggcaccttccaccccaccctgagcgaggccagcaccgccggcagacccaccggccagagcagccccaccagccccagcgccagcccccaggagaccgccgccatcagcagaatggcccagacccagagaaccagaaccagcagaggcagcgacaccatcagcctggccagccaggccaccgacaccttcagcaccgtgccccccaccccccccagcatcaccagcaccggcctgaccagcccccagaccgagacccacaccctgagccccagcggcagcggcaagaccttcaccaccgccctgatcagcaacgccacccccctgcccgtgacctacgccagcagcgccagcaccggccacgccacccccctggccgtgagcagcgccaccagcgccagcaccgtgagcagcgacagccccctgaagatggagacccccggcatgaccacccccagcctgaagaccgacggcggcagaagaaccgccaccagccccccccccaccaccagccagaccatcatcagcaccatccccagcaccgccatgcacaccagaagcaccgccgcccccatccccatcctgcccgagagaggcgtgagcctgttcccctacggcgccggcgccggcgacctggagttcgtgagaagaaccgtggacttcaccagccccctgttcaagcccgccaccggcttccccctgggcagcagcctgagagacagcctgtacttcaccgacaacggccagatcatcttccccgagagcgactaccagatcttcagctaccccaaccccctgcccaccggcttcaccggcagagaccccgtggccctggtggcccccttctgggacgacgccgacttcagcaccggcagaggcaccaccttctaccaggagtacgagaccttctacggcgagcacagcctgctggtgcagcaggccgagagctggatcagaaagatgaccaacaacggcggctacaaggccagatgggccctgaaggtgacctgggtgaacgcccacgcctaccccgcccagtggaccctgggcagcaacacctaccaggccatcctgagcaccgacggcagcagaagctacgccctgttcctgtaccagagcggcggcatgcagtgggacgtggcccagagaagcggcaaccccgtgctgatgggcttcagcagcggcgacggctacttcgagaacagccccctgatgagccagcccgtgtgggagagatacagacccgacagattcctgaacagcaacagcggcctgcagggcctgcagttctacagactgcacagagaggagagacccaactacagactggagtgcctgcagtggctgaagagccagcccagatggcccagctggggctggaaccaggtgagctgcccctgcagctggcagcagggcagaagagacctgagattccagcccgccagcctgccccccgagtaccagaacagaaccgagggcctgctgggcgtgtggaacaacaaccccgaggacgacttcagaatgcccaacggcagcaccatcccccccggcagccccgaggagatgctgttccacttcggcatgacctggcagatcaacggcaccggcctgctgggcaagagaaacgaccagctgcccagcaacttcacccccgtgttctacagccagctgcagaagaacagcagctgggccgagcacctgatcagcaactgcgacggcgacagcagctgcatctacgacaccctggccctgagaaacgccagcatcggcctgcacaccagagaggtgagcaagaactacgagcaggccaacgccaccctgaaccagtacccccccagcatcaacggcggcagagtgatcgaggcctacaagggccagaccaccctgatccagtacaccagcaacgccgaggacgccaacttcaccctgagagacagctgcaccgacctggagctgttcgagaacggcaccctgctgtggacccccaagagcctggagcccttcaccctggagatcctggccagaagcgccaagatcggcctggccagcgccctgcagcccagaaccgtggtgtgccactgcaacgccgagagccagtgcctgtacaaccagaccagcagagtgggcaacagcagcctggaggtggccggctgcaagtgcgacggcggcaccttcggcagatactgcgagggcagcgaggacgcctgcgaggagccctgcttccccagcgtgcactgcgtgcccggcaagggctgcgaggcctgcccccccaacctgaccggcgacggcagacactgcgccgccctgggcagcagcttcctgtgccagaaccagagctgccccgtgaactactgctacaaccagggccactgctacatcagccagaccctgggctgccagcccatgtgcacctgcccccccgccttcaccgacagcagatgcttcctggccggcaacaacttcagccccaccgtgaacctggagctgcccctgagagtgatccagctgctgctgagcgaggaggagaacgccagcatggccgaggtgaacgccagcgtggcctacagactgggcaccctggacatgagagccttcctgagaaacagccaggtggagagaatcgacagcgccgcccccgccagcggcagccccatccagcactggatggtgatcagcgagttccagtacagacccagaggccccgtgatcgacttcctgaacaaccagctgctggccgccgtggtggaggccttcctgtaccacgtgcccagaagaagcgaggagcccagaaacgacgtggtgttccagcccatcagcggcgaggacgtgagagacgtgaccgccctgaacgtgagcaccctgaaggcctacttcagatgcgacggctacaagggctacgacctggtgtacagcccccagagcggcttcacctgcgtgagcccctgcagcagaggctactgcgaccacggcggccagtgccagcacctgcccagcggccccagatgcagctgcgtgagcttcagcatctacaccgcctggggcgagcactgcgagcacctgagcatgaagctggacgccttcttcggcatcttcttcggcgccctgggcggcctgctgctgctgggcgtgggcaccttcgtggtgctgagattctggggctgcagcggcgccagattcagctacttcctgaacagcgccgaggccctgccctag

SEQ ID NO: 89534 - DNA, 16239 bp, synthetic construct
  misc_feature 1..16239: note = Description of Artificial Sequence: Synthetic coding sequence
  source 1..16239: mol_type = other DNA
atgaagggcgccagatggagaagagtgccctgggtgagcctgagctgcctgtgcctgtgcctgctgccccacgtggtgcccggcaccaccgaggacaccctgatcaccggcagcaagaccgccgcccccgtgaccagcaccggcagcaccaccgccaccctggagggccagagcaccgccgccagcagcagaaccagcaaccaggacatcagcgccagcagccagaaccaccagaccaagagcaccgagaccaccagcaaggcccagaccgacaccctgacccagatgatgaccagcaccctgttcagcagccccagcgtgcacaacgtgatggagaccgccccccccgacgagatgaccaccagcttccccagcagcgtgaccaacaccctgatgatgaccagcaagaccatcaccatgaccaccagcaccgacagcaccctgggcaacaccgaggagaccagcaccgccggcaccgagagcagcacccccgtgaccagcgccgtgagcatcaccgccggccaggagggccagagcagaaccaccagctggagaaccagcatccaggacaccagcgccagcagccagaaccactggaccagaagcacccagaccaccagagagagccagaccagcaccctgacccacagaaccaccagcacccccagcttcagccccagcgtgcacaacgtgaccggcaccgtgagccagaagaccagccccagcggcgagaccgccaccagcagcctgtgcagcgtgaccaacaccagcatgatgaccagcgagaagatcaccgtgaccaccagcaccggcagcaccctgggcaaccccggcgagaccagcagcgtgcccgtgaccggcagcctgatgcccgtgaccagcgccgccctggtgaccttcgaccccgagggccagagccccgccaccttcagcagaaccagcacccaggacaccaccgccttcagcaagaaccaccagacccagagcgtggagaccaccagagtgagccagatcaacaccctgaacaccctgacccccgtgaccaccagcaccgtgctgagcagccccagcggcttcaaccccagcggcaccgtgagccaggagaccttccccagcggcgagaccaccaccagcagccccagcagcgtgagcaacaccttcctggtgaccagcaaggtgttcagaatgcccaccagcagagacagcaccctgggcaacaccgaggagaccagcctgagcgtgagcggcaccatcagcgccatcaccagcaaggtgagcaccatctggtggagcgacaccctgagcaccgccctgagccccagcagcctgccccccaagatcagcaccgccttccacacccagcagagcgagggcgccgagaccaccggcagaccccacgagagaagcagcttcagccccggcgtgagccaggagatcttcaccctgcacgagaccaccacctggcccagcagcttcagcagcaagggccacaccacctggagccagaccgagctgcccagcaccagcaccggcgccgccaccagactggtgaccggcaaccccagcaccggcaccgccggcaccatccccagagtgcccagcaaggtgagcgccatcggcgagcccggcgagcccaccacctacagcagccacagcaccaccctgcccaagaccaccggcgccggcgcccagacccagtggacccaggagaccggcaccaccggcgaggccctgctgagcagccccagctacagcgtgacccagatgatcaagaccgccaccagccccagcagcagccccatgctggacagacacaccagccagcagatcaccaccgcccccagcaccaaccacagcaccatccacagcaccagcaccagcccccaggagagccccgccgtgagccagagaggccacacccaggccccccagaccacccaggagagccagaccaccagaagcgtgagccccatgaccgacaccaagaccgtgaccacccccggcagcagcttcaccgccagcggccacagccccagcgagatcgtgccccaggacgcccccaccatcagcgccgccaccaccttcgcccccgcccccaccggcgacggccacaccacccaggcccccaccaccgccctgcaggccgcccccagcagccacgacgccaccctgggccccagcggcggcaccagcctgagcaagaccggcgccctgaccctggccaacagcgtggtgagcacccccggcggccccgagggccagtggaccagcgccagcgccagcaccagccccgacaccgccgccgccatgacccacacccaccaggccgagagcaccgaggccagcggccagacccagaccagcgagcccgccagcagcggcagcagaaccaccagcgccggcaccgccacccccagcagcagcggcgccagcggcaccacccccagcggcagcgagggcatcagcaccagcggcgagaccaccagattcagcagcaaccccagcagagacagccacaccacccagagcaccaccgagctgctgagcgccagcgccagccacggcgccatccccgtgagcaccggcatggccagcagcatcgtgcccggcaccttccaccccaccctgagcgaggccagcaccgccggcagacccaccggccagagcagccccaccagccccagcgccagcccccaggagaccgccgccatcagcagaatggcccagacccagagaaccagaaccagcagaggcagcgacaccatcagcctggccagccaggccaccgacaccttcagcaccgtgccccccaccccccccagcatcaccagcaccggcctgaccagcccccagaccgagacccacaccctgagccccagcggcagcggcaagaccttcaccaccgccctgatcagcaacgccacccccctgcccgtgacctacgccagcagcgccagcaccggccacaccacccccctgcacgtgaccgacgccagcagcgtgagcaccggccacgccacccccctgcccgtgaccagccccagcagcgtgagcaccggccacaccacccccctgcccgtgaccgacaccagcagcgagagcaccggccacgtgacccccctgcccgtgaccagcttcagcagcgccagcaccggcgacagcacccccctgcccgtgaccgacaccagcagcgccagcaccggccacgtgacccccctgcccgtgaccagcctgagcagcgccagcaccggcgacaccacccccctgcccgtgaccgacaccagcagcgccagcaccggccacgccaccagcctgcccgtgaccgacaccagcagcgtgagcaccggccacaccacccccctgcccgtgaccgacaccagcagcgccagcaccggccacgccaccagcctgcccgtgaccgacaccagcagcgtgagcaccggccacaccacccccctgcacgtgaccgacgccagcagcgccagcaccggccaggccacccccctgcccgtgaccagcctgagcagcgtgagcaccggcgacaccacccccctgcccgtgaccagccccagcagcgccagcaccggccacgccacccccctgctggtgaccgacaccagcagcgccagcaccggccacgccacccccctgcccgtgaccgacgccagcagcgtgagcaccgaccacgccaccagcctgcccgtgaccatccccagcgccgccagcaccggccacaccacccccctgcccgtgaccgacaccagcagcgccagcaccggccaggccaccagcctgctggtgaccgacaccagcagcgtgagcaccggcgacaccacccccctgcccgtgaccagcaccagcagcgccagcaccggccacgtgacccccctgcacgtgaccagccccagcagcgccagcaccggccacgccacccccctgcccgtgaccagcctgagcagcgccagcaccggcgacaccatgcccctgcccgtgaccagccccagcagcgccagcaccggcgacaccacccccctgcccgtgaccgacgccagcagcgtgagcaccggccacaccacccccctgcacgtgaccgacgccagcagcgccagcaccggccaggccacccccctgcccgtgaccagcctgagcagcgtgagcaccggcgacaccacccccctgcccgtgaccagccccagcagcgccagcaccggccacgccacccccctgctggtgaccgacaccagcagcgccagcaccggccacgccacccccctgcccgtgaccgacgccagcagcgtgagcaccgaccacgccaccagcctgcccgtgaccatccccagcgccgccagcaccggccacaccacccccctgcccgtgaccgacaccagcagcgccagcaccggccaggccaccagcctgctggtgaccgacaccagcagcgtgagcaccggcgacaccacccccctgcccgtgaccagcaccagcagcgccagcaccggccacgtgacccccctgcacgtgaccagccccagcagcgccagcaccggccacgccacccccctgcccgtgaccagcctgagcagcgccagcaccggcgacaccatgcccctgcccgtgaccagccccagcagcgccagcaccggcgacaccacccccctgcccgtgaccgacgccagcagcgtgagcaccggccacaccacccccctgcccgtgaccagccccagcagcgccagcaccggccacaccacccccctgcccgtgaccgacaccagcagcgccagcaagggcgacaccacccccctgcccgtgaccagccccagcagcgccagcaccggccacaccacccccctgcccgtgaccgacaccagcagcgccagcaccggcgacaccacccccctgcccgtgaccaacgccagcagcctgagcaccggccacgccacccccctgcacgtgaccagccccagcagcgccagcaccggccacgccacccccctgcccgtgaccagcaccagcagcgccagcaccggccacgccacccccctgcccgtgaccggcctgagcagcgccaccaccgacgacaccaccagactgcccgtgaccgacgtgagcagcgccagcaccggccaggccacccccctgcccgtgaccagcctgagcagcgtgagcaccggcgacaccacccccctgcccgtgaccagccccagcagcgccagcaccggccacgccagccccctgctggtgaccgacgccagcagcgccagcaccggccaggccacccccctgcccgtgaccgacaccagcagcgtgagcaccgcccacgccacccccctgcccgtgaccggcctgagcagcgccagcaccgacgacaccaccagactgcccgtgaccgacgtgagcagcgccagcaccggccaggccatccccctgcccgtgaccagccccagcagcgccagcaccggcgacaccacccccctgcccgtgaccgacgccagcagcgccagcaccggcgacaccaccagcctgcccgtgaccatccccagcagcgccagcagcggccacaccaccagcctgcccgtgaccgacgccagcagcgtgagcaccggccacgccaccagcctgctggtgaccgacgccagcagcgtgagcaccggcgacaccacccccctgcccgtgaccgacaccaacagcgccagcaccggcgacaccacccccctgcacgtgaccgacgccagcagcgtgagcaccggccacgccaccagcctgcccgtgaccagcctgagcagcgccagcaccggcgacaccacccccctgcccgtgaccagccccagcagcgccagcagcggccacaccacccccctgcccgtgaccgacgccagcagcgtgcccaccggccacgccaccagcctgcccgtgaccgacgccagcagcgtgagcaccggccacgccacccccctgcccgtgaccgacgccagcagcgtgagcaccggccacgccacccccctgcccgtgaccgacaccagcagcgtgagcaccggccaggccacccccctgcccgtgaccagcctgagcagcgccagcaccggcgacaccacccccctgcccgtgaccgacaccagcagcgccagcaccggccaggacacccccctgcccgtgaccagcctgagcagcgtgagcaccggcgacaccacccccctgcccgtgaccaaccccagcagcgccagcaccggccacgccacccccctgctggtgaccgacgccagcagcatcagcaccggccacgccaccagcctgctggtgaccgacgccagcagcgtgagcaccggccacgccaccgccctgcacgacaccgacgccagcagcctgagcaccggcgacaccacccccctgcccgtgaccagccccagcagcaccagcaccggcgacaccacccccctgcccgtgaccgagaccagcagcgtgagcaccggccacgccaccagcctgcccgtgaccgacaccagcagcgccagcaccggccacgccaccagcctgcccgtgaccgacaccagcagcgccagcaccggccacgccacccccctgcccgtgaccgacaccagcagcgccagcaccggccaggccacccccctgcccgtgaccagccccagcagcgccagcaccggccacgccatccccctgctggtgaccgacaccagcagcgccagcaccggccaggccacccccctgcccgtgaccagcctgagcagcgccagcaccggcgacaccacccccctgcccgtgaccgacgccagcagcgtgagcaccggccacgccaccagcctgcccgtgaccagcctgagcagcgtgagcaccggcgacaccacccccctgcccgtgaccagccccagcagcgccagcaccggccacgccacccccctgcacgtgaccgacgccagcagcgccagcaccggccacgccacccccctgcccgtgaccagcctgagcagcgccagcaccggcgacaccacccccctgcccgtgaccagccccagcagcgccagcaccggccacgccacccccctgcacgtgaccgacgccagcagcgtgagcaccggcgacaccacccccctgcccgtgaccagcagcagcagcgccagcagcggccacaccacccccctgcccgtgaccgacgccagcagcgccagcaccggcgacaccacccccctgcccgtgaccgacaccagcagcgccagcaccggccacgccacccacctgcccgtgaccggcctgagcagcgccagcaccggcgacaccaccagactgcccgtgaccaacgtgagcagcgccagcaccggccacgccacccccctgcccgtgaccagcaccagcagcgccagcaccggcgacaccacccccctgcccggcaccgacaccagcagcgtgagcaccggccacaccacccccctgctggtgaccgacgccagcagcgtgagcaccggcgacaccaccagactgcccgtgaccagccccagcagcgccagcaccggccacaccacccccctgcccgtgaccgacacccccagcgccagcaccggcgacaccacccccctgcccgtgaccaacgccagcagcctgagcaccagacacgccaccagcctgcacgtgaccagccccagcagcgccagcaccggccacgccaccagcctgcccgtgaccgacaccagcgccgccagcaccggccacgccacccccctgcccgtgaccagcaccagcagcgccagcaccggcgacaccacccccctgcccgtgaccgacacctacagcgccagcaccggccaggccacccccctgcccgtgaccagcctgagcagcgtgagcaccggcgacaccacccccctgcccgtgaccagccccagcagcgccagcaccggccacgccacccccctgctggtgaccgacgccagcagcgccagcaccggccaggccacccccctgcccgtgaccagcctgagcagcgtgagcaccggcgacaccacccccctgcccgtgaccagccccagcagcgccagcaccggccacgccaccagcctgcccgtgaccgacaccagcagcgccagcaccggcgacaccaccagcctgcccgtgaccgacaccagcagcgcctacaccggcgacaccaccagcctgcccgtgaccgacaccagcagcagcagcaccggcgacaccacccccctgctggtgaccgagaccagcagcgtgagcaccggcgacaccacccccctgcccgtgaccgacaccagcagcgccagcaccggccacgccacccccctgcccgtgaccaacaccagcagcgtgagcaccggccacgccacccccctgcacgtgaccagccccagcagcgccagcaccggccacaccacccccctgcccgtgaccgacgccagcagcgtgagcaccggccacgccaccagcctgcccgtgaccgacgccagcagcgtgttcaccggccacgccaccagcctgcccgtgaccatccccagcagcgccagcagcggccacaccacccccctgcccgtgaccgacgccagcagcgtgagcaccggccacgccaccagcctgcccgtgaccgacgccagcagcgtgagcaccggccacgccacccccctgcccgtgaccgacgccagcagcgtgagcaccggccacgccacccccctgcccctgaccagcctgagcagcgtgagcaccggcgacaccacccccctgcccgtgaccgacaccagcagcgccagcaccggccaggccacccccctgcccgtgaccagcctgagcagcgtgagcaccggcgacaccacccccctgcccgtgaccgacaccagcagcgccagcaccggccacgccaccagcctgcccgtgaccgacaccagcagcgccagcaccggccacgccacccccctgcccgacaccgacaccagcagcgccagcaccggccacgccaccctgctgcccgtgaccgacaccagcagcgccagcatcggccacgccaccagcctgcccgtgaccgacaccagcagcatcagcaccggccacgccacccccctgcacgtgaccagccccagcagcgccagcaccggccacgccacccccctgcccgtgaccgacaccagcagcgccagcaccggccacgccaaccccctgcacgtgaccagccccagcagcgccagcaccggccacgccacccccctgcccgtgaccgacaccagcagcgccagcaccggccacgccacccccctgcccgtgaccagcctgagcagcgtgagcaccggcgacaccacccccctgcccgtgaccagccccagcagcgccagcaccggccacaccacccccctgcccgtgaccgacaccagcagcgccagcaccggccaggccaccgccctgcccgtgaccagcaccagcagcgccagcaccggcgacaccacccccctgcccgtgaccgacaccagcagcgccagcaccggccaggccacccccctgcccgtgaccagcctgagcagcgtgagcaccggcgacaccacccccctgcccgtgaccagccccagcagcgccagcaccggccacgccacccccctgctggtgaccgacgccagcagcgccagcaccggccaggccacccccctgcccgtgaccagcctgagcagcgtgagcaccggcgacaccacccccctgcccgtgaccagccccagcagcgccagcaccggccacgccaccagcctgcccgtgaccgacaccagcagcgccagcaccggcgacaccaccagcctgcccgtgaccgacaccagcagcgcctacaccggcgacaccaccagcctgcccgtgaccgacaccagcagcagcagcaccggcgacaccacccccctgctggtgaccgagaccagcagcgtgagcaccggccacgccacccccctgctggtgaccgacgccagcagcgccagcaccggccacgccacccccctgcacgtgaccagccccagcagcgccagcaccggcgacaccacccccgtgcccgtgaccgacaccagcagcgtgagcaccggccacgccacccccctgcccgtgaccggcctgagcagcgccagcaccggcgacaccaccagactgcccgtgaccgacatcagcagcgccagcaccggccaggccacccccctgcccgtgaccaacaccagcagcgtgagcaccggcgacaccatgcccctgcccgtgaccagccccagcagcgccagcaccggccacgccacccccctgcccgtgaccagcaccagcagcgccagcaccggccacgccacccccgtgcccgtgaccagcaccagcagcgccagcaccggccacaccacccccctgcccgtgaccgacaccagcagcgccagcaccggcgacaccacccccctgcccgtgaccagccccagcagcgccagcaccggccacaccacccccctgcacgtgaccatccccagcagcgccagcaccggcgacaccagcaccctgcccgtgaccggcgccagcagcgccagcaccggccacgccacccccctgcccgtgaccgacaccagcagcgtgagcaccggccacgccacccccctgcccgtgaccagcctgagcagcgtgagcaccggcgacaccacccccctgcccgtgaccgacgccagcagcgccagcaccggccaggccacccccctgcccgtgaccagcctgagcagcgtgagcaccggcgacaccacccccctgctggtgaccgacgccagcagcgtgagcaccggccacgccacccccctgcccgtgaccgacaccagcagcgccagcaccggcgacaccaccagactgcccgtgaccgacaccagcagcgccagcaccggccaggccacccccctgcccgtgaccagcctgagcagcgtgagcaccggcgacaccacccccctgctggtgaccgacgccagcagcgtgagcaccggccacgccacccccctgcccgtgaccgacaccagcagcgccagcaccggcgacaccaccagactgcccgtgaccgacaccagcagcgccagcaccggccaggccacccccctgcccgtgaccatccccagcagcagcagcagcggccacaccacccccctgcccgtgaccagcaccagcagcgtgagcaccggccacgtgacccccctgcacgtgaccagccccagcagcgccagcaccggccacgtgacccccctgcccgtgaccagcaccagcagcgccagcaccggccacgccacccccctgctggtgaccgacgccagcagcgtgagcaccggccacgccacccccctgcccgtgaccgacgccagcagcgccagcaccggcgacaccacccccctgcccgtgaccgacaccagcagcgccagcaccggccaggccacccccctgcccgtgaccagcctgagcagcgtgagcaccggcgacaccacccccctgcccgtgaccgacgccagcagcgccagcaccggccacgccacccccctgcccgtgaccatccccagcagcgtgagcaccggcgacaccatgcccctgcccgtgaccagccccagcagcgccagcaccggccacgccacccccctgcccgtgaccggcctgagcagcgccagcaccggcgacaccacccccctgcccgtgaccgacaccagcagcgccagcaccagacacgccacccccctgcccgtgaccgacaccagcagcgccagcaccgacgacaccaccagactgcccgtgaccgacgtgagcagcgccagcaccggccacgccacccccctgcccgtgaccagcaccagcagcgccagcaccggcgacaccacccccctgcccgtgaccgacaccagcagcgtgagcaccggccacgccaccagcctgcccgtgaccagcagaagcagcgccagcaccggccacgccacccccctgcccgtgaccgacaccagcagcgtgagcaccggccacgccacccccctgcccgtgaccagcaccagcagcgtgagcaccggccacgccacccccctgcccgtgaccagccccagcagcgccagcaccggccacgccacccccgtgcccgtgaccagcaccagcagcgccagcaccggcgacaccacccccctgcccgtgaccaacgccagcagcctgagcaccggccacgccacccccctgcacgtgaccagccccagcagcgccagcagaggcgacaccagcaccctgcccgtgaccgacgccagcagcgccagcaccggccacgccacccccctgcccctgaccagcctgagcagcgtgagcaccggcgacaccacccccctgcccgtgaccgacaccagcagcgccagcaccggccaggccacccccctgcccgtgaccagcctgagcagcgtgagcaccggcgacaccacccccctgcccgtgaccatccccagcagcgccagcagcggccacaccaccagcctgcccgtgaccgacgccagcagcgtgagcaccggccacggcacccccctgcccgtgaccagcaccagcagcgccagcaccggcgacaccacccccctgcccgtgaccgacaccagcagcgccagcaccggccacgccacccccctgcccgtgaccgacaccagcagcgccagcaccggccacgccacccccctgcccgtgaccagcctgagcagcgtgagcaccggccacgccacccccctggccgtgagcagcgccaccagcgccagcaccgtgagcagcgacagccccctgaagatggagacccccggcatgaccacccccagcctgaagaccgacggcggcagaagaaccgccaccagccccccccccaccaccagccagaccatcatcagcaccatccccagcaccgccatgcacaccagaagcaccgccgcccccatccccatcctgcccgagagaggcgtgagcctgttcccctacggcgccggcgccggcgacctggagttcgtgagaagaaccgtggacttcaccagccccctgttcaagcccgccaccggcttccccctgggcagcagcctgagagacagcctgtacttcaccgacaacggccagatcatcttccccgagagcgactaccagatcttcagctaccccaaccccctgcccaccggcttcaccggcagagaccccgtggccctggtggcccccttctgggacgacgccgacttcagcaccggcagaggcaccaccttctaccaggagtacgagaccttctacggcgagcacagcctgctggtgcagcaggccgagagctggatcagaaagatgaccaacaacggcggctacaaggccagatgggccctgaaggtgacctgggtgaacgcccacgcctaccccgcccagtggaccctgggcagcaacacctaccaggccatcctgagcaccgacggcagcagaagctacgccctgttcctgtaccagagcggcggcatgcagtgggacgtggcccagagaagcggcaaccccgtgctgatgggcttcagcagcggcgacggctacttcgagaacagccccctgatgagccagcccgtgtgggagagatacagacccgacagattcctgaacagcaacagcggcctgcagggcctgcagttctacagactgcacagagaggagagacccaactacagactggagtgcctgcagtggctgaagagccagcccagatggcccagctggggctggaaccaggtgagctgcccctgcagctggcagcagggcagaagagacctgagattccagcccgtgagcatcggcagatggggcctgggcagcagacagctgtgcagcttcaccagctggagaggcggcgtgtgctgcagctacggcccctggggcgagttcagagagggctggcacgtgcagagaccctggcagctggcccaggagctggagccccagagctggtgctgcagatggaacgacaagccctacctgtgcgccctgtaccagcagagaagaccccacgtgggctgcgccacctacagacccccccagcccgcctggatgttcggcgacccccacatcaccaccctggacggcgtgagctacaccttcaacggcctgggcgacttcctgctggtgggcgcccaggacggcaacagcagcttcctgctgcagggcagaaccgcccagaccggcagcgcccaggccaccaacttcatcgccttcgccgcccagtacagaagcagcagcctgggccccgtgaccgtgcagtggctgctggagccccacgacgccatcagagtgctgctggacaaccagaccgtgaccttccagcccgaccacgaggacggcggcggccaggagaccttcaacgccaccggcgtgctgctgagcagaaacggcagcgaggtgagcgccagcttcgacggctgggccaccgtgagcgtgatcgccctgagcaacatcctgcacgccagcgccagcctgccccccgagtaccagaacagaaccgagggcctgctgggcgtgtggaacaacaaccccgaggacgacttcagaatgcccaacggcagcaccatcccccccggcagccccgaggagatgctgttccacttcggcatgacctggcagatcaacggcaccggcctgctgggcaagagaaacgaccagctgcccagcaacttcacccccgtgttctacagccagctgcagaagaacagcagctgggccgagcacctgatcagcaactgcgacggcgacagcagctgcatctacgacaccctggccctgagaaacgccagcatcggcctgcacaccagagaggtgagcaagaactacgagcaggccaacgccaccctgaaccagtacccccccagcatcaacggcggcagagtgatcgaggcctacaagggccagaccaccctgatccagtacaccagcaacgccgaggacgccaacttcaccctgagagacagctgcaccgacctggagctgttcgagaacggcaccctgctgtggacccccaagagcctggagcccttcaccctggagatcctggccagaagcgccaagatcggcctggccagcgccctgcagcccagaaccgtggtgtgccactgcaacgccgagagccagtgcctgtacaaccagaccagcagagtgggcaacagcagcctggaggtggccggctgcaagtgcgacggcggcaccttcggcagatactgcgagggcagcgaggacgcctgcgaggagccctgcttccccagcgtgcactgcgtgcccggcaagggctgcgaggcctgcccccccaacctgaccggcgacggcagacactgcgccgccctgggcagcagcttcctgtgccagaaccagagctgccccgtgaactactgctacaaccagggccactgctacatcagccagaccctgggctgccagcccatgtgcacctgcccccccgccttcaccgacagcagatgcttcctggccggcaacaacttcagccccaccgtgaacctggagctgcccctgagagtgatccagctgctgctgagcgaggaggagaacgccagcatggccgaggtgaacgccagcgtggcctacagactgggcaccctggacatgagagccttcctgagaaacagccaggtggagagaatcgacagcgccgcccccgccagcggcagccccatccagcactggatggtgatcagcgagttccagtacagacccagaggccccgtgatcgacttcctgaacaaccagctgctggccgccgtggtggaggccttcctgtaccacgtgcccagaagaagcgaggagcccagaaacgacgtggtgttccagcccatcagcggcgaggacgtgagagacgtgaccgccctgaacgtgagcaccctgaaggcctacttcagatgcgacggctacaagggctacgacctggtgtacagcccccagagcggcttcacctgcgtgagcccctgcagcagaggctactgcgaccacggcggccagtgccagcacctgcccagcggccccagatgcagctgcgtgagcttcagcatctacaccgcctggggcgagcactgcgagcacctgagcatgaagctggacgccttcttcggcatcttcttcggcgccctgggcggcctgctgctgctgggcgtgggcaccttcgtggtgctgagattctggggctgcagcggcgccagattcagctacttcctgaacagcgccgaggccctgccctag

SEQ ID NO: 89535 - DNA, 16083 bp, synthetic construct
  misc_feature 1..16083: note = Description of Artificial Sequence: Synthetic coding sequence
  source 1..16083: mol_type = other DNA
atgaagggcgccagatggagaagagtgccctgggtgagcctgagctgcctgtgcctgtgcctgctgccccacgtggtgcccggcaccaccgaggacaccctgatcaccggcagcaagaccgccgcccccgtgaccagcaccggcagcaccaccgccaccctggagggccagagcaccgccgccagcagcagaaccagcaaccaggacatcagcgccagcagccagaaccaccagaccaagagcaccgagaccaccagcaaggcccagaccgacaccctgacccagatgatgaccagcaccctgttcagcagccccagcgtgcacaacgtgatggagaccgccccccccgacgagatgaccaccagcttccccagcagcgtgaccaacaccctgatgatgaccagcaagaccatcaccatgaccaccagcaccgacagcaccctgggcaacaccgaggagaccagcaccgccggcaccgagagcagcacccccgtgaccagcgccgtgagcatcaccgccggccaggagggccagagcagaaccaccagctggagaaccagcatccaggacaccagcgccagcagccagaaccactggaccagaagcacccagaccaccagagagagccagaccagcaccctgacccacagaaccaccagcacccccagcttcagccccagcgtgcacaacgtgaccggcaccgtgagccagaagaccagccccagcggcgagaccgccaccagcagcctgtgcagcgtgaccaacaccagcatgatgaccagcgagaagatcaccgtgaccaccagcaccggcagcaccctgggcaaccccggcgagaccagcagcgtgcccgtgaccggcagcctgatgcccgtgaccagcgccgccctggtgaccttcgaccccgagggccagagccccgccaccttcagcagaaccagcacccaggacaccaccgccttcagcaagaaccaccagacccagagcgtggagaccaccagagtgagccagatcaacaccctgaacaccctgacccccgtgaccaccagcaccgtgctgagcagccccagcggcttcaaccccagcggcaccgtgagccaggagaccttccccagcggcgagaccaccaccagcagccccagcagcgtgagcaacaccttcctggtgaccagcaaggtgttcagaatgcccaccagcagagacagcaccctgggcaacaccgaggagaccagcctgagcgtgagcggcaccatcagcgccatcaccagcaaggtgagcaccatctggtggagcgacaccctgagcaccgccctgagccccagcagcctgccccccaagatcagcaccgccttccacacccagcagagcgagggcgccgagaccaccggcagaccccacgagagaagcagcttcagccccggcgtgagccaggagatcttcaccctgcacgagaccaccacctggcccagcagcttcagcagcaagggccacaccacctggagccagaccgagctgcccagcaccagcaccggcgccgccaccagactggtgaccggcaaccccagcaccggcaccgccggcaccatccccagagtgcccagcaaggtgagcgccatcggcgagcccggcgagcccaccacctacagcagccacagcaccaccctgcccaagaccaccggcgccggcgcccagacccagtggacccaggagaccggcaccaccggcgaggccctgctgagcagccccagctacagcgtgacccagatgatcaagaccgccaccagccccagcagcagccccatgctggacagacacaccagccagcagatcaccaccgcccccagcaccaaccacagcaccatccacagcaccagcaccagcccccaggagagccccgccgtgagccagagaggccacacccaggccccccagaccacccaggagagccagaccaccagaagcgtgagccccatgaccgacaccaagaccgtgaccacccccggcagcagcttcaccgccagcggccacagccccagcgagatcgtgccccaggacgcccccaccatcagcgccgccaccaccttcgcccccgcccccaccggcgacggccacaccacccaggcccccaccaccgccctgcaggccgcccccagcagccacgacgccaccctgggccccagcggcggcaccagcctgagcaagaccggcgccctgaccctggccaacagcgtggtgagcacccccggcggccccgagggccagtggaccagcgccagcgccagcaccagccccgacaccgccgccgccatgacccacacccaccaggccgagagcaccgaggccagcggccagacccagaccagcgagcccgccagcagcggcagcagaaccaccagcgccggcaccgccacccccagcagcagcggcgccagcggcaccacccccagcggcagcgagggcatcagcaccagcggcgagaccaccagattcagcagcaaccccagcagagacagccacaccacccagagcaccaccgagctgctgagcgccagcgccagccacggcgccatccccgtgagcaccggcatggccagcagcatcgtgcccggcaccttccaccccaccctgagcgaggccagcaccgccggcagacccaccggccagagcagccccaccagccccagcgccagcccccaggagaccgccgccatcagcagaatggcccagacccagagaaccagaaccagcagaggcagcgacaccatcagcctggccagccaggccaccgacaccttcagcaccgtgccccccaccccccccagcatcaccagcaccggcctgaccagcccccagaccgagacccacaccctgagccccagcggcagcggcaagaccttcaccaccgccctgatcagcaacgccacccccctgcccgtgacctacgccagcagcgccagcaccggccacaccacccccctgcacgtgaccgacgccagcagcgtgagcaccggccacgccacccccctgcccgtgaccagccccagcagcgtgagcaccggccacaccacccccctgcccgtgaccgacaccagcagcgagagcaccggccacgtgacccccctgcccgtgaccagcttcagcagcgccagcaccggcgacagcacccccctgcccgtgaccgacaccagcagcgccagcaccggccacgtgacccccctgcccgtgaccagcctgagcagcgccagcaccggcgacaccacccccctgcccgtgaccgacaccagcagcgccagcaccggccacgccaccagcctgcccgtgaccgacaccagcagcgtgagcaccggccacaccacccccctgcccgtgaccgacaccagcagcgccagcaccggccacgccaccagcctgcccgtgaccgacaccagcagcgtgagcaccggccacaccacccccctgcacgtgaccgacgccagcagcgccagcaccggccaggccacccccctgcccgtgaccagcctgagcagcgtgagcaccggcgacaccacccccctgcccgtgaccagccccagcagcgccagcaccggccacgccacccccctgctggtgaccgacaccagcagcgccagcaccggccacgccacccccctgcccgtgaccgacgccagcagcgtgagcaccgaccacgccaccagcctgcccgtgaccatccccagcgccgccagcaccggccacaccacccccctgcccgtgaccgacaccagcagcgccagcaccggccaggccaccagcctgctggtgaccgacaccagcagcgtgagcaccggcgacaccacccccctgcccgtgaccagcaccagcagcgccagcaccggccacgtgacccccctgcacgtgaccagccccagcagcgccagcaccggccacgccacccccctgcccgtgaccagcctgagcagcgccagcaccggcgacaccatgcccctgcccgtgaccagccccagcagcgccagcaccggcgacaccacccccctgcccgtgaccgacgccagcagcgtgagcaccggccacaccacccccctgcacgtgaccgacgccagcagcgccagcaccggccaggccacccccctgcccgtgaccagcctgagcagcgtgagcaccggcgacaccacccccctgcccgtgaccagccccagcagcgccagcaccggccacgccacccccctgctggtgaccgacaccagcagcgccagcaccggccacgccacccccctgcccgtgaccgacgccagcagcgtgagcaccgaccacgccaccagcctgcccgtgaccatccccagcgccgccagcaccggccacaccacccccctgcccgtgaccgacaccagcagcgccagcaccggccaggccaccagcctgctggtgaccgacaccagcagcgtgagcaccggcgacaccacccccctgcccgtgaccagcaccagcagcgccagcaccggccacgtgacccccctgcacgtgaccagccccagcagcgccagcaccggccacgccacccccctgcccgtgaccagcctgagcagcgccagcaccggcgacaccatgcccctgcccgtgaccagccccagcagcgccagcaccggcgacaccacccccctgcccgtgaccgacgccagcagcgtgagcaccggccacaccacccccctgcccgtgaccagccccagcagcgccagcaccggccacaccacccccctgcccgtgaccgacaccagcagcgccagcaagggcgacaccacccccctgcccgtgaccagccccagcagcgccagcaccggccacaccacccccctgcccgtgaccgacaccagcagcgccagcaccggcgacaccacccccctgcccgtgaccaacgccagcagcctgagcaccggccacgccacccccctgcacgtgaccagccccagcagcgccagcaccggccacgccacccccctgcccgtgaccagcaccagcagcgccagcaccggccacgccacccccctgcccgtgaccggcctgagcagcgccaccaccgacgacaccaccagactgcccgtgaccgacgtgagcagcgccagcaccggccaggccacccccctgcccgtgaccagcctgagcagcgtgagcaccggcgacaccacccccctgcccgtgaccagccccagcagcgccagcaccggccacgccagccccctgctggtgaccgacgccagcagcgccagcaccggccaggccacccccctgcccgtgaccgacaccagcagcgtgagcaccgcccacgccacccccctgcccgtgaccggcctgagcagcgccagcaccgacgacaccaccagactgcccgtgaccgacgtgagcagcgccagcaccggccaggccatccccctgcccgtgaccagccccagcagcgccagcaccggcgacaccacccccctgcccgtgaccgacgccagcagcgccagcaccggcgacaccaccagcctgcccgtgaccatccccagcagcgccagcagcggccacaccaccagcctgcccgtgaccgacgccagcagcgtgagcaccggccacgccaccagcctgctggtgaccgacgccagcagcgtgagcaccggcgacaccacccccctgcccgtgaccgacaccaacagcgccagcaccggcgacaccacccccctgcacgtgaccgacgccagcagcgtgagcaccggccacgccaccagcctgcccgtgaccagcctgagcagcgccagcaccggcgacaccacccccctgcccgtgaccagccccagcagcgccagcagcggccacaccacccccctgcccgtgaccgacgccagcagcgtgcccaccggccacgccaccagcctgcccgtgaccgacgccagcagcgtgagcaccggccacgccacccccctgcccgtgaccgacgccagcagcgtgagcaccggccacgccacccccctgcccgtgaccgacaccagcagcgtgagcaccggccaggccacccccctgcccgtgaccagcctgagcagcgccagcaccggcgacaccacccccctgcccgtgaccgacaccagcagcgccagcaccggccaggacacccccctgcccgtgaccagcctgagcagcgtgagcaccggcgacaccacccccctgcccgtgaccaaccccagcagcgccagcaccggccacgccacccccctgctggtgaccgacgccagcagcatcagcaccggccacgccaccagcctgctggtgaccgacgccagcagcgtgagcaccggccacgccaccgccctgcacgacaccgacgccagcagcctgagcaccggcgacaccacccccctgcccgtgaccagccccagcagcaccagcaccggcgacaccacccccctgcccgtgaccgagaccagcagcgtgagcaccggccacgccaccagcctgcccgtgaccgacaccagcagcgccagcaccggccacgccaccagcctgcccgtgaccgacaccagcagcgccagcaccggccacgccacccccctgcccgtgaccgacaccagcagcgccagcaccggccaggccacccccctgcccgtgaccagccccagcagcgccagcaccggccacgccatccccctgctggtgaccgacaccagcagcgccagcaccggccaggccacccccctgcccgtgaccagcctgagcagcgccagcaccggcgacaccacccccctgcccgtgaccgacgccagcagcgtgagcaccggccacgccaccagcctgcccgtgaccagcctgagcagcgtgagcaccggcgacaccacccccctgcccgtgaccagccccagcagcgccagcaccggccacgccacccccctgcacgtgaccgacgccagcagcgccagcaccggccacgccacccccctgcccgtgaccagcctgagcagcgccagcaccggcgacaccacccccctgcccgtgaccagccccagcagcgccagcaccggccacgccacccccctgcacgtgaccgacgccagcagcgtgagcaccggcgacaccacccccctgcccgtgaccagcagcagcagcgccagcagcggccacaccacccccctgcccgtgaccgacgccagcagcgccagcaccggcgacaccacccccctgcccgtgaccgacaccagcagcgccagcaccggccacgccacccacctgcccgtgaccggcctgagcagcgccagcaccggcgacaccaccagactgcccgtgaccaacgtgagcagcgccagcaccggccacgccacccccctgcccgtgaccagcaccagcagcgccagcaccggcgacaccacccccctgcccggcaccgacaccagcagcgtgagcaccggccacaccacccccctgctggtgaccgacgccagcagcgtgagcaccggcgacaccaccagactgcccgtgaccagccccagcagcgccagcaccggccacaccacccccctgcccgtgaccgacacccccagcgccagcaccggcgacaccacccccctgcccgtgaccaacgccagcagcctgagcaccagacacgccaccagcctgcacgtgaccagccccagcagcgccagcaccggccacgccaccagcctgcccgtgaccgacaccagcgccgccagcaccggccacgccacccccctgcccgtgaccagcaccagcagcgccagcaccggcgacaccacccccctgcccgtgaccgacacctacagcgccagcaccggccaggccacccccctgcccgtgaccagcctgagcagcgtgagcaccggcgacaccacccccctgcccgtgaccagccccagcagcgccagcaccggccacgccacccccctgctggtgaccgacgccagcagcgccagcaccggccaggccacccccctgcccgtgaccagcctgagcagcgtgagcaccggcgacaccacccccctgcccgtgaccagccccagcagcgccagcaccggccacgccaccagcctgcccgtgaccgacaccagcagcgccagcaccggcgacaccaccagcctgcccgtgaccgacaccagcagcgcctacaccggcgacaccaccagcctgcccgtgaccgacaccagcagcagcagcaccggcgacaccacccccctgctggtgaccgagaccagcagcgtgagcaccggcgacaccacccccctgcccgtgaccgacaccagcagcgccagcaccggccacgccacccccctgcccgtgaccaacaccagcagcgtgagcaccggccacgccacccccctgcacgtgaccagccccagcagcgccagcaccggccacaccacccccctgcccgtgaccgacgccagcagcgtgagcaccggccacgccaccagcctgcccgtgaccgacgccagcagcgtgttcaccggccacgccaccagcctgcccgtgaccatccccagcagcgccagcagcggccacaccacccccctgcccgtgaccgacgccagcagcgtgagcaccggccacgccaccagcctgcccgtgaccgacgccagcagcgtgagcaccggccacgccacccccctgcccgtgaccgacgccagcagcgtgagcaccggccacgccacccccctgcccctgaccagcctgagcagcgtgagcaccggcgacaccacccccctgcccgtgaccgacaccagcagcgccagcaccggccaggccacccccctgcccgtgaccagcctgagcagcgtgagcaccggcgacaccacccccctgcccgtgaccgacaccagcagcgccagcaccggccacgccaccagcctgcccgtgaccgacaccagcagcgccagcaccggccacgccacccccctgcccgacaccgacaccagcagcgccagcaccggccacgccaccctgctgcccgtgaccgacaccagcagcgccagcatcggccacgccaccagcctgcccgtgaccgacaccagcagcatcagcaccggccacgccacccccctgcacgtgaccagccccagcagcgccagcaccggccacgccacccccctgcccgtgaccgacaccagcagcgccagcaccggccacgccaaccccctgcacgtgaccagccccagcagcgccagcaccggccacgccacccccctgcccgtgaccgacaccagcagcgccagcaccggccacgccacccccctgcccgtgaccagcctgagcagcgtgagcaccggcgacaccacccccctgcccgtgaccagccccagcagcgccagcaccggccacaccacccccctgcccgtgaccgacaccagcagcgccagcaccggccaggccaccgccctgcccgtgaccagcaccagcagcgccagcaccggcgacaccacccccctgcccgtgaccgacaccagcagcgccagcaccggccaggccacccccctgcccgtgaccagcctgagcagcgtgagcaccggcgacaccacccccctgcccgtgaccagccccagcagcgccagcaccggccacgccacccccctgctggtgaccgacgccagcagcgccagcaccggccaggccacccccctgcccgtgaccagcctgagcagcgtgagcaccggcgacaccacccccctgcccgtgaccagccccagcagcgccagcaccggccacgccaccagcctgcccgtgaccgacaccagcagcgccagcaccggcgacaccaccagcctgcccgtgaccgacaccagcagcgcctacaccggcgacaccaccagcctgcccgtgaccgacaccagcagcagcagcaccggcgacaccacccccctgctggtgaccgagaccagcagcgtgagcaccggccacgccacccccctgctggtgaccgacgccagcagcgccagcaccggccacgccacccccctgcacgtgaccagccccagcagcgccagcaccggcgacaccacccccgtgcccgtgaccgacaccagcagcgtgagcaccggccacgccacccccctgcccgtgaccggcctgagcagcgccagcaccggcgacaccaccagactgcccgtgaccgacatcagcagcgccagcaccggccaggccacccccctgcccgtgaccaacaccagcagcgtgagcaccggcgacaccatgcccctgcccgtgaccagccccagcagcgccagcaccggccacgccacccccctgcccgtgaccagcaccagcagcgccagcaccggccacgccacccccgtgcccgtgaccagcaccagcagcgccagcaccggccacaccacccccctgcccgtgaccgacaccagcagcgccagcaccggcgacaccacccccctgcccgtgaccagccccagcagcgccagcaccggccacaccacccccctgcacgtgaccatccccagcagcgccagcaccggcgacaccagcaccctgcccgtgaccggcgccagcagcgccagcaccggccacgccacccccctgcccgtgaccgacaccagcagcgtgagcaccggccacgccacccccctgcccgtgaccagcctgagcagcgtgagcaccggcgacaccacccccctgcccgtgaccgacgccagcagcgccagcaccggccaggccacccccctgcccgtgaccagcctgagcagcgtgagcaccggcgacaccacccccctgctggtgaccgacgccagcagcgtgagcaccggccacgccacccccctgcccgtgaccgacaccagcagcgccagcaccggcgacaccaccagactgcccgtgaccgacaccagcagcgccagcaccggccaggccacccccctgcccgtgaccagcctgagcagcgtgagcaccggcgacaccacccccctgctggtgaccgacgccagcagcgtgagcaccggccacgccacccccctgcccgtgaccgacaccagcagcgccagcaccggcgacaccaccagactgcccgtgaccgacaccagcagcgccagcaccggccaggccacccccctgcccgtgaccatccccagcagcagcagcagcggccacaccacccccctgcccgtgaccagcaccagcagcgtgagcaccggccacgtgacccccctgcacgtgaccagccccagcagcgccagcaccggccacgtgacccccctgcccgtgaccagcaccagcagcgccagcaccggccacgccacccccctgctggtgaccgacgccagcagcgtgagcaccggccacgccacccccctgcccgtgaccgacgccagcagcgccagcaccggcgacaccacccccctgcccgtgaccgacaccagcagcgccagcaccggccaggccacccccctgcccgtgaccagcctgagcagcgtgagcaccggcgacaccacccccctgcccgtgaccgacgccagcagcgccagcaccggccacgccacccccctgcccgtgaccatccccagcagcgtgagcaccggcgacaccatgcccctgcccgtgaccagccccagcagcgccagcaccggccacgccacccccctgcccgtgaccggcctgagcagcgccagcaccggcgacaccacccccctgcccgtgaccgacaccagcagcgccagcaccagacacgccacccccctgcccgtgaccgacaccagcagcgccagcaccgacgacaccaccagactgcccgtgaccgacgtgagcagcgccagcaccggccacgccacccccctgcccgtgaccagcaccagcagcgccagcaccggcgacaccacccccctgcccgtgaccgacaccagcagcgtgagcaccggccacgccaccagcctgcccgtgaccagcagaagcagcgccagcaccggccacgccacccccctgcccgtgaccgacaccagcagcgtgagcaccggccacgccacccccctgcccgtgaccagcaccagcagcgtgagcaccggccacgccacccccctgcccgtgaccagccccagcagcgccagcaccggccacgccacccccgtgcccgtgaccagcaccagcagcgccagcaccggcgacaccacccccctgcccgtgaccaacgccagcagcctgagcaccggccacgccacccccctgcacgtgaccagccccagcagcgccagcagaggcgacaccagcaccctgcccgtgaccgacgccagcagcgccagcaccggccacgccacccccctgcccctgaccagcctgagcagcgtgagcaccggcgacaccacccccctgcccgtgaccgacaccagcagcgccagcaccggccaggccacccccctgcccgtgaccagcctgagcagcgtgagcaccggcgacaccacccccctgcccgtgaccatccccagcagcgccagcagcggccacaccaccagcctgcccgtgaccgacgccagcagcgtgagcaccggccacggcacccccctgcccgtgaccagcaccagcagcgccagcaccggcgacaccacccccctgcccgtgaccgacaccagcagcgccagcaccggccacgccacccccctgcccgtgaccgacaccagcagcgccagcaccggccacgccacccccctgcccgtgaccagcctgagcagcgtgagcaccggccacgccacccccctggccgtgagcagcgccaccagcgccagcaccgtgagcagcgacagccccctgaagatggagacccccggcatgaccacccccagcctgaagaccgacggcggcagaagaaccgccaccagccccccccccaccaccagccagaccatcatcagcaccatccccagcaccgccatgcacaccagaagcaccgccgcccccatccccatcctgcccgagagaggcgtgagcctgttcccctacggcgccggcgccggcgacctggagttcgtgagaagaaccgtggacttcaccagccccctgttcaagcccgccaccggcttccccctgggcagcagcctgagagacagcctgtacttcaccgacaacggccagatcatcttccccgagagcgactaccagatcttcagctaccccaaccccctgcccaccggcttcaccggcagagaccccgtggccctggtggcccccttctgggacgacgccgacttcagcaccggcagaggcaccaccttctaccagagcaacacctaccaggccatcctgagcaccgacggcagcagaagctacgccctgttcctgtaccagagcggcggcatgcagtgggacgtggcccagagaagcggcaaccccgtgctgatgggcttcagcagcggcgacggctacttcgagaacagccccctgatgagccagcccgtgtgggagagatacagacccgacagattcctgaacagcaacagcggcctgcagggcctgcagttctacagactgcacagagaggagagacccaactacagactggagtgcctgcagtggctgaagagccagcccagatggcccagctggggctggaaccaggtgagctgcccctgcagctggcagcagggcagaagagacctgagattccagcccgtgagcatcggcagatggggcctgggcagcagacagctgtgcagcttcaccagctggagaggcggcgtgtgctgcagctacggcccctggggcgagttcagagagggctggcacgtgcagagaccctggcagctggcccaggagctggagccccagagctggtgctgcagatggaacgacaagccctacctgtgcgccctgtaccagcagagaagaccccacgtgggctgcgccacctacagacccccccagcccgcctggatgttcggcgacccccacatcaccaccctggacggcgtgagctacaccttcaacggcctgggcgacttcctgctggtgggcgcccaggacggcaacagcagcttcctgctgcagggcagaaccgcccagaccggcagcgcccaggccaccaacttcatcgccttcgccgcccagtacagaagcagcagcctgggccccgtgaccgtgcagtggctgctggagccccacgacgccatcagagtgctgctggacaaccagaccgtgaccttccagcccgaccacgaggacggcggcggccaggagaccttcaacgccaccggcgtgctgctgagcagaaacggcagcgaggtgagcgccagcttcgacggctgggccaccgtgagcgtgatcgccctgagcaacatcctgcacgccagcgccagcctgccccccgagtaccagaacagaaccgagggcctgctgggcgtgtggaacaacaaccccgaggacgacttcagaatgcccaacggcagcaccatcccccccggcagccccgaggagatgctgttccacttcggcatgacctggcagatcaacggcaccggcctgctgggcaagagaaacgaccagctgcccagcaacttcacccccgtgttctacagccagctgcagaagaacagcagctgggccgagcacctgatcagcaactgcgacggcgacagcagctgcatctacgacaccctggccctgagaaacgccagcatcggcctgcacaccagagaggtgagcaagaactacgagcaggccaacgccaccctgaaccagtacccccccagcatcaacggcggcagagtgatcgaggcctacaagggccagaccaccctgatccagtacaccagcaacgccgaggacgccaacttcaccctgagagacagctgcaccgacctggagctgttcgagaacggcaccctgctgtggacccccaagagcctggagcccttcaccctggagatcctggccagaagcgccaagatcggcctggccagcgccctgcagcccagaaccgtggtgtgccactgcaacgccgagagccagtgcctgtacaaccagaccagcagagtgggcaacagcagcctggaggtggccggctgcaagtgcgacggcggcaccttcggcagatactgcgagggcagcgaggacgcctgcgaggagccctgcttccccagcgtgcactgcgtgcccggcaagggctgcgaggcctgcccccccaacctgaccggcgacggcagacactgcgccgccctgggcagcagcttcctgtgccagaaccagagctgccccgtgaactactgctacaaccagggccactgctacatcagccagaccctgggctgccagcccatgtgcacctgcccccccgccttcaccgacagcagatgcttcctggccggcaacaacttcagccccaccgtgaacctggagctgcccctgagagtgatccagctgctgctgagcgaggaggagaacgccagcatggccgaggtgaacgccagcgtggcctacagactgggcaccctggacatgagagccttcctgagaaacagccaggtggagagaatcgacagcgccgcccccgccagcggcagccccatccagcactggatggtgatcagcgagttccagtacagacccagaggccccgtgatcgacttcctgaacaaccagctgctggccgccgtggtggaggccttcctgtaccacgtgcccagaagaagcgaggagcccagaaacgacgtggtgttccagcccatcagcggcgaggacgtgagagacgtgaccgccctgaacgtgagcaccctgaaggcctacttcagatgcgacggctacaagggctacgacctggtgtacagcccccagagcggcttcacctgcgtgagcccctgcagcagaggctactgcgaccacggcggccagtgccagcacctgcccagcggccccagatgcagctgcgtgagcttcagcatctacaccgcctggggcgagcactgcgagcacctgagcatgaagctggacgccttcttcggcatcttcttcggcgccctgggcggcctgctgctgctgggcgtgggcaccttcgtggtgctgagattctggggctgcagcggcgccagattcagctacttcctgaacagcgccgaggccctgccctag

SEQ ID NO: 89536 - DNA, 1863 bp, synthetic construct
  misc_feature 1..1863: note = Description of Artificial Sequence: Synthetic coding sequence
  source 1..1863: mol_type = other DNA
atgagcgtgggcagaagaaagctggccctgctgtgggccctggccctggccctggcctgcaccagacacaccggccacgcccaggacggcagcagcgagagcagctacaagcaccaccccgccctgagccccatcgccagaggccccagcggcgtgcccctgagaggcgccaccgtgttccccagcctgagaaccatccccgtggtgagagccagcaaccccgcccacaacggcagagtgtgcagcacctggggcagcttccactacaagaccttcgacggcgacgtgttcagattccccggcctgtgcaactacgtgttcagcgagcactgcggcgccgcctacgaggacttcaaccccgccaccccccagcccggcgtgagcggcccccacgccgagcagggcccccacgagggcggctggagaggccaccccgccgaccagggcctgagacccggccagagaccccccggccccgccgccctgcagcccgtgtggggcccccacagcagagccgccgccacccccagatggagacccggctgggccctgagcagctgcggcaccaccatgaccgcctgctgctggctggacaccaagtacgccaacaagctgtgggccctgtggggcctgcagagagacgccagaggccagagagcccccctgccccagcaccaggccgacacccacggcatcagagagcccgccagatggaccacccccagaagcagcgtgagaaccctgagcctgaaccccagaggcaccgcccccctggccctgggcatctgcgaggagctgctgcacggccagctgttcagcggctgcgtggccctggtggacgtgggcagctacctggaggcctgcagacaggacctgtgcttctgcgaggacaccgacctgctgagctgcgtgtgccacaccctggccgagtacagcagacagtgcacccacgccggcggcctgccccaggactggagaggccccgacttctgcccccagaagtgccccaacaacatgcagtaccacgagtgcagaagcccctgcgccgacacctgcagcaaccaggagcacagcagagcctgcgaggaccactgcgtggccggctgcttctgccccgagggcaccgtgctggacgacatcggccagaccggctgcgtgcccgtgagcaagtgcgcctgcgtgtacaacggcgccgcctacgcccccggcgccacctacagcaccgactgcaccaactgcacctgcagcggcggcagatggagctgccaggaggtgccctgccccggcacctgcagcgtgctgggcggcgcccacttcagcaccttcgacggcaagcagtacaccgtgcacggcgactgcagctacgtgctgaccaagccctgcgacagcagcgccttcaccgtgctggccgagctgagaagatgcggcctgaccgacagcgagacctgcctgaagagcgtgaccctgagcctggacggcgtgcagaccgtggtggtgatcaaggccagcggcgaggtgttcctgaaccagatctacacccagctgcccatcagcgccgccaacgtgaccatcttcagacccagcaccttcttcatcatcgcccagaccagcctgggcctgcagctgaacctgcagctggtgcccaccatgcagctgttcatgcagctggcccccaagctgagaggccagacctgcggcctgtgcggcaacttcaacagcatccaggccgacgacttcagaaccctgagcggcgtggtggaggccaccgccgccgccttcttcaacaccttcaagacccaggccgcctgccccaacatcagaaacagcttcgaggacccctgcagcctgagcgtggagaactag

SEQ ID NO: 89537 - DNA, 1872 bp, synthetic construct
  misc_feature 1..1872: note = Description of Artificial Sequence: Synthetic coding sequence
  source 1..1872: mol_type = other DNA
atgagcgtgggcagaagaaagctggccctgctgtgggccctggccctggccctggcctgcaccagacacaccggccacgcccaggacggcagcagcgagagcagctacaagcaccaccccgccctgagccccatcgccagaggccccagcggcgtgcccctgagaggcgccaccgtgttccccagcctgagaaccatccccgtggtgagagccagcaaccccgcccacaacggcagagtgtgcagcacctggggcagcttccactacaagaccttcgacggcgacgtgttcagattccccggcctgtgcaactacgtgttcagcgagcactgcggcgccgcctacgaggacttcaacatccagctgagaagaagccaggagagcgccgcccccaccctgagcagagtgctgatgaaggtggacggcgtggtgatccagctgaccaagggcagcgtgctggtgaacggccaccccgtgctgctgcccttcagccagagcggcgtgctgatccagcagagcagcagctacaccaaggtggaggccagactgggcctggtgctgatgtggaaccacgacgacagcctgctgctggagctggacaccaagtacgccaacaagacctgcggcctgtgcggcgacttcaacggcatgcccgtggtgagcgagctgctgagccacaacaccaagctgacccccatggagttcggcaacctgcagaagatggacgaccccaccgagcagtgccaggaccccgtgcccgagccccccagaaactgcagcaccggcttcggcatctgcgaggagctgctgcacggccagctgttcagcggctgcgtggccctggtggacgtgggcagctacctggaggcctgcagacaggacctgtgcttctgcgaggacaccgacctgctgagctgcgtgtgccacaccctggccgagtacagcagacagtgcacccacgccggcggcctgccccaggactggagaggccccgacttctgcccccagaagtgccccaacaacatgcagtaccacgagtgcagaagcccctgcgccgacacctgcagcaaccaggagcacagcagagcctgcgaggaccactgcgtggccggctgcttctgccccgagggcaccgtgctggacgacatcggccagaccggctgcgtgcccgtgagcaagtgcgcctgcgtgtacaacggcgccgcctacgcccccggcgccacctacagcaccgactgcaccaactgcacctgcagcggcggcagatggagctgccaggaggtgccctgccccggcacctgcagcgtgctgggcggcgcccacttcagcaccttcgacggcaagcagtacaccgtgcacggcgactgcagctacgtgctgaccaagccctgcgacagcagcgccttcaccgtgctggccgagctgagaagatgcggcctgaccgacagcgagacctgcctgaagagcgtgaccctgagcctggacggcgtgcagaccgtggtggtgatcaaggccagcggcgaggtgttcctgaaccagatctacacccagctgcccatcagcgccgccaacgtgaccatcttcagacccagcaccttcttcatcatcgcccagaccagcctgggcctgcagctgaacctgcagctggtgcccaccatgcagctgttcatgcagctggcccccaagctgagaggccagacctgcggcctgtgcggcaacttcaacagcatccaggccgacgacttcagaaccctgagcggcgtggtggaggccaccgccgccgccttcttcaacaccttcaagacccaggccgcctgccccaacatcagaaacagcttcgaggacccctgcagcctgagcgtggagaactag

SEQ ID NO: 89538 - DNA, 17121 bp, synthetic construct
  misc_feature 1..17121: note = Description of Artificial Sequence: Synthetic coding sequence
  source 1..17121: mol_type = other DNA
atgggcgcccccagcgcctgcagaaccctggtgctggccctggccgccatgctggtggtgccccaggccgagacccagggccccgtggagcccagctgggagaacgccggccacaccatggacggcggcgcccccaccagcagccccaccagaagagtgagcttcgtgccccccgtgaccgtgttccccagcctgagccccctgaaccccgcccacaacggcagagtgtgcagcacctggggcgacttccactacaagaccttcgacggcgacgtgttcagattccccggcctgtgcaactacgtgttcagcgagcactgcagagccgcctacgaggacttcaacgtgcagctgagaagaggcctggtgggcagcagacccgtggtgaccagagtggtgatcaaggcccagggcctggtgctggaggccagcaacggcagcgtgctgatcaacggccagagagaggagctgccctacagcagaaccggcctgctggtggagcagagcggcgactacatcaaggtgagcatcagactggtgctgaccttcctgtggaacggcgaggacagcgccctgctggagctggaccccaagtacgccaaccagacctgcggcctgtgcggcgacttcaacggcctgcccgccttcaacgagttctacgcccacaacgccagactgacccccctgcagttcggcaacctgcagaagctggacggccccaccgagcagtgccccgaccccctgcccctgcccgccggcaactgcaccgacgaggagggcatctgccacagaaccctgctgggccccgccttcgccgagtgccacgccctggtggacagcaccgcctacctggccgcctgcgcccaggacctgtgcagatgccccacctgcccctgcgccaccttcgtggagtacagcagacagtgcgcccacgccggcggccagcccagaaactggagatgccccgagctgtgccccagaacctgccccctgaacatgcagcaccaggagtgcggcagcccctgcaccgacacctgcagcaacccccagagagcccagctgtgcgaggaccactgcgtggacggctgcttctgcccccccggcagcaccgtgctggacgacatcacccacagcggctgcctgcccctgggccagtgcccctgcacccacggcggcagaacctacagccccggcaccagcttcaacaccacctgcagcagctgcacctgcagcggcggcctgtggcagtgccaggacctgccctgccccggcacctgcagcgtgcagggcggcgcccacatcagcacctacgacgagaagctgtacgacctgcacggcgactgcagctacgtgctgagcaagaagtgcgccgacagcagcttcaccgtgctggccgagctgagaaagtgcggcctgaccgacaacgagaactgcctgaaggccgtgaccctgagcctggacggcggcgacaccgccatcagagtgcaggccgacggcggcgtgttcctgaacagcatctacacccagctgcccctgagcgccgccaacatcaccctgttcacccccagcagcttcttcatcgtggtgcagaccggcctgggcctgcagctgctggtgcagctggtgcccctgatgcaggtgttcgtgagactggaccccgcccaccagggccagatgtgcggcctgtgcggcaacttcaaccagaaccaggccgacgacttcaccgccctgagcggcgtggtggaggccaccggcgccgccttcgccaacacctggaaggcccaggccgcctgcgccaacgccagaaacagcttcgaggacccctgcagcctgagcgtggagaacgagaactacgccagacactggtgcagcagactgaccgaccccaacagcgccttcagcagatgccacagcatcatcaaccccaagcccttccacagcaactgcatgttcgacacctgcaactgcgagagaagcgaggactgcctgtgcgccgccctgagcagctacgtgcacgcctgcgccgccaagggcgtgcagctgagcgactggagagacggcgtgtgcaccaagtacatgcagaactgccccaagagccagagatacgcctacgtggtggacgcctgccagcccacctgcagaggcctgagcgaggccgacgtgacctgcagcgtgagcttcgtgcccgtggacggctgcacctgccccgccggcaccttcctgaacgacgccggcgcctgcgtgcccgcccaggagtgcccctgctacgcccacggcaccgtgctggcccccggcgaggtggtgcacgacgagggcgccgtgtgcagctgcaccggcggcaagctgagctgcctgggcgccagcctgcagaagagcaccggctgcgccgcccccatggtgtacctggactgcagcaacagcagcgccggcacccccggcgccgagtgcctgagaagctgccacaccctggacgtgggctgcttcagcacccactgcgtgagcggctgcgtgtgcccccccggcctggtgagcgacggcagcggcggctgcatcgccgaggaggactgcccctgcgtgcacaacgaggccacctacaagcccggcgagaccatcagagtggactgcaacacctgcacctgcagaaacagaagatgggagtgcagccacagactgtgcctgggcacctgcgtggcctacggcgacggccacttcatcaccttcgacggcgacagatacagcttcgagggcagctgcgagtacatcctggcccaggactactgcggcgacaacaccacccacggcaccttcagaatcgtgaccgagaacatcccctgcggcaccaccggcaccacctgcagcaaggccatcaagctgttcgtggagagctacgagctgatcctgcaggagggcaccttcaaggccgtggccagaggccccggcggcgaccccccctacaagatcagatacatgggcatcttcctggtgatcgagacccacggcatggccgtgagctgggacagaaagaccagcgtgttcatcagactgcaccaggactacaagggcagagtgtgcggcctgtgcggcaacttcgacgacaacgccatcaacgacttcgccaccagaagcagaagcgtggtgggcgacgccctggagttcggcaacagctggaagctgagccccagctgccccgacgccctggcccccaaggacccctgcaccgccaaccccttcagaaagagctgggcccagaagcagtgcagcatcctgcacggccccaccttcgccgcctgcagaagccaggtggacagcaccaagtactacgaggcctgcgtgaacgacgcctgcgcctgcgacagcggcggcgactgcgagtgcttctgcaccgccgtggccgcctacgcccaggcctgccacgacgccggcctgtgcgtgagctggagaacccccgacacctgccccctgttctgcgacttctacaacccccacggcggctgcgagtggcactaccagccctgcggcgccccctgcctgaagacctgcagaaaccccagcggccactgcctggtggacctgcccggcctggagggctgctaccccaagtgcccccccagccagcccttcttcaacgaggaccagatgaagtgcgtggcccagtgcggctgctacgacaaggacggcaactactacgacgtgggcgccagagtgcccaccgccgagaactgccagagctgcaactgcacccccagcggcatccagtgcgcccacagcctggaggcctgcacctgcacctacgaggacagaacctacagctaccaggacgtgatctacaacaccaccgacggcctgggcgcctgcctgatcgccatctgcggcagcaacggcaccatcatcagaaaggccgtggcctgccccggcacccccgccaccacccccttcaccttcaccaccgcctgggtgccccacagcaccaccagccccgccctgcccgtgagcaccgtgtgcgtgagagaggtgtgcagatggagcagctggtacaacggccacagacccgagcccggcctgggcggcggcgacttcgagaccttcgagaacctgagacagagaggctaccaggtgtgccccgtgctggccgacatcgagtgcagagccgcccagctgcccgacatgcccctggaggagctgggccagcaggtggactgcgacagaatgagaggcctgatgtgcgccaacagccagcagagcccccccctgtgccacgactacgagctgagagtgctgtgctgcgagtacgtgccctgcggccccagccccgcccccggcaccagcccccagcccagcctgagcgccagcaccgagcccgccgtgcccacccccacccagaccaccgccaccgagaagaccaccctgtgggtgacccccagcatcagaagcaccgccgccctgaccagccagaccggcagcagcagcggccccgtgaccgtgacccccagcgcccccggcaccaccacctgccagcccagatgccagtggaccgagtggttcgacgaggactaccccaagagcgagcagctgggcggcgacgtggagagctacgacaagatcagagccgccggcggccacctgtgccagcagcccaaggacatcgagtgccaggccgagagcttccccaactggaccctggcccaggtgggccagaaggtgcactgcgacgtgcacttcggcctggtgtgcagaaactgggagcaggagggcgtgttcaagatgtgctacaactacagaatcagagtgctgtgctgcagcgacgaccactgcagaggcagagccaccacccccccccccaccaccgagctggagaccgccaccaccaccaccacccaggccctgttcagcaccccccagcccaccagcagccccggcctgaccagagccccccccgccagcaccaccgccgtgcccaccctgagcgagggcctgaccagccccagatacaccagcaccctgggcaccgccaccaccggcggccccaccacccccgccggcagcaccgagcccaccgtgcccggcgtggccaccagcaccctgcccaccagaagcgccctgcccggcaccaccggcagcctgggcacctggagacccagccagccccccaccctggcccccaccaccatggccaccagcagagccagacccaccggcaccgccagcaccgccagcaaggagcccctgaccaccagcctggcccccaccctgaccagcgagctgagcaccagccaggccgagaccagcacccccagaaccgagaccaccatgagccccctgaccaacaccaccaccagccagggcaccaccagatgccagcccaagtgcgagtggaccgagtggttcgacgtggacttccccaccagcggcgtggccggcggcgacatggagaccttcgagaacatcagagccgccggcggcaagatgtgctgggcccccaagagcatcgagtgcagagccgagaactaccccgaggtgagcatcgaccaggtgggccaggtgctgacctgcagcctggagaccggcctgacctgcaagaacgaggaccagaccggcagattcaacatgtgcttcaactacaacgtgagagtgctgtgctgcgacgactacagccactgccccagcacccccgccaccagcagcaccgccacccccagcagcacccccggcaccacctggatcctgaccaagcccaccaccaccgccaccaccaccgccagcaccggcagcaccgccacccccaccagcaccctgagaaccgcccccccccccaaggtgctgaccaccaccgccaccacccccaccgtgaccagcagcaaggccacccccagcagcagccccggcaccgccaccgccctgcccgccctgagaagcaccgccaccacccccaccgccaccagcgtgacccccatccccagcagcagcctgggcaccacctggaccagactgagccagaccaccacccccaccgccaccatgagcaccgccacccccagcagcacccccgagaccgcccacaccagcaccgtgctgaccgccaccgccaccaccaccggcgccaccggcagcgtggccacccccagcagcacccccggcaccgcccacaccaccaaggtgcccaccaccaccaccaccggcttcaccgccacccccagcagcagccccggcaccgccctgaccccccccgtgtggatcagcaccaccaccacccccaccaccagaggcagcaccgtgacccccagcagcatccccggcaccacccacaccgccaccgtgctgaccaccaccaccaccaccgtggccaccggcagcatggccacccccagcagcagcacccagaccagcggcaccccccccagcctgaccaccaccgccaccaccatcaccgccaccggcagcaccaccaaccccagcagcacccccggcaccacccccatcccccccgtgctgaccaccaccgccaccacccccgccgccaccagcaacaccgtgacccccagcagcgccctgggcaccacccacaccccccccgtgcccaacaccatggccaccacccacggcagaagcctgccccccagcagcccccacaccgtgagaaccgcctggaccagcgccaccagcggcatcctgggcaccacccacatcaccgagcccagcaccgtgaccagccacaccctggccgccaccaccggcaccacccagcacagcacccccgccctgagcagcccccaccccagcagcagaaccaccgagagcccccccagccccggcaccaccacccccggccacaccaccgccaccagcagaaccaccgccaccgccacccccagcaagaccagaaccagcaccctgctgcccagcagccccaccagcgcccccatcaccaccgtggtgaccatgggctgcgagccccagtgcgcctggagcgagtggctggactacagctaccccatgcccggccccagcggcggcgacttcgacacctacagcaacatcagagccgccggcggcgccgtgtgcgagcagcccctgggcctggagtgcagagcccaggcccagcccggcgtgcccctgagagagctgggccaggtggtggagtgcagcctggacttcggcctggtgtgcagaaacagagagcaggtgggcaagttcaagatgtgcttcaactacgagatcagagtgttctgctgcaactacggccactgccccagcacccccgccaccagcagcaccgccatgcccagcagcacccccggcaccacctggatcctgaccgagctgaccaccaccgccaccaccaccgagagcaccggcagcaccgccacccccagcagcacccccgccaccgccggcaccccccacgtgagcaccaccgccaccacccccaccgtgaccagcagcaaggccacccccttcagcagccccggcaccgccaccgccctgcccgccctgagaagcaccgccaccacccccaccgccaccagcttcaccgccatccccagcagcagcctgggcaccacctggaccagactgagccagaccaccacccccaccgccaccatgagcaccgccacccccagcagcacccccgagaccgtgcacaccagcaccgtgctgaccaccaccgccaccaccaccggcgccaccggcagcgtggccacccccagcagcacccccggcaccgcccacaccaccaaggtgctgaccaccaccaccaccggcttcaccgccacccccagcagcagccccggcaccgccagaaccctgcccgtgtggatcagcaccaccaccacccccaccaccagaggcagcaccgtgacccccagcagcatccccggcaccacccacacccccaccgtgctgaccaccaccaccaccaccgtggccaccggcagcatggccacccccagcagcagcacccagaccagcggcaccccccccagcctgaccaccaccgccaccaccatcaccgccaccggcagcaccaccaaccccagcagcacccccggcaccacccccatcccccccgtgctgaccaccaccgccaccacccccgccgccaccagcagcaccgtgacccccagcagcgccctgggcaccacccacaccccccccgtgcccaacaccaccgccaccacccacggcagaagcctgagccccagcagcccccacaccgtgagaaccgcctggaccagcgccaccagcggcaccctgggcaccacccacatcaccgagcccagcaccggcaccagccacacccccgccgccaccaccggcaccacccagcacagcacccccgccctgagcagcccccaccccagcagcagaaccaccgagagcccccccagccccggcaccaccacccccggccacaccagagccaccagcagaaccaccgccaccgccacccccagcaagaccagaaccagcaccctgctgcccagcagccccaccagcgcccccatcaccaccgtggtgaccatgggctgcgagccccagtgcgcctggagcgagtggctggactacagctaccccatgcccggccccagcggcggcgacttcgacacctacagcaacatcagagccgccggcggcgccgtgtgcgagcagcccctgggcctggagtgcagagcccaggcccagcccggcgtgcccctgagagagctgggccaggtggtggagtgcagcctggacttcggcctggtgtgcagaaacagagagcaggtgggcaagttcaagatgtgcttcaactacgagatcagagtgttctgctgcaactacggccactgccccagcacccccgccaccagcagcaccgccacccccagcagcacccccggcaccacctggatcctgaccgagcagaccaccgccgccaccaccaccgccaccaccggcagcaccgccatccccagcagcacccccggcaccgcccccccccccaaggtgctgaccagcaccgccaccacccccaccgccaccagcagcaaggccaccagcagcagcagccccagaaccgccaccaccctgcccgtgctgaccagcaccgccaccaagagcaccgccaccagcttcacccccatccccagcttcaccctgggcaccaccggcaccctgcccgagcagaccaccacccccatggccaccatgagcaccatccaccccagcagcacccccgagaccacccacaccagcaccgtgctgaccaccaaggccaccaccaccagagccaccagcagcatgagcacccccagcagcacccccggcaccacctggatcctgaccgagctgaccaccgccgccaccaccaccgccgccaccggccccaccgccacccccagcagcacccccggcaccacctggatcctgaccgagcccagcaccaccgccaccgtgaccgtgcccaccggcagcaccgccaccgccagcagcaccagagccaccgccggcaccctgaaggtgctgaccagcaccgccaccacccccaccgtgatcagcagcagagccacccccagcagcagccccggcaccgccaccgccctgcccgccctgagaagcaccgccaccacccccaccgccaccagcgtgaccgccatccccagcagcagcctgggcaccgcctggaccagactgagccagaccaccacccccaccgccaccatgagcaccgccacccccagcagcacccccgagaccgtgcacaccagcaccgtgctgaccaccaccaccaccaccaccagagccaccggcagcgtggccacccccagcagcacccccggcaccgcccacaccaccaaggtgcccaccaccaccaccaccggcttcaccgccacccccagcagcagccccggcaccgccctgaccccccccgtgtggatcagcaccaccaccacccccaccaccagaggcagcaccgtgacccccagcagcatccccggcaccacccacaccgccaccgtgctgaccaccaccaccaccaccgtggccaccggcagcatggccacccccagcagcagcacccagaccagcggcaccccccccagcctgaccaccaccgccaccaccatcaccgccaccggcagcaccaccaaccccagcagcacccccggcaccacccccatcccccccgtgctgaccaccaccgccaccacccccgccgccaccagcagcaccgtgacccccagcagcgccctgggcaccacccacaccccccccgtgcccaacaccaccgccaccacccacggcagaagcctgccccccagcagcccccacaccgtgagaaccgcctggaccagcgccaccagcggcatcctgggcaccacccacatcaccgagcccagcaccgtgaccagccacacccccgccgccaccaccagcaccacccagcacagcacccccgccctgagcagcccccaccccagcagcagaaccaccgagagcccccccagccccggcaccaccacccccggccacaccagaggcaccagcagaaccaccgccaccgccacccccagcaagaccagaaccagcaccctgctgcccagcagccccaccagcgcccccatcaccaccgtggtgaccaccggctgcgagccccagtgcgcctggagcgagtggctggactacagctaccccatgcccggccccagcggcggcgacttcgacacctacagcaacatcagagccgccggcggcgccgtgtgcgagcagcccctgggcctggagtgcagagcccaggcccagcccggcgtgcccctgagagagctgggccaggtggtggagtgcagcctggacttcggcctggtgtgcagaaacagagagcaggtgggcaagttcaagatgtgcttcaactacgagatcagagtgttctgctgcaactacggccactgccccagcacccccgccaccagcagcaccgccacccccagcagcacccccggcaccacctggatcctgaccaagctgaccaccaccgccaccaccaccgagagcaccggcagcaccgccacccccagcagcacccccggcgccaccgccggcaccccccacgtgagcaccaccgccaccacccccaccgtgaccagcagcaaggccacccccttcagcagccccggcaccgccaccgccctgcccgccctgagaagcaccgccaccacccccaccgccaccagcttcaccgccatccccagcagcagcctgggcaccacctggaccagactgagccagaccaccacccccaccgccaccatgagcaccgccacccccagcagcacccccgagaccgcccacaccagcaccgtgctgaccaccaccgccaccaccaccagagccaccggcagcgtggccacccccagcagcacccccggcaccgcccacaccaccaaggtgcccaccaccaccaccaccggcttcaccgtgacccccagcagcagccccggcaccgccagaaccccccccgtgtggatcagcaccaccaccacccccaccaccagcggcagcaccgtgacccccagcagcgtgcccggcaccacccacacccccaccgtgctgaccaccaccaccaccaccgtggccaccggcagcatggccacccccagcagcagcacccagaccagcggcaccccccccagcctgatcaccaccgccaccaccatcaccgccaccggcagcaccaccaaccccagcagcacccccggcaccacccccatcccccccgtgctgaccaccaccgccaccacccccgccgccaccagcagcaccgtgacccccagcagcgccctgggcaccacccacaccccccccgtgcccaacaccaccgccaccacccacggcagaagcctgagccccagcagcccccacaccgtgagaaccgcctggaccagcgccaccagcggcaccctgggcaccacccacatcaccgagcccagcaccggcaccagccacacccccgccgccaccaccggcaccacccagcacagcacccccgccctgagcagcccccaccccagcagcagaaccaccgagagcccccccagccccggcaccaccacccccggccacaccaccgccaccagcagaaccaccgccaccgccacccccagcaagaccagaaccagcaccctgctgcccagcagccccaccagcgcccccatcaccaccgtggtgaccaccggctgcgagccccagtgcgcctggagcgagtggctggactacagctaccccatgcccggccccagcggcggcgacttcgacacctacagcaacatcagagccgccggcggcgccgtgtgcgagcagcccctgggcctggagtgcagagcccaggcccagcccggcgtgcccctgggcgagctgggccaggtggtggagtgcagcctggacttcggcctggtgtgcagaaacagagagcaggtgggcaagttcaagatgtgcttcaactacgagatcagagtgttctgctgcaactacggccactgccccagcacccccgccaccagcagcaccgccatgcccagcagcacccccggcaccacctggatcctgaccgagctgaccaccaccgccaccaccaccgccagcaccggcagcaccgccacccccagcagcacccccggcaccgcccccccccccaaggtgctgaccagccccgccaccacccccaccgccaccagcagcaaggccaccagcagcagcagccccagaaccgccaccaccctgcccgtgctgaccagcaccgccaccaagagcaccgccaccagcgtgacccccatccccagcagcaccctgggcaccaccggcaccctgcccgagcagaccaccacccccgtggccaccatgagcaccatccaccccagcagcacccccgagaccacccacaccagcaccgtgctgaccaccaaggccaccaccaccagagccaccagcagcaccagcacccccagcagcacccccggcaccacctggatcctgaccgagctgaccaccgccgccaccaccaccgccgccaccggccccaccgccacccccagcagcacccccggcaccacctggatcctgaccgagctgaccaccaccgccaccaccaccgccagcaccggcagcaccgccacccccagcagcacccccggcaccacctggatcctgaccgagcccagcaccaccgccaccgtgaccgtgcccaccggcagcaccgccaccgccagcagcacccaggccaccgccggcaccccccacgtgagcaccaccgccaccacccccaccgtgaccagcagcaaggccacccccagcagcagccccggcaccgccaccgccctgcccgccctgagaagcaccgccaccacccccaccgccaccagcttcaccgccatccccagcagcagcctgggcaccacctggaccagactgagccagaccaccacccccaccgccaccatgagcaccgccacccccagcagcacccccgagaccgtgcacaccagcaccgtgctgaccgccaccgccaccaccaccggcgccaccggcagcgtggccacccccagcagcacccccggcaccgcccacaccaccaaggtgcccaccaccaccaccaccggcttcaccgccacccccagcagcagccccggcaccgccctgaccccccccgtgtggatcagcaccaccaccacccccaccaccaccacccccaccaccagcggcagcaccgtgacccccagcagcatccccggcaccacccacaccgccagagtgctgaccaccaccaccaccaccgtggccaccggcagcatggccacccccagcagcagcacccagaccagcggcaccccccccagcctgaccaccaccgccaccaccatcaccgccaccggcagcaccaccaaccccagcagcacccccggcaccacccccatcacccccgtgctgaccagcaccgccaccacccccgccgccaccagcagcaaggccaccagcagcagcagccccagaaccgccaccaccctgcccgtgctgaccagcaccgccaccaagagcaccgccaccagcttcacccccatccccagcagcaccctgtggaccacctggaccgtgcccgcccagaccaccacccccatgagcaccatgagcaccatccacaccagcagcacccccgagaccacccacaccagcaccgtgctgaccaccaccgccaccatgaccagagccaccaacagcaccgccacccccagcagcaccctgggcaccaccagaatcctgaccgagctgaccaccaccgccaccaccaccgccgccaccggcagcaccgccaccctgagcagcacccccggcaccacctggatcctgaccgagcccagcaccatcgccaccgtgatggtgcccaccggcagcaccgccaccgccagcagcaccctgggcaccgcccacacccccaaggtggtgaccaccatggccaccatgcccaccgccaccgccagcaccgtgcccagcagcagcaccgtgggcaccaccagaacccccgccgtgctgcccagcagcctgcccaccttcagcgtgagcaccgtgagcagcagcgtgctgaccaccctgagacccaccggcttccccagcagccacttcagcaccccctgcttctgcagagccttcggccagttcttcagccccggcgaggtgatctacaacaagaccgacagagccggctgccacttctacgccgtgtgcaaccagcactgcgacatcgacagattccagggcgcctgccccaccagccccccccccgtgagcagcgcccccctgagcagccccagccccgcccccggctgcgacaacgccatccccctgagacaggtgaacgagacctggaccctggagaactgcaccgtggccagatgcgtgggcgacaacagagtggtgctgctggaccccaagcccgtggccaacgtgacctgcgtgaacaagcacctgcccatcaaggtgagcgaccccagccagccctgcgacttccactacgagtgcgagtgcatctgcagcatgtggggcggcagccactacagcaccttcgacggcaccagctacaccttcagaggcaactgcacctacgtgctgatgagagagatccacgccagattcggcaacctgagcctgtacctggacaaccactactgcaccgccagcgccaccgccgccgccgccagatgccccagagccctgagcatccactacaagagcatggacatcgtgctgaccgtgaccatggtgcacggcaaggaggagggcctgatcctgttcgaccagatccccgtgagcagcggcttcagcaagaacggcgtgctggtgagcgtgctgggcaccaccaccatgagagtggacatccccgccctgggcgtgagcgtgaccttcaacggccaggtgttccaggccagactgccctacagcctgttccacaacaacaccgagggccagtgcggcacctgcaccaacaaccagagagacgactgcctgcagagagacggcaccaccgccgccagctgcaaggacatggccaagacctggctggtgcccgacagcagaaaggacggctgctgggcccccaccggcaccccccccaccgccagccccgccgcccccgtgagcagcacccccacccccaccccctgccccccccagcccctgtgcgacctgatgctgagccaggtgttcgccgagtgccacaacctggtgccccccggccccttcttcaacgcctgcatcagcgaccactgcagaggcagactggaggtgccctgccagagcctggaggcctacgccgagctgtgcagagccagaggcgtgtgcagcgactggagaggcgccaccggcggcctgtgcgacctgacctgcccccccaccaaggtgtacaagccctgcggccccatccagcccgccacctgcaacagcagaaaccagagcccccagctggagggcatggccgagggctgcttctgccccgaggaccagatcctgttcaacgcccacatgggcatctgcgtgcaggcctgcccctgcgtgggccccgacggcttccccaagttccccggcgagagatgggtgagcaactgccagagctgcgtgtgcgacgagggcagcgtgagcgtgcagtgcaagcccctgccctgcgacgcccagggccagccccccccctgcaacagacccggcttcgtgaccgtgaccagacccagagccgagaacccctgctgccccgagaccgtgtgcgtgtgcaacaccaccacctgcccccagagcctgcccgtgtgcccccccggccaggagagcatctgcacccaggaggagggcgactgctgccccaccttcagatgcagaccccagctgtgcagctacaacggcaccttctacggcgtgggcgccaccttccccggcgccctgccctgccacatgtgcacctgcctgagcggcgacacccaggaccccaccgtgcagtgccaggaggacgcctgcaacaacaccacctgcccccagggcttcgagtacaagagagtggccggccagtgctgcggcgagtgcgtgcagaccgcctgcctgacccccgacggccagcccgtgcagctgaacgagacctgggtgaacagccacgtggacaactgcaccgtgtacctgtgcgaggccgagggcggcgtgcacctgctgaccccccagcccgccagctgccccgacgtgagcagctgcagaggcagcctgagaaagaccggctgctgctacagctgcgaggaggacagctgccaggtgagaatcaacaccaccatcctgtggcaccagggctgcgagaccgaggtgaacatcaccttctgcgagggcagctgccccggcgccagcaagtacagcgccgaggcccaggccatgcagcaccagtgcacctgctgccaggagagaagagtgcacgaggagaccgtgcccctgcactgccccaacggcagcgccatcctgcacacctacacccacgtggacgagtgcggctgcacccccttctgcgtgcccgcccccatggcccccccccacaccagaggcttccccgcccaggaggccaccgccgtgtag

SEQ ID NO: 89539 - DNA, 16587 bp, synthetic construct
  misc_feature 1..16587: note = Description of Artificial Sequence: Synthetic coding sequence
  source 1..16587: mol_type = other DNA
gcccccagaatgggcgcccccagcgcctgcagaaccctggtgctggccctggccgccatgctggtggtgccccaggccggcaagagcccccccctgagacccctgagcagaaacagcggcgccggcctggacggcggcgcccccaccagcagccccaccagaagagtgagcttcgtgccccccgtgaccgtgttccccagcctgagcagaaagcagatgctgcccctgcccgccggcaagggcgtgttcgccagccccaagggcggcggccccgacctgggcgtgcagctgccccccgccctgaaccccgcccacaacggcagagtgtgcagcacctggggcgacttccactacaagaccttcgacggcgacgtgttcagattccccggcctgtgcaactacgtgttcagcgagcactgcagagccgcctacgaggacttcaacgtgcagctgagaagaggcctggtgggcagcagacccgtggtgaccagagtggtgatcaaggcccagggcctggtgctggaggccagcaacggcagcgtgctgatcaacggccagagagaggagctgccctacagcagaaccggcctgctggtggagcagagcggcgactacatcaaggtgagcatcagactggtgctgaccttcctgtggaacggcgaggacagcgccctgctggagctggaccccaagtacgccaaccagacctgcggcctgtgcggcgacttcaacggcctgcccgccttcaacgagttctacgcccacaacgccagactgacccccctgcagttcggcaacctgcagaagctggacggccccaccgagcagtgccccgaccccctgcccctgcccgccggcaactgcaccgacgaggagggcatctgccacagaaccctgctgggccccgccttcgccgagtgccacgccctggtggacagcaccgcctacctggccgcctgcgcccaggacctgtgcagatgccccacctgcccctgcgccaccttcgtggagtacagcagacagtgcgcccacgccggcggccagcccagaaactggagatgccccgagctgtgccccagaacctgccccctgaacatgcagcaccaggagtgcggcagcccctgcaccgacacctgcagcaacccccagagagcccagctgtgcgaggaccactgcgtggacggctgcttctgcccccccggcagaagctgcaccgtgctggacgacatcacccacagcggctgcctgcccctgggccagtgcccctgcacccacggcggcagaacctacagccccggcaccagcttcaacaccacctgcagcagctgcacctgcagcggcggcctgtggcagtgccaggacctgccctgccccggcacctgcagcgtgcagggcggcgcccacatcagcacctacgacgagaagctgtacgacctgcacggcgactgcagctacgtgctgagcaagaagtgcgccgacagcagcttcaccgtgctggccgagctgagaaagtgcggcctgaccgacaacgagaactgcctgaaggccgtgaccctgagcctggacggcggcgacaccgccatcagagtgcaggccgacggcggcgtgttcctgaacagcatctacacccagctgcccctgagcgccgccaacatcaccctgttcacccccagcagcttcttcatcgtggtgcagaccggcctgggcctgcagctgctggtgcagctggtgcccctgatgcaggtgttcgtgagactggaccccgcccaccagggccagatgtgcggcctgtgcggcaacttcaaccagaaccaggccgacgacttcaccgccctgagcggcgtggtggaggccaccggcgccgccttcgccaacacctggaaggcccaggccgcctgcgccaacgccagaaacagcttcgaggacccctgcagcctgagcgtggagaacgagaactacgccagacactggtgcagcagactgaccgaccccaacagcgccttcagcagatgccacagcatcatcaaccccaagcccttccacagcaactgcatgttcgacacctgcaactgcgagagaagcgaggactgcctgtgcgccgccctgagcagctacgtgcacgcctgcgccgccaagggcgtgcagctgagcgactggagagacggcgtgtgcaccaagtacatgcagaactgccccaagagccagagatacgcctacgtggtggacgcctgccagcccacctgcagaggcctgagcgaggccgacgtgacctgcagcgtgagcttcgtgcccgtggacggctgcacctgccccgccggcaccttcctgaacgacgccggcgcctgcgtgcccgcccaggagtgcccctgctacgcccacggcaccgtgctggcccccggcgaggtggtgcacgacgagggcgccgtgtgcagctgcaccggcggcaagctgagctgcctgggcgccagcctgcagaagagcaccggctgcgccgcccccatggtgtacctggactgcagcaacagcagcgccggcacccccggcgccgagtgcctgagaagctgccacaccctggacgtgggctgcttcagcacccactgcgtgagcggctgcgtgtgcccccccggcctggtgagcgacggcagcggcggctgcatcgccgaggaggactgcccctgcgtgcacaacgaggccacctacaagcccggcgagaccatcagagtggactgcaacacctgcacctgcagaaacagaagatgggagtgcagccacagactgtgcctgggcacctgcgtggcctacggcgacggccacttcatcaccttcgacggcgacagatacagcttcgagggcagctgcgagtacatcctggcccaggactactgcggcgacaacaccacccacggcaccttcagaatcgtgaccgagaacatcccctgcggcaccaccggcaccacctgcagcaaggccatcaagctgttcgtggaggtgagaaccgcccccgccgtgagcacccccgaccccgccgccaacgagcccgcccccagagaggccagcgtgggcttcagacagagactgccccccctgcagagctacgagctgatcctgcaggagggcaccttcaaggccgtggccagaggccccggcggcgaccccccctacaagatcagatacatgggcatcttcctggtgatcgagacccacggcatggccgtgagctgggacagaaagaccagcgtgttcatcagactgcaccaggactacaagggcagagtgtgcggcctgtgcggcaacttcgacgacaacgccatcaacgacttcgccaccagaagcagaagcgtggtgggcgacgccctggagttcggcaacagctggaagctgagccccagctgccccgacgccctggcccccaaggacccctgcaccgccaaccccttcagaaagagctgggcccagaagcagtgcagcatcctgcacggccccaccttcgccgcctgcagaagccaggtggacagcaccaagtactacgaggcctgcgtgaacgacgcctgcgcctgcgacagcggcggcgactgcgagtgcttctgcaccgccgtggccgcctacgcccaggcctgccacgacgccggcctgtgcgtgagctggagaacccccgacacctgccccctgttctgcgacttctacaacccccacggcggctgcgagtggcactaccagccctgcggcgccccctgcctgaagacctgcagaaaccccagcggccactgcctggtggacctgcccggcctggagggctgctaccccaagtgcccccccagccagcccttcttcaacgaggaccagatgaagtgcgtggcccagtgcggctgctacgacaaggacggcaactactacgacgtgggcgccagagtgcccaccgccgagaactgccagagctgcaactgcacccccagcggcatccagtgcgcccacagcctggaggcctgcacctgcacctacgaggacagaacctacagctaccaggacgtgatctacaacaccaccgacggcctgggcgcctgcctgatcgccatctgcggcagcaacggcaccatcatcagaaaggccgtggcctgccccggcacccccgccaccacccccttcaccttcaccaccgcctgggtgccccacagcaccaccagccccgccctgcccgtgagcaccgtgtgcgtgagagaggtgtgcagatggagcagctggtacaacggccacagacccgagcccggcctgggcggcggcgacttcgagaccttcgagaacctgagacagagaggctaccaggtgtgccccgtgctggccgacatcgagtgcagagccgcccagctgcccgacatgcccctggaggagctgggccagcaggtggactgcgacagaatgagaggcctgatgtgcgccaacagccagcagagcccccccctgtgccacgactacgagctgagagtgctgtgctgcgagtacgtgccctgcggccccagccccgcccccggcaccagcccccagcccagcctgagcgccagcaccgagcccgccgtgcccacccccacccagaccaccgccaccgagaagaccaccctgtgggtgacccccagcatcagaagcaccgccgccctgaccagccagaccggcagcagcagcggccccgtgaccgtgacccccagcgcccccggcaccaccacctgccagcccagatgccagtggaccgagtggttcgacgaggactaccccaagagcgagcagctgggcggcgacgtggagagctacgacaagatcagagccgccggcggccacctgtgccagcagcccaaggacatcgagtgccaggccgagagcttccccaactggaccctggcccaggtgggccagaaggtgcactgcgacgtgcacttcggcctggtgtgcagaaactgggagcaggagggcgtgttcaagatgtgctacaactacagaatcagagtgctgtgctgcagcgacgaccactgcagaggcagagccaccacccccccccccaccaccgagctggagaccgccaccaccaccaccacccaggccctgttcagcaccccccagcccaccagcagccccggcctgaccagagccccccccgccagcaccaccgccgtgcccaccctgagcgagggcctgaccagccccagatacaccagcaccctgggcaccgccaccaccggcggccccaccacccccgccggcagcaccgagcccaccgtgcccggcgtggccaccagcaccctgcccaccagaagcgccctgcccggcaccaccggcagcctgggcacctggagacccagccagccccccaccctggcccccaccaccatggccaccagcagagccagacccaccggcaccgccagcaccgccagcaaggagcccctgaccaccagcctggcccccaccctgaccagcgagctgagcaccagccaggccgagaccagcacccccagaaccgagaccaccatgagccccctgaccaacaccaccaccagccagggcaccaccagatgccagcccaagtgcgagtggaccgagtggttcgacgtggacttccccaccagcggcgtggccggcggcgacatggagaccttcgagaacatcagagccgccggcggcaagatgtgctgggcccccaagagcatcgagtgcagagccgagaactaccccgaggtgagcatcgaccaggtgggccaggtgctgacctgcagcctggagaccggcctgacctgcaagaacgaggaccagaccggcagattcaacatgtgcttcaactacaacgtgagagtgctgtgctgcgacgactacagccactgccccagcacccccgccaccagcagcaccgccacccccagcagcacccccggcaccacctggatcctgaccaagcccaccaccaccgccaccaccaccgccagcaccggcagcaccgccacccccaccagcaccctgagaaccgcccccccccccaaggtgctgaccaccaccgccaccacccccaccgtgaccagcagcaaggccacccccagcagcagccccggcaccgccaccgccctgcccgccctgagaagcaccgccaccacccccaccgccaccagcgtgacccccatccccagcagcagcctgggcaccacctggaccagactgagccagaccaccacccccaccgccaccatgagcaccgccacccccagcagcacccccgagaccgcccacaccagcaccgtgctgaccgccaccgccaccaccaccggcgccaccggcagcgtggccacccccagcagcacccccggcaccgcccacaccaccaaggtgcccaccaccaccaccaccggcttcaccgccacccccagcagcagccccggcaccgccctgaccccccccgtgtggatcagcaccaccaccacccccaccaccagaggcagcaccgtgacccccagcagcatccccggcaccacccacaccgccaccgtgctgaccaccaccaccaccaccgtggccaccggcagcatggccacccccagcagcagcacccagaccagcggcaccacccacaccccccccgtgcccaacaccatggccaccacccacggcagaagcctgccccccagcagcccccacaccgtgagaaccgcctggaccagcgccaccagcggcatcctgggcaccacccacatcaccgagcccagcaccgtgaccagccacaccctggccgccaccaccggcaccacccagcacagcacccccgccctgagcagcccccaccccagcagcagaaccaccgagagcccccccagccccggcaccaccacccccggccacaccaccgccaccagcagaaccaccgccaccgccacccccagcaagaccagaaccagcaccctgctgcccagcagccccaccagcgcccccatcaccaccgtggtgaccatgggctgcgagccccagtgcgcctggagcgagtggctggactacagctaccccatgcccggccccagcggcggcgacttcgacacctacagcaacatcagagccgccggcggcgccgtgtgcgagcagcccctgggcctggagtgcagagcccaggcccagcccggcgtgcccctgagagagctgggccaggtggtggagtgcagcctggacttcggcctggtgtgcagaaacagagagcaggtgggcaagttcaagatgtgcttcaactacgagatcagagtgttctgctgcaactacggccactgccccagcacccccgccaccagcagcaccgccatgcccagcagcacccccggcaccacctggatcctgaccgagctgaccaccaccgccaccaccaccgagagcaccggcagcaccgccacccccagcagcacccccggcaccacctggatcctgaccgagcccagcaccaccgccaccgtgaccgtgcccaccggcagcaccgccaccgccagcagcacccaggccaccgccggcaccccccacgtgagcaccaccgccaccacccccaccgtgaccagcagcaaggccacccccttcagcagccccggcaccgccaccgccctgcccgccctgagaagcaccgccaccacccccaccgccaccagcttcaccgccatccccagcagcagcctgggcaccacctggaccagactgagccagaccaccacccccaccgccaccatgagcaccgccacccccagcagcacccccgagaccgtgcacaccagcaccgtgctgaccaccaccgccaccaccaccggcgccaccggcagcgtggccacccccagcagcacccccggcaccgcccacaccaccaaggtgctgaccaccaccaccaccggcttcaccgccacccccagcagcagccccggcaccgccagaaccctgcccgtgtggatcagcaccaccaccacccccaccaccagaggcagcaccgtgacccccagcagcatccccggcaccacccacacccccaccgtgctgaccaccaccaccaccaccgtggccaccggcagcatggccacccccagcagcagcacccagaccagcggcaccacccacaccccccccgtgcccaacaccaccgccaccacccacggcagaagcctgagccccagcagcccccacaccgtgagaaccgcctggaccagcgccaccagcggcaccctgggcaccacccacatcaccgagcccagcaccggcaccagccacacccccgccgccaccaccggcaccacccagcacagcacccccgccctgagcagcccccaccccagcagcagaaccaccgagagcccccccagccccggcaccaccacccccggccacaccagagccaccagcagaaccaccgccaccgccacccccagcaagaccagaaccagcaccctgctgcccagcagccccaccagcgcccccatcaccaccgtggtgaccatgggctgcgagccccagtgcgcctggagcgagtggctggactacagctaccccatgcccggccccagcggcggcgacttcgacacctacagcaacatcagagccgccggcggcgccgtgtgcgagcagcccctgggcctggagtgcagagcccaggcccagcccggcgtgcccctgagagagctgggccaggtggtggagtgcagcctggacttcggcctggtgtgcagaaacagagagcaggtgggcaagttcaagatgtgcttcaactacgagatcagagtgttctgctgcaactacggccactgccccagcacccccgccaccagcagcaccgccacccccagcagcacccccggcaccacctggatcctgaccgagcagaccaccgccgccaccaccaccgccaccaccggcagcaccgccatccccagcagcacccccggcaccgcccccccccccaaggtgctgaccagcaccgccaccacccccaccgccaccagcagcaaggccaccagcagcagcagccccagaaccgccaccaccctgcccgtgctgaccagcaccgccaccaagagcaccgccaccagcttcacccccatccccagcttcaccctgggcaccaccggcaccctgcccgagcagaccaccacccccatggccaccatgagcaccatccaccccagcagcacccccgagaccacccacaccagcaccgtgctgaccaccaaggccaccaccaccagagccaccagcagcatgagcacccccagcagcacccccggcaccacctggatcctgaccgagctgaccaccgccgccaccaccaccgccgccaccggccccaccgccacccccagcagcacccccggcaccacctggatcctgaccgagcccagcaccaccgccaccgtgaccgtgcccaccggcagcaccgccaccgccagcagcaccagagccaccgccggcaccctgaaggtgctgaccagcaccgccaccacccccaccgtgatcagcagcagagccacccccagcagcagccccggcaccgccaccgccctgcccgccctgagaagcaccgccaccacccccaccgccaccagcgtgaccgccatccccagcagcagcctgggcaccgcctggaccagactgagccagaccaccacccccaccgccaccatgagcaccgccacccccagcagcacccccgagaccgtgcacaccagcaccgtgctgaccaccaccaccaccaccaccagagccaccggcagcgtggccacccccagcagcacccccggcaccgcccacaccaccaaggtgcccaccaccaccaccaccggcttcaccgccacccccagcagcagccccggcaccgccctgaccccccccgtgtggatcagcaccaccaccacccccaccaccagaggcagcaccgtgacccccagcagcatccccggcaccacccacaccgccaccgtgctgaccaccaccaccaccaccgtggccaccggcagcatggccacccccagcagcagcacccagaccagcggcaccacccacaccccccccgtgcccaacaccaccgccaccacccacggcagaagcctgccccccagcagcccccacaccgtgagaaccgcctggaccagcgccaccagcggcatcctgggcaccacccacatcaccgagcccagcaccgtgaccagccacacccccgccgccaccaccagcaccacccagcacagcacccccgccctgagcagcccccaccccagcagcagaaccaccgagagcccccccagccccggcaccaccacccccggccacaccagaggcaccagcagaaccaccgccaccgccacccccagcaagaccagaaccagcaccctgctgcccagcagccccaccagcgcccccatcaccaccgtggtgaccaccggctgcgagccccagtgcgcctggagcgagtggctggactacagctaccccatgcccggccccagcggcggcgacttcgacacctacagcaacatcagagccgccggcggcgccgtgtgcgagcagcccctgggcctggagtgcagagcccaggcccagcccggcgtgcccctgagagagctgggccaggtggtggagtgcagcctggacttcggcctggtgtgcagaaacagagagcaggtgggcaagttcaagatgtgcttcaactacgagatcagagtgttctgctgcaactacggccactgccccagcacccccgccaccagcagcaccgccacccccagcagcacccccggcaccacctggatcctgaccaagctgaccaccaccgccaccaccaccgagagcaccggcagcaccgccacccccagcagcacccccggcaccacctggatcctgaccgagcccagcaccaccgccaccgtgaccgtgcccaccggcagcaccgccaccgccagcagcacccaggccaccgccggcaccccccacgtgagcaccaccgccaccacccccaccgtgaccagcagcaaggccacccccttcagcagccccggcaccgccaccgccctgcccgccctgagaagcaccgccaccacccccaccgccaccagcttcaccgccatccccagcagcagcctgggcaccacctggaccagactgagccagaccaccacccccaccgccaccatgagcaccgccacccccagcagcacccccgagaccgcccacaccagcaccgtgctgaccaccaccgccaccaccaccagagccaccggcagcgtggccacccccagcagcacccccggcaccgcccacaccaccaaggtgcccaccaccaccaccaccggcttcaccgtgacccccagcagcagccccggcaccgccagaaccccccccgtgtggatcagcaccaccaccacccccaccaccagcggcagcaccgtgacccccagcagcgtgcccggcaccacccacacccccaccgtgctgaccaccaccaccaccaccgtggccaccggcagcatggccacccccagcagcagcacccagaccagcggcaccacccacaccccccccgtgcccaacaccaccgccaccacccacggcagaagcctgagccccagcagcccccacaccgtgagaaccgcctggaccagcgccaccagcggcaccctgggcaccacccacatcaccgagcccagcaccggcaccagccacacccccgccgccaccaccggcaccacccagcacagcacccccgccctgagcagcccccaccccagcagcagaaccaccgagagcccccccagccccggcaccaccacccccggccacaccaccgccaccagcagaaccaccgccaccgccacccccagcaagaccagaaccagcaccctgctgcccagcagccccaccagcgcccccatcaccaccgtggtgaccaccggctgcgagccccagtgcgcctggagcgagtggctggactacagctaccccatgcccggccccagcggcggcgacttcgacacctacagcaacatcagagccgccggcggcgccgtgtgcgagcagcccctgggcctggagtgcagagcccaggcccagcccggcgtgcccctgggcgagctgggccaggtggtggagtgcagcctggacttcggcctggtgtgcagaaacagagagcaggtgggcaagttcaagatgtgcttcaactacgagatcagagtgttctgctgcaactacggccactgccccagcacccccgccaccagcagcaccgccatgcccagcagcacccccggcaccacctggatcctgaccgagctgaccaccaccgccaccaccaccgccagcaccggcagcaccgccacccccagcagcacccccggcaccgcccccccccccaaggtgctgaccagccccgccaccacccccaccgccaccagcagcaaggccaccagcagcagcagccccagaaccgccaccaccctgcccgtgctgaccagcaccgccaccaagagcaccgccaccagcgtgacccccatccccagcagcaccctgggcaccaccggcaccctgcccgagcagaccaccacccccgtggccaccatgagcaccatccaccccagcagcacccccgagaccacccacaccagcaccgtgctgaccaccaaggccaccaccaccagagccaccagcagcaccagcacccccagcagcacccccggcaccacctggatcctgaccgagctgaccaccgccgccaccaccaccgccgccaccggccccaccgccacccccagcagcacccccggcaccacctggatcctgaccgagctgaccaccaccgccaccaccaccgccagcaccggcagcaccgccacccccagcagcacccccggcaccacctggatcctgaccgagcccagcaccaccgccaccgtgaccgtgcccaccggcagcaccgccaccgccagcagcacccaggccaccgccggcaccccccacgtgagcaccaccgccaccacccccaccgtgaccagcagcaaggccacccccagcagcagccccggcaccgccaccgccctgcccgccctgagaagcaccgccaccacccccaccgccaccagcttcaccgccatccccagcagcagcctgggcaccacctggaccagactgagccagaccaccacccccaccgccaccatgagcaccgccacccccagcagcacccccgagaccgtgcacaccagcaccgtgctgaccgccaccgccaccaccaccggcgccaccggcagcgtggccacccccagcagcacccccggcaccgcccacaccaccaaggtgcccaccaccaccaccaccggcttcaccgccacccccagcagcagccccggcaccgccctgaccccccccaccaccacccccatgagcaccatgagcaccatccacaccagcagcacccccgagaccacccacaccagcaccgtgctgaccaccaccgccaccatgaccagagccaccaacagcaccgccacccccagcagcaccctgggcaccaccagaatcctgaccgagctgaccaccaccgccaccaccaccgccgccaccggcagcaccgccaccctgagcagcacccccggcaccacctggatcctgaccgagcccagcaccatcgccaccgtgatggtgcccaccggcagcaccgccaccgccagcagcaccctgggcaccgcccacacccccaaggtggtgaccaccatggccaccatgcccaccgccaccgccagcaccgtgcccagcagcagcaccgtgggcaccaccagaacccccgccgtgctgcccagcagcctgcccaccttcagcgtgagcaccgtgagcagcagcgtgctgaccaccctgagacccaccggcttccccagcagccacttcagcaccccctgcttctgcagagccttcggccagttcttcagccccggcgaggtgatctacaacaagaccgacagagccggctgccacttctacgccgtgtgcaaccagcactgcgacatcgacagattccagggcgcctgccccaccagccccccccccgtgagcagcgcccccctgagcagccccagccccgcccccggctgcgacaacgccatccccctgagacaggtgaacgagacctggaccctggagaactgcaccgtggccagatgcgtgggcgacaacagagtggtgctgctggaccccaagcccgtggccaacgtgacctgcgtgaacaagcacctgcccatcaaggtgagcgaccccagccagccctgcgacttccactacgagtgcgagtgcgagtgcgtgggcggcagaggcatcacccccggcgccggcatctgcagcatgtggggcggcagccactacagcaccttcgacggcaccagctacaccttcagaggcaactgcacctacgtgctgatgagagagatccacgccagattcggcaacctgagcctgtacctggacaaccactactgcaccgccagcgccaccgccgccgccgccagatgccccagagccctgagcatccactacaagagcatggacatcgtgctgaccgtgaccatggtgcacggcaaggaggagggcctgatcctgttcgaccagatccccgtgagcagcggcttcagcaagaacggcgtgctggtgagcgtgctgggcaccaccaccatgagagtggacatccccgccctgggcgtgagcgtgaccttcaacggccaggtgttccaggccagactgccctacagcctgttccacaacaacaccgagggccagtgcggcacctgcaccaacaaccagagagacgactgcctgcagagagacggcaccaccgccgccagctgcaaggacatggccaagacctggctggtgcccgacagcagaaaggacggctgctgggcccccaccggcaccccccccaccgccagccccgccgcccccgtgagcagcacccccacccccaccccctgccccccccagcccctgtgcgacctgatgctgagccaggtgttcgccgagtgccacaacctggtgccccccggccccttcttcaacgcctgcatcagcgaccactgcagaggcagactggaggtgccctgccagagcctggaggcctacgccgagctgtgcagagccagaggcgtgtgcagcgactggagaggcgccaccggcggcctgtgcgacctgacctgcccccccaccaaggtgtacaagccctgcggccccatccagcccgccacctgcaacagcagaaaccagagcccccagctggagggcatggccgagggctgcttctgccccgaggaccagatcctgttcaacgcccacatgggcatctgcgtgcaggcctgcccctgcgtgggccccgacggcttccccaagttccccggcgagagatgggtgagcaactgccagagctgcgtgtgcgacgagggcagcgtgagcgtgcagtgcaagcccctgccctgcgacgcccagggccagccccccccctgcaacagacccggcttcgtgaccgtgaccagacccagagccgagaacccctgctgccccgagaccgtgtgcgtgtgcaacaccaccacctgcccccagagcctgcccgtgtgcccccccggccaggagagcatctgcacccaggaggagggcgactgctgccccaccttcagatgcagaccccagctgtgcagctacaacggcaccttctacggcgtgggcgccaccttccccggcgccctgccctgccacatgtgcacctgcctgagcggcgacacccaggaccccaccgtgcagtgccaggaggacgcctgcaacaacaccacctgcccccagggcttcgagtacaagagagtggccggccagtgctgcggcgagtgcgtgcagaccgcctgcctgacccccgacggccagcccgtgcagctgaacgagacctgggtgaacagccacgtggacaactgcaccgtgtacctgtgcgaggccgagggcggcgtgcacctgctgaccccccagcccgccagctgccccgacgtgagcagctgcagaggcagcctgagaaagaccggctgctgctacagctgcgaggaggacagctgccaggtgagaatcaacaccaccatcctgtggcaccagggctgcgagaccgaggtgaacatcaccttctgcgagggcagctgccccggcgccagcaagtacagcgccgaggcccaggccatgcagcaccagtgcacctgctgccaggagagaagagtgcacgaggagaccgtgcccctgcactgccccaacggcagcgccatcctgcacacctacacccacgccgtgcaggtgctgtgcggcctgctggcctggggcctgcaggccggcggccacatcagaggcgccgtgcaggacccccagcagcccctgaaggaccaggaggccagcggcaaggccagacagggcggcggctacagacagaccgtggcctggggcgacaagagcaacgccagagcctggctgcagaagcccgtggtgtgggtgcagagcggcgccttccccacccccggccccgccagcgccctgtgcccctggtag

SEQ ID NO: 89540 - DNA, 17298 bp, synthetic construct
  misc_feature 1..17298: note = Description of Artificial Sequence: Synthetic coding sequence
  source 1..17298: mol_type = other DNA
atgggcgcccccagcgcctgcagaaccctggtgctggccctggccgccatgctggtggtgccccaggccgagacccagggccccgtggagcccagctgggagaacgccggccacaccatggacggcggcgcccccaccagcagccccaccagaagagtgagcttcgtgccccccgtgaccgtgttccccagcctgagccccctgaaccccgcccacaacggcagagtgtgcagcacctggggcgacttccactacaagaccttcgacggcgacgtgttcagattccccggcctgtgcaactacgtgttcagcgagcactgcagagccgcctacgaggacttcaacgtgcagctgagaagaggcctggtgggcagcagacccgtggtgaccagagtggtgatcaaggcccagggcctggtgctggaggccagcaacggcagcgtgctgatcaacggccagagagaggagctgccctacagcagaaccggcctgctggtggagcagagcggcgactacatcaaggtgagcatcagactggtgctgaccttcctgtggaacggcgaggacagcgccctgctggagctggaccccaagtacgccaaccagacctgcggcctgtgcggcgacttcaacggcctgcccgccttcaacgagttctacgcccacaacgccagactgacccccctgcagttcggcaacctgcagaagctggacggccccaccgagcagtgccccgaccccctgcccctgcccgccggcaactgcaccgacgaggagggcatctgccacagaaccctgctgggccccgccttcgccgagtgccacgccctggtggacagcaccgcctacctggccgcctgcgcccaggacctgtgcagatgccccacctgcccctgcgccaccttcgtggagtacagcagacagtgcgcccacgccggcggccagcccagaaactggagatgccccgagctgtgccccagaacctgccccctgaacatgcagcaccaggagtgcggcagcccctgcaccgacacctgcagcaacccccagagagcccagctgtgcgaggaccactgcgtggacggctgcttctgcccccccggcagaagctgcaccgtgctggacgacatcacccacagcggctgcctgcccctgggccagtgcccctgcacccacggcggcagaacctacagccccggcaccagcttcaacaccacctgcagcagctgcacctgcagcggcggcctgtggcagtgccaggacctgccctgccccggcacctgcagcgtgcagggcggcgcccacatcagcacctacgacgagaagctgtacgacctgcacggcgactgcagctacgtgctgagcaagaagtgcgccgacagcagcttcaccgtgctggccgagctgagaaagtgcggcctgaccgacaacgagaactgcctgaaggccgtgaccctgagcctggacggcggcgacaccgccatcagagtgcaggccgacggcggcgtgttcctgaacagcatctacacccagctgcccctgagcgccgccaacatcaccctgttcacccccagcagcttcttcatcgtggtgcagaccggcctgggcctgcagctgctggtgcagctggtgcccctgatgcaggtgttcgtgagactggaccccgcccaccagggccagatgtgcggcctgtgcggcaacttcaaccagaaccaggccgacgacttcaccgccctgagcggcgtggtggaggccaccggcgccgccttcgccaacacctggaaggcccaggccgcctgcgccaacgccagaaacagcttcgaggacccctgcagcctgagcgtggagaacgagaactacgccagacactggtgcagcagactgaccgaccccaacagcgccttcagcagatgccacagcatcatcaaccccaagcccttccacagcaactgcatgttcgacacctgcaactgcgagagaagcgaggactgcctgtgcgccgccctgagcagctacgtgcacgcctgcgccgccaagggcgtgcagctgagcgactggagagacggcgtgtgcaccaagtacatgcagaactgccccaagagccagagatacgcctacgtggtggacgcctgccagcccacctgcagaggcctgagcgaggccgacgtgacctgcagcgtgagcttcgtgcccgtggacggctgcacctgccccgccggcaccttcctgaacgacgccggcgcctgcgtgcccgcccaggagtgcccctgctacgcccacggcaccgtgctggcccccggcgaggtggtgcacgacgagggcgccgtgtgcagctgcaccggcggcaagctgagctgcctgggcgccagcctgcagaagagcaccggctgcgccgcccccatggtgtacctggactgcagcaacagcagcgccggcacccccggcgccgagtgcctgagaagctgccacaccctggacgtgggctgcttcagcacccactgcgtgagcggctgcgtgtgcccccccggcctggtgagcgacggcagcggcggctgcatcgccgaggaggactgcccctgcgtgcacaacgaggccacctacaagcccggcgagaccatcagagtggactgcaacacctgcacctgcagaaacagaagatgggagtgcagccacagactgtgcctgggcacctgcgtggcctacggcgacggccacttcatcaccttcgacggcgacagatacagcttcgagggcagctgcgagtacatcctggcccaggactactgcggcgacaacaccacccacggcaccttcagaatcgtgaccgagaacatcccctgcggcaccaccggcaccacctgcagcaaggccatcaagctgttcgtggagagctacgagctgatcctgcaggagggcaccttcaaggccgtggccagaggccccggcggcgaccccccctacaagatcagatacatgggcatcttcctggtgatcgagacccacggcatggccgtgagctgggacagaaagaccagcgtgttcatcagactgcaccaggactacaagggcagagtgtgcggcctgtgcggcaacttcgacgacaacgccatcaacgacttcgccaccagaagcagaagcgtggtgggcgacgccctggagttcggcaacagctggaagctgagccccagctgccccgacgccctggcccccaaggacccctgcaccgccaaccccttcagaaagagctgggcccagaagcagtgcagcatcctgcacggccccaccttcgccgcctgcagaagccaggtggacagcaccaagtactacgaggcctgcgtgaacgacgcctgcgcctgcgacagcggcggcgactgcgagtgcttctgcaccgccgtggccgcctacgcccaggcctgccacgacgccggcctgtgcgtgagctggagaacccccgacacctgccccctgttctgcgacttctacaacccccacggcggctgcgagtggcactaccagccctgcggcgccccctgcctgaagacctgcagaaaccccagcggccactgcctggtggacctgcccggcctggagggctgctaccccaagtgcccccccagccagcccttcttcaacgaggaccagatgaagtgcgtggcccagtgcggctgctacgacaaggacggcaactactacgacgtgggcgccagagtgcccaccgccgagaactgccagagctgcaactgcacccccagcggcatccagtgcgcccacagcctggaggcctgcacctgcacctacgaggacagaacctacagctaccaggacgtgatctacaacaccaccgacggcctgggcgcctgcctgatcgccatctgcggcagcaacggcaccatcatcagaaaggccgtggcctgccccggcacccccgccaccacccccttcaccttcaccaccgcctgggtgccccacagcaccaccagccccgccctgcccgtgagcaccgtgtgcgtgagagaggtgtgcagatggagcagctggtacaacggccacagacccgagcccggcctgggcggcggcgacttcgagaccttcgagaacctgagacagagaggctaccaggtgtgccccgtgctggccgacatcgagtgcagagccgcccagctgcccgacatgcccctggaggagctgggccagcaggtggactgcgacagaatgagaggcctgatgtgcgccaacagccagcagagcccccccctgtgccacgactacgagctgagagtgctgtgctgcgagtacgtgccctgcggccccagccccgcccccggcaccagcccccagcccagcctgagcgccagcaccgagcccgccgtgcccacccccacccagaccaccgccaccgagaagaccaccctgtgggtgacccccagcatcagaagcaccgccgccctgaccagccagaccggcagcagcagcggccccgtgaccgtgacccccagcgcccccggcaccaccacctgccagcccagatgccagtggaccgagtggttcgacgaggactaccccaagagcgagcagctgggcggcgacgtggagagctacgacaagatcagagccgccggcggccacctgtgccagcagcccaaggacatcgagtgccaggccgagagcttccccaactggaccctggcccaggtgggccagaaggtgcactgcgacgtgcacttcggcctggtgtgcagaaactgggagcaggagggcgtgttcaagatgtgctacaactacagaatcagagtgctgtgctgcagcgacgaccactgcagaggcagagccaccacccccccccccaccaccgagctggagaccgccaccaccaccaccacccaggccctgttcagcaccccccagcccaccagcagccccggcctgaccagagccccccccgccagcaccaccgccgtgcccaccctgagcgagggcctgaccagccccagatacaccagcaccctgggcaccgccaccaccggcggccccaccacccccgccggcagcaccgagcccaccgtgcccggcgtggccaccagcaccctgcccaccagaagcgccctgcccggcaccaccggcagcctgggcacctggagacccagccagccccccaccctggcccccaccaccatggccaccagcagagccagacccaccggcaccgccagcaccgccagcaaggagcccctgaccaccagcctggcccccaccctgaccagcgagctgagcaccagccaggccgagaccagcacccccagaaccgagaccaccatgagccccctgaccaacaccaccaccagccagggcaccaccagatgccagcccaagtgcgagtggaccgagtggttcgacgtggacttccccaccagcggcgtggccggcggcgacatggagaccttcgagaacatcagagccgccggcggcaagatgtgctgggcccccaagagcatcgagtgcagagccgagaactaccccgaggtgagcatcgaccaggtgggccaggtgctgacctgcagcctggagaccggcctgacctgcaagaacgaggaccagaccggcagattcaacatgtgcttcaactacaacgtgagagtgctgtgctgcgacgactacagccactgccccagcacccccgccaccagcagcaccgccacccccagcagcacccccggcaccacctggatcctgaccaagcccaccaccaccgccaccaccaccgccagcaccggcagcaccgccacccccaccagcaccctgagaaccgcccccccccccaaggtgctgaccaccaccgccaccacccccaccgtgaccagcagcaaggccacccccagcagcagccccggcaccgccaccgccctgcccgccctgagaagcaccgccaccacccccaccgccaccagcgtgacccccatccccagcagcagcctgggcaccacctggaccagactgagccagaccaccacccccaccgccaccatgagcaccgccacccccagcagcacccccgagaccgcccacaccagcaccgtgctgaccgccaccgccaccaccaccggcgccaccggcagcgtggccacccccagcagcacccccggcaccgcccacaccaccaaggtgcccaccaccaccaccaccggcttcaccgccacccccagcagcagccccggcaccgccctgaccccccccgtgtggatcagcaccaccaccacccccaccaccagaggcagcaccgtgacccccagcagcatccccggcaccacccacaccgccaccgtgctgaccaccaccaccaccaccgtggccaccggcagcatggccacccccagcagcagcacccagaccagcggcaccccccccagcctgaccaccaccgccaccaccatcaccgccaccggcagcaccaccaaccccagcagcacccccggcaccacccccatcccccccgtgctgaccaccaccgccaccacccccgccgccaccagcaacaccgtgacccccagcagcgccctgggcaccacccacaccccccccgtgcccaacaccatggccaccacccacggcagaagcctgccccccagcagcccccacaccgtgagaaccgcctggaccagcgccaccagcggcatcctgggcaccacccacatcaccgagcccagcaccgtgaccagccacaccctggccgccaccaccggcaccacccagcacagcacccccgccctgagcagcccccaccccagcagcagaaccaccgagagcccccccagccccggcaccaccacccccggccacaccaccgccaccagcagaaccaccgccaccgccacccccagcaagaccagaaccagcaccctgctgcccagcagccccaccagcgcccccatcaccaccgtggtgaccatgggctgcgagccccagtgcgcctggagcgagtggctggactacagctaccccatgcccggccccagcggcggcgacttcgacacctacagcaacatcagagccgccggcggcgccgtgtgcgagcagcccctgggcctggagtgcagagcccaggcccagcccggcgtgcccctgagagagctgggccaggtggtggagtgcagcctggacttcggcctggtgtgcagaaacagagagcaggtgggcaagttcaagatgtgcttcaactacgagatcagagtgttctgctgcaactacggccactgccccagcacccccgccaccagcagcaccgccatgcccagcagcacccccggcaccacctggatcctgaccgagctgaccaccaccgccaccaccaccgagagcaccggcagcaccgccacccccagcagcacccccggcaccacctggatcctgaccgagcccagcaccaccgccaccgtgaccgtgcccaccggcagcaccgccaccgccagcagcacccaggccaccgccggcaccccccacgtgagcaccaccgccaccacccccaccgtgaccagcagcaaggccacccccttcagcagccccggcaccgccaccgccctgcccgccctgagaagcaccgccaccacccccaccgccaccagcttcaccgccatccccagcagcagcctgggcaccacctggaccagactgagccagaccaccacccccaccgccaccatgagcaccgccacccccagcagcacccccgagaccgtgcacaccagcaccgtgctgaccaccaccgccaccaccaccggcgccaccggcagcgtggccacccccagcagcacccccggcaccgcccacaccaccaaggtgctgaccaccaccaccaccggcttcaccgccacccccagcagcagccccggcaccgccagaaccctgcccgtgtggatcagcaccaccaccacccccaccaccagaggcagcaccgtgacccccagcagcatccccggcaccacccacacccccaccgtgctgaccaccaccaccaccaccgtggccaccggcagcatggccacccccagcagcagcacccagaccagcggcaccccccccagcctgaccaccaccgccaccaccatcaccgccaccggcagcaccaccaaccccagcagcacccccggcaccacccccatcccccccgtgctgaccaccaccgccaccacccccgccgccaccagcagcaccgtgacccccagcagcgccctgggcaccacccacaccccccccgtgcccaacaccaccgccaccacccacggcagaagcctgagccccagcagcccccacaccgtgagaaccgcctggaccagcgccaccagcggcaccctgggcaccacccacatcaccgagcccagcaccggcaccagccacacccccgccgccaccaccggcaccacccagcacagcacccccgccctgagcagcccccaccccagcagcagaaccaccgagagcccccccagccccggcaccaccacccccggccacaccagagccaccagcagaaccaccgccaccgccacccccagcaagaccagaaccagcaccctgctgcccagcagccccaccagcgcccccatcaccaccgtggtgaccatgggctgcgagccccagtgcgcctggagcgagtggctggactacagctaccccatgcccggccccagcggcggcgacttcgacacctacagcaacatcagagccgccggcggcgccgtgtgcgagcagcccctgggcctggagtgcagagcccaggcccagcccggcgtgcccctgagagagctgggccaggtggtggagtgcagcctggacttcggcctggtgtgcagaaacagagagcaggtgggcaagttcaagatgtgcttcaactacgagatcagagtgttctgctgcaactacggccactgccccagcacccccgccaccagcagcaccgccacccccagcagcacccccggcaccacctggatcctgaccgagcagaccaccgccgccaccaccaccgccaccaccggcagcaccgccatccccagcagcacccccggcaccgcccccccccccaaggtgctgaccagcaccgccaccacccccaccgccaccagcagcaaggccaccagcagcagcagccccagaaccgccaccaccctgcccgtgctgaccagcaccgccaccaagagcaccgccaccagcttcacccccatccccagcttcaccctgggcaccaccggcaccctgcccgagcagaccaccacccccatggccaccatgagcaccatccaccccagcagcacccccgagaccacccacaccagcaccgtgctgaccaccaaggccaccaccaccagagccaccagcagcatgagcacccccagcagcacccccggcaccacctggatcctgaccgagctgaccaccgccgccaccaccaccgccgccaccggccccaccgccacccccagcagcacccccggcaccacctggatcctgaccgagcccagcaccaccgccaccgtgaccgtgcccaccggcagcaccgccaccgccagcagcaccagagccaccgccggcaccctgaaggtgctgaccagcaccgccaccacccccaccgtgatcagcagcagagccacccccagcagcagccccggcaccgccaccgccctgcccgccctgagaagcaccgccaccacccccaccgccaccagcgtgaccgccatccccagcagcagcctgggcaccgcctggaccagactgagccagaccaccacccccaccgccaccatgagcaccgccacccccagcagcacccccgagaccgtgcacaccagcaccgtgctgaccaccaccaccaccaccaccagagccaccggcagcgtggccacccccagcagcacccccggcaccgcccacaccaccaaggtgcccaccaccaccaccaccggcttcaccgccacccccagcagcagccccggcaccgccctgaccccccccgtgtggatcagcaccaccaccacccccaccaccagaggcagcaccgtgacccccagcagcatccccggcaccacccacaccgccaccgtgctgaccaccaccaccaccaccgtggccaccggcagcatggccacccccagcagcagcacccagaccagcggcaccccccccagcctgaccaccaccgccaccaccatcaccgccaccggcagcaccaccaaccccagcagcacccccggcaccacccccatcccccccgtgctgaccaccaccgccaccacccccgccgccaccagcagcaccgtgacccccagcagcgccctgggcaccacccacaccccccccgtgcccaacaccaccgccaccacccacggcagaagcctgccccccagcagcccccacaccgtgagaaccgcctggaccagcgccaccagcggcatcctgggcaccacccacatcaccgagcccagcaccgtgaccagccacacccccgccgccaccaccagcaccacccagcacagcacccccgccctgagcagcccccaccccagcagcagaaccaccgagagcccccccagccccggcaccaccacccccggccacaccagaggcaccagcagaaccaccgccaccgccacccccagcaagaccagaaccagcaccctgctgcccagcagccccaccagcgcccccatcaccaccgtggtgaccaccggctgcgagccccagtgcgcctggagcgagtggctggactacagctaccccatgcccggccccagcggcggcgacttcgacacctacagcaacatcagagccgccggcggcgccgtgtgcgagcagcccctgggcctggagtgcagagcccaggcccagcccggcgtgcccctgagagagctgggccaggtggtggagtgcagcctggacttcggcctggtgtgcagaaacagagagcaggtgggcaagttcaagatgtgcttcaactacgagatcagagtgttctgctgcaactacggccactgccccagcacccccgccaccagcagcaccgccacccccagcagcacccccggcaccacctggatcctgaccaagctgaccaccaccgccaccaccaccgagagcaccggcagcaccgccacccccagcagcacccccggcaccacctggatcctgaccgagcccagcaccaccgccaccgtgaccgtgcccaccggcagcaccgccaccgccagcagcacccaggccaccgccggcaccccccacgtgagcaccaccgccaccacccccaccgtgaccagcagcaaggccacccccttcagcagccccggcaccgccaccgccctgcccgccctgagaagcaccgccaccacccccaccgccaccagcttcaccgccatccccagcagcagcctgggcaccacctggaccagactgagccagaccaccacccccaccgccaccatgagcaccgccacccccagcagcacccccgagaccgcccacaccagcaccgtgctgaccaccaccgccaccaccaccagagccaccggcagcgtggccacccccagcagcacccccggcaccgcccacaccaccaaggtgcccaccaccaccaccaccggcttcaccgtgacccccagcagcagccccggcaccgccagaaccccccccgtgtggatcagcaccaccaccacccccaccaccagcggcagcaccgtgacccccagcagcgtgcccggcaccacccacacccccaccgtgctgaccaccaccaccaccaccgtggccaccggcagcatggccacccccagcagcagcacccagaccagcggcaccccccccagcctgatcaccaccgccaccaccatcaccgccaccggcagcaccaccaaccccagcagcacccccggcaccacccccatcccccccgtgctgaccaccaccgccaccacccccgccgccaccagcagcaccgtgacccccagcagcgccctgggcaccacccacaccccccccgtgcccaacaccaccgccaccacccacggcagaagcctgagccccagcagcccccacaccgtgagaaccgcctggaccagcgccaccagcggcaccctgggcaccacccacatcaccgagcccagcaccggcaccagccacacccccgccgccaccaccggcaccacccagcacagcacccccgccctgagcagcccccaccccagcagcagaaccaccgagagcccccccagccccggcaccaccacccccggccacaccaccgccaccagcagaaccaccgccaccgccacccccagcaagaccagaaccagcaccctgctgcccagcagccccaccagcgcccccatcaccaccgtggtgaccaccggctgcgagccccagtgcgcctggagcgagtggctggactacagctaccccatgcccggccccagcggcggcgacttcgacacctacagcaacatcagagccgccggcggcgccgtgtgcgagcagcccctgggcctggagtgcagagcccaggcccagcccggcgtgcccctgggcgagctgggccaggtggtggagtgcagcctggacttcggcctggtgtgcagaaacagagagcaggtgggcaagttcaagatgtgcttcaactacgagatcagagtgttctgctgcaactacggccactgccccagcacccccgccaccagcagcaccgccatgcccagcagcacccccggcaccacctggatcctgaccgagctgaccaccaccgccaccaccaccgccagcaccggcagcaccgccacccccagcagcacccccggcaccgcccccccccccaaggtgctgaccagccccgccaccacccccaccgccaccagcagcaaggccaccagcagcagcagccccagaaccgccaccaccctgcccgtgctgaccagcaccgccaccaagagcaccgccaccagcgtgacccccatccccagcagcaccctgggcaccaccggcaccctgcccgagcagaccaccacccccgtggccaccatgagcaccatccaccccagcagcacccccgagaccacccacaccagcaccgtgctgaccaccaaggccaccaccaccagagccaccagcagcaccagcacccccagcagcacccccggcaccacctggatcctgaccgagctgaccaccgccgccaccaccaccgccgccaccggccccaccgccacccccagcagcacccccggcaccacctggatcctgaccgagctgaccaccaccgccaccaccaccgccagcaccggcagcaccgccacccccagcagcacccccggcaccacctggatcctgaccgagcccagcaccaccgccaccgtgaccgtgcccaccggcagcaccgccaccgccagcagcacccaggccaccgccggcaccccccacgtgagcaccaccgccaccacccccaccgtgaccagcagcaaggccacccccagcagcagccccggcaccgccaccgccctgcccgccctgagaagcaccgccaccacccccaccgccaccagcttcaccgccatccccagcagcagcctgggcaccacctggaccagactgagccagaccaccacccccaccgccaccatgagcaccgccacccccagcagcacccccgagaccgtgcacaccagcaccgtgctgaccgccaccgccaccaccaccggcgccaccggcagcgtggccacccccagcagcacccccggcaccgcccacaccaccaaggtgcccaccaccaccaccaccggcttcaccgccacccccagcagcagccccggcaccgccctgaccccccccgtgtggatcagcaccaccaccacccccaccaccaccacccccaccaccagcggcagcaccgtgacccccagcagcatccccggcaccacccacaccgccagagtgctgaccaccaccaccaccaccgtggccaccggcagcatggccacccccagcagcagcacccagaccagcggcaccccccccagcctgaccaccaccgccaccaccatcaccgccaccggcagcaccaccaaccccagcagcacccccggcaccacccccatcacccccgtgctgaccagcaccgccaccacccccgccgccaccagcagcaaggccaccagcagcagcagccccagaaccgccaccaccctgcccgtgctgaccagcaccgccaccaagagcaccgccaccagcttcacccccatccccagcagcaccctgtggaccacctggaccgtgcccgcccagaccaccacccccatgagcaccatgagcaccatccacaccagcagcacccccgagaccacccacaccagcaccgtgctgaccaccaccgccaccatgaccagagccaccaacagcaccgccacccccagcagcaccctgggcaccaccagaatcctgaccgagctgaccaccaccgccaccaccaccgccgccaccggcagcaccgccaccctgagcagcacccccggcaccacctggatcctgaccgagcccagcaccatcgccaccgtgatggtgcccaccggcagcaccgccaccgccagcagcaccctgggcaccgcccacacccccaaggtggtgaccaccatggccaccatgcccaccgccaccgccagcaccgtgcccagcagcagcaccgtgggcaccaccagaacccccgccgtgctgcccagcagcctgcccaccttcagcgtgagcaccgtgagcagcagcgtgctgaccaccctgagacccaccggcttccccagcagccacttcagcaccccctgcttctgcagagccttcggccagttcttcagccccggcgaggtgatctacaacaagaccgacagagccggctgccacttctacgccgtgtgcaaccagcactgcgacatcgacagattccagggcgcctgccccaccagccccccccccgtgagcagcgcccccctgagcagccccagccccgcccccggctgcgacaacgccatccccctgagacaggtgaacgagacctggaccctggagaactgcaccgtggccagatgcgtgggcgacaacagagtggtgctgctggaccccaagcccgtggccaacgtgacctgcgtgaacaagcacctgcccatcaaggtgagcgaccccagccagccctgcgacttccactacgagtgcgagtgcatctgcagcatgtggggcggcagccactacagcaccttcgacggcaccagctacaccttcagaggcaactgcacctacgtgctgatgagagagatccacgccagattcggcaacctgagcctgtacctggacaaccactactgcaccgccagcgccaccgccgccgccgccagatgccccagagccctgagcatccactacaagagcatggacatcgtgctgaccgtgaccatggtgcacggcaaggaggagggcctgatcctgttcgaccagatccccgtgagcagcggcttcagcaagaacggcgtgctggtgagcgtgctgggcaccaccaccatgagagtggacatccccgccctgggcgtgagcgtgaccttcaacggccaggtgttccaggccagactgccctacagcctgttccacaacaacaccgagggccagtgcggcacctgcaccaacaaccagagagacgactgcctgcagagagacggcaccaccgccgccagctgcaaggacatggccaagacctggctggtgcccgacagcagaaaggacggctgctgggcccccaccggcaccccccccaccgccagccccgccgcccccgtgagcagcacccccacccccaccccctgccccccccagcccctgtgcgacctgatgctgagccaggtgttcgccgagtgccacaacctggtgccccccggccccttcttcaacgcctgcatcagcgaccactgcagaggcagactggaggtgccctgccagagcctggaggcctacgccgagctgtgcagagccagaggcgtgtgcagcgactggagaggcgccaccggcggcctgtgcgacctgacctgcccccccaccaaggtgtacaagccctgcggccccatccagcccgccacctgcaacagcagaaaccagagcccccagctggagggcatggccgagggctgcttctgccccgaggaccagatcctgttcaacgcccacatgggcatctgcgtgcaggcctgcccctgcgtgggccccgacggcttccccaagttccccggcgagagatgggtgagcaactgccagagctgcgtgtgcgacgagggcagcgtgagcgtgcagtgcaagcccctgccctgcgacgcccagggccagccccccccctgcaacagacccggcttcgtgaccgtgaccagacccagagccgagaacccctgctgccccgagaccgtgtgcgtgtgcaacaccaccacctgcccccagagcctgcccgtgtgcccccccggccaggagagcatctgcacccaggaggagggcgactgctgccccaccttcagatgcagaccccagctgtgcagctacaacggcaccttctacggcgtgggcgccaccttccccggcgccctgccctgccacatgtgcacctgcctgagcggcgacacccaggaccccaccgtgcagtgccaggaggacgcctgcaacaacaccacctgcccccagggcttcgagtacaagagagtggccggccagtgctgcggcgagtgcgtgcagaccgcctgcctgacccccgacggccagcccgtgcagctgaacgagacctgggtgaacagccacgtggacaactgcaccgtgtacctgtgcgaggccgagggcggcgtgcacctgctgaccccccagcccgccagctgccccgacgtgagcagctgcagaggcagcctgagaaagaccggctgctgctacagctgcgaggaggacagctgccaggtgagaatcaacaccaccatcctgtggcaccagggctgcgagaccgaggtgaacatcaccttctgcgagggcagctgccccggcgccagcaagtacagcgccgaggcccaggccatgcagcaccagtgcacctgctgccaggagagaagagtgcacgaggagaccgtgcccctgcactgccccaacggcagcgccatcctgcacacctacacccacgtggacgagtgcggctgcacccccttctgcgtgcccgcccccatggcccccccccacaccagaggcttccccgcccaggaggccaccgccgtgtag

SEQ ID NO: 89541 - DNA, 17289 bp, synthetic construct
  misc_feature 1..17289: note = Description of Artificial Sequence: Synthetic coding sequence
  source 1..17289: mol_type = other DNA
atgggcgcccccagcgcctgcagaaccctggtgctggccctggccgccatgctggtggtgccccaggccgagacccagggccccgtggagcccagctgggagaacgccggccacaccatggacggcggcgcccccaccagcagccccaccagaagagtgagcttcgtgccccccgtgaccgtgttccccagcctgagccccctgaaccccgcccacaacggcagagtgtgcagcacctggggcgacttccactacaagaccttcgacggcgacgtgttcagattccccggcctgtgcaactacgtgttcagcgagcactgcagagccgcctacgaggacttcaacgtgcagctgagaagaggcctggtgggcagcagacccgtggtgaccagagtggtgatcaaggcccagggcctggtgctggaggccagcaacggcagcgtgctgatcaacggccagagagaggagctgccctacagcagaaccggcctgctggtggagcagagcggcgactacatcaaggtgagcatcagactggtgctgaccttcctgtggaacggcgaggacagcgccctgctggagctggaccccaagtacgccaaccagacctgcggcctgtgcggcgacttcaacggcctgcccgccttcaacgagttctacgcccacaacgccagactgacccccctgcagttcggcaacctgcagaagctggacggccccaccgagcagtgccccgaccccctgcccctgcccgccggcaactgcaccgacgaggagggcatctgccacagaaccctgctgggccccgccttcgccgagtgccacgccctggtggacagcaccgcctacctggccgcctgcgcccaggacctgtgcagatgccccacctgcccctgcgccaccttcgtggagtacagcagacagtgcgcccacgccggcggccagcccagaaactggagatgccccgagctgtgccccagaacctgccccctgaacatgcagcaccaggagtgcggcagcccctgcaccgacacctgcagcaacccccagagagcccagctgtgcgaggaccactgcgtggacggctgcttctgcccccccggcaccgtgctggacgacatcacccacagcggctgcctgcccctgggccagtgcccctgcacccacggcggcagaacctacagccccggcaccagcttcaacaccacctgcagcagctgcacctgcagcggcggcctgtggcagtgccaggacctgccctgccccggcacctgcagcgtgcagggcggcgcccacatcagcacctacgacgagaagctgtacgacctgcacggcgactgcagctacgtgctgagcaagaagtgcgccgacagcagcttcaccgtgctggccgagctgagaaagtgcggcctgaccgacaacgagaactgcctgaaggccgtgaccctgagcctggacggcggcgacaccgccatcagagtgcaggccgacggcggcgtgttcctgaacagcatctacacccagctgcccctgagcgccgccaacatcaccctgttcacccccagcagcttcttcatcgtggtgcagaccggcctgggcctgcagctgctggtgcagctggtgcccctgatgcaggtgttcgtgagactggaccccgcccaccagggccagatgtgcggcctgtgcggcaacttcaaccagaaccaggccgacgacttcaccgccctgagcggcgtggtggaggccaccggcgccgccttcgccaacacctggaaggcccaggccgcctgcgccaacgccagaaacagcttcgaggacccctgcagcctgagcgtggagaacgagaactacgccagacactggtgcagcagactgaccgaccccaacagcgccttcagcagatgccacagcatcatcaaccccaagcccttccacagcaactgcatgttcgacacctgcaactgcgagagaagcgaggactgcctgtgcgccgccctgagcagctacgtgcacgcctgcgccgccaagggcgtgcagctgagcgactggagagacggcgtgtgcaccaagtacatgcagaactgccccaagagccagagatacgcctacgtggtggacgcctgccagcccacctgcagaggcctgagcgaggccgacgtgacctgcagcgtgagcttcgtgcccgtggacggctgcacctgccccgccggcaccttcctgaacgacgccggcgcctgcgtgcccgcccaggagtgcccctgctacgcccacggcaccgtgctggcccccggcgaggtggtgcacgacgagggcgccgtgtgcagctgcaccggcggcaagctgagctgcctgggcgccagcctgcagaagagcaccggctgcgccgcccccatggtgtacctggactgcagcaacagcagcgccggcacccccggcgccgagtgcctgagaagctgccacaccctggacgtgggctgcttcagcacccactgcgtgagcggctgcgtgtgcccccccggcctggtgagcgacggcagcggcggctgcatcgccgaggaggactgcccctgcgtgcacaacgaggccacctacaagcccggcgagaccatcagagtggactgcaacacctgcacctgcagaaacagaagatgggagtgcagccacagactgtgcctgggcacctgcgtggcctacggcgacggccacttcatcaccttcgacggcgacagatacagcttcgagggcagctgcgagtacatcctggcccaggactactgcggcgacaacaccacccacggcaccttcagaatcgtgaccgagaacatcccctgcggcaccaccggcaccacctgcagcaaggccatcaagctgttcgtggagagctacgagctgatcctgcaggagggcaccttcaaggccgtggccagaggccccggcggcgaccccccctacaagatcagatacatgggcatcttcctggtgatcgagacccacggcatggccgtgagctgggacagaaagaccagcgtgttcatcagactgcaccaggactacaagggcagagtgtgcggcctgtgcggcaacttcgacgacaacgccatcaacgacttcgccaccagaagcagaagcgtggtgggcgacgccctggagttcggcaacagctggaagctgagccccagctgccccgacgccctggcccccaaggacccctgcaccgccaaccccttcagaaagagctgggcccagaagcagtgcagcatcctgcacggccccaccttcgccgcctgcagaagccaggtggacagcaccaagtactacgaggcctgcgtgaacgacgcctgcgcctgcgacagcggcggcgactgcgagtgcttctgcaccgccgtggccgcctacgcccaggcctgccacgacgccggcctgtgcgtgagctggagaacccccgacacctgccccctgttctgcgacttctacaacccccacggcggctgcgagtggcactaccagccctgcggcgccccctgcctgaagacctgcagaaaccccagcggccactgcctggtggacctgcccggcctggagggctgctaccccaagtgcccccccagccagcccttcttcaacgaggaccagatgaagtgcgtggcccagtgcggctgctacgacaaggacggcaactactacgacgtgggcgccagagtgcccaccgccgagaactgccagagctgcaactgcacccccagcggcatccagtgcgcccacagcctggaggcctgcacctgcacctacgaggacagaacctacagctaccaggacgtgatctacaacaccaccgacggcctgggcgcctgcctgatcgccatctgcggcagcaacggcaccatcatcagaaaggccgtggcctgccccggcacccccgccaccacccccttcaccttcaccaccgcctgggtgccccacagcaccaccagccccgccctgcccgtgagcaccgtgtgcgtgagagaggtgtgcagatggagcagctggtacaacggccacagacccgagcccggcctgggcggcggcgacttcgagaccttcgagaacctgagacagagaggctaccaggtgtgccccgtgctggccgacatcgagtgcagagccgcccagctgcccgacatgcccctggaggagctgggccagcaggtggactgcgacagaatgagaggcctgatgtgcgccaacagccagcagagcccccccctgtgccacgactacgagctgagagtgctgtgctgcgagtacgtgccctgcggccccagccccgcccccggcaccagcccccagcccagcctgagcgccagcaccgagcccgccgtgcccacccccacccagaccaccgccaccgagaagaccaccctgtgggtgacccccagcatcagaagcaccgccgccctgaccagccagaccggcagcagcagcggccccgtgaccgtgacccccagcgcccccggcaccaccacctgccagcccagatgccagtggaccgagtggttcgacgaggactaccccaagagcgagcagctgggcggcgacgtggagagctacgacaagatcagagccgccggcggccacctgtgccagcagcccaaggacatcgagtgccaggccgagagcttccccaactggaccctggcccaggtgggccagaaggtgcactgcgacgtgcacttcggcctggtgtgcagaaactgggagcaggagggcgtgttcaagatgtgctacaactacagaatcagagtgctgtgctgcagcgacgaccactgcagaggcagagccaccacccccccccccaccaccgagctggagaccgccaccaccaccaccacccaggccctgttcagcaccccccagcccaccagcagccccggcctgaccagagccccccccgccagcaccaccgccgtgcccaccctgagcgagggcctgaccagccccagatacaccagcaccctgggcaccgccaccaccggcggccccaccacccccgccggcagcaccgagcccaccgtgcccggcgtggccaccagcaccctgcccaccagaagcgccctgcccggcaccaccggcagcctgggcacctggagacccagccagccccccaccctggcccccaccaccatggccaccagcagagccagacccaccggcaccgccagcaccgccagcaaggagcccctgaccaccagcctggcccccaccctgaccagcgagctgagcaccagccaggccgagaccagcacccccagaaccgagaccaccatgagccccctgaccaacaccaccaccagccagggcaccaccagatgccagcccaagtgcgagtggaccgagtggttcgacgtggacttccccaccagcggcgtggccggcggcgacatggagaccttcgagaacatcagagccgccggcggcaagatgtgctgggcccccaagagcatcgagtgcagagccgagaactaccccgaggtgagcatcgaccaggtgggccaggtgctgacctgcagcctggagaccggcctgacctgcaagaacgaggaccagaccggcagattcaacatgtgcttcaactacaacgtgagagtgctgtgctgcgacgactacagccactgccccagcacccccgccaccagcagcaccgccacccccagcagcacccccggcaccacctggatcctgaccaagcccaccaccaccgccaccaccaccgccagcaccggcagcaccgccacccccaccagcaccctgagaaccgcccccccccccaaggtgctgaccaccaccgccaccacccccaccgtgaccagcagcaaggccacccccagcagcagccccggcaccgccaccgccctgcccgccctgagaagcaccgccaccacccccaccgccaccagcgtgacccccatccccagcagcagcctgggcaccacctggaccagactgagccagaccaccacccccaccgccaccatgagcaccgccacccccagcagcacccccgagaccgcccacaccagcaccgtgctgaccgccaccgccaccaccaccggcgccaccggcagcgtggccacccccagcagcacccccggcaccgcccacaccaccaaggtgcccaccaccaccaccaccggcttcaccgccacccccagcagcagccccggcaccgccctgaccccccccgtgtggatcagcaccaccaccacccccaccaccagaggcagcaccgtgacccccagcagcatccccggcaccacccacaccgccaccgtgctgaccaccaccaccaccaccgtggccaccggcagcatggccacccccagcagcagcacccagaccagcggcaccccccccagcctgaccaccaccgccaccaccatcaccgccaccggcagcaccaccaaccccagcagcacccccggcaccacccccatcccccccgtgctgaccaccaccgccaccacccccgccgccaccagcaacaccgtgacccccagcagcgccctgggcaccacccacaccccccccgtgcccaacaccatggccaccacccacggcagaagcctgccccccagcagcccccacaccgtgagaaccgcctggaccagcgccaccagcggcatcctgggcaccacccacatcaccgagcccagcaccgtgaccagccacaccctggccgccaccaccggcaccacccagcacagcacccccgccctgagcagcccccaccccagcagcagaaccaccgagagcccccccagccccggcaccaccacccccggccacaccaccgccaccagcagaaccaccgccaccgccacccccagcaagaccagaaccagcaccctgctgcccagcagccccaccagcgcccccatcaccaccgtggtgaccatgggctgcgagccccagtgcgcctggagcgagtggctggactacagctaccccatgcccggccccagcggcggcgacttcgacacctacagcaacatcagagccgccggcggcgccgtgtgcgagcagcccctgggcctggagtgcagagcccaggcccagcccggcgtgcccctgagagagctgggccaggtggtggagtgcagcctggacttcggcctggtgtgcagaaacagagagcaggtgggcaagttcaagatgtgcttcaactacgagatcagagtgttctgctgcaactacggccactgccccagcacccccgccaccagcagcaccgccatgcccagcagcacccccggcaccacctggatcctgaccgagctgaccaccaccgccaccaccaccgagagcaccggcagcaccgccacccccagcagcacccccggcaccacctggatcctgaccgagcccagcaccaccgccaccgtgaccgtgcccaccggcagcaccgccaccgccagcagcacccaggccaccgccggcaccccccacgtgagcaccaccgccaccacccccaccgtgaccagcagcaaggccacccccttcagcagccccggcaccgccaccgccctgcccgccctgagaagcaccgccaccacccccaccgccaccagcttcaccgccatccccagcagcagcctgggcaccacctggaccagactgagccagaccaccacccccaccgccaccatgagcaccgccacccccagcagcacccccgagaccgtgcacaccagcaccgtgctgaccaccaccgccaccaccaccggcgccaccggcagcgtggccacccccagcagcacccccggcaccgcccacaccaccaaggtgctgaccaccaccaccaccggcttcaccgccacccccagcagcagccccggcaccgccagaaccctgcccgtgtggatcagcaccaccaccacccccaccaccagaggcagcaccgtgacccccagcagcatccccggcaccacccacacccccaccgtgctgaccaccaccaccaccaccgtggccaccggcagcatggccacccccagcagcagcacccagaccagcggcaccccccccagcctgaccaccaccgccaccaccatcaccgccaccggcagcaccaccaaccccagcagcacccccggcaccacccccatcccccccgtgctgaccaccaccgccaccacccccgccgccaccagcagcaccgtgacccccagcagcgccctgggcaccacccacaccccccccgtgcccaacaccaccgccaccacccacggcagaagcctgagccccagcagcccccacaccgtgagaaccgcctggaccagcgccaccagcggcaccctgggcaccacccacatcaccgagcccagcaccggcaccagccacacccccgccgccaccaccggcaccacccagcacagcacccccgccctgagcagcccccaccccagcagcagaaccaccgagagcccccccagccccggcaccaccacccccggccacaccagagccaccagcagaaccaccgccaccgccacccccagcaagaccagaaccagcaccctgctgcccagcagccccaccagcgcccccatcaccaccgtggtgaccatgggctgcgagccccagtgcgcctggagcgagtggctggactacagctaccccatgcccggccccagcggcggcgacttcgacacctacagcaacatcagagccgccggcggcgccgtgtgcgagcagcccctgggcctggagtgcagagcccaggcccagcccggcgtgcccctgagagagctgggccaggtggtggagtgcagcctggacttcggcctggtgtgcagaaacagagagcaggtgggcaagttcaagatgtgcttcaactacgagatcagagtgttctgctgcaactacggccactgccccagcacccccgccaccagcagcaccgccacccccagcagcacccccggcaccacctggatcctgaccgagcagaccaccgccgccaccaccaccgccaccaccggcagcaccgccatccccagcagcacccccggcaccgcccccccccccaaggtgctgaccagcaccgccaccacccccaccgccaccagcagcaaggccaccagcagcagcagccccagaaccgccaccaccctgcccgtgctgaccagcaccgccaccaagagcaccgccaccagcttcacccccatccccagcttcaccctgggcaccaccggcaccctgcccgagcagaccaccacccccatggccaccatgagcaccatccaccccagcagcacccccgagaccacccacaccagcaccgtgctgaccaccaaggccaccaccaccagagccaccagcagcatgagcacccccagcagcacccccggcaccacctggatcctgaccgagctgaccaccgccgccaccaccaccgccgccaccggccccaccgccacccccagcagcacccccggcaccacctggatcctgaccgagcccagcaccaccgccaccgtgaccgtgcccaccggcagcaccgccaccgccagcagcaccagagccaccgccggcaccctgaaggtgctgaccagcaccgccaccacccccaccgtgatcagcagcagagccacccccagcagcagccccggcaccgccaccgccctgcccgccctgagaagcaccgccaccacccccaccgccaccagcgtgaccgccatccccagcagcagcctgggcaccgcctggaccagactgagccagaccaccacccccaccgccaccatgagcaccgccacccccagcagcacccccgagaccgtgcacaccagcaccgtgctgaccaccaccaccaccaccaccagagccaccggcagcgtggccacccccagcagcacccccggcaccgcccacaccaccaaggtgcccaccaccaccaccaccggcttcaccgccacccccagcagcagccccggcaccgccctgaccccccccgtgtggatcagcaccaccaccacccccaccaccagaggcagcaccgtgacccccagcagcatccccggcaccacccacaccgccaccgtgctgaccaccaccaccaccaccgtggccaccggcagcatggccacccccagcagcagcacccagaccagcggcaccccccccagcctgaccaccaccgccaccaccatcaccgccaccggcagcaccaccaaccccagcagcacccccggcaccacccccatcccccccgtgctgaccaccaccgccaccacccccgccgccaccagcagcaccgtgacccccagcagcgccctgggcaccacccacaccccccccgtgcccaacaccaccgccaccacccacggcagaagcctgccccccagcagcccccacaccgtgagaaccgcctggaccagcgccaccagcggcatcctgggcaccacccacatcaccgagcccagcaccgtgaccagccacacccccgccgccaccaccagcaccacccagcacagcacccccgccctgagcagcccccaccccagcagcagaaccaccgagagcccccccagccccggcaccaccacccccggccacaccagaggcaccagcagaaccaccgccaccgccacccccagcaagaccagaaccagcaccctgctgcccagcagccccaccagcgcccccatcaccaccgtggtgaccaccggctgcgagccccagtgcgcctggagcgagtggctggactacagctaccccatgcccggccccagcggcggcgacttcgacacctacagcaacatcagagccgccggcggcgccgtgtgcgagcagcccctgggcctggagtgcagagcccaggcccagcccggcgtgcccctgagagagctgggccaggtggtggagtgcagcctggacttcggcctggtgtgcagaaacagagagcaggtgggcaagttcaagatgtgcttcaactacgagatcagagtgttctgctgcaactacggccactgccccagcacccccgccaccagcagcaccgccacccccagcagcacccccggcaccacctggatcctgaccaagctgaccaccaccgccaccaccaccgagagcaccggcagcaccgccacccccagcagcacccccggcaccacctggatcctgaccgagcccagcaccaccgccaccgtgaccgtgcccaccggcagcaccgccaccgccagcagcacccaggccaccgccggcaccccccacgtgagcaccaccgccaccacccccaccgtgaccagcagcaaggccacccccttcagcagccccggcaccgccaccgccctgcccgccctgagaagcaccgccaccacccccaccgccaccagcttcaccgccatccccagcagcagcctgggcaccacctggaccagactgagccagaccaccacccccaccgccaccatgagcaccgccacccccagcagcacccccgagaccgcccacaccagcaccgtgctgaccaccaccgccaccaccaccagagccaccggcagcgtggccacccccagcagcacccccggcaccgcccacaccaccaaggtgcccaccaccaccaccaccggcttcaccgtgacccccagcagcagccccggcaccgccagaaccccccccgtgtggatcagcaccaccaccacccccaccaccagcggcagcaccgtgacccccagcagcgtgcccggcaccacccacacccccaccgtgctgaccaccaccaccaccaccgtggccaccggcagcatggccacccccagcagcagcacccagaccagcggcaccccccccagcctgatcaccaccgccaccaccatcaccgccaccggcagcaccaccaaccccagcagcacccccggcaccacccccatcccccccgtgctgaccaccaccgccaccacccccgccgccaccagcagcaccgtgacccccagcagcgccctgggcaccacccacaccccccccgtgcccaacaccaccgccaccacccacggcagaagcctgagccccagcagcccccacaccgtgagaaccgcctggaccagcgccaccagcggcaccctgggcaccacccacatcaccgagcccagcaccggcaccagccacacccccgccgccaccaccggcaccacccagcacagcacccccgccctgagcagcccccaccccagcagcagaaccaccgagagcccccccagccccggcaccaccacccccggccacaccaccgccaccagcagaaccaccgccaccgccacccccagcaagaccagaaccagcaccctgctgcccagcagccccaccagcgcccccatcaccaccgtggtgaccaccggctgcgagccccagtgcgcctggagcgagtggctggactacagctaccccatgcccggccccagcggcggcgacttcgacacctacagcaacatcagagccgccggcggcgccgtgtgcgagcagcccctgggcctggagtgcagagcccaggcccagcccggcgtgcccctgggcgagctgggccaggtggtggagtgcagcctggacttcggcctggtgtgcagaaacagagagcaggtgggcaagttcaagatgtgcttcaactacgagatcagagtgttctgctgcaactacggccactgccccagcacccccgccaccagcagcaccgccatgcccagcagcacccccggcaccacctggatcctgaccgagctgaccaccaccgccaccaccaccgccagcaccggcagcaccgccacccccagcagcacccccggcaccgcccccccccccaaggtgctgaccagccccgccaccacccccaccgccaccagcagcaaggccaccagcagcagcagccccagaaccgccaccaccctgcccgtgctgaccagcaccgccaccaagagcaccgccaccagcgtgacccccatccccagcagcaccctgggcaccaccggcaccctgcccgagcagaccaccacccccgtggccaccatgagcaccatccaccccagcagcacccccgagaccacccacaccagcaccgtgctgaccaccaaggccaccaccaccagagccaccagcagcaccagcacccccagcagcacccccggcaccacctggatcctgaccgagctgaccaccgccgccaccaccaccgccgccaccggccccaccgccacccccagcagcacccccggcaccacctggatcctgaccgagctgaccaccaccgccaccaccaccgccagcaccggcagcaccgccacccccagcagcacccccggcaccacctggatcctgaccgagcccagcaccaccgccaccgtgaccgtgcccaccggcagcaccgccaccgccagcagcacccaggccaccgccggcaccccccacgtgagcaccaccgccaccacccccaccgtgaccagcagcaaggccacccccagcagcagccccggcaccgccaccgccctgcccgccctgagaagcaccgccaccacccccaccgccaccagcttcaccgccatccccagcagcagcctgggcaccacctggaccagactgagccagaccaccacccccaccgccaccatgagcaccgccacccccagcagcacccccgagaccgtgcacaccagcaccgtgctgaccgccaccgccaccaccaccggcgccaccggcagcgtggccacccccagcagcacccccggcaccgcccacaccaccaaggtgcccaccaccaccaccaccggcttcaccgccacccccagcagcagccccggcaccgccctgaccccccccgtgtggatcagcaccaccaccacccccaccaccaccacccccaccaccagcggcagcaccgtgacccccagcagcatccccggcaccacccacaccgccagagtgctgaccaccaccaccaccaccgtggccaccggcagcatggccacccccagcagcagcacccagaccagcggcaccccccccagcctgaccaccaccgccaccaccatcaccgccaccggcagcaccaccaaccccagcagcacccccggcaccacccccatcacccccgtgctgaccagcaccgccaccacccccgccgccaccagcagcaaggccaccagcagcagcagccccagaaccgccaccaccctgcccgtgctgaccagcaccgccaccaagagcaccgccaccagcttcacccccatccccagcagcaccctgtggaccacctggaccgtgcccgcccagaccaccacccccatgagcaccatgagcaccatccacaccagcagcacccccgagaccacccacaccagcaccgtgctgaccaccaccgccaccatgaccagagccaccaacagcaccgccacccccagcagcaccctgggcaccaccagaatcctgaccgagctgaccaccaccgccaccaccaccgccgccaccggcagcaccgccaccctgagcagcacccccggcaccacctggatcctgaccgagcccagcaccatcgccaccgtgatggtgcccaccggcagcaccgccaccgccagcagcaccctgggcaccgcccacacccccaaggtggtgaccaccatggccaccatgcccaccgccaccgccagcaccgtgcccagcagcagcaccgtgggcaccaccagaacccccgccgtgctgcccagcagcctgcccaccttcagcgtgagcaccgtgagcagcagcgtgctgaccaccctgagacccaccggcttccccagcagccacttcagcaccccctgcttctgcagagccttcggccagttcttcagccccggcgaggtgatctacaacaagaccgacagagccggctgccacttctacgccgtgtgcaaccagcactgcgacatcgacagattccagggcgcctgccccaccagccccccccccgtgagcagcgcccccctgagcagccccagccccgcccccggctgcgacaacgccatccccctgagacaggtgaacgagacctggaccctggagaactgcaccgtggccagatgcgtgggcgacaacagagtggtgctgctggaccccaagcccgtggccaacgtgacctgcgtgaacaagcacctgcccatcaaggtgagcgaccccagccagccctgcgacttccactacgagtgcgagtgcatctgcagcatgtggggcggcagccactacagcaccttcgacggcaccagctacaccttcagaggcaactgcacctacgtgctgatgagagagatccacgccagattcggcaacctgagcctgtacctggacaaccactactgcaccgccagcgccaccgccgccgccgccagatgccccagagccctgagcatccactacaagagcatggacatcgtgctgaccgtgaccatggtgcacggcaaggaggagggcctgatcctgttcgaccagatccccgtgagcagcggcttcagcaagaacggcgtgctggtgagcgtgctgggcaccaccaccatgagagtggacatccccgccctgggcgtgagcgtgaccttcaacggccaggtgttccaggccagactgccctacagcctgttccacaacaacaccgagggccagtgcggcacctgcaccaacaaccagagagacgactgcctgcagagagacggcaccaccgccgccagctgcaaggacatggccaagacctggctggtgcccgacagcagaaaggacggctgctgggcccccaccggcaccccccccaccgccagccccgccgcccccgtgagcagcacccccacccccaccccctgccccccccagcccctgtgcgacctgatgctgagccaggtgttcgccgagtgccacaacctggtgccccccggccccttcttcaacgcctgcatcagcgaccactgcagaggcagactggaggtgccctgccagagcctggaggcctacgccgagctgtgcagagccagaggcgtgtgcagcgactggagaggcgccaccggcggcctgtgcgacctgacctgcccccccaccaaggtgtacaagccctgcggccccatccagcccgccacctgcaacagcagaaaccagagcccccagctggagggcatggccgagggctgcttctgccccgaggaccagatcctgttcaacgcccacatgggcatctgcgtgcaggcctgcccctgcgtgggccccgacggcttccccaagttccccggcgagagatgggtgagcaactgccagagctgcgtgtgcgacgagggcagcgtgagcgtgcagtgcaagcccctgccctgcgacgcccagggccagccccccccctgcaacagacccggcttcgtgaccgtgaccagacccagagccgagaacccctgctgccccgagaccgtgtgcgtgtgcaacaccaccacctgcccccagagcctgcccgtgtgcccccccggccaggagagcatctgcacccaggaggagggcgactgctgccccaccttcagatgcagaccccagctgtgcagctacaacggcaccttctacggcgtgggcgccaccttccccggcgccctgccctgccacatgtgcacctgcctgagcggcgacacccaggaccccaccgtgcagtgccaggaggacgcctgcaacaacaccacctgcccccagggcttcgagtacaagagagtggccggccagtgctgcggcgagtgcgtgcagaccgcctgcctgacccccgacggccagcccgtgcagctgaacgagacctgggtgaacagccacgtggacaactgcaccgtgtacctgtgcgaggccgagggcggcgtgcacctgctgaccccccagcccgccagctgccccgacgtgagcagctgcagaggcagcctgagaaagaccggctgctgctacagctgcgaggaggacagctgccaggtgagaatcaacaccaccatcctgtggcaccagggctgcgagaccgaggtgaacatcaccttctgcgagggcagctgccccggcgccagcaagtacagcgccgaggcccaggccatgcagcaccagtgcacctgctgccaggagagaagagtgcacgaggagaccgtgcccctgcactgccccaacggcagcgccatcctgcacacctacacccacgtggacgagtgcggctgcacccccttctgcgtgcccgcccccatggcccccccccacaccagaggcttccccgcccaggaggccaccgccgtgtag

SEQ ID NO: 89542 - DNA, 1611 bp, synthetic construct
  misc_feature 1..1611: note = Description of Artificial Sequence: Synthetic coding sequence
  source 1..1611: mol_type = other DNA
gtgttctgctgcaactacggccactgcccccccagaccccccgccctgagaccctgccccccccccctgagaggcagacccggcagcaccgagctgaccaccaccgccaccaccaccgccagcaccggcagcaccgccacccccagcagcacccccggcaccgcccccccccccaaggtgctgaccagccccgccaccacccccaccgccaccagcagcaaggccaccagcagcagcagccccagaaccgccaccaccctgcccgtgctgaccagcaccgccaccaagagcaccgccaccagcgtgacccccatccccagcagcaccctgggcaccaccggcaccctgcccgagcagaccaccacccccgtggccaccatgagcaccatccaccccagcagcacccccgagaccacccacaccagcaccgtgctgaccaccaaggccaccaccaccagagccaccagcagcaccagcacccccagcagcacccccggcaccacctggatcctgaccgagctgaccaccgccgccaccaccaccgccgccaccggccccaccgccacccccagcagcacccccggcaccacctggatcctgaccgagctgaccaccaccgccaccaccaccgccagcaccggcagcaccgccacccccagcagcacccccggcaccacctggatcctgaccgagcccagcaccaccgccaccgtgaccgtgcccaccggcagcaccgccaccgccagcagcacccaggccaccgccggcaccccccacgtgagcaccaccgccaccacccccaccgtgaccagcagcaaggccacccccagcagcagccccggcaccgccaccgccctgcccgccctgagaagcaccgccaccacccacagctaccagctgtacagccaccccctgctgctgcccaccacctggaccagactgagccagaccaccacccccaccgccaccatgagcaccgccacccccagcagcacccccgagaccgtgcacaccagcaccgtgctgaccgccaccgccaccaccaccggccccgccctgtggcccccccccccccccccccaggagcagctgaccctgcccaagtgcagactgccccagcccagacacagccaccccctgctgcagcccagagacggcacccacgccagcagcgtggaccagcacaaccaccacacccacaaccaccacacccacaaccagtggctgcacggcgaccccctgctgcaccccggcgaccacccccacagacagagcgccgaccaccaccaccacaactgcaccggcagcatggccacccccagcagcagcacccagaccagcggcaccccccccagcctgaccaccaccgccaccaccatcaccgccaccggcagcaccaccaaccccagcagcacccccggcaccacccccatcacccccgtgctgaccagcaccgccaccacccccgccgccaccagcagcaaggccaccagcagcagcagccccagaaccgccaccaccctgcccgtgctgaccagcaccgccaccaagagcaccgccaccagcttcacccccatccccagcccctgcggccccagaggccccagctag

SEQ ID NO: 89543 - DNA, 561 bp, synthetic construct
  misc_feature 1..561: note = Description of Artificial Sequence: Synthetic coding sequence
  source 1..561: mol_type = other DNA
agcagcacccccggcaccacctggatcctgaccgagcccagcaccaccgccaccgtgaccgtgcccaccggcagcaccgccaccgccagcagcacccaggccaccgccggcaccccccacgtgagcaccaccgccaccacccccaccgtgaccagcagcaaggccacccccttcagcagccccggcaccgccaccgccctgcccgccctgagaagcaccgccaccacccccaccgccaccagcttcaccgccatccccagcagctgggccccccccggccccgcctaccacagacccccccaccccagacccccctgcccccagccccaccccccccccctgcagagactgagcacccccccccagtgcctgccccccagaccccccagaggccacagactgtgcggccaccccctgctgcaccccagaaacagcagccactaccagagcgccgactaccacaaccacttcaccgccacccccagcagcagccccggcaccgccagaaccctgcccgtgtggatcagcaccaccaccacccccaccaccagaggcagctag

SEQ ID NO: 89544 - DNA, 960 bp, synthetic construct
  misc_feature 1..960: note = Description of Artificial Sequence: Synthetic coding sequence
  source 1..960: mol_type = other DNA
accaaggccaccaccaccagagccaccagcagcatgagcacccccagcagcacccccggcaccacctggatcctgaccgagctgaccaccgccgccaccaccaccgccgccaccccccacggccaccccgtgctgcaccccagagaccacctggacccccacagagcccagcactacaccgtgaccgtgcccaccggcagcaccgccaccgccagcagcaccagagccaccgccggcaccctgaaggtgctgaccagccaccacacccacagccaccagctgcagagccacagcctgctgcagagcagagactgcaacagacccagcagcaccgagaagcacagccaccacacccacagctaccagagatacagccaccccctgttcctgcccaccgcctggaccagactgagccagaccaccacccccaccgccaccatgagcaccgccacccccagcagcacccccgagaccgtgcacaccagcaccgtgctgaccaccaccaccaccaccaccagagccaccctgtggcccccccccccccccccccaggagcagctgaccctgcccaagtgcagactgccccagcccagacacagccaccccctgctgcagcccagagacggcacccacgccagcagcgtggaccagcacaaccaccacacccacaaccagagactgcacggcgaccccctgctgcaccccaccacccacaccgccaccgtgctgaccaccaccaccaccacccccctggtgctgtggcagcacccccccctggcccacagacccgtggtgccccccagcctgaccaccaccgccaccaccatcaccgccaccggcagcaccaccaaccccagcagcacccccggcaccacccccatcccccccgtgctgaccaccaccgcccacacctgcagccaccagcagcacagcgacagcctgctgtgccccagagactag

SEQ ID NO: 89545 - DNA, 2007 bp, synthetic construct
  misc_feature 1..2007: note = Description of Artificial Sequence: Synthetic coding sequence
  source 1..2007: mol_type = other DNA
atgagagagatccacgccagattcggcaacctgagcctgtacctggacaaccactactgcaccgccagcgccaccgccgccgccgccagatgccccagagccctgagcatccactacaagagcatggacatcgtgctgaccgtgaccatggtgcacggcaaggaggagggcctgatcctgttcgaccagatccccgtgagcagcggcttcagcaagaacggcgtgctggtgagcgtgctgggcaccaccaccatgagagtggacatccccgccctgggcgtgagcgtgaccttcaacggccaggtgttccaggccagactgccctacagcctgttccacaacaacaccgagggccagtgcggcacctgcaccaacaaccagagagacgactgcctgcagagagacggcaccaccgccgccagctgcaaggacatggccaagacctggctggtgcccgacagcagaaaggacggctgctgggcccccaccggcaccccccccaccgccagccccgccgcccccgtgagcagcacccccacccccaccccctgccccccccagcccctgtgcgacctgatgctgagccaggtgttcgccgagtgccacaacctggtgccccccggccccttcttcaacgcctgcatcagcgaccactgcagaggcagactggaggtgccctgccagagcctggaggcctacgccgagctgtgcagagccagaggcgtgtgcagcgactggagaggcgccaccggcggcctgtgcgacctgacctgcccccccaccaaggtgtacaagccctgcggccccatccagcccgccacctgcaacagcagaaaccagagcccccagctggagggcatggccgagggctgcttctgccccgaggaccagatcctgttcaacgcccacatgggcatctgcgtgcaggcctgcccctgcgtgggccccgacggcttccccaagttccccggcgagagatgggtgagcaactgccagagctgcgtgtgcgacgagggcagcgtgagcgtgcagtgcaagcccctgccctgcgacgcccagggccagccccccccctgcaacagacccggcttcgtgaccgtgaccagacccagagccgagaacccctgctgccccgagaccgtgtgcgtgtgcaacaccaccacctgcccccagagcctgcccgtgtgcccccccggccaggagagcatctgcacccaggaggagggcgactgctgccccaccttcagatgcagaccccagctgtgcagctacaacggcaccttctacggcgtgggcgccaccttccccggcgccctgccctgccacatgtgcacctgcctgagcggcgacacccaggaccccaccgtgcagtgccaggaggacgcctgcaacaacaccacctgcccccagggcttcgagtacaagagagtggccggccagtgctgcggcgagtgcgtgcagaccgcctgcctgacccccgacggccagcccgtgcagctgaacgagacctgggtgaacagccacgtggacaactgcaccgtgtacctgtgcgaggccgagggcggcgtgcacctgctgaccccccagcccgccagctgccccgacgtgagcagctgcagaggcagcctgagaaagaccggctgctgctacagctgcgaggaggacagctgccaggtgagaatcaacaccaccatcctgtggcaccagggctgcgagaccgaggtgaacatcaccttctgcgagggcagctgccccggcgccagcaagtacagcgccgaggcccaggccatgcagcaccagtgcacctgctgccaggagagaagagtgcacgaggagaccgtgcccctgcactgccccaacggcagcgccatcctgcacacctacacccacgtggacgagtgcggctgcacccccttctgcgtgcccgcccccatgagcccccccgcctgcgtgtggcaccccgccctgagagcccccgccgcccacctgggcctggcccccccctag

SEQ ID NO: 89546 - DNA, 7320 bp, synthetic construct
  misc_feature 1..7320: note = Description of Artificial Sequence: Synthetic coding sequence
  source 1..7320: mol_type = other DNA
atggtgcagagatggctgctgctgagctgctgcggcgccctgctgagcgccggcctggccaacaccagctacaccagccccggcctgcagagactgaaggacagcccccagaccgcccccgacaagggccagtgcagcacctggggcgccggccacttcagcaccttcgaccaccacgtgtacgacttcagcggcacctgcaactacatcttcgccgccacctgcaaggacgccttccccaccttcagcgtgcagctgagaagaggccccgacggcagcatcagcagaatcatcgtggagctgggcgccagcgtggtgaccgtgagcgaggccatcatcagcgtgaaggacatcggcgtgatcagcctgccctacaccagcaacggcctgcagatcacccccttcggccagagcgtgagactggtggccaagcagctggagctggagctggaggtggtgtggggccccgacagccacctgatggtgctggtggagagaaagtacatgggccagatgtgcggcctgtgcggcaacttcgacggcaaggtgaccaacgagttcgtgagcgaggagggcaagttcctggagccccacaagttcgccgccctgcagaagctggacgaccccggcgagatctgcaccttccaggacatccccagcacccacgtgagacaggcccagcacgccagaatctgcacccagctgctgaccctggtggcccccgagtgcagcgtgagcaaggagcccttcgtgctgagctgccaggccgacgtggccgccgccccccagcccggcccccagaacagcagctgcgccaccctgagcgagtacagcagacagtgcagcatggtgggccagcccgtgagaagatggagaagccccggcctgtgcagcgtgggccagtgccccgccaaccaggtgtaccaggagtgcggcagcgcctgcgtgaagacctgcagcaacccccagcacagctgcagcagcagctgcaccttcggctgcttctgccccgagggcaccgtgctgaacgacctgagcaacaaccacacctgcgtgcccgtgacccagtgcccctgcgtgctgcacggcgccatgtacgcccccggcgaggtgaccatcgccgcctgccagacctgcagatgcaccctgggcagatgggtgtgcaccgagagaccctgccccggccactgcagcctggagggcggcagcttcgtgaccaccttcgacgccagaccctacagattccacggcacctgcacctacatcctgctgcagagcccccagctgcccgaggacggcgccctgatggccgtgtacgacaagagcggcgtgagccacagcgagaccagcctggtggccgtggtgtacctgagcagacaggacaagatcgtgatcagccaggacgaggtggtgaccaacaacggcgaggccaagtggctgccctacaagaccagaaacatcaccgtgttcagacagaccagcacccacctgcagatggccaccagcttcggcctggagctggtggtgcagctgagacccatcttccaggcctacgtgaccgtgggcccccagttcagaggccagaccagaggcctgtgcggcaacttcaacggcgacaccaccgacgacttcaccaccagcatgggcatcgccgagggcaccgccagcctgttcgtggacagctggagagccggcaactgccccgccgccctggagagagagaccgacccctgcagcatgagccagctgaacaaggtgtgcgccgagacccactgcagcatgctgctgagaaccggcaccgtgttcgagagatgccacgccaccgtgaaccccgcccccttctacaagagatgcgtgtaccaggcctgcaactacgaggagaccttcccccacatctgcgccgccctgggcgactacgtgcacgcctgcagcctgagaggcgtgctgctgtggggctggagaagcagcgtggacaactgcaccatcccctgcaccggcaacaccaccttcagctacaacagccaggcctgcgagagaacctgcctgagcctgagcgacagagccaccgagtgccaccacagcgccgtgcccgtggacggctgcaactgccccgacggcacctacctgaaccagaagggcgagtgcgtgagaaaggcccagtgcccctgcatcctggagggctacaagttcatcctggccgagcagagcaccgtgatcaacggcatcacctgccactgcatcaacggcagactgagctgcccccagagaccccagatgttcctggccagctgccaggcccccaagaccttcaagagctgcagccagagcagcgagaacaagttcggcgccgcctgcgcccccacctgccagatgctggccaccggcgtggcctgcgtgcccaccaagtgcgagcccggctgcgtgtgcgccgagggcctgtacgagaacgccgacggccagtgcgtgccccccgaggagtgcccctgcgagttcagcggcgtgagctaccccggcggcgccgagctgcacaccgactgcagaacctgcagctgcagcagaggcagatgggcctgccagcagggcacccactgccccagcacctgcaccctgtacggcgagggccacgtgatcaccttcgacggccagagattcgtgttcgacggcaactgcgagtacatcctggccaccgacgtgtgcggcgtgaacgacagccagcccaccttcaagatcctgaccgagaacgtgatctgcggcaacagcggcgtgacctgcagcagagccatcaagatcttcctgggcggcctgagcgtggtgctggccgacagaaactacaccgtgaccggcgaggagccccacgtgcagctgggcgtgacccccggcgccctgagcctggtggtggacatcagcatccccggcagatacaacctgaccctgatctggaacagacacatgaccatcctgatcagaatcgccagagccagccaggaccccctgtgcggcctgtgcggcaacttcaacggcaacatgaaggacgacttcgagaccagaagcagatacgtggccagcagcgagctggagctggtgaacagctggaaggagagccccctgtgcggcgacgtgagcttcgtgaccgacccctgcagcctgaacgccttcagaagaagctgggccgagagaaagtgcagcgtgatcaacagccagaccttcgccacctgccacagcaaggtgtaccacctgccctactacgaggcctgcgtgagagacgcctgcggctgcgacagcggcggcgactgcgagtgcctgtgcgacgccgtggccgcctacgcccaggcctgcctggacaagggcgtgtgcgtggactggagaacccccgccttctgccccatctactgcggcttctacaacacccacacccaggacggccacggcgagtaccagtacacccaggaggccaactgcacctggcactaccagccctgcctgtgccccagccagccccagagcgtgcccggcagcaacatcgagggctgctacaactgcagccaggacgagtacttcgaccacgaggagggcgtgtgcgtgccctgcatgccccccaccaccccccagccccccaccaccccccagctgcccaccaccggcagcagacccacccaggtgtggcccatgaccggcaccagcaccaccatcggcctgctgagcagcaccggccccagccccagcagcaaccacacccccgccagccccacccagacccccctgctgcccgccaccctgaccagcagcaagcccaccgccagcagcggcgagccccccagacccaccaccgccgtgaccccccaggccaccagcggcctgccccccaccgccaccctgagaagcaccgccaccaagcccaccgtgacccaggccaccaccagagccaccgccagcaccgccagccccgccaccaccagcaccgcccagagcaccaccagaaccaccatgaccctgcccacccccgccaccagcggcaccagccccaccctgcccaagagcaccaaccaggagctgcccggcaccaccgccacccagaccaccggccccagacccacccccgccagcaccaccggccccaccaccccccagcccggccagcccaccagacccaccgccaccgagaccacccagaccagaaccaccaccgagtacaccaccccccagaccccccacaccacccacagcccccccaccgccggcagccccgtgcccagcaccggccccgtgaccgccaccagcttccacgccaccaccacctaccccacccccagccaccccgagaccaccctgcccacccacgtgccccccttcagcaccagcctggtgacccccagcacccacaccgtgatcacccccacccacgcccagatggccaccagcgccagcaaccacagcgcccccaccggcaccatccccccccccaccaccctgaaggccaccggcagcacccacaccgccccccccatcacccccaccaccagcggcaccagccaggcccacagcagcttcagcaccaacaagacccccaccagcctgcacagccacaccagcagcacccaccaccccgaggtgacccccaccagcaccaccaccatcacccccaaccccaccagcaccagaaccagaacccccgtggcccacaccaacagcgccaccagcagcagaccccccccccccttcaccacccacagcccccccaccggcagcagccccttcagcagcaccggccccatgaccgccaccagcttcaagaccaccaccacctaccccacccccagccacccccagaccaccctgcccacccacgtgccccccttcagcaccagcctggtgacccccagcacccacaccgtgatcacccccacccacgcccagatggccaccagcgccagcatccacagcatgcccaccggcaccatccccccccccaccaccctgaaggccaccggcagcacccacaccgcccccaccatgaccctgaccaccagcggcaccagccaggccctgagcagcctgaacaccgccaagaccagcaccagcctgcacagccacaccagcagcacccaccacgccgaggccaccagcaccagcaccaccaacatcacccccaaccccaccagcaccggcaccccccccatgaccgtgaccaccagcggcaccagccagagcagaagcagcttcagcaccgccaagaccagcaccagcctgcacagccacaccagcagcacccaccaccccgaggtgaccagcaccagcaccaccagcatcacccccaaccacaccagcaccggcaccagaacccccgtggcccacaccaccagcgccaccagcagcagactgcccacccccttcaccacccacagcccccccaccggcaccacccccatcagcagcaccggccccgtgaccgccaccagcttccagaccaccaccacctaccccacccccagccacccccacaccaccctgcccacccacgtgcccagcttcagcaccagcctggtgacccccagcacccacaccgtgatcatccccacccacacccagatggccaccagcgccagcatccacagcatgcccaccggcaccatccccccccccaccaccatcaaggccaccggcagcacccacaccgccccccccatgacccccaccaccagcggcaccagccagagccccagcagcttcagcaccgccaagaccagcaccagcctgccctaccacaccagcagcacccaccaccccgaggtgacccccaccagcaccaccaacatcacccccaagcacaccagcaccggcaccagaacccccgtggcccacaccaccagcgccagcagcagcagactgcccacccccttcaccacccacagcccccccaccggcagcagccccttcagcagcaccggccccatgaccgccaccagcttccagaccaccaccacctaccccacccccagccacccccagaccaccctgcccacccacgtgccccccttcagcaccagcctggtgacccccagcacccacaccgtgatcatcaccacccacacccagatggccaccagcgccagcatccacagcacccccaccggcaccgtgcccccccccaccaccctgaaggccaccggcagcacccacaccgccccccccatgaccgtgaccaccagcggcaccagccagacccacagcagcttcagcaccgccaccgccagcagcagcttcatcagcagcagcagctggctgccccagaacagcagcagcagaccccccagcagccccatcaccacccagctgccccacctgagcagcgccaccacccccgtgagcaccaccaaccagctgagcagcagcttcagccccagccccagcgcccccagcaccgtgagcagctacgtgcccagcagccacagcagcccccagaccagcagccccagcgtgggcaccagcagcagcttcgtgagcgcccccgtgcacagcaccaccctgagcagcggcagccacagcagcctgagcacccaccccaccaccgccagcgtgagcgccagccccctgttccccagcagccccgccgccagcaccaccatcagagccaccctgccccacaccatcagcagccccttcaccctgagcgccctgctgcccatcagcaccgtgaccgtgagccccacccccagcagccacctggccagcagcaccatcgccttccccagcacccccagaaccaccgccagcacccacaccgcccccgccttcagcagccagagcaccaccagcagaagcaccagcctgaccaccagagtgcccaccagcggcttcgtgagcctgaccagcggcgtgaccggcatccccaccagccccgtgaccaacctgaccaccagacaccccggccccaccctgagccccaccaccagattcctgaccagcagcctgaccgcccacggcagcacccccgccagcgcccccgtgagcagcctgggcacccccacccccaccagccccggcgtgtgcagcgtgagagagcagcaggaggagatcaccttcaagggctgcatggccaacgtgaccgtgaccagatgcgagggcgcctgcatcagcgccgccagcttcaacatcatcacccagcaggtggacgccagatgcagctgctgcagacccctgcacagctacgagcagcagctggagctgccctgccccgaccccagcacccccggcagaagactggtgctgaccctgcaggtgttcagccactgcgtgtgcagcagcgtggcctgcggcgactag

SEQ ID NO: 89547 - DNA, 1134 bp, synthetic construct
  misc_feature 1..1134: note = Description of Artificial Sequence: Synthetic coding sequence
  source 1..1134: mol_type = other DNA
atgaagaccctgcccctgttcgtgtgcatctgcgccctgagcgcctgcttcagcttcagcgagggcagagagagagaccacgagctgagacacagaagacaccaccaccagagccccaagagccacttcgagctgccccactaccccggcctgctggcccaccagaagcccttcatcagaaagagctacaagtgcctgcacaagagatgcagacccaagctgccccccagccccaacaacccccccaagttccccaacccccaccagccccccaagcaccccgacaagaacagcagcgtggtgaaccccaccctggtggccaccacccagatccccagcgtgaccttccccagcgccagcaccaagatcaccaccctgcccaacgtgaccttcctgccccagaacgccaccaccatcagcagcagagagaacgtgaacaccagcagcagcgtggccaccctggcccccgtgaacagccccgccccccaggacaccaccgccgccccccccacccccagcgccaccacccccgccccccccagcagcagcgccccccccgagaccaccgccgccccccccacccccagcgccaccacccaggccccccccagcagcagcgccccccccgagaccaccgccgccccccccaccccccccgccaccacccccgccccccccagcagcagcgccccccccgagaccaccgccgccccccccacccccagcgccaccacccccgcccccctgagcagcagcgccccccccgagaccaccgccgtgccccccacccccagcgccaccaccctggaccccagcagcgccagcgccccccccgagaccaccgccgccccccccacccccagcgccaccacccccgccccccccagcagccccgccccccaggagaccaccgccgcccccatcaccacccccaacagcagccccaccaccctggcccccgacaccagcgagaccagcgccgcccccacccaccagaccaccaccagcgtgaccacccagaccaccaccaccaagcagcccaccagcgcccccggccagaacaagatcagcagattcctgctgtacatgaagaacctgctgaacagaatcatcgacgacatggtggagcagtag

SEQ ID NO: 89548 - DNA, 1134 bp, synthetic construct; identical to SEQ ID NO: 89547
  misc_feature 1..1134: note = Description of Artificial Sequence: Synthetic coding sequence
  source 1..1134: mol_type = other DNA

SEQ ID NO: 89549 - DNA, 1134 bp, synthetic construct; identical to SEQ ID NO: 89547
  misc_feature 1..1134: note = Description of Artificial Sequence: Synthetic coding sequence
  source 1..1134: mol_type = other DNA

SEQ ID NO: 89550 - DNA, 411 bp, synthetic construct
  misc_feature 1..411: note = Description of Artificial Sequence: Synthetic coding sequence
  source 1..411: mol_type = other DNA
atgaagaccctgcccctgttcgtgtgcatctgcgccctgagcgcctgcttcagcttcagcgagggcagagagagagaccacgagctgagacacagaagacaccaccaccagagccccaagagccacttcgagctgccccactaccccggcctgctggcccaccagaagcccttcatcagaaagagctacaagtgcctgcacaagagatgcagacccaagctgccccccagccccaacaacccccccaagttccccaacccccaccagccccccaagcaccccgacaagaacagcagcgtggtgaaccccaccctggtggccaccacccagatccccagcgtgaccttccccagcgccagcaccaagatcaccaccctgcccaacgtgaccttcctgccccagaacgcctag

SEQ ID NO: 89551 - DNA, 1743 bp, synthetic construct
  misc_feature 1..1743: note = Description of Artificial Sequence: Synthetic coding sequence
  source 1..1743: mol_type = other DNA
atgaccgcccccgccggccccagaggcagcgagaccgagagactgctgacccccaaccccggctacggcacccaggccggccccagccccgccccccccaccccccccgaggaggaggacctgagaagaagactgaagtacttcttcatgagcccctgcgacaagttcagagccaagggcagaaagccctgcaagctgatgctgcaggtggtgaagatcctggtggtgaccgtgcagctgatcctgttcggcctgagcaaccagctggccgtgaccttcagagaggagaacaccatcgccttcagacacctgttcctgctgggctacagcgacggcgccgacgacaccttcgccgcctacaccagagagcagctgtaccaggccatcttccacgccgtggaccagtacctggccctgcccgacgtgagcctgggcagatacgcctacgtgagaggcggcggcgacccctggaccaacggcagcggcctggccctgtgccagagatactaccacagaggccacgtggaccccgccaacgacaccttcgacatcgaccccatggtggtgaccgactgcatccaggtggacccccccgagagacccccccccccccccagcgacgacctgaccctgctggagagcagcagcagctacaagaacctgaccctgaagttccacaagctggtgaacgtgaccatccacttcagactgaagaccatcaacctgcagagcctgatcaacaacgagatccccgactgctacaccttcagcgtgctgatcaccttcgacaacaaggcccacagcggcagaatccccatcagcctggagacccaggcccacatccaggagtgcaagcaccccagcgtgttccagcacggcgacaacagcttcagactgctgttcgacgtggtggtgatcctgacctgcagcctgagcttcctgctgtgcgccagaagcctgctgagaggcttcctgctgcagaacgagttcgtgggcttcatgtggagacagagaggcagagtgatcagcctgtgggagagactggagttcgtgaacggctggtacatcctgctggtgaccagcgacgtgctgaccatcagcggcaccatcatgaagatcggcatcgaggccaagaacctggccagctacgacgtgtgcagcatcctgctgggcaccagcaccctgctggtgtgggtgggcgtgatcagatacctgaccttcttccacaactacaacatcctgatcgccaccctgagagtggccctgcccagcgtgatgagattctgctgctgcgtggccgtgatctacctgggctactgcttctgcggctggatcgtgctgggcccctaccacgtgaagttcagaagcctgagcatggtgagcgagtgcctgttcagcctgatcaacggcgacgacatgttcgtgaccttcgccgccatgcaggcccagcagggcagaagcagcctggtgtggctgttcagccagctgtacctgtacagcttcatcagcctgttcatctacatggtgctgagcctgttcatcgccctgatcaccggcgcctacgacaccatcaagcaccccggcggcgccggcgccgaggagagcgagctgcaggcctacatcgcccagtgccaggacagccccaccagcggcaagttcagaagaggcagcggcagcgcctgcagcctgctgtgctgctgcggcagagaccccagcgaggagcacagcctgctggtgaactag

SEQ ID NO: 89552 - DNA, 1638 bp, synthetic construct
  misc_feature 1..1638: note = Description of Artificial Sequence: Synthetic coding sequence
  source 1..1638: mol_type = other DNA
atgacccccagccagcccaccagaggcagcagctgcaccagacccagcagcatgctgtggaccagcacctggagatgcctgacctgccactgggccggcatgagaatgagcgtggtgggcgtgaccctgggccccatggcccagggcctgctgagcgccagcggcaccaccaccgaggccacctggaccagacccaccacccacctgaccctgatcagatggtggctgctgaccgccagcagatggatcccccccagcggccccctgagaccccccgccaccatcagccccagctggaaggccgcccccgtgaccagaaccagcagaagcaacagcaccagcaccgcctgcagcctggagggcggccccggctggggcagacagcacaccagacacagccaccccagcaactacttccccaaggtgggcaccggcccccccagacccagatggtgcctgctgggcgagcacttcccctgccagctgcagagccagcacgtggccggcgacgccggcacctggggcagaaagggccccgaggacgcccccgacccccaccccagcctgctgcccagactggtgaacgtgaccatccacttcagactgaagaccatcaacctgcagagcctgatcaacaacgagatccccgactgctacaccttcagcgtgctgatcaccttcgacaacaaggcccacagcggcagaatccccatcagcctggagacccaggcccacatccaggagtgcaagcaccccagcgtgttccagcacggcgacaacagcttcagactgctgttcgacgtggtggtgatcctgacctgcagcctgagcttcctgctgtgcgccagaagcctgctgagaggcttcctgctgcagaacgagttcgtgggcttcatgtggagacagagaggcagagtgatcagcctgtgggagagactggagttcgtgaacggctggtacatcctgctggtgaccagcgacgtgctgaccatcagcggcaccatcatgaagatcggcatcgaggccaagaacctggccagctacgacgtgtgcagcatcctgctgggcaccagcaccctgctggtgtgggtgggcgtgatcagatacctgaccttcttccacaactacaacatcctgatcgccaccctgagagtggccctgcccagcgtgatgagattctgctgctgcgtggccgtgatctacctgggctactgcttctgcggctggatcgtgctgggcccctaccacgtgaagttcagaagcctgagcatggtgagcgagtgcctgttcagcctgatcaacggcgacgacatgttcgtgaccttcgccgccatgcaggcccagcagggcagaagcagcctggtgtggctgttcagccagctgtacctgtacagcttcatcagcctgttcatctacatggtgctgagcctgttcatcgccctgatcaccggcgcctacgacaccatcaagcaccccggcggcgccggcgccgaggagagcgagctgcaggcctacatcgcccagtgccaggacagccccaccagcggcaagttcagaagaggcagcggcagcgcctgcagcctgctgtgctgctgcggcagagaccccagcgaggagcacagcctgctggtgaactag

SEQ ID NO: 89553 - DNA, 1701 bp, synthetic construct
  misc_feature 1..1701: note = Description of Artificial Sequence: Synthetic coding sequence
  source 1..1701: mol_type = other DNA
atggccagacagccctacagattcccccaggccagaatccccgagagaggcagcggcgtgttcagactgaccgtgagaaacgccatggcccacagagacagcgagatgaaggaggagtgcctgagagaggacctgaagttctacttcatgagcccctgcgagaagtacagagccagaagacagatcccctggaagctgggcctgcagatcctgaagatcgtgatggtgaccacccagctggtgagattcggcctgagcaaccagctggtggtggccttcaaggaggacaacaccgtggccttcaagcacctgttcctgaagggctacagcggcaccgacgaggacgactacagctgcagcgtgtacacccaggaggacgcctacgagagcatcttcttcgccatcaaccagtaccaccagctgaaggacatcaccctgggcaccctgggctacggcgagaacgaggacaacagaatcggcctgaaggtgtgcaagcagcactacaagaagggcaccatgttccccagcaacgagaccctgaacatcgacaacgacgtggagctggactgcgtgcagctggacctgcaggacctgagcaagaagccccccgactggaagaacagcagcttcttcagactggagttctacagactgctgcaggtggagatcagcttccacctgaagggcatcgacctgcagaccatccacagcagagagctgcccgactgctacgtgttccagaacaccatcatcttcgacaacaaggcccacagcggcaagatcaagatctacttcgacagcgacgccaagatcgaggagtgcaaggacctgaacatcttcggcagcacccagaagaacgcccagtacgtgctggtgttcgacgccttcgtgatcgtgatctgcctggccagcctgatcctgtgcaccagaagcatcgtgctggccctgagactgagaaagagattcctgaacttcttcctggagaagtacaagagacccgtgtgcgacaccgaccagtgggagttcatcaacggctggtacgtgctggtgatcatcagcgacctgatgaccatcatcggcagcatcctgaagatggagatcaaggccaagaacctgaccaactacgacctgtgcagcatcttcctgggcaccagcaccctgctggtgtgggtgggcgtgatcagatacctgggctacttccaggcctacaacgtgctgatcctgaccatgcaggccagcctgcccaaggtgctgagattctgcgcctgcgccggcatgatctacctgggctacaccttctgcggctggatcgtgctgggcccctaccacgacaagttcgagaacctgaacaccgtggccgagtgcctgttcagcctggtgaacggcgacgacatgttcgccaccttcgcccagatccagcagaagagcatcctggtgtggctgttcagcagactgtacctgtacagcttcatcagcctgttcatctacatgatcctgagcctgttcatcgccctgatcaccgacagctacgacaccatcaagaagttccagcagaacggcttccccgagaccgacctgcaggagttcctgaaggagtgcagcagcaaggaggagtaccagaaggagagcagcgccttcctgagctgcatctgctgcagaagaagaaagagaagcgacgaccacctgatccccatcagctag

SEQ ID NO: 89554 - DNA, 1662 bp, synthetic construct
  misc_feature 1..1662: note = Description of Artificial Sequence: Synthetic coding sequence
  source 1..1662: mol_type = other DNA
atggccgaccccgaggtggtggtgagcagctgcagcagccacgaggaggagaacagatgcaacttcaaccagcagaccagccccagcgaggagctgctgctggaggaccagatgagaagaaagctgaagttcttcttcatgaacccctgcgagaagttctgggccagaggcagaaagccctggaagctggccatccagatcctgaagatcgccatggtgaccatccagctggtgctgttcggcctgagcaaccagatggtggtggccttcaaggaggagaacaccatcgccttcaagcacctgttcctgaagggctacatggacagaatggacgacacctacgccgtgtacacccagagcgacgtgtacgaccagctgatcttcgccgtgaaccagtacctgcagctgtacaacgtgagcgtgggcaaccacgcctacgagaacaagggcaccaagcagagcgccatggccatctgccagcacttctacaagagaggcaacatctaccccggcaacgacaccttcgacatcgaccccgagatcgagaccgagtgcttcttcgtggagcccgacgagcccttccacatcggcacccccgccgagaacaagctgaacctgaccctggacttccacagactgctgaccgtggagctgcagttcaagctgaaggccatcaacctgcagaccgtgagacaccaggagctgcccgactgctacgacttcaccctgaccatcaccttcgacaacaaggcccacagcggcagaatcaagatcagcctggacaacgacatcagcatcagagagtgcaaggactggcacgtgagcggcagcatccagaagaacacccactacatgatgatcttcgacgccttcgtgatcctgacctgcctggtgagcctgatcctgtgcatcagaagcgtgatcagaggcctgcagctgcagcaggagttcgtgaacttcttcctgctgcactacaagaaggaggtgagcgtgagcgaccagatggagttcgtgaacggctggtacatcatgatcatcatcagcgacatcctgaccatcatcggcagcatcctgaagatggagatccaggccaagagcctgaccagctacgacgtgtgcagcatcctgctgggcaccagcaccatgctggtgtggctgggcgtgatcagatacctgggcttcttcgccaagtacaacctgctgatcctgaccctgcaggccgccctgcccaacgtgatcagattctgctgctgcgccgccatgatctacctgggctactgcttctgcggctggatcgtgctgggcccctaccacgacaagttcagaagcctgaacatggtgagcgagtgcctgttcagcctgatcaacggcgacgacatgttcgccaccttcgccaagatgcagcagaagagctacctggtgtggctgttcagcagaatctacctgtacagcttcatcagcctgttcatctacatgatcctgagcctgttcatcgccctgatcaccgacacctacgagaccatcaagcagtaccagcaggacggcttccccgagaccgagctgagaaccttcatcagcgagtgcaaggacctgcccaacagcggcaagtacagactggaggacgacccccccgtgagcctgttctgctgctgcaagaagtag

SEQ ID NO: 89555 - DNA, 1494 bp, synthetic construct
  misc_feature 1..1494: note = Description of Artificial Sequence: Synthetic coding sequence
  source 1..1494: mol_type = other DNA
atggccgaccccgaggtggtggtgagcagctgcagcagccacgaggaggagaacagatgcaacttcaaccagcagaccagccccagcgaggagctgctgctggaggaccagatgagaagaaagctgaagttcttcttcatgaacccctgcgagaagttctgggccagaggcagaaagccctggaagctggccatccagatcctgaagatcgccatggtgaccatccagtacctgcagctgtacaacgtgagcgtgggcaaccacgcctacgagaacaagggcaccaagcagagcgccatggccatctgccagcacttctacaagagaggcaacatctaccccggcaacgacaccttcgacatcgaccccgagatcgagaccgagtgcttcttcgtggagcccgacgagcccttccacatcggcacccccgccgagaacaagctgaacctgaccctggacttccacagactgctgaccgtggagctgcagttcaagctgaaggccatcaacctgcagaccgtgagacaccaggagctgcccgactgctacgacttcaccctgaccatcaccttcgacaacaaggcccacagcggcagaatcaagatcagcctggacaacgacatcagcatcagagagtgcaaggactggcacgtgagcggcagcatccagaagaacacccactacatgatgatcttcgacgccttcgtgatcctgacctgcctggtgagcctgatcctgtgcatcagaagcgtgatcagaggcctgcagctgcagcaggagttcgtgaacttcttcctgctgcactacaagaaggaggtgagcgtgagcgaccagatggagttcgtgaacggctggtacatcatgatcatcatcagcgacatcctgaccatcatcggcagcatcctgaagatggagatccaggccaagagcctgaccagctacgacgtgtgcagcatcctgctgggcaccagcaccatgctggtgtggctgggcgtgatcagatacctgggcttcttcgccaagtacaacctgctgatcctgaccctgcaggccgccctgcccaacgtgatcagattctgctgctgcgccgccatgatctacctgggctactgcttctgcggctggatcgtgctgggcccctaccacgacaagttcagaagcctgaacatggtgagcgagtgcctgttcagcctgatcaacggcgacgacatgttcgccaccttcgccaagatgcagcagaagagctacctggtgtggctgttcagcagaatctacctgtacagcttcatcagcctgttcatctacatgatcctgagcctgttcatcgccctgatcaccgacacctacgagaccatcaagcagtaccagcaggacggcttccccgagaccgagctgagaaccttcatcagcgagtgcaaggacctgcccaacagcggcaagtacagactggaggacgacccccccgtgagcctgttctgctgctgcaagaagtag

SEQ ID NO: 89556 - DNA, 966 bp, synthetic construct
  misc_feature 1..966: note = Description of Artificial Sequence: Synthetic coding sequence
  source 1..966: mol_type = other DNA
atggccgaccccgaggtggtggtgagcagctgcagcagccacgaggaggagaacagatgcaacttcaaccagcagaccagccccagcgaggagctgctgctggaggaccagatgagaagaaagctgaagttcttcttcatgaacccctgcgagaagttctgggccagaggcagaaagccctggaagctggccatccagatcctgaagatcgccatggtgaccatccagctggtgctgttcggcctgagcaaccagatggtggtggccttcaaggaggagaacaccatcgccttcaagcacctgttcctgaagggctacatggacagaatggacgacacctacgccgtgtacacccagagcgacgtgtacgaccagctgatcttcgccgtgaaccagtacctgcagctgtacaacgtgagcgtgggcaaccacgcctacgagaacaagggcaccaagcagagcgccatggccatctgccagcacttctacaagagaggcaacatctaccccggcaacgacaccttcgacatcgaccccgagatcgagaccgagtgcttcttcgtggagcccgacgagcccttccacatcggcacccccgccgagaacaagctgaacctgaccctggacttccacagactgctgaccgtggagctgcagttcaagctgaaggccatcaacctgcagaccgtgagacaccaggagctgcccgactgctacgacttcaccctgaccatcaccttcgacaacaaggcccacagcggcagaatcaagatcagcctggacaacgacatcagcatcagagagtgcaaggactggcacgtgagcggcagcatccagaagaacacccactacatgatgatcttcgacgccttcgtgatcctgacctgcctggtgagcctgatcctgtgcatcagaagcgtgatcagaggcctgcagctgcagcaggtgggcaacgtggccttctag

SEQ ID NO: 89557 - DNA, 1494 bp, synthetic construct; identical to SEQ ID NO: 89555
  misc_feature 1..1494: note = Description of Artificial Sequence: Synthetic coding sequence
  source 1..1494: mol_type = other DNA

SEQ ID NO: 89558 - DNA, 1662 bp, synthetic construct; identical to SEQ ID NO: 89554
  misc_feature 1..1662: note = Description of Artificial Sequence: Synthetic coding sequence
  source 1..1662: mol_type = other DNA

SEQ ID NO: 89559 - DNA, 2442 bp, synthetic construct
  misc_feature 1..2442: note = Description of Artificial Sequence: Synthetic coding sequence
  source 1..2442: mol_type = other DNA
atgagcctgctgggcgaccccctgcaggccctgccccccagcgccgcccccaccggccccctgctggccccccccgccggcgccaccctgaacagactgagagagcccctgctgagaagactgagcgagctgctggaccaggcccccgagggcagaggctggagaagactggccgagctggccggcagcagaggcagactgagactgagctgcctggacctggagcagtgcagcctgaaggtgctggagcccgagggcagccccagcctgtgcctgctgaagctgatgggcgagaagggctgcaccgtgaccgagctgagcgacttcctgcaggccatggagcacaccgaggtgctgcagctgctgagcccccccggcatcaagatcaccgtgaaccccgagagcaaggccgtgctggccggccagttcgtgaagctgtgctgcagagccaccggccaccccttcgtgcagtaccagtggttcaagatgaacaaggagatccccaacggcaacaccagcgagctgatcttcaacgccgtgcacgtgaaggacgccggcttctacgtgtgcagagtgaacaacaacttcaccttcgagttcagccagtggagccagctggacgtgtgcgacatccccgagagcttccagagaagcgtggacggcgtgagcgagagcaagctgcagatctgcgtggagcccaccagccagaagctgatgcccggcagcaccctggtgctgcagtgcgtggccgtgggcagccccatcccccactaccagtggttcaagaacgagctgcccctgacccacgagaccaagaagctgtacatggtgccctacgtggacctggagcaccagggcacctactggtgccacgtgtacaacgacagagacagccaggacagcaagaaggtggagatcatcatcgacgagctgaacaacctgggccaccccgacaacaaggagcagaccaccgaccagcccctggccaaggacaaggtggccctgctgatcggcaacatgaactacagagagcaccccaagctgaaggcccccctggtggacgtgtacgagctgaccaacctgctgagacagctggacttcaaggtggtgagcctgctggacctgaccgagtacgagatgagaaacgccgtggacgagttcctgctgctgctggacaagggcgtgtacggcctgctgtactacgccggccacggctacgagaacttcggcaacagcttcatggtgcccgtggacgcccccaacccctacagaagcgagaactgcctgtgcgtgcagaacatcctgaagctgatgcaggagaaggagaccggcctgaacgtgttcctgctggacatgtgcagaaagagaaacgactacgacgacaccatccccatcctggacgccctgaaggtgaccgccaacatcgtgttcggctacgccacctgccagggcgccgaggccttcgagatccagcacagcggcctggccaacggcatcttcatgaagttcctgaaggacagactgctggaggacaagaagatcaccgtgctgctggacgaggtggccgaggacatgggcaagtgccacctgaccaagggcaagcaggccctggagatcagaagcagcctgagcgagaagagagccctgaccgaccccatccagggcaccgagtacagcgccgagagcctggtgagaaacctgcagtgggccaaggcccacgagctgcccgagagcatgtgcctgaagttcgactgcggcgtgcagatccagctgggcttcgccgccgagttcagcaacgtgatgatcatctacaccagcatcgtgtacaagccccccgagatcatcatgtgcgacgcctacgtgaccgacttccccctggacctggacatcgaccccaaggacgccaacaagggcacccccgaggagaccggcagctacctggtgagcaaggacctgcccaagcactgcctgtacaccagactgagcagcctgcagaagctgaaggagcacctggtgttcaccgtgtgcctgagctaccagtacagcggcctggaggacaccgtggaggacaagcaggaggtgaacgtgggcaagcccctgatcgccaagctggacatgcacagaggcctgggcagaaagacctgcttccagacctgcctgatgagcaacggcccctaccagagcagcgccgccaccagcggcggcgccggccactaccacagcctgcaggaccccttccacggcgtgtaccacagccaccccggcaaccccagcaacgtgacccccgccgacagctgccactgcagcagaacccccgacgccttcatcagcagcttcgcccaccacgccagctgccacttcagcagaagcaacgtgcccgtggagaccaccgacgagatccccttcagcttcagcgacagactgagaatcagcgagaagtag

SEQ ID NO: 89560 - DNA, 2475 bp, synthetic construct
  misc_feature 1..2475: note = Description of Artificial Sequence: Synthetic coding sequence
  source 1..2475: mol_type = other DNA
atgagcctgctgggcgaccccctgcaggccctgccccccagcgccgcccccaccggccccctgctggccccccccgccggcgccaccctgaacagactgagagagcccctgctgagaagactgagcgagctgctggaccaggcccccgagggcagaggctggagaagactggccgagctggccggcagcagaggcagactgagactgagctgcctggacctggagcagtgcagcctgaaggtgctggagcccgagggcagccccagcctgtgcctgctgaagctgatgggcgagaagggctgcaccgtgaccgagctgagcgacttcctgcaggccatggagcacaccgaggtgctgcagctgctgagcccccccggcatcaagatcaccgtgaaccccgagagcaaggccgtgctggccggccagttcgtgaagctgtgctgcagagccaccggccaccccttcgtgcagtaccagtggttcaagatgaacaaggagatccccaacggcaacaccagcgagctgatcttcaacgccgtgcacgtgaaggacgccggcttctacgtgtgcagagtgaacaacaacttcaccttcgagttcagccagtggagccagctggacgtgtgcgacatccccgagagcttccagagaagcgtggacggcgtgagcgagagcaagctgcagatctgcgtggagcccaccagccagaagctgatgcccggcagcaccctggtgctgcagtgcgtggccgtgggcagccccatcccccactaccagtggttcaagaacgagctgcccctgacccacgagaccaagaagctgtacatggtgccctacgtggacctggagcaccagggcacctactggtgccacgtgtacaacgacagagacagccaggacagcaagaaggtggagatcatcatcggcagaaccgacgaggccgtggagtgcaccgaggacgagctgaacaacctgggccaccccgacaacaaggagcagaccaccgaccagcccctggccaaggacaaggtggccctgctgatcggcaacatgaactacagagagcaccccaagctgaaggcccccctggtggacgtgtacgagctgaccaacctgctgagacagctggacttcaaggtggtgagcctgctggacctgaccgagtacgagatgagaaacgccgtggacgagttcctgctgctgctggacaagggcgtgtacggcctgctgtactacgccggccacggctacgagaacttcggcaacagcttcatggtgcccgtggacgcccccaacccctacagaagcgagaactgcctgtgcgtgcagaacatcctgaagctgatgcaggagaaggagaccggcctgaacgtgttcctgctggacatgtgcagaaagagaaacgactacgacgacaccatccccatcctggacgccctgaaggtgaccgccaacatcgtgttcggctacgccacctgccagggcgccgaggccttcgagatccagcacagcggcctggccaacggcatcttcatgaagttcctgaaggacagactgctggaggacaagaagatcaccgtgctgctggacgaggtggccgaggacatgggcaagtgccacctgaccaagggcaagcaggccctggagatcagaagcagcctgagcgagaagagagccctgaccgaccccatccagggcaccgagtacagcgccgagagcctggtgagaaacctgcagtgggccaaggcccacgagctgcccgagagcatgtgcctgaagttcgactgcggcgtgcagatccagctgggcttcgccgccgagttcagcaacgtgatgatcatctacaccagcatcgtgtacaagccccccgagatcatcatgtgcgacgcctacgtgaccgacttccccctggacctggacatcgaccccaaggacgccaacaagggcacccccgaggagaccggcagctacctggtgagcaaggacctgcccaagcactgcctgtacaccagactgagcagcctgcagaagctgaaggagcacctggtgttcaccgtgtgcctgagctaccagtacagcggcctggaggacaccgtggaggacaagcaggaggtgaacgtgggcaagcccctgatcgccaagctggacatgcacagaggcctgggcagaaagacctgcttccagacctgcctgatgagcaacggcccctaccagagcagcgccgccaccagcggcggcgccggccactaccacagcctgcaggaccccttccacggcgtgtaccacagccaccccggcaaccccagcaacgtgacccccgccgacagctgccactgcagcagaacccccgacgccttcatcagcagcttcgcccaccacgccagctgccacttcagcagaagcaacgtgcccgtggagaccaccgacgagatccccttcagcttcagcgacagactgagaatcagcgagaagtag

SEQ ID NO: 89561 - DNA, 441 bp, synthetic construct
  misc_feature 1..441: note = Description of Artificial Sequence: Synthetic coding sequence
  source 1..441: mol_type = other DNA
atgaccatgagaagcctgctgagaacccccttcctgtgcggcctgctgtgggccttctgcgcccccggcgccagagccgaggagcccgccgccagcttcagccagcccggcagcatgggcctggacaagaacaccgtgcacgaccaggagcacatcatggagcacctggagggcgtgatcaacaagcccgaggccgagatgagcccccaggagctgcagctgcactacttcaagatgcacgactacgacggcaacaacctgctggacggcctggagctgagcaccgccatcacccacgtgcacaaggaggagggcagcgagcaggcccccctgatgagcgaggacgagctgatcaacatcatcgacggcgtgctgagagacgacgacaagaacaacgacggctacatcgactacgccgagttcgccaagagcctgcagtag

SEQ ID NO: 89562 - DNA, 441 bp, synthetic construct; identical to SEQ ID NO: 89561
  misc_feature 1..441: note = Description of Artificial Sequence: Synthetic coding sequence
  source 1..441: mol_type = other DNA

SEQ ID NO: 89563 - DNA, 285 bp, synthetic construct
  misc_feature 1..285: note = Description of Artificial Sequence: Synthetic coding sequence
  source 1..285: mol_type = other DNA
atggagcacctggagggcgtgatcaacaagcccgaggccgagatgagcccccaggagctgcagctgcactacttcaagatgcacgactacgacggcaacaacctgctggacggcctggagctgagcaccgccatcacccacgtgcacaaggaggagggcagcgagcaggcccccctgatgagcgaggacgagctgatcaacatcatcgacggcgtgctgagagacgacgacaagaacaacgacggctacatcgactacgccgagttcgccaagagcctgcagtag

SEQ ID NO: 89564 - DNA, 441 bp, synthetic construct; identical to SEQ ID NO: 89561
  misc_feature 1..441: note = Description of Artificial Sequence: Synthetic coding sequence
  source 1..441: mol_type = other DNA

SEQ ID NO: 89565 - DNA, 441 bp, synthetic construct; identical to SEQ ID NO: 89561
  misc_feature 1..441: note = Description of Artificial Sequence: Synthetic coding sequence
  source 1..441: mol_type = other DNA

SEQ ID NO: 89566 - DNA, 285 bp, synthetic construct; identical to SEQ ID NO: 89563
  misc_feature 1..285: note = Description of Artificial Sequence: Synthetic coding sequence
  source 1..285: mol_type = other DNA

SEQ ID NO: 89567 - DNA, 285 bp, synthetic construct; identical to SEQ ID NO: 89563
  misc_feature 1..285: note = Description of Artificial Sequence: Synthetic coding sequence
  source 1..285: mol_type = other DNA

SEQ ID NO: 89568 - DNA, 441 bp, synthetic construct; identical to SEQ ID NO: 89561
  misc_feature 1..441: note = Description of Artificial Sequence: Synthetic coding sequence
  source 1..441: mol_type = other DNA

SEQ ID NO: 89569 - DNA, 441 bp, synthetic construct; identical to SEQ ID NO: 89561
  misc_feature 1..441: note = Description of Artificial Sequence: Synthetic coding sequence
  source 1..441: mol_type = other DNA

SEQ ID NO: 89570 - DNA, 186 bp, synthetic construct
  misc_feature 1..186: note = Description of Artificial Sequence: Synthetic coding sequence
  source 1..186: mol_type = other DNA
atgaccatgagaagcctgctgagaacccccttcctgtgcggcctgctgtgggccttctgcgcccccggcgccagagccgaggagcccgccgccagcttcagccagcccggcagcatgggcctggacaagaacaccgtgcacgaccaggagcacatcatggagcacctggagggcgtgatcaactag

SEQ ID NO: 89571 - DNA, 384 bp, synthetic construct
  misc_feature 1..384: note = Description of Artificial Sequence: Synthetic coding sequence
  source 1..384: mol_type = other DNA
atgctgagcgtgtgcagctgcagaaccagcagcggcatgagaagccagtggcccagcgccagacagagaagcagcagcctgagcaccttcagacacatcatggagcacctggagggcgtgatcaacaagcccgaggccgagatgagcccccaggagctgcagctgcactacttcaagatgcacgactacgacggcaacaacctgctggacggcctggagctgagcaccgccatcacccacgtgcacaaggaggagggcagcgagcaggcccccctgatgagcgaggacgagctgatcaacatcatcgacggcgtgctgagagacgacgacaagaacaacgacggctacatcgactacgccgagttcgccaagagcctgcagtag

SEQ ID NO: 89572 - DNA, 3423 bp, synthetic construct
  misc_feature 1..3423: note = Description of Artificial Sequence: Synthetic coding sequence
  source 1..3423: mol_type = other DNA
atggtgatcagcctgaacagctgcctgagcttcatctgcctgctgctgtgccactggatcggcaccgccagccccctgaacctggaggaccccaacgtgtgcagccactgggagagctacagcgtgaccgtgcaggagagctacccccaccccttcgaccagatctactacaccagctgcaccgacatcctgaactggttcaagtgcaccagacacagagtgagctacagaaccgcctacagacacggcgagaagaccatgtacagaagaaagagccagtgctgccccggcttctacgagagcggcgagatgtgcgtgccccactgcgccgacaagtgcgtgcacggcagatgcatcgcccccaacacctgccagtgcgagcccggctggggcggcaccaactgcagcagcgcctgcgacggcgaccactggggcccccactgcaccagcagatgccagtgcaagaacggcgccctgtgcaaccccatcaccggcgcctgccactgcgccgccggcttcagaggctggagatgcgaggacagatgcgagcagggcacctacggcaacgactgccaccagagatgccagtgccagaacggcgccacctgcgaccacgtgaccggcgagtgcagatgcccccccggctacaccggcgccttctgcgaggacctgtgcccccccggcaagcacggcccccagtgcgagcagagatgcccctgccagaacggcggcgtgtgccaccacgtgaccggcgagtgcagctgccccagcggctggatgggcaccgtgtgcggccagccctgccccgagggcagattcggcaagaactgcagccaggagtgccagtgccacaacggcggcacctgcgacgccgccaccggccagtgccactgcagccccggctacaccggcgagagatgccaggacgagtgccccgtgggcacctacggcgtgctgtgcgccgagacctgccagtgcgtgaacggcggcaagtgctaccacgtgagcggcgcctgcctgtgcgaggccggcttcgccggcgagagatgcgaggccagactgtgccccgagggcctgtacggcatcaagtgcgacaagagatgcccctgccacctggagaacacccacagctgccaccccatgagcggcgagtgcgcctgcaagcccggctggagcggcctgtactgcaacgagacctgcagccccggcttctacggcgaggcctgccagcagatctgcagctgccagaacggcgccgactgcgacagcgtgaccggcaagtgcacctgcgcccccggcttcaagggcatcgactgcagcaccccctgccccctgggcacctacggcatcaactgcagcagcagatgcggctgcaagaacgacgccgtgtgcagccccgtggacggcagctgcacctgcaaggccggctggcacggcgtggactgcagcatcagatgccccagcggcacctggggcttcggctgcaacctgacctgccagtgcctgaacggcggcgcctgcaacaccctggacggcacctgcacctgcgcccccggctggagaggcgagaagtgcgagctgccctgccaggacggcacctacggcctgaactgcgccgagagatgcgactgcagccacgccgacggctgccaccccaccaccggccactgcagatgcctgcccggctggagcggcgtgcactgcgacagcgtgtgcgccgagggcagatggggccccaactgcagcctgccctgctactgcaagaacggcgccagctgcagccccgacgacggcatctgcgagtgcgcccccggcttcagaggcaccacctgccagagaatctgcagccccggcttctacggccacagatgcagccagacctgcccccagtgcgtgcacagcagcggcccctgccaccacatcaccggcctgtgcgactgcctgcccggcttcaccggcgccctgtgcaacgaggtgtgccccagcggcagattcggcaagaactgcgccggcatctgcacctgcaccaacaacggcacctgcaaccccatcgacagaagctgccagtgctaccccggctggatcggcagcgactgcagccagccctgcccccccgcccactggggccccaactgcatccacacctgcaactgccacaacggcgccttctgcagcgcctacgacggcgagtgcaagtgcacccccggctggaccggcctgtactgcacccagagatgccccctgggcttctacggcaaggactgcgccctgatctgccagtgccagaacggcgccgactgcgaccacatcagcggccagtgcacctgcagaaccggcttcatgggcagacactgcgagcagaagtgccccagcggcacctacggctacggctgcagacagatctgcgactgcctgaacaacagcacctgcgaccacatcaccggcacctgctactgcagccccggctggaagggcgccagatgcgaccaggccggcgtgatcatcgtgggcaacctgaacagcctgagcagaaccagcaccgccctgcccgccgacagctaccagatcggcgccatcgccggcatcatcatcctggtgctggtggtgctgttcctgctggccctgttcatcatctacagacacaagcagaagggcaaggagagcagcatgcccgccgtgacctacacccccgccatgagagtggtgaacgccgactacaccatcagcggcaccctgccccacagcaacggcggcaacgccaacagccactacttcaccaaccccagctaccacaccctgacccagtgcgccaccagcccccacgtgaacaacagagacagaatgaccgtgaccaagagcaagaacaaccagctgttcgtgaacctgaagaacgtgaaccccggcaagagaggccccgtgggcgactgcaccggcaccctgcccgccgactggaagcacggcggctacctgaacgagctgggcgccttcggcctggacagaagctacatgggcaagagcctgaaggacctgggcaagaacagcgagtacaacagcagcaactgcagcctgagcagcagcgagaacccctacgccaccatcaaggacccccccgtgctgatccccaagagcagcgagtgcggctacgtggagatgaagagccccgccagaagagacagcccctacgccgagatcaacaacagcaccagcgccaacagaaacgtgtacgaggtggagcccaccgtgagcgtggtgcagggcgtgttcagcaacaacggcagactgagccaggacccctacgacctgcccaagaacagccacatcccctgccactacgacctgctgcccgtgagagacagcagcagcagccccaagcaggaggacagcggcggcagcagcagcaacagcagcagcagcagcgagtag

SEQ ID NO: 89573 - DNA, 1704 bp, synthetic construct
  misc_feature 1..1704: note = Description of Artificial Sequence: Synthetic coding sequence
  source 1..1704: mol_type = other DNA
atggtgatcagcctgaacagctgcctgagcttcatctgcctgctgctgtgccactggatcggcaccgccagccccctgaacctggaggaccccaacgtgtgcagccactgggagagctacagcgtgaccgtgcaggagagctacccccaccccttcgaccagatctactacaccagctgcaccgacatcctgaactggttcaagtgcaccagacacagagtgagctacagaaccgcctacagacacggcgagaagaccatgtacagaagaaagagccagtgctgccccggcttctacgagagcggcgagatgtgcgtgccccactgcgccgacaagtgcgtgcacggcagatgcatcgcccccaacacctgccagtgcgagcccggctggggcggcaccaactgcagcagcgcctgcgacggcgaccactggggcccccactgcaccagcagatgccagtgcaagaacggcgccctgtgcaaccccatcaccggcgcctgccactgcgccgccggcttcagaggctggagatgcgaggacagatgcgagcagggcacctacggcaacgactgccaccagagatgccagtgccagaacggcgccacctgcgaccacgtgaccggcgagtgcagatgcccccccggctacaccggcgccttctgcgaggacctgtgcccccccggcaagcacggcccccagtgcgagcagagatgcccctgccagaacggcggcgtgtgccaccacgtgaccggcgagtgcagctgccccagcggctggatgggcaccgtgtgcggccagccctgccccgagggcagattcggcaagaactgcagccaggagtgccagtgccacaacggcggcacctgcgacgccgccaccggccagtgccactgcagccccggctacaccggcgagagatgccaggacgagtgccccgtgggcacctacggcgtgctgtgcgccgagacctgccagtgcgtgaacggcggcaagtgctaccacgtgagcggcgcctgcctgtgcgaggccggcttcgccggcgagagatgcgaggccagactgtgccccgagggcctgtacggcatcaagtgcgacaagagatgcccctgccacctggagaacacccacagctgccaccccatgagcggcgagtgcgcctgcaagcccggctggagcggcctgtactgcaacgagacctgcagccccggcttctacggcgaggcctgccagcagatctgcagctgccagaacggcgccgactgcgacagcgtgaccggcaagtgcacctgcgcccccggcttcaagggcatcgactgcagcaccccctgccccctgggcacctacggcatcaactgcagcagcagatgcggctgcaagaacgacgccgtgtgcagccccgtggacggcagctgcacctgcaaggccggctggcacggcgtggactgcagcatcagatgccccagcggcacctggggcttcggctgcaacctgacctgccagtgcctgaacggcggcgcctgcaacaccctggacggcacctgcacctgcgcccccggctggagaggcgagaagtgcgagctgccctgccaggacggcacctacggcctgaactgcgccgagagatgcgactgcagccacgccgacggctgccaccccaccaccggccactgcagatgcctgcccggctggagcggcctgttctag

SEQ ID NO: 89574 - DNA, 3423 bp, synthetic construct; identical to SEQ ID NO: 89572
  misc_feature 1..3423: note = Description of Artificial Sequence: Synthetic coding sequence
  source 1..3423: mol_type = other DNA

SEQ ID NO: 89575 - DNA, 2910 bp, synthetic construct
  misc_feature 1..2910: note = Description of Artificial Sequence: Synthetic coding sequence
  source 1..2910: mol_type = other DNA
atgcacacccccagcatcagaagcatcacccacgacgcccagaccagcagcaccggcagcagcgcccccggcaccgccctgtgcaccgaggagtgcgtgcacggcagatgcgtgagccccgacacctgccactgcgagcccggctggggcggccccgactgcagcagcggctgcgacagcgaccactggggcccccactgcagcaacagatgccagtgccagaacggcgccctgtgcaaccccatcaccggcgcctgcgtgtgcgccgccggcttcagaggctggagatgcgaggagctgtgcgcccccggcacccacggcaagggctgccagctgccctgccagtgcagacacggcgccagctgcgaccccagagccggcgagtgcctgtgcgcccccggctacaccggcgtgtactgcgaggagctgtgcccccccggcagccacggcgcccactgcgagctgagatgcccctgccagaacggcggcacctgccaccacatcaccggcgagtgcgcctgcccccccggctggaccggcgccgtgtgcgcccagccctgcccccccggcaccttcggccagaactgcagccaggactgcccctgccaccacggcggccagtgcgaccacgtgaccggccagtgccactgcaccgccggctacatgggcgacagatgccaggaggagtgccccttcggcagcttcggcttccagtgcagccagcactgcgactgccacaacggcggccagtgcagccccaccaccggcgcctgcgagtgcgagcccggctacaagggccccagatgccaggagagactgtgccccgagggcctgcacggccccggctgcaccctgccctgcccctgcgacgccgacaacaccatcagctgccaccccgtgaccggcgcctgcacctgccagcccggctggagcggccaccactgcaacgagagctgccccgtgggctactacggcgacggctgccagctgccctgcacctgccagaacggcgccgactgccacagcatcaccggcggctgcacctgcgcccccggcttcatgggcgaggtgtgcgccgtgagctgcgccgccggcacctacggccccaactgcagcagcatctgcagctgcaacaacggcggcacctgcagccccgtggacggcagctgcacctgcaaggagggctggcagggcctggactgcaccctgccctgccccagcggcacctggggcctgaactgcaacgagagctgcacctgcgccaacggcgccgcctgcagccccatcgacggcagctgcagctgcacccccggctggctgggcgacacctgcgagctgccctgccccgacggcaccttcggcctgaactgcagcgagcactgcgactgcagccacgccgacggctgcgaccccgtgaccggccactgctgctgcctggccggctggaccggcatcagatgcgacagcacctgcccccccggcagatggggccccaactgcagcgtgagctgcagctgcgagaacggcggcagctgcagccccgaggacggcagctgcgagtgcgcccccggcttcagaggccccctgtgccagagaatctgcccccccggcttctacggccacggctgcgcccagccctgccccctgtgcgtgcacagcagcagaccctgccaccacatcagcggcatctgcgagtgcctgcccggcttcagcggcgccctgtgcaaccaggtgtgcgccggcggctacttcggccaggactgcgcccagctgtgcagctgcgccaacaacggcacctgcagccccatcgacggcagctgccagtgcttccccggctggatcggcaaggactgcagccaggcctgcccccccggcttctggggccccgcctgcttccacgcctgcagctgccacaacggcgccagctgcagcgccgaggacggcgcctgccactgcacccccggctggaccggcctgttctgcacccagagatgccccgccgccttcttcggcaaggactgcggcagagtgtgccagtgccagaacggcgccagctgcgaccacatcagcggcaagtgcacctgcagaaccggcttcaccggccagcactgcgagcagagatgcgcccccggcaccttcggctacggctgccagcagctgtgcgagtgcatgaacaacagcacctgcgaccacgtgaccggcacctgctactgcagccccggcttcaagggcatcagatgcgaccaggccgccctgatgatggaggagctgaacccctacaccaagatcagccccgccctgggcgccgagagacacagcgtgggcgccgtgaccggcatcatgctgctgctgttcctgatcgtggtgctgctgggcctgttcgcctggcacagaagaagacagaaggagaagggcagagacctggcccccagagtgagctacacccccgccatgagaatgaccagcaccgactacagcctgagcggcgcctgcggcatggacagaagacagaacacctacatcatggacaagggcttcaaggactacatgaaggagagcgtgtgcagcagcagcacctgcagcctgaacagcagcgagaacccctacgccaccatcaaggacccccccatcctgacctgcaagctgcccgagagcagctacgtggagatgaagagccccgtgcacatgggcagcccctacaccgacgtgcccagcctgagcaccagcaacaagaacatctacgaggtggagcccaccgtgagcgtggtgcaggagggctgcggccacaacagcagctacatccagaacgcctacgacctgcccagaaacagccacatccccggccactacgacctgctgcccgtgagacagagccccgccaacggccccagccaggacaagcagagctag

SEQ ID NO: 89576 - DNA, 2628 bp, synthetic construct
  misc_feature 1..2628: note = Description of Artificial Sequence: Synthetic coding sequence
  source 1..2628: mol_type = other DNA
atggtgctgagcctgaccggcctgatcgccttcagcttcctgcaggccaccctggccctgaaccccgaggaccccaacgtgtgcagccactgggagagctacgccgtgaccgtgcaggagagctacgcccaccccttcgaccagatctactacaccagatgcaccgacatcctgaactggttcaagtgcaccagacacagaatcagctacaagaccgcctacagaagaggcctgagaaccatgtacagaagaagaagccagtgctgccccggctactacgagagcggcgacttctgcatccccctgtgcaccgaggagtgcgtgcacggcagatgcgtgagccccgacacctgccactgcgagcccggctggggcggccccgactgcagcagcggctgcgacagcgaccactggggcccccactgcagcaacagatgccagtgccagaacggcgccctgtgcaaccccatcaccggcgcctgcgtgtgcgccgccggcttcagaggctggagatgcgaggagctgtgcgcccccggcacccacggcaagggctgccagctgccctgccagtgcagacacggcgccagctgcgaccccagagccggcgagtgcctgtgcgcccccggctacaccggcgtgtactgcgaggagctgtgcccccccggcagccacggcgcccactgcgagctgagatgcccctgccagaacggcggcacctgccaccacatcaccggcgagtgcgcctgcccccccggctggaccggcgccgtgtgcgcccagccctgcccccccggcaccttcggccagaactgcagccaggactgcccctgccaccacggcggccagtgcgaccacgtgaccggccagtgccactgcaccgccggctacatgggcgacagatgccaggaggagtgccccttcggcagcttcggcttccagtgcagccagcactgcgactgccacaacggcggccagtgcagccccaccaccggcgcctgcgagtgcgagcccggctacaagggccccagatgccaggagagactgtgccccgagggcctgcacggccccggctgcaccctgccctgcccctgcgacgccgacaacaccatcagctgccaccccgtgaccggcgcctgcacctgccagcccggctggagcggccaccactgcaacgagagctgccccgtgggctactacggcgacggctgccagctgccctgcacctgccagaacggcgccgactgccacagcatcaccggcggctgcacctgcgcccccggcttcatgggcgaggtgtgcgccgtgagctgcgccgccggcacctacggccccaactgcagcagcatctgcagctgcaacaacggcggcacctgcagccccgtggacggcagctgcacctgcaaggagggctggcagggcctggactgcaccctgccctgccccagcggcacctggggcctgaactgcaacgagagctgcacctgcgccaacggcgccgcctgcagccccatcgacggcagctgcagctgcacccccggctggctgggcgacacctgcgagctgccctgccccgacggcaccttcggcctgaactgcagcgagcactgcgactgcagccacgccgacggctgcgaccccgtgaccggccactgctgctgcctggccggctggaccggcatcagatgcgacagcacctgcccccccggcagatggggccccaactgcagcgtgagctgcagctgcgagaacggcggcagctgcagccccgaggacggcagctgcgagtgcgcccccggcttcagaggccccctgtgccagagaatctgcccccccggcttctacggccacggctgcgcccagccctgccccctgtgcgtgcacagcagcagaccctgccaccacatcagcggcatctgcgagtgcctgcccggcttcagcggcgccctgtgcaaccaggtgtgcgccggcggctacttcggccaggactgcgcccagctgtgcagctgcgccaacaacggcacctgcagccccatcgacggcagctgccagtgcttccccggctggatcggcaaggactgcagccaggcctgcccccccggcttctggggccccgcctgcttccacgcctgcagctgccacaacggcgccagctgcagcgccgaggacggcgcctgccactgcacccccggctggaccggcctgttctgcacccagagaaagccccacctgctggccagccagcccctgagaatcccctgctgcggcctgctggccaccgtgggcatcgtgcagaccagcagagagggcggcatgcaggccgcccccggcctggtggtgcccgacagctgccccaccagaaccgaggagctgtgcagaggcagcagcagacccgactggatccagggcatcgacaagcccaaggtgctggagggccagggctgcaaggccgcccagcagcacttcctgggcagaaccgtgggcgcctacgccagcgtgagaatggcccccgccgtgaccaccagcgtggccagcgcccccgccgcccaggccagccccggcaacaccgtgagcagagacgtgccccaggagcccctggccatgggcgtgagcagctacgtgagcgcctag

SEQ ID NO: 89577 - DNA, 414 bp, synthetic construct
  misc_feature 1..414: note = Description of Artificial Sequence: Synthetic coding sequence
  source 1..414: mol_type = other DNA
atgatggaggagctgaacccctacaccaagatcagccccgccctgggcgccgagagacacagcgtgggcgccgtgaccggcatcatgctgctgctgttcctgatcgtggtgctgctgggcctgttcgcctggcacagaagaagacagaaggagaagggcagagacctggcccccagagtgagctacacccccgccatgagaatgaccagcaccgactacagcctgagcgccagcaccaccccctggtggcccgtgatggagcacctggccagacccttcagccagagacccagaacccagctgagcaacaagagcctggacagagacaccgccggctggaccccctacagctacgtgaacgtgctggaccagtgccccggcggccaggtgcccgccagaggcctgctgcactag

SEQ ID NO: 89578 - DNA, 2910 bp, synthetic construct; identical to SEQ ID NO: 89575
  misc_feature 1..2910: note = Description of Artificial Sequence: Synthetic coding sequence
  source 1..2910: mol_type = other DNA

SEQ ID NO: 89579 - DNA, 3135 bp, synthetic construct
  misc_feature 1..3135: note = Description of Artificial Sequence: Synthetic coding sequence
  source 1..3135: mol_type = other DNA
atggtgctgagcctgaccggcctgatcgccttcagcttcctgcaggccaccctggccctgaaccccgaggaccccaacgtgtgcagccactgggagagctacgccgtgaccgtgcaggagagctacgcccaccccttcgaccagatctactacaccagatgcaccgacatcctgaactggttcaagtgcaccagacacagaatcagctacaagaccgcctacagaagaggcctgagaaccatgtacagaagaagaagccagtgctgccccggctactacgagagcggcgacttctgcatccccctgtgcaccgaggagtgcgtgcacggcagatgcgtgagccccgacacctgccactgcgagcccggctggggcggccccgactgcagcagcggctgcgacagcgaccactggggcccccactgcagcaacagatgccagtgccagaacggcgccctgtgcaaccccatcaccggcgcctgcgtgtgcgccgccggcttcagaggctggagatgcgaggagctgtgcgcccccggcacccacggcaagggctgccagctgccctgccagtgcagacacggcgccagctgcgaccccagagccggcgagtgcctgtgcgcccccggctacaccggcgtgtactgcgaggagctgtgcccccccggcagccacggcgcccactgcgagctgagatgcccctgccagaacggcggcacctgccaccacatcaccggcgagtgcgcctgcccccccggctggaccggcgccgtgtgcgcccagccctgcccccccggcaccttcggccagaactgcagccaggactgcccctgccaccacggcggccagtgcgaccacgtgaccggccagtgccactgcaccgccggctacatgggcgacagatgccaggaggagtgccccttcggcagcttcggcttccagtgcagccagcactgcgactgccacaacggcggccagtgcagccccaccaccggcgcctgcgagtgcgagcccggctacaagggccccagatgccaggagagactgtgccccgagggcctgcacggccccggctgcaccctgccctgcccctgcgacgccgacaacaccatcagctgccaccccgtgaccggcgcctgcacctgccagcccggctggagcggccaccactgcaacgagagctgccccgtgggctactacggcgacggctgccagctgccctgcacctgccagaacggcgccgactgccacagcatcaccggcggctgcacctgcgcccccggcttcatgggcgaggtgtgcgccgtgagctgcgccgccggcacctacggccccaactgcagcagcatctgcagctgcaacaacggcggcacctgcagccccgtggacggcagctgcacctgcaaggagggctggcagggcctggactgcaccctgccctgccccagcggcacctggggcctgaactgcaacgagagctgcacctgcgccaacggcgccgcctgcagccccatcgacggcagctgcagctgcacccccggctggctgggcgacacctgcgagctgccctgccccgacggcaccttcggcctgaactgcagcgagcactgcgactgcagccacgccgacggctgcgaccccgtgaccggccactgctgctgcctggccggctggaccggcatcagatgcgacagcacctgcccccccggcagatggggccccaactgcagcgtgagctgcagctgcgagaacggcggcagctgcagccccgaggacggcagctgcgagtgcgcccccggcttcagaggccccctgtgccagagaatctgcccccccggcttctacggccacggctgcgcccagccctgccccctgtgcgtgcacagcagcagaccctgccaccacatcagcggcatctgcgagtgcctgcccggcttcagcggcgccctgtgcaaccaggtgtgcgccggcggctacttcggccaggactgcgcccagctgtgcagctgcgccaacaacggcacctgcagccccatcgacggcagctgccagtgcttccccggctggatcggcaaggactgcagccaggcctgcccccccggcttctggggccccgcctgcttccacgcctgcagctgccacaacggcgccagctgcagcgccgaggacggcgcctgccactgcacccccggctggaccggcctgttctgcacccagagatgccccgccgccttcttcggcaaggactgcggcagagtgtgccagtgccagaacggcgccagctgcgaccacatcagcggcaagtgcacctgcagaaccggcttcaccggccagcactgcgagcagagatgcgcccccggcaccttcggctacggctgccagcagctgtgcgagtgcatgaacaacagcacctgcgaccacgtgaccggcacctgctactgcagccccggcttcaagggcatcagatgcgaccaggccgccctgatgatggaggagctgaacccctacaccaagatcagccccgccctgggcgccgagagacacagcgtgggcgccgtgaccggcatcatgctgctgctgttcctgatcgtggtgctgctgggcctgttcgcctggcacagaagaagacagaaggagaagggcagagacctggcccccagagtgagctacacccccgccatgagaatgaccagcaccgactacagcctgagcggcgcctgcggcatggacagaagacagaacacctacatcatggacaagggcttcaaggactacatgaaggagagcgtgtgcagcagcagcacctgcagcctgaacagcagcgagaacccctacgccaccatcaaggacccccccatcctgacctgcaagctgcccgagagcagctacgtggagatgaagagccccgtgcacatgggcagcccctacaccgacgtgcccagcctgagcaccagcaacaagaacatctacgaggtggagcccaccgtgagcgtggtgcaggagggctgcggccacaacagcagctacatccagaacgcctacgacctgcccagaaacagccacatccccggccactacgacctgctgcccgtgagacagagccccgccaacggccccagccaggacaagcagagctag

SEQ ID NO: 89580 - DNA, 3135 bp, synthetic construct; identical to SEQ ID NO: 89579
  misc_feature 1..3135: note = Description of Artificial Sequence: Synthetic coding sequence
  source 1..3135: mol_type = other DNA

SEQ ID NO: 89581 - DNA, 3690 bp, synthetic construct
  misc_feature 1..3690: note = Description of Artificial Sequence: Synthetic coding sequence
  source 1..3690: mol_type = other DNA
atgggcgccagcagagacagaggcctggccgccctgtggtgcctgggcctgctgggcggcctggccagagtggccggcacccactacagatacctgtggagaggctgctacccctgccacctgggccaggccggctaccccgtgagcgccggcgaccagagacccgacgtggacgagtgcagaacccacaacggcggctgccagcacagatgcgtgaacacccccggcagctacctgtgcgagtgcaagcccggcttcagactgcacaccgacagcagaacctgcctggccatcaacagctgcgccctgggcaacggcggctgccagcaccactgcgtgcagctgaccatcaccagacacagatgccagtgcagacccggcttccagctgcaggaggacggcagacactgcgtgagaagaagcccctgcgccaacagaaacggcagctgcatgcacagatgccaggtggtgagaggcctggccagatgcgagtgccacgtgggctaccagctggccgccgacggcaaggcctgcgaggacgtggacgagtgcgccgccggcctggcccagtgcgcccacggctgcctgaacacccagggcagcttcaagtgcgtgtgccacgccggctacgagctgggcgccgacggcagacagtgctacagaatcgagatggagatcgtgaacagctgcgaggccaacaacggcggctgcagccacggctgcagccacaccagcgccggccccctgtgcacctgccccagaggctacgagctggacaccgaccagagaacctgcatcgacgtggacgactgcgccgacagcccctgctgccagcaggtgtgcaccaacaaccccggcggctacgagtgcggctgctacgccggctacagactgagcgccgacggctgcggctgcgaggacgtggacgagtgcgccagcagcagaggcggctgcgagcaccactgcaccaacctggccggcagcttccagtgcagctgcgaggccggctacagactgcacgaggacagaagaggctgcagccccctggaggagcccatggtggacctggacggcgagctgcccttcgtgagacccctgccccacatcgccgtgctgcaggacgagctgccccagctgttccaggacgacgacgtgggcgccgacgaggaggaggccgagctgagaggcgagcacaccctgaccgagaagttcgtgtgcctggacgacagcttcggccacgactgcagcctgacctgcgacgactgcagaaacggcggcacctgcctgctgggcctggacggctgcgactgccccgagggctggaccggcctgatctgcaacgagacctgcccccccgacaccttcggcaagaactgcagcttcagctgcagctgccagaacggcggcacctgcgacagcgtgaccggcgcctgcagatgcccccccggcgtgagcggcaccaactgcgaggacggctgccccaagggctactacggcaagcactgcagaaagaagtgcaactgcgccaacagaggcagatgccacagactgtacggcgcctgcctgtgcgaccccggcctgtacggcagattctgccacctgacctgccccccctgggccttcggccccggctgcagcgaggagtgccagtgcgtgcagccccacacccagagctgcgacaagagagacggcagctgcagctgcaaggccggcttcagaggcgagagatgccaggccgagtgcgagctgggctacttcggccccggctgctggcaggcctgcacctgccccgtgggcgtggcctgcgacagcgtgagcggcgagtgcggcaagagatgccccgccggcttccagggcgaggactgcggccaggagtgccccgtgggcaccttcggcgtgaactgcagcagcagctgcagctgcggcggcgccccctgccacggcgtgaccggccagtgcagatgcccccccggcagaaccggcgaggactgcgaggccgactgccccgagggcagatggggcctgggctgccaggagatctgccccgcctgccagcacgccgccagatgcgaccccgagaccggcgcctgcctgtgcctgcccggcttcgtgggcagcagatgccaggacgtgtgccccgccggctggtacggccccagctgccagaccagatgcagctgcgccaacgacggccactgccaccccgccaccggccactgcagctgcgcccccggctggaccggcttcagctgccagagagcctgcgacaccggccactggggccccgactgcagccacccctgcaactgcagcgccggccacggcagctgcgacgccatcagcggcctgtgcctgtgcgaggccggctacgtgggccccagatgcgagcagcagtgcccccagggccacttcggccccggctgcgagcagagatgccagtgccagcacggcgccgcctgcgaccacgtgagcggcgcctgcacctgccccgccggctggagaggcaccttctgcgagcacgcctgccccgccggcttcttcggcctggactgcagaagcgcctgcaactgcaccgccggcgccgcctgcgacgccgtgaacggcagctgcctgtgccccgccggcagaagaggccccagatgcgccgagaagtgcctgcccagagacgtgagagccggctgcagacacagcggcggctgcctgaacggcggcctgtgcgacccccacaccggcagatgcctgtgccccgccggctggaccggcgacaagtgccagagcccctgcctgagaggctggttcggcgaggcctgcgcccagagatgcagctgcccccccggcgccgcctgccaccacgtgaccggcgcctgcagatgcccccccggcttcaccggcagcggctgcgagcagggctgcccccccggcagatacggccccggctgcgagcagctgtgcggctgcctgaacggcggcagctgcgacgccgccaccggcgcctgcagatgccccaccggcttcctgggcaccgactgcaacctgacctgcccccagggcagattcggccccaactgcacccacgtgtgcggctgcggccagggcgccgcctgcgaccccgtgaccggcacctgcctgtgcccccccggcagagccggcgtgagatgcgagagaggctgcccccagaacagattcggcgtgggctgcgagcacacctgcagctgcagaaacggcggcctgtgccacgccagcaacggcagctgcagctgcggcctgggctggaccggcagacactgcgagctggcctgcccccccggcagatacggcgccgcctgccacctggagtgcagctgccacaacaacagcacctgcgagcccgccaccggcacctgcagatgcggccccggcttctacggccaggcctgcgagcacagaagaagcggcgccacctgcaacctggactgcagaagaggccagttcggccccagctgcaccctgcactgcgactgcggcggcggcgccgactgcgaccccgtgagcggccagtgccactgcgtggacggctacatgggccccacctgcagagagggcggccccctgagactgcccgagaaccccagcctggcccagggcagcgccggcaccctgcccgccagcagcagacccaccagcagaagcggcggccccgccagacactag

SEQ ID NO: 89582 - DNA, 4626 bp, synthetic construct
  misc_feature 1..4626: note = Description of Artificial Sequence: Synthetic coding sequence
  source 1..4626: mol_type = other DNA
atgagcttcctggaggaggccagagccgccggcagagccgtggtgctggccctggtgctgctgctgctgcccgccgtgcccgtgggcgccagcgtgccccccagacccctgctgcccctgcagcccggcatgccccacgtgtgcgccgagcaggagctgaccctggtgggcagaagacagccctgcgtgcaggccctgagccacaccgtgcccgtgtggaaggccggctgcggctggcaggcctggtgcgtgggccacgagagaagaaccgtgtactacatgggctacagacaggtgtacaccaccgaggccagaaccgtgctgagatgctgcagaggctggatgcagcagcccgacgaggagggctgcctgagcgccgagtgcagcgccagcctgtgcttccacggcggcagatgcgtgcccggcagcgcccagccctgccactgcccccccggcttccagggccccagatgccagtacgacgtggacgagtgcagaacccacaacggcggctgccagcacagatgcgtgaacacccccggcagctacctgtgcgagtgcaagcccggcttcagactgcacaccgacagcagaacctgcctggccatcaacagctgcgccctgggcaacggcggctgccagcaccactgcgtgcagctgaccatcaccagacacagatgccagtgcagacccggcttccagctgcaggaggacggcagacactgcgtgagaagaagcccctgcgccaacagaaacggcagctgcatgcacagatgccaggtggtgagaggcctggccagatgcgagtgccacgtgggctaccagctggccgccgacggcaaggcctgcgaggacgtggacgagtgcgccgccggcctggcccagtgcgcccacggctgcctgaacacccagggcagcttcaagtgcgtgtgccacgccggctacgagctgggcgccgacggcagacagtgctacagaatcgagatggagatcgtgaacagctgcgaggccaacaacggcggctgcagccacggctgcagccacaccagcgccggccccctgtgcacctgccccagaggctacgagctggacaccgaccagagaacctgcatcgacgtggacgactgcgccgacagcccctgctgccagcaggtgtgcaccaacaaccccggcggctacgagtgcggctgctacgccggctacagactgagcgccgacggctgcggctgcgaggacgtggacgagtgcgccagcagcagaggcggctgcgagcaccactgcaccaacctggccggcagcttccagtgcagctgcgaggccggctacagactgcacgaggacagaagaggctgcagccccctggaggagcccatggtggacctggacggcgagctgcccttcgtgagacccctgccccacatcgccgtgctgcaggacgagctgccccagctgttccaggacgacgacgtgggcgccgacgaggaggaggccgagctgagaggcgagcacaccctgaccgagaagttcgtgtgcctggacgacagcttcggccacgactgcagcctgacctgcgacgactgcagaaacggcggcacctgcctgctgggcctggacggctgcgactgccccgagggctggaccggcctgatctgcaacgagacctgcccccccgacaccttcggcaagaactgcagcttcagctgcagctgccagaacggcggcacctgcgacagcgtgaccggcgcctgcagatgcccccccggcgtgagcggcaccaactgcgaggacggctgccccaagggctactacggcaagcactgcagaaagaagtgcaactgcgccaacagaggcagatgccacagactgtacggcgcctgcctgtgcgaccccggcctgtacggcagattctgccacctgacctgccccccctgggccttcggccccggctgcagcgaggagtgccagtgcgtgcagccccacacccagagctgcgacaagagagacggcagctgcagctgcaaggccggcttcagaggcgagagatgccaggccgagtgcgagctgggctacttcggccccggctgctggcaggcctgcacctgccccgtgggcgtggcctgcgacagcgtgagcggcgagtgcggcaagagatgccccgccggcttccagggcgaggactgcggccaggagtgccccgtgggcaccttcggcgtgaactgcagcagcagctgcagctgcggcggcgccccctgccacggcgtgaccggccagtgcagatgcccccccggcagaaccggcgaggactgcgaggccgactgccccgagggcagatggggcctgggctgccaggagatctgccccgcctgccagcacgccgccagatgcgaccccgagaccggcgcctgcctgtgcctgcccggcttcgtgggcagcagatgccaggacgtgtgccccgccggctggtacggccccagctgccagaccagatgcagctgcgccaacgacggccactgccaccccgccaccggccactgcagctgcgcccccggctggaccggcttcagctgccagagagcctgcgacaccggccactggggccccgactgcagccacccctgcaactgcagcgccggccacggcagctgcgacgccatcagcggcctgtgcctgtgcgaggccggctacgtgggccccagatgcgagcagcagtgcccccagggccacttcggccccggctgcgagcagagatgccagtgccagcacggcgccgcctgcgaccacgtgagcggcgcctgcacctgccccgccggctggagaggcaccttctgcgagcacgcctgccccgccggcttcttcggcctggactgcagaagcgcctgcaactgcaccgccggcgccgcctgcgacgccgtgaacggcagctgcctgtgccccgccggcagaagaggccccagatgcgccgagacctgccccgcccacacctacggccacaactgcagccaggcctgcgcctgcttcaacggcgccagctgcgaccccgtgcacggccagtgccactgcgcccccggctggatgggccccagctgcctgcaggcctgccccgccggcctgtacggcgacaactgcagacacagctgcctgtgccagaacggcggcacctgcgaccccgtgagcggccactgcgcctgccccgagggctgggccggcctggcctgcgagaaggagtgcctgcccagagacgtgagagccggctgcagacacagcggcggctgcctgaacggcggcctgtgcgacccccacaccggcagatgcctgtgccccgccggctggaccggcgacaagtgccagagcccctgcctgagaggctggttcggcgaggcctgcgcccagagatgcagctgcccccccggcgccgcctgccaccacgtgaccggcgcctgcagatgcccccccggcttcaccggcagcggctgcgagcaggcctgcccccccggcagcttcggcgaggactgcgcccagatgtgccagtgccccggcgagaaccccgcctgccaccccgccaccggcacctgcagctgcgccgccggctaccacggccccagctgccagcagagatgcccccccggcagatacggccccggctgcgagcagctgtgcggctgcctgaacggcggcagctgcgacgccgccaccggcgcctgcagatgccccaccggcttcctgggcaccgactgcaacctgacctgcccccagggcagattcggccccaactgcacccacgtgtgcggctgcggccagggcgccgcctgcgaccccgtgaccggcacctgcctgtgcccccccggcagagccggcgtgagatgcgagagaggctgcccccagaacagattcggcgtgggctgcgagcacacctgcagctgcagaaacggcggcctgtgccacgccagcaacggcagctgcagctgcggcctgggctggaccggcagacactgcgagctggcctgcccccccggcagatacggcgccgcctgccacctggagtgcagctgccacaacaacagcacctgcgagcccgccaccggcacctgcagatgcggccccggcttctacggccaggcctgcgagcacccctgcccccccggcttccacggcgccggctgccagggcctgtgctggtgccagcacggcgccccctgcgaccccatcagcggcagatgcctgtgccccgccggcttccacggccacttctgcgagagaggctgcgagcccggcagcttcggcgagggctgccaccagagatgcgactgcgacggcggcgccccctgcgaccccgtgaccggcctgtgcctgtgcccccccggcagaagcggcgccacctgcaacctggactgcagaagaggccagttcggccccagctgcaccctgcactgcgactgcggcggcggcgccgactgcgaccccgtgagcggccagtgccactgcgtggacggctacatgggccccacctgcagagagggcggccccctgagactgcccgagaaccccagcctggcccagggcagcgccggcaccctgcccgccagcagcagacccaccagcagaagcggcggccccgccagacactag

SEQ ID NO: 89583 - DNA, 8538 bp, synthetic construct
  misc_feature 1..8538: note = Description of Artificial Sequence: Synthetic coding sequence
  source 1..8538: mol_type = other DNA
atggccctgggcaaggtgctggccatggccctggtgctggccctggccgtgctgggcagcctgagccccggcgccagagccggcgactgcaagggccagagacaggtgctgagagaggcccccggcttcgtgaccgacggcgccggcaactacagcgtgaacggcaactgcgagtggctgatcgaggcccccagcccccagcacagaatcctgctggacttcctgttcctggacaccgagtgcacctacgactacctgttcgtgtacgacggcgacagccccagaggccccctgctggccagcctgagcggcagcaccagacccccccccatcgaggccagcagcggcaagatgctgctgcacctgttcagcgacgccaactacaacctgctgggcttcaacgccagcttcagattcagcctgtgccccggcggctgccagagccacggccagtgccagccccccggcgtgtgcgcctgcgagcccggctggggcggccccgactgcggcctgcaggagtgcagcgcctactgcggcagccacggcacctgcgccagccccctgggcccctgcagatgcgagcccggcttcctgggcagagcctgcgacctgcacctgtgggagaaccagggcgccggctggtggcacaacgtgagcgccagagaccccgccttcagcgccagaatcggcgccgccggcgccttcctgagcccccccggcctgctggccgtgttcggcggccaggacctgaacaacgccctgggcgacctggtgctgtacaacttcagcgccaacacctgggagagctgggacctgagccccgcccccgccgccagacacagccacgtggccgtggcctgggccggcagcctggtgctgatgggcggcgagctggccgacggcagcctgaccaacgacgtgtgggccttcagccccctgggcagaggccactgggagctgctggccccccccgccagcagcagcagcggcccccccggcctggccggccacgccgccgccctggtggacgacgtgtggctgtacgtgagcggcggcagaaccccccacgacctgttcagcagcggcctgttcagattcagactggacagcaccagcggcggctactgggagcaggtgatccccgccggcggcagaccccccgccgccaccggccacagcatggtgttccacgcccccagcagagccctgctggtgcacggcggccacagacccagcaccgccagattcagcgtgagagtgaacagcaccgagctgttccacgtggacagacacgtgtggaccaccctgaagggcagagacggcctgcagggccccagagagagagccttccacaccgccagcgtgctgggcaactacatggtggtgtacggcggcaacgtgcacacccactaccaggaggagaagtgctacgaggacggcatcttcttctaccacctgggctgccaccagtgggtgagcggcgccgagctggccccccccggcacccccgagggcagagccgccccccccagcggcagatacagccacgtggccgccgtgctgggcggcagcgtgctgctggtggccggcggctacagcggcagacccagaggcgacctgatggcctacaaggtgccccccttcgtgttccaggcccccgcccccgactaccacctggactactgcagcatgtacaccgaccacagcgtgtgcagcagagaccccgagtgcagctggtgccagggcgcctgccaggccgcccccccccccggcacccccctgggcgcctgccccgccgccagctgcctgggcctgggcagactgctgggcgactgccaggcctgcctggccttcagcagccccaccgccccccccagaggccccggcaccctgggctggtgcgtgcacaacgagagctgcctgcccagacccgagcaggccagatgcagaggcgagcagatcagcggcaccgtgggctggtggggccccgcccccgtgttcgtgaccagcctggaggcctgcgtgacccagagcttcctgcccggcctgcacctgctgaccttccagcagccccccaacaccagccagcccgacaaggtgagcatcgtgagaagcaccaccatcaccctgacccccagcgccgagaccgacgtgagcctggtgtacagaggcttcatctaccccatgctgcccggcggccccggcggccccggcgccgaggacgtggccgtgtggaccagagcccagagactgcacgtgctggccagaatggccagaggccccgacaccgagaacatggaggaggtgggcagatgggtggcccaccaggagaaggagaccagaagactgcagagacccggcagcgccagactgttccccctgcccggcagagaccacaagtacgccgtggagatccagggccagctgaacggcagcgccggccccggccacagcgagctgaccctgctgtgggacagaaccggcgtgcccggcggcagcgagatcagcttcttcttcctggagccctacagaagcagcagctgcaccagctacagcagctgcctgggctgcctggccgaccagggctgcggctggtgcctgaccagcgccacctgccacctgagacagggcggcgcccactgcggcgacgacggcgccggcggcagcctgctggtgctggtgcccaccctgtgccccctgtgcgaggagcacagagactgccacgcctgcacccaggaccccttctgcgagtggcaccagagcaccagcagaaagggcgacgccgcctgcagcagaagaggcagaggcagaggcgccctgaagagccccgaggagtgcccccccctgtgcagccagagactgacctgcgaggactgcctggccaacagcagccagtgcgcctggtgccagagcacccacacctgcttcctgttcgccgcctacctggccagatacccccacggcggctgcagaggctgggacgacagcgtgcacagcgagcccagatgcagaagctgcgacggcttcctgacctgccacgagtgcctgcagagccacgagtgcggctggtgcggcaacgaggacaaccccaccctgggcagatgcctgcagggcgacttcagcggccccctgggcggcggcaactgcagcctgtgggtgggcgagggcctgggcctgcccgtggccctgcccgccagatgggcctacgccagatgccccgacgtggacgagtgcagactgggcctggccagatgccaccccagagccacctgcctgaacacccccctgagctacgagtgccactgccagagaggctaccagggcgacggcatcagccactgcaacagaacctgcctggaggactgcggccacggcgtgtgcagcggcccccccgacttcacctgcgtgtgcgacctgggctggaccagcgacctgcccccccccacccccgcccccggcccccccgcccccagatgcagcagagactgcggctgcagcttccacagccactgcagaaagagaggccccggcttctgcgacgagtgccaggactggacctggggcgagcactgcgagagatgcagacccggcagcttcggcaacgccaccggcagcagaggctgcagaccctgccagtgcaacggccacggcgaccccagaagaggccactgcgacaacctgagcggcctgtgcttctgccaggaccacaccgagggcgcccactgccagctgtgcagccccggctactacggcgaccccagagccggcggcagctgcttcagagagtgcggcggcagagccctgctgaccaacgtgagcagcgtggccctgggcagcagaagagtgggcggcctgctgccccccggcggcggcgccgccagagccggccccggcctgagctactgcgtgtgggtggtgagcgccaccgaggagctgcagccctgcgcccccggcaccctgtgcccccccctgaccctgaccttcagccccgacagcagcaccccctgcaccctgagctacgtgctggccttcgacggcttccccagattcctggacaccggcgtggtgcagagcgacagaagcctgatcgccgccttctgcggccagagaagagacagacccctgaccgtgcaggccctgagcggcctgctggtgctgcactgggaggccaacggcagcagcagctggggcttcaacgccagcgtgggcagcgccagatgcggcagcggcggccccggcagctgccccgtgccccaggagtgcgtgccccaggacggcgccgccggcgccggcctgtgcagatgcccccagggctgggccggcccccactgcagaatggccctgtgccccgagaactgcaacgcccacaccggcgccggcacctgcaaccagagcctgggcgtgtgcatctgcgccgagggcttcggcggccccgactgcgccaccaagctggacggcggccagctggtgtgggagaccctgatggacagcagactgagcgccgacaccgccagcagattcctgcacagactgggccacaccatggtggacggccccgacgccaccctgtggatgttcggcggcctgggcctgccccagggcctgctgggcaacctgtacagatacagcgtgagcgagagaagatggacccagatgctggccggcgccgaggacggcggccccggccccagccccagaagcttccacgccgccgcctacgtgcccgccggcagaggcgccatgtacctgctgggcggcctgaccgccggcggcgtgaccagagacttctgggtgctgaacctgaccaccctgcagtggagacaggagaaggccccccagaccgtggagctgcccgccgtggccggccacaccctgaccgccagaagaggcctgagcctgctgctggtgggcggctacagccccgagaacggcttcaaccagcagctgctggagtaccagctggccaccggcacctgggtgagcggcgcccagagcggcaccccccccaccggcctgtacggccacagcgccgtgtaccacgaggccaccgacagcctgtacgtgttcggcggcttcagattccacgtggagctggccgcccccagccccgagctgtacagcctgcactgccccgacagaacctggagcctgctggcccccagccagggcgccaagagagacagaatgagaaacgtgagaggcagcagcagaggcctgggccaggtgcccggcgagcagcccggcagctggggcttcagagaggtgagaaagaagatggccctgtgggccgccctggccggcaccggcggcttcctggaggagatcagcccccacctgaaggagcccagacccagactgttccacgccagcgccctgctgggcgacaccatggtggtgctgggcggcagaagcgaccccgacgagttcagcagcgacgtgctgctgtaccaggtgaactgcaacgcctggctgctgcccgacctgaccagaagcgccagcgtgggcccccccatggaggagagcgtggcccacgccgtggccgccgtgggcagcagactgtacatcagcggcggcttcggcggcgtggccctgggcagactgctggccctgaccctgccccccgacccctgcagactgctgagcagccccgaggcctgcaaccagagcggcgcctgcacctggtgccacggcgcctgcctgagcggcgaccaggcccacagactgggctgcggcggcagcccctgcagccccatgcccagaagccccgaggagtgcagaagactgagaacctgcagcgagtgcctggccagacaccccagaaccctgcagcccggcgacggcgaggccagcacccccagatgcaagtggtgcaccaactgccccgagggcgcctgcatcggcagaaacggcagctgcaccagcgagaacgactgcagaatcaaccagagagaggtgttctgggccggcaactgcagcgaggccgcctgcggcgccgccgactgcgagcagtgcaccagagagggcaagtgcatgtggaccagacagttcaagagaaccggcgagaccagaagaatcctgagcgtgcagcccacctacgactggacctgcttcagccacagcctgctgaacgtgagccccatgcccgtggagagcagcccccccctgccctgccccaccccctgccacctgctgcccaactgcaccagctgcctggacagcaagggcgccgacggcggctggcagcactgcgtgtggagcagcagcctgcagcagtgcctgagccccagctacctgcccctgagatgcatggccggcggctgcggcagactgctgagaggccccgagagctgcagcctgggctgcgcccaggccacccagtgcgccctgtgcctgagaagaccccactgcggctggtgcgcctggggcggccaggacggcggcggcagatgcatggagggcggcctgagcggccccagagacggcctgacctgcggcagacccggcgccagctgggccttcctgagctgcccccccgaggacgagtgcgccaacggccaccacgactgcaacgagacccagaactgccacgaccagccccacggctacgagtgcagctgcaagaccggctacaccatggacaacatgaccggcctgtgcagacccgtgtgcgcccagggctgcgtgaacggcagctgcgtggagcccgaccactgcagatgccacttcggcttcgtgggcagaaactgcagcaccgagtgcagatgcaacagacacagcgagtgcgccggcgtgggcgccagagaccactgcctgctgtgcagaaaccacaccaagggcagccactgcgagcagtgcctgcccctgttcgtgggcagcgccgtgggcggcggcacctgcagaccctgccacgccttctgcagaggcaacagccacatctgcatcagcagaaaggagctgcagatgagcaagggcgagcccaagaagtacagcctggaccccgaggagatcgagaactgggtgaccgagggccccagcgaggacgaggccgtgtgcgtgaactgccagaacaacagctacggcgagaagtgcgagagctgcctgcagggctacttcctgctggacggcaagtgcaccaagtgccagtgcaacggccacgccgacacctgcaacgagcaggacggcaccggctgcccctgccagaacaacaccgagaccggcacctgccagggcagcagccccagcgacagaagagactgctacaagtaccagtgcgccaagtgcagagagagcttccacggcagccccctgggcggccagcagtgctacagactgatcagcgtggagcaggagtgctgcctggaccccaccagccagaccaactgcttccacgagcccaagagaagagccctgggccccggcagaaccgtgctgttcggcgtgcagcccaagttcaccaacgtggacatcagactgaccctggacgtgaccttcggcgccgtggacctgtacgtgagcaccagctacgacaccttcgtggtgagagtggcccccgacaccggcgtgcacaccgtgcacatccagcccccccccgcccccccccccccccccccccccgccgacggcggccccagaggcgccggcgaccccggcggcgccggcgccagcagcggccccggcgcccccgccgagcccagagtgagagaggtgtggcccagaggcctgatcacctacgtgaccgtgaccgagcccagcgccgtgctggtggtgagaggcgtgagagacagactggtgatcacctacccccacgagcaccacgccctgaagagcagcagattctacctgctgctgctgggcgtgggcgaccccagcggccccggcgccaacggcagcgccgacagccagggcctgctgttcttcagacaggaccaggcccacatcgacctgttcgtgttcttcagcgtgttcttcagctgcttcttcctgttcctgagcctgtgcgtgctgctgtggaaggccaagcaggccctggaccagagacaggagcagagaagacacctgcaggagatgaccaagatggccagcagacccttcgccaaggtgaccgtgtgcttcccccccgaccccaccgcccccgccagcgcctggaagcccgccggcctgcccccccccgccttcagaagaagcgagcccttcctggcccccctgctgctgaccggcgccggcggcccctggggccccatgggcggcggctgctgcccccccgccatccccgccaccaccgccggcctgagagccggccccatcaccctggagcccaccgaggacggcatggccggcgtggccaccctgctgctgcagctgcccggcggcccccacgcccccaacggcgcctgcctgggcagcgccctggtgaccctgagacacagactgcacgagtactgcggcggcggcggcggcgccggcggcagcggccacggcaccggcgccggcagaaagggcctgctgagccaggacaacctgaccagcatgagcctgtag

SEQ ID NO: 89584 - DNA, 8337 bp, synthetic construct
  misc_feature 1..8337: note = Description of Artificial Sequence: Synthetic coding sequence
  source 1..8337: mol_type = other DNA
atggccctgggcaaggtgctggccatggccctggtgctggccctggccgtgctgggcagcctgagccccggcgccagagccggcgactgcaagggccagagacaggtgctgagagaggcccccggcttcgtgaccgacggcgccggcaactacagcgtgaacggcaactgcgagtggctgatcgaggcccccagcccccagcacagaatcctgctggacttcctgttcctggacaccgagtgcacctacgactacctgttcgtgtacgacggcgacagccccagaggccccctgctggccagcctgagcggcagcaccagacccccccccatcgaggccagcagcggcaagatgctgctgcacctgttcagcgacgccaactacaacctgctgggcttcaacgccagcttcagattcagcctgtgccccggcggctgccagagccacggccagtgccagccccccggcgtgtgcgcctgcgagcccggctggggcggccccgactgcggcctgcaggagtgcagcgcctactgcggcagccacggcacctgcgccagccccctgggcccctgcagatgcgagcccggcttcctgggcagagcctgcgacctgcacctgtgggagaaccagggcgccggctggtggcacaacgtgagcgccagagaccccgccttcagcgccagaatcggcgccgccggcgccttcctgagcccccccggcctgctggccgtgttcggcggccaggacctgaacaacgccctgggcgacctggtgctgtacaacttcagcgccaacacctgggagagctgggacctgagccccgcccccgccgccagacacagccacgtggccgtggcctgggccggcagcctggtgctgatgggcggcgagctggccgacggcagcctgaccaacgacgtgtgggccttcagccccctgggcagaggccactgggagctgctggccccccccgccagcagcagcagcggcccccccggcctggccggccacgccgccgccctggtggacgacgtgtggctgtacgtgagcggcggcagaaccccccacgacctgttcagcagcggcctgttcagattcagactggacagcaccagcggcggctactgggagcaggtgatccccgccggcggcagaccccccgccgccaccggccacagcatggtgttccacgcccccagcagagccctgctggtgcacggcggccacagacccagcaccgccagattcagcgtgagagtgaacagcaccgagctgttccacgtggacagacacgtgtggaccaccctgaagggcagagacggcctgcagggccccagagagagagccttccacaccgccagcgtgctgggcaactacatggtggtgtacggcggcaacgtgcacacccactaccaggaggagaagtgctacgaggacggcatcttcttctaccacctgggctgccaccagtgggtgagcggcgccgagctggccccccccggcacccccgagggcagagccgccccccccagcggcagatacagccacgtggccgccgtgctgggcggcagcgtgctgctggtggccggcggctacagcggcagacccagaggcgacctgatggcctacaaggtgccccccttcgtgttccaggcccccgcccccgactaccacctggactactgcagcatgtacaccgaccacagcgtgtgcagcagagaccccgagtgcagctggtgccagggcgcctgccaggccgcccccccccccggcacccccctgggcgcctgccccgccgccagctgcctgggcctgggcagactgctgggcgactgccaggcctgcctggccttcagcagccccaccgccccccccagaggccccggcaccctgggctggtgcgtgcacaacgagagctgcctgcccagacccgagcaggccagatgcagaggcgagcagatcagcggcaccgtgggctggtggggccccgcccccgtgttcgtgaccagcctggaggcctgcgtgacccagagcttcctgcccggcctgcacctgctgaccttccagcagccccccaacaccagccagcccgacaaggaggaggtgggcagatgggtggcccaccaggagaaggagaccagaagactgcagagacccggcagcgccagactgttccccctgcccggcagagaccacaagtacgccgtggagatccagggccagctgaacggcagcgccggccccggccacagcgagctgaccctgctgtgggacagaaccggcgtgcccggcggcagcgagatcagcttcttcttcctggagccctacagaagcagcagctgcaccagctacagcagctgcctgggctgcctggccgaccagggctgcggctggtgcctgaccagcgccacctgccacctgagacagggcggcgcccactgcggcgacgacggcgccggcggcagcctgctggtgctggtgcccaccctgtgccccctgtgcgaggagcacagagactgccacgcctgcacccaggaccccttctgcgagtggcaccagagcaccagcagaaagggcgacgccgcctgcagcagaagaggcagaggcagaggcgccctgaagagccccgaggagtgcccccccctgtgcagccagagactgacctgcgaggactgcctggccaacagcagccagtgcgcctggtgccagagcacccacacctgcttcctgttcgccgcctacctggccagatacccccacggcggctgcagaggctgggacgacagcgtgcacagcgagcccagatgcagaagctgcgacggcttcctgacctgccacgagtgcctgcagagccacgagtgcggctggtgcggcaacgaggacaaccccaccctgggcagatgcctgcagggcgacttcagcggccccctgggcggcggcaactgcagcctgtgggtgggcgagggcctgggcctgcccgtggccctgcccgccagatgggcctacgccagatgccccgacgtggacgagtgcagactgggcctggccagatgccaccccagagccacctgcctgaacacccccctgagctacgagtgccactgccagagaggctaccagggcgacggcatcagccactgcaacagaacctgcctggaggactgcggccacggcgtgtgcagcggcccccccgacttcacctgcgtgtgcgacctgggctggaccagcgacctgcccccccccacccccgcccccggcccccccgcccccagatgcagcagagactgcggctgcagcttccacagccactgcagaaagagaggccccggcttctgcgacgagtgccaggactggacctggggcgagcactgcgagagatgcagacccggcagcttcggcaacgccaccggcagcagaggctgcagaccctgccagtgcaacggccacggcgaccccagaagaggccactgcgacaacctgagcggcctgtgcttctgccaggaccacaccgagggcgcccactgccagctgtgcagccccggctactacggcgaccccagagccggcggcagctgcttcagagagtgcggcggcagagccctgctgaccaacgtgagcagcgtggccctgggcagcagaagagtgggcggcctgctgccccccggcggcggcgccgccagagccggccccggcctgagctactgcgtgtgggtggtgagcgccaccgaggagctgcagccctgcgcccccggcaccctgtgcccccccctgaccctgaccttcagccccgacagcagcaccccctgcaccctgagctacgtgctggccttcgacggcttccccagattcctggacaccggcgtggtgcagagcgacagaagcctgatcgccgccttctgcggccagagaagagacagacccctgaccgtgcaggccctgagcggcctgctggtgctgcactgggaggccaacggcagcagcagctggggcttcaacgccagcgtgggcagcgccagatgcggcagcggcggccccggcagctgccccgtgccccaggagtgcgtgccccaggacggcgccgccggcgccggcctgtgcagatgcccccagggctgggccggcccccactgcagaatggccctgtgccccgagaactgcaacgcccacaccggcgccggcacctgcaaccagagcctgggcgtgtgcatctgcgccgagggcttcggcggccccgactgcgccaccaagctggacggcggccagctggtgtgggagaccctgatggacagcagactgagcgccgacaccgccagcagattcctgcacagactgggccacaccatggtggacggccccgacgccaccctgtggatgttcggcggcctgggcctgccccagggcctgctgggcaacctgtacagatacagcgtgagcgagagaagatggacccagatgctggccggcgccgaggacggcggccccggccccagccccagaagcttccacgccgccgcctacgtgcccgccggcagaggcgccatgtacctgctgggcggcctgaccgccggcggcgtgaccagagacttctgggtgctgaacctgaccaccctgcagtggagacaggagaaggccccccagaccgtggagctgcccgccgtggccggccacaccctgaccgccagaagaggcctgagcctgctgctggtgggcggctacagccccgagaacggcttcaaccagcagctgctggagtaccagctggccaccggcacctgggtgagcggcgcccagagcggcaccccccccaccggcctgtacggccacagcgccgtgtaccacgaggccaccgacagcctgtacgtgttcggcggcttcagattccacgtggagctggccgcccccagccccgagctgtacagcctgcactgccccgacagaacctggagcctgctggcccccagccagggcgccaagagagacagaatgagaaacgtgagaggcagcagcagaggcctgggccaggtgcccggcgagcagcccggcagctggggcttcagagaggtgagaaagaagatggccctgtgggccgccctggccggcaccggcggcttcctggaggagatcagcccccacctgaaggagcccagacccagactgttccacgccagcgccctgctgggcgacaccatggtggtgctgggcggcagaagcgaccccgacgagttcagcagcgacgtgctgctgtaccaggtgaactgcaacgcctggctgctgcccgacctgaccagaagcgccagcgtgggcccccccatggaggagagcgtggcccacgccgtggccgccgtgggcagcagactgtacatcagcggcggcttcggcggcgtggccctgggcagactgctggccctgaccctgccccccgacccctgcagactgctgagcagccccgaggcctgcaaccagagcggcgcctgcacctggtgccacggcgcctgcctgagcggcgaccaggcccacagactgggctgcggcggcagcccctgcagccccatgcccagaagccccgaggagtgcagaagactgagaacctgcagcgagtgcctggccagacaccccagaaccctgcagcccggcgacggcgaggccagcacccccagatgcaagtggtgcaccaactgccccgagggcgcctgcatcggcagaaacggcagctgcaccagcgagaacgactgcagaatcaaccagagagaggtgttctgggccggcaactgcagcgaggccgcctgcggcgccgccgactgcgagcagtgcaccagagagggcaagtgcatgtggaccagacagttcaagagaaccggcgagaccagaagaatcctgagcgtgcagcccacctacgactggacctgcttcagccacagcctgctgaacgtgagccccatgcccgtggagagcagcccccccctgccctgccccaccccctgccacctgctgcccaactgcaccagctgcctggacagcaagggcgccgacggcggctggcagcactgcgtgtggagcagcagcctgcagcagtgcctgagccccagctacctgcccctgagatgcatggccggcggctgcggcagactgctgagaggccccgagagctgcagcctgggctgcgcccaggccacccagtgcgccctgtgcctgagaagaccccactgcggctggtgcgcctggggcggccaggacggcggcggcagatgcatggagggcggcctgagcggccccagagacggcctgacctgcggcagacccggcgccagctgggccttcctgagctgcccccccgaggacgagtgcgccaacggccaccacgactgcaacgagacccagaactgccacgaccagccccacggctacgagtgcagctgcaagaccggctacaccatggacaacatgaccggcctgtgcagacccgtgtgcgcccagggctgcgtgaacggcagctgcgtggagcccgaccactgcagatgccacttcggcttcgtgggcagaaactgcagcaccgagtgcagatgcaacagacacagcgagtgcgccggcgtgggcgccagagaccactgcctgctgtgcagaaaccacaccaagggcagccactgcgagcagtgcctgcccctgttcgtgggcagcgccgtgggcggcggcacctgcagaccctgccacgccttctgcagaggcaacagccacatctgcatcagcagaaaggagctgcagatgagcaagggcgagcccaagaagtacagcctggaccccgaggagatcgagaactgggtgaccgagggccccagcgaggacgaggccgtgtgcgtgaactgccagaacaacagctacggcgagaagtgcgagagctgcctgcagggctacttcctgctggacggcaagtgcaccaagtgccagtgcaacggccacgccgacacctgcaacgagcaggacggcaccggctgcccctgccagaacaacaccgagaccggcacctgccagggcagcagccccagcgacagaagagactgctacaagtaccagtgcgccaagtgcagagagagcttccacggcagccccctgggcggccagcagtgctacagactgatcagcgtggagcaggagtgctgcctggaccccaccagccagaccaactgcttccacgagcccaagagaagagccctgggccccggcagaaccgtgctgttcggcgtgcagcccaagttcaccaacgtggacatcagactgaccctggacgtgaccttcggcgccgtggacctgtacgtgagcaccagctacgacaccttcgtggtgagagtggcccccgacaccggcgtgcacaccgtgcacatccagcccccccccgcccccccccccccccccccccccgccgacggcggccccagaggcgccggcgaccccggcggcgccggcgccagcagcggccccggcgcccccgccgagcccagagtgagagaggtgtggcccagaggcctgatcacctacgtgaccgtgaccgagcccagcgccgtgctggtggtgagaggcgtgagagacagactggtgatcacctacccccacgagcaccacgccctgaagagcagcagattctacctgctgctgctgggcgtgggcgaccccagcggccccggcgccaacggcagcgccgacagccagggcctgctgttcttcagacaggaccaggcccacatcgacctgttcgtgttcttcagcgtgttcttcagctgcttcttcctgttcctgagcctgtgcgtgctgctgtggaaggccaagcaggccctggaccagagacaggagcagagaagacacctgcaggagatgaccaagatggccagcagacccttcgccaaggtgaccgtgtgcttcccccccgaccccaccgcccccgccagcgcctggaagcccgccggcctgcccccccccgccttcagaagaagcgagcccttcctggcccccctgctgctgaccggcgccggcggcccctggggccccatgggcggcggctgctgcccccccgccatccccgccaccaccgccggcctgagagccggccccatcaccctggagcccaccgaggacggcatggccggcgtggccaccctgctgctgcagctgcccggcggcccccacgcccccaacggcgcctgcctgggcagcgccctggtgaccctgagacacagactgcacgagtactgcggcggcggcggcggcgccggcggcagcggccacggcaccggcgccggcagaaagggcctgctgagccaggacaacctgaccagcatgagcctgtag

SEQ ID NO: 89585 - DNA, 1320 bp, synthetic construct
  misc_feature 1..1320: note = Description of Artificial Sequence: Synthetic coding sequence
  source 1..1320: mol_type = other DNA
atgagagagctgcccgccggcctgctgccccccggcagagaggtgcaccagtgcgccaagtgcagagagagcttccacggcagccccctgggcggccagcagtgctacagactgatcagcgtggagcaggagtgctgcctggaccccaccagccagaccaactgcttccacgagcccaagagaagagccctgggccccggcagaaccgtgctgttcggcgtgcagcccaagttcaccaacgtggacatcagactgaccctggacgtgaccttcggcgccgtggacctgtacgtgagcaccagctacgacaccttcgtggtgagagtggcccccgacaccggcgtgcacaccgtgcacatccagcccccccccgcccccccccccccccccccccccgccgacggcggccccagaggcgccggcgaccccggcggcgccggcgccagcagcggccccggcgcccccgccgagcccagagtgagagaggtgtggcccagaggcctgatcacctacgtgaccgtgaccgagcccagcgccgtgctggtggtgagaggcgtgagagacagactggtgatcacctacccccacgagcaccacgccctgaagagcagcagattctacctgctgctgctgggcgtgggcgaccccagcggccccggcgccaacggcagcgccgacagccagggcctgctgttcttcagacaggaccaggcccacatcgacctgttcgtgttcttcagcgtgttcttcagctgcttcttcctgttcctgagcctgtgcgtgctgctgtggaaggccaagcaggccctggaccagagacaggagcagagaagacacctgcaggagatgaccaagatggccagcagacccttcgccaaggtgaccgtgtgcttcccccccgaccccaccgcccccgccagcgcctggaagcccgccggcctgcccccccccgccttcagaagaagcgagcccttcctggcccccctgctgctgaccggcgccggcggcccctggggccccatgggcggcggctgctgcccccccgccatccccgccaccaccgccggcctgagagccggccccatcaccctggagcccaccgaggacggcatggccggcgtggccaccctgctgctgcagctgcccggcggcccccacgcccccaacggcgcctgcctgggcagcgccctggtgaccctgagacacagactgcacgagtactgcggcggcggcggcggcgccggcggcagcggccacggcaccggcgccggcagaaagggcctgctgagccaggacaacctgaccagcatgagcctgtag

SEQ ID NO: 89586 - DNA, 1809 bp, synthetic construct
  misc_feature 1..1809: note = Description of Artificial Sequence: Synthetic coding sequence
  source 1..1809: mol_type = other DNA
atgaacggcggcgccgagagagccatgagaagcctgcccagcctgggcggcctggccctgctgtgctgcgccgccgccgccgccgccgccgccgtggccagcgccgccagcgccggcaacgtgaccggcggcggcggcgccgccggccaggtggacgccagccccggccccggcctgagaggcgagcccagccaccccttccccagagccaccgcccccaccgcccaggcccccagaaccggcccccccagagccaccgtgcacagacccctggccgccaccagccccgcccagagccccgagaccacccccctgtgggccaccgccggccccagcagcaccaccttccaggcccccctgggccccagccccaccaccccccccgccgccgagagaaccagcaccaccagccaggcccccaccagacccgcccccaccaccctgagcaccaccaccggccccgcccccaccacccccgtggccaccaccgtgcccgcccccaccacccccagaacccccacccccgacctgcccagcagcagcaacagcagcgtgctgcccaccccccccgccaccgaggcccccagcagccccccccccgagtacgtgtgcaactgcagcgtggtgggcagcctgaacgtgaacagatgcaaccagaccaccggccagtgcgagtgcagacccggctaccagggcctgcactgcgagacctgcaaggagggcttctacctgaactacaccagcggcctgtgccagccctgcgactgcagcccccacggcgccctgagcatcccctgcaacagcagcggcaagtgccagtgcaaggtgggcgtgatcggcagcatctgcgacagatgccaggacggctactacggcttcagcaagaacggctgcctgccctgccagtgcaacaacagaagcgccagctgcgacgccctgaccggcgcctgcctgaactgccaggagaacagcaagggcaaccactgcgaggagtgcaaggagggcttctaccagagccccgacgccaccaaggagtgcctgagatgcccctgcagcgccgtgaccagcaccggcagctgcagcatcaagagcagcgagctggagcccgagtgcgaccagtgcaaggacggctacatcggccccaactgcaacaagtgcgagaacggctactacaacttcgacagcatctgcagaaagtgccagtgccacggccacgtggaccccgtgaagacccccaagatctgcaagcccgagagcggcgagtgcatcaactgcctgcacaacaccaccggcttctggtgcgagaactgcctggagggctacgtgcacgacctggagggcaactgcatcaagaaggaggtgatcctgcccacccccgagggcagcaccatcctggtgagcaacgccagcctgaccaccagcgtgcccacccccgtgatcaacagcaccttcacccccaccaccctgcagaccatcttcagcgtgagcaccagcgagaacagcaccagcgccctggccgacgtgagctggacccagttcaacatcatcatcctgaccgtgatcatcatcgtggtggtgctgctgatgggcttcgtgggcgccgtgtacatgtacagagagtaccagaacagaaagctgaacgcccccttctggaccatcgagctgaaggaggacaacatcagcttcagcagctaccacgacagcatccccaacgccgacgtgagcggcctgctggaggacgacggcaacgaggtggcccccaacggccagctgaccctgaccacccccatccacaactacaaggcctag

SEQ ID NO: 89587 - DNA, 1920 bp, synthetic construct
  misc_feature 1..1920: note = Description of Artificial Sequence: Synthetic coding sequence
  source 1..1920: mol_type = other DNA
atgagaagcctgcccagcctgggcggcctggccctgctgtgctgcgccgccgccgccgccgccgccgccgtggccagcgccgccagcgccggcaacgtgaccggcggcggcggcgccgccggccaggtggacgccagccccggccccggcctgagaggcgagcccagccaccccttccccagagccaccgcccccaccgcccaggcccccagaaccggcccccccagagccaccgtgcacagacccctggccgccaccagccccgcccagagccccgagaccacccccctgtgggccaccgccggccccagcagcaccaccttccaggcccccctgggccccagccccaccaccccccccgccgccgagagaaccagcaccaccagccaggcccccaccagacccgcccccaccaccctgagcaccaccaccggccccgcccccaccacccccgtggccaccaccgtgcccgcccccaccacccccagaacccccacccccgacctgcccagcagcagcaacagcagcgtgctgcccaccccccccgccaccgaggcccccagcagccccccccccggccaccagtggcccgtggccaagatgccccagaagtacctgggcaagtacgcctgcgagagcaacctgaagagcaagtacctgcccctgacccagcccgtgatgaacctgagagtgagcgaggccgtgaagaccgagtacgtgtgcaactgcagcgtggtgggcagcctgaacgtgaacagatgcaaccagaccaccggccagtgcgagtgcagacccggctaccagggcctgcactgcgagacctgcaaggagggcttctacctgaactacaccagcggcctgtgccagccctgcgactgcagcccccacggcgccctgagcatcccctgcaacagcagcggcaagtgccagtgcaaggtgggcgtgatcggcagcatctgcgacagatgccaggacggctactacggcttcagcaagaacggctgcctgccctgccagtgcaacaacagaagcgccagctgcgacgccctgaccggcgcctgcctgaactgccaggagaacagcaagggcaaccactgcgaggagtgcaaggagggcttctaccagagccccgacgccaccaaggagtgcctgagatgcccctgcagcgccgtgaccagcaccggcagctgcagcatcaagagcagcgagctggagcccgagtgcgaccagtgcaaggacggctacatcggccccaactgcaacaagtgcgagaacggctactacaacttcgacagcatctgcagaaagtgccagtgccacggccacgtggaccccgtgaagacccccaagatctgcaagcccgagagcggcgagtgcatcaactgcctgcacaacaccaccggcttctggtgcgagaactgcctggagggctacgtgcacgacctggagggcaactgcatcaagaaggaggtgatcctgcccacccccgagggcagcaccatcctggtgagcaacgccagcctgaccaccagcgtgcccacccccgtgatcaacagcaccttcacccccaccaccctgcagaccatcttcagcgtgagcaccagcgagaacagcaccagcgccctggccgacgtgagctggacccagttcaacatcatcatcctgaccgtgatcatcatcgtggtggtgctgctgatgggcttcgtgggcgccgtgtacatgtacagagagtaccagaacagaaagctgaacgcccccttctggaccatcgagctgaaggaggacaacatcagcttcagcagctaccacgacagcatccccaacgccgacgtgagcggcctgctggaggacgacggcaacgaggtggcccccaacggccagctgaccctgaccacccccatccacaactacaaggcctag

SEQ ID NO: 89588 - DNA, 939 bp, synthetic construct
  misc_feature 1..939: note = Description of Artificial Sequence: Synthetic coding sequence
  source 1..939: mol_type = other DNA
atgctgagagcccccggctgcctgctgagaaccagcgtggcccccgccgccgccctggccgccgccctgctgagcagcctggccagatgcagcctgctggagcccagagaccccgtggccagcagcctgagcccctacttcggcaccaagaccagatacgaggacgtgaaccccgtgctgctgagcggccccgaggccccctggagagaccccgagctgctggagggcacctgcacccccgtgcagctggtggccctgatcagacacggcaccagataccccaccgtgaagcagatcagaaagctgagacagctgcacggcctgctgcaggccagaggcagcagagacggcggcgccagcagcaccggcagcagagacctgggcgccgccctggccgactggcccctgtggtacgccgactggatggacggccagctggtggagaagggcagacaggacatgagacagctggccctgagactggccagcctgttccccgccctgttcagcagagagaactacggcagactgagactgatcaccagcagcaagcacagatgcatggacagcagcgccgccttcctgcagggcctgtggcagcactaccaccccggcctgcccccccccgacgtggccgacatggagttcggcccccccaccgtgaacgacaagctgatgagattcttcgaccactgcgagaagttcctgaccgaggtggagaagaacgccaccgccctgtaccacgtggaggccttcaagaccggccccgagatgcagaacatcctgaagaaggtggccgccaccctgcaggtgcccgtgaacgacctgaacgccggcctgagccagttcctgctgcagagcagcagcagcctggtgatgcagagactgttcttccactgcttcctgagctgggccaccagcaagaccagaaacccctag

SEQ ID NO: 89589 - DNA, 1464 bp, synthetic construct
  misc_feature 1..1464: note = Description of Artificial Sequence: Synthetic coding sequence
  source 1..1464: mol_type = other DNA
atgctgagagcccccggctgcctgctgagaaccagcgtggcccccgccgccgccctggccgccgccctgctgagcagcctggccagatgcagcctgctggagcccagagaccccgtggccagcagcctgagcccctacttcggcaccaagaccagatacgaggacgtgaaccccgtgctgctgagcggccccgaggccccctggagagaccccgagctgctggagggcacctgcacccccgtgcagctggtggccctgatcagacacggcaccagataccccaccgtgaagcagatcagaaagctgagacagctgcacggcctgctgcaggccagaggcagcagagacggcggcgccagcagcaccggcagcagagacctgggcgccgccctggccgactggcccctgtggtacgccgactggatggacggccagctggtggagaagggcagacaggacatgagacagctggccctgagactggccagcctgttccccgccctgttcagcagagagaactacggcagactgagactgatcaccagcagcaagcacagatgcatggacagcagcgccgccttcctgcagggcctgtggcagcactaccaccccggcctgcccccccccgacgtggccgacatggagttcggcccccccaccgtgaacgacaagctgatgagattcttcgaccactgcgagaagttcctgaccgaggtggagaagaacgccaccgccctgtaccacgtggaggccttcaagaccggccccgagatgcagaacatcctgaagaaggtggccgccaccctgcaggtgcccgtgaacgacctgaacgccgacctgatccaggtggccttcttcacctgcagcttcgacctggccatcaagggcgtgaagagcccctggtgcgacgtgttcgacatcgacgacgccaaggtgctggagtacctgaacgacctgaagcagtactggaagagaggctacggctacaccatcaacagcagaagcagctgcaccctgttccaggacatcttccagcacctggacaaggccgtggagcagaagcagagaagccagcccatcagcagccccgtgatcctgcagttcggccacgccgagaccctgctgcccctgctgagcctgatgggctacttcaaggacaaggagcccctgaccgcctacaactacaagaagcagatgcacagaaagttcagaagcggcctgatcgtgccctacgccagcaacctgatcttcgtgctgtaccactgcgagaacgccaagacccccaaggagcagttcagagtgcagatgctgctgaacgagaaggtgctgcccctggcctacagccaggagaccgtgagcttctacgaggacctgaagaaccactacaaggacatcctgcagagctgccagaccagcgaggagtgcgagctggccagagccaacagcaccagcgacgagctgtag

SEQ ID NO: 89590 - DNA, 861 bp, synthetic construct
  misc_feature 1..861: note = Description of Artificial Sequence: Synthetic coding sequence
  source 1..861: mol_type = other DNA
atgtgcctgttccagctgtgcggcctggtgagatacatggagttcggcccccccaccgtgaacgacaagctgatgagattcttcgaccactgcgagaagttcctgaccgaggtggagaagaacgccaccgccctgtaccacgtggaggccttcaagaccggccccgagatgcagaacatcctgaagaaggtggccgccaccctgcaggtgcccgtgaacgacctgaacgccgacctgatccaggtggccttcttcacctgcagcttcgacctggccatcaagggcgtgaagagcccctggtgcgacgtgttcgacatcgacgacgccaaggtgctggagtacctgaacgacctgaagcagtactggaagagaggctacggctacaccatcaacagcagaagcagctgcaccctgttccaggacatcttccagcacctggacaaggccgtggagcagaagcagagaagccagcccatcagcagccccgtgatcctgcagttcggccacgccgagaccctgctgcccctgctgagcctgatgggctacttcaaggacaaggagcccctgaccgcctacaactacaagaagcagatgcacagaaagttcagaagcggcctgatcgtgccctacgccagcaacctgatcttcgtgctgtaccactgcgagaacgccaagacccccaaggagcagttcagagtgcagatgctgctgaacgagaaggtgctgcccctggcctacagccaggagaccgtgagcttctacgaggacctgaagaaccactacaaggacatcctgcagagctgccagaccagcgaggagtgcgagctggccagagccaacagcaccagcgacgagctgtag

SEQ ID NO: 89591 - DNA, 1041 bp, synthetic construct
  misc_feature 1..1041: note = Description of Artificial Sequence: Synthetic coding sequence
  source 1..1041: mol_type = other DNA
atggacggccagctggtggagaagggcagacaggacatgagacagctggccctgagactggccagcctgttccccgccctgttcagcagagagaactacggcagactgagactgatcaccagcagcaagcacagatgcatggacagcagcgccgccttcctgcagggcctgtggcagcactaccaccccggcctgcccccccccgacgtggccgacatggagttcggcccccccaccgtgaacgacaagctgatgagattcttcgaccactgcgagaagttcctgaccgaggtggagaagaacgccaccgccctgtaccacgtggaggccttcaagaccggccccgagatgcagaacatcctgaagaaggtggccgccaccctgcaggtgcccgtgaacgacctgaacgccgacctgatccaggtggccttcttcacctgcagcttcgacctggccatcaagggcgtgaagagcccctggtgcgacgtgttcgacatcgacgacgccaaggtgctggagtacctgaacgacctgaagcagtactggaagagaggctacggctacaccatcaacagcagaagcagctgcaccctgttccaggacatcttccagcacctggacaaggccgtggagcagaagcagagaagccagcccatcagcagccccgtgatcctgcagttcggccacgccgagaccctgctgcccctgctgagcctgatgggctacttcaaggacaaggagcccctgaccgcctacaactacaagaagcagatgcacagaaagttcagaagcggcctgatcgtgccctacgccagcaacctgatcttcgtgctgtaccactgcgagaacgccaagacccccaaggagcagttcagagtgcagatgctgctgaacgagaaggtgctgcccctggcctacagccaggagaccgtgagcttctacgaggacctgaagaaccactacaaggacatcctgcagagctgccagaccagcgaggagtgcgagctggccagagccaacagcaccagcgacgagctgtag

SEQ ID NO: 89592 - DNA, 6213 bp, synthetic construct
  misc_feature 1..6213: note = Description of Artificial Sequence: Synthetic coding sequence
  source 1..6213: mol_type = other DNA
atgctggaggccatcgacaagaacagagccctgcacgccgccgagagactgcagaccaagctgagagagagaggcgacgtggccaacgaggacaagctgagcctgctgaagagcgtgctgcagagccccctgttcagccagatcctgagcctgcagaccagcgtgcagcagctgaaggaccaggtgaacatcgccaccagcgccaccagcaacatcgagtacgcccacgtgccccacctgagccccgccgtgatccccaccctgcagaacgagagcttcctgctgagccccaacaacggcaacctggaggccctgaccggccccggcatcccccacatcaacggcaagcccgcctgcgacgagttcgaccagctgatcaagaacatggcccagggcagacacgtggaggtgttcgagctgctgaagccccccagcggcggcctgggcttcagcgtggtgggcctgagaagcgagaacagaggcgagctgggcatcttcgtgcaggagatccaggagggcagcgtggcccacagagacggcagactgaaggagaccgaccagatcctggccatcaacggccaggccctggaccagaccatcacccaccagcaggccatcagcatcctgcagaaggccaaggacaccgtgcagctggtgatcgccagaggcagcctgccccagctggtgagccccatcgtgagcagaagccccagcgccgccagcaccatcagcgcccacagcaaccccgtgcactggcagcacatggagaccatcgagctggtgaacgacggcagcggcctgggcttcggcatcatcggcggcaaggccaccggcgtgatcgtgaagaccatcctgcccggcggcgtggccgaccagcacggcagactgtgcagcggcgaccacatcctgaagatcggcgacaccgacctggccggcatgagcagcgagcaggtggcccaggtgctgagacagtgcggcaacagagtgaagctgatgatcgccagaggcgccatcgaggagagaaccgcccccaccgccctgggcatcaccctgagcagcagccccaccagcacccccgagctgagagtggacgccagcacccagaagggcgaggagagcgagaccttcgacgtggagctgaccaagaacgtgcagggcctgggcatcaccatcgccggctacatcggcgacaagaagctggagcccagcggcatcttcgtgaagagcatcaccaagagcagcgccgtggagcacgacggcagaatccagatcggcgaccagatcatcgccgtggacggcaccaacctgcagggcttcaccaaccagcaggccgtggaggtgctgagacacaccggccagaccgtgctgctgaccctgatgagaagaggcatgaagcaggaggccgagctgatgagcagagaggacgtgaccaaggacgccgacctgagccccgtgaacgccagcatcatcaaggagaactacgagaaggacgaggacttcctgagcagcaccagaaacaccaacatcctgcccaccgaggaggagggctaccccctgctgagcgccgagatcgaggagatcgaggacgcccagaagcaggaggccgccctgctgaccaagtggcagagaatcatgggcatcaactacgagatcgtggtggcccacgtgagcaagttcagcgagaacagcggcctgggcatcagcctggaggccaccgtgggccaccacttcatcagaagcgtgctgcccgagggccccgtgggccacagcggcaagctgttcagcggcgacgagctgctggaggtgaacggcatcaccctgctgggcgagaaccaccaggacgtggtgaacatcctgaaggagctgcccatcgaggtgaccatggtgtgctgcagaagaaccgtgccccccaccacccagagcgagctggacagcctggacctgtgcgacatcgagctgaccgagaagccccacgtggacctgggcgagttcatcggcagcagcgagaccgaggaccccgtgctggccatgaccgacgccggccagagcaccgaggaggtgcaggcccccctggccatgtgggaggccggcatccagcacatcgagctggagaagggcagcaagggcctgggcttcagcatcctggactaccaggaccccatcgaccccgccagcaccgtgatcatcatcagaagcctggtgcccggcggcatcgccgagaaggacggcagactgctgcccggcgacagactgatgttcgtgaacgacgtgaacctggagaacagcagcctggaggaggccgtggaggccctgaagggcgcccccagcggcaccgtgagaatcggcgtggccaagcccctgcccctgagccccgaggagggctacgtgagcgccaaggaggacagcttcctgtaccccccccacagctgcgaggaggccggcctggccgacaagcccctgttcagagccgacctggccctggtgggcaccaacgacgccgacctggtggacgagagcaccttcgagagcccctacagccccgagaacgacagcatctacagcacccaggccagcatcctgagcctgcacggcagcagctgcggcgacggcctgaactacggcagcagcctgcccagcagcccccccaaggacgtgatcgagaacagctgcgaccccgtgctggacctgcacatgagcctggaggagctgtacacccagaacctgctgcagagacaggacgagaacacccccagcgtggacatcagcatgggccccgccagcggcttcaccatcaacgactacacccccgccaacgccatcgagcagcagtacgagtgcgagaacaccatcgtgtggaccgagagccacctgcccagcgaggtgatcagcagcgccgagctgcccagcgtgctgcccgacagcgccggcaagggcagcgagtacctgctggagcagagcagcctggcctgcaacgccgagtgcgtgatgctgcagaacgtgagcaaggagagcttcgagagaaccatcaacatcgccaagggcaacagcagcctgggcatgaccgtgagcgccaacaaggacggcctgggcatgatcgtgagaagcatcatccacggcggcgccatcagcagagacggcagaatcgccatcggcgactgcatcctgagcatcaacgaggagagcaccatcagcgtgaccaacgcccaggccagagccatgctgagaagacacagcctgatcggccccgacatcaagatcacctacgtgcccgccgagcacctggaggagttcaagatcagcctgggccagcagagcggcagagtgatggccctggacatcttcagcagctacaccggcagagacatccccgagctgcccgagagagaggagggcgagggcgaggagagcgagctgcagaacaccgcctacagcaactggaaccagcccagaagagtggagctgtggagagagcccagcaagagcctgggcatcagcatcgtgggcggcagaggcatgggcagcagactgagcaacggcgaggtgatgagaggcatcttcatcaagcacgtgctggaggacagccccgccggcaagaacggcaccctgaagcccggcgacagaatcgtggaggtggacggcatggacctgagagacgccagccacgagcaggccgtggaggccatcagaaaggccggcaaccccgtggtgttcatggtgcagagcatcatcaacagacccagaaagagccccctgcccagcctgctgcacaacctgtaccccaagtacaacttcagcagcaccaaccccttcgccgacagcctgcagatcaacgccgacaaggcccccagccagagcgagagcgagcccgagaaggcccccctgtgcagcgtgcccccccccccccccagcgccttcgccgagatgggcagcgaccacacccagagcagcgccagcaagatcagccaggacgtggacaaggaggacgagttcggctacagctggaagaacatcagagagagatacggcaccctgaccggcgagctgcacatgatcgagctggagaagggccacagcggcctgggcctgagcctggccggcaacaaggacagaagcagaatgagcgtgttcatcgtgggcatcgaccccaacggcgccgccggcaaggacggcagactgcagatcgccgacgagctgctggagatcaacggccagatcctgtacggcagaagccaccagaacgccagcagcatcatcaagtgcgcccccagcaaggtgaagatcatcttcatcagaaacaaggacgccgtgaaccagatggccgtgtgccccggcaacgccgtggagcccctgcccagcaacagcgagaacctgcagaacaaggagaccgagcccaccgtgaccaccagcgacgccgccgtggacctgagcagcttcaagaacgtgcagcacctggagctgcccaaggaccagggcggcctgggcatcgccatcagcgaggaggacaccctgagcggcgtgatcatcaagagcctgaccgagcacggcgtggccgccaccgacggcagactgaaggtgggcgaccagatcctggccgtggacgacgagatcgtggtgggctaccccatcgagaagttcatcagcctgctgaagaccgccaagatgaccgtgaagctgaccatccacgccgagaaccccgacagccaggccgtgcccagcgccgccggcgccgccagcggcgagaagaagaacagcagccagagcctgatggtgccccagagcggcagccccgagcccgagagcatcagaaacaccagcagaagcagcacccccgccatcttcgccagcgaccccgccacctgccccatcatccccggctgcgagaccaccatcgagatcagcaagggcagaaccggcctgggcctgagcatcgtgggcggcagcgacaccctgctgggcgccatcatcatccacgaggtgtacgaggagggcgccgcctgcaaggacggcagactgtgggccggcgaccagatcctggaggtgaacggcatcgacctgagaaaggccacccacgacgaggccatcaacgtgctgagacagaccccccagagagtgagactgaccctgtacagagacgaggccccctacaaggaggaggaggtgtgcgacaccctgaccatcgagctgcagaagaagcccggcaagggcctgggcctgagcatcgtgggcaagagaaacgacaccggcgtgttcgtgagcgacatcgtgaagggcggcatcgccgacgccgacggcagactgatgcagggcgaccagatcctgatggtgaacggcgaggacgtgagaaacgccacccaggaggccgtggccgccctgctgaagtgcagcctgggcaccgtgaccctggaggtgggcagaatcaaggccggccccttccacagcgagagaagacccagccagagcagccaggtgagcgagggcagcctgagcagcttcaccttccccctgagcggcagcagcaccagcgagagcctggagagcagcagcaagaagaacgccctggccagcgagatccagggcctgagaaccgtggagatgaagaagggccccaccgacagcctgggcatcagcatcgccggcggcgtgggcagccccctgggcgacgtgcccatcttcatcgccatgatgcaccccaccggcgtggccgcccagacccagaagctgagagtgggcgacagaatcgtgaccatctgcggcaccagcaccgagggcatgacccacacccaggccgtgaacctgctgaagaacgccagcggcagcatcgagatgcaggtggtggccggcggcgacgtgagcgtggtgaccggccaccagcaggagcccgccagcagcagcctgagcttcaccggcctgaccagcagcagcatcttccaggacgacctgggccccccccagtgcaagagcatcaccctggagagaggccccgacggcctgggcttcagcatcgtgggcggctacggcagcccccacggcgacctgcccatctacgtgaagaccgtgttcgccaagggcgccgccagcgaggacggcagactgaagagaggcgaccagatcatcgccgtgaacggccagagcctggagggcgtgacccacgaggaggccgtggccatcctgaagagaaccaagggcaccgtgaccctgatggtgctgagctag

SEQ ID NO: 89593 - DNA, 6213 bp, synthetic construct; identical to SEQ ID NO: 89592
  misc_feature 1..6213: note = Description of Artificial Sequence: Synthetic coding sequence
  source 1..6213: mol_type = other DNA

SEQ ID NO: 89594 - DNA, 6126 bp, synthetic construct
  misc_feature 1..6126: note = Description of Artificial Sequence: Synthetic coding sequence
  source 1..6126: mol_type = other DNA
atgctggaggccatcgacaagaacagagccctgcacgccgccgagagactgcagaccaagctgagagagagaggcgacgtggccaacgaggacaagctgagcctgctgaagagcgtgctgcagagccccctgttcagccagatcctgagcctgcagaccagcgtgcagcagctgaaggaccaggtgaacatcgccaccagcgccaccagcaacatcgagtacgcccacgtgccccacctgagccccgccgtgatccccaccctgcagaacgagagcttcctgctgagccccaacaacggcaacctggaggccctgaccggccccggcatcccccacatcaacggcaagcccgcctgcgacgagttcgaccagctgatcaagaacatggcccagggcagacacgtggaggtgttcgagctgctgaagccccccagcggcggcctgggcttcagcgtggtgggcctgagaagcgagaacagaggcgagctgggcatcttcgtgcaggagatccaggagggcagcgtggcccacagagacggcagactgaaggagaccgaccagatcctggccatcaacggccaggccctggaccagaccatcacccaccagcaggccatcagcatcctgcagaaggccaaggacaccgtgcagctggtgatcgccagaggcagcctgccccagctggtgagccccatcgtgagcagaagccccagcgccgccagcaccatcagcgcccacagcaaccccgtgcactggcagcacatggagaccatcgagctggtgaacgacggcagcggcctgggcttcggcatcatcggcggcaaggccaccggcgtgatcgtgaagaccatcctgcccggcggcgtggccgaccagcacggcagactgtgcagcggcgaccacatcctgaagatcggcgacaccgacctggccggcatgagcagcgagcaggtggcccaggtgctgagacagtgcggcaacagagtgaagctgatgatcgccagaggcgccatcgaggagagaaccgcccccaccgccctgggcatcaccctgagcagcagccccaccagcacccccgagctgagagtggacgccagcacccagaagggcgaggagagcgagaccttcgacgtggagctgaccaagaacgtgcagggcctgggcatcaccatcgccggctacatcggcgacaagaagctggagcccagcggcatcttcgtgaagagcatcaccaagagcagcgccgtggagcacgacggcagaatccagatcggcgaccagatcatcgccgtggacggcaccaacctgcagggcttcaccaaccagcaggccgtggaggtgctgagacacaccggccagaccgtgctgctgaccctgatgagaagaggcatgaagcaggaggccgagctgatgagcagagaggacgtgaccaaggacgccgacctgagccccgtgaacgccagcatcatcaaggagaactacgagaaggacgaggacttcctgagcagcaccagaaacaccaacatcctgcccaccgaggaggagggctaccccctgctgagcgccgagatcgaggagatcgaggacgcccagaagcaggaggccgccctgctgaccaagtggcagagaatcatgggcatcaactacgagatcgtggtggcccacgtgagcaagttcagcgagaacagcggcctgggcatcagcctggaggccaccgtgggccaccacttcatcagaagcgtgctgcccgagggccccgtgggccacagcggcaagctgttcagcggcgacgagctgctggaggtgaacggcatcaccctgctgggcgagaaccaccaggacgtggtgaacatcctgaaggagctgcccatcgaggtgaccatggtgtgctgcagaagaaccgtgccccccaccacccagagcgagctggacagcctggacctgtgcgacatcgagctgaccgagaagccccacgtggacctgggcgagttcatcggcagcagcgagaccgaggaccccgtgctggccatgaccgacgccggccagagcaccgaggaggtgcaggcccccctggccatgtgggaggccggcatccagcacatcgagctggagaagggcagcaagggcctgggcttcagcatcctggactaccaggaccccatcgaccccgccagcaccgtgatcatcatcagaagcctggtgcccggcggcatcgccgagaaggacggcagactgctgcccggcgacagactgatgttcgtgaacgacgtgaacctggagaacagcagcctggaggaggccgtggaggccctgaagggcgcccccagcggcaccgtgagaatcggcgtggccaagcccctgcccctgagccccgaggagggctacgtgagcgccaaggaggacagcttcctgtaccccccccacagctgcgaggaggccggcctggccgacaagcccctgttcagagccgacctggccctggtgggcaccaacgacgccgacctggtggacgagagcaccttcgagagcccctacagccccgagaacgacagcatctacagcacccaggccagcatcctgagcctgcacggcagcagctgcggcgacggcctgaactacggcagcagcctgcccagcagcccccccaaggacgtgatcgagaacagctgcgaccccgtgctggacctgcacatgagcctggaggagctgtacacccagaacctgctgcagagacaggacgagaacacccccagcgtggacatcagcatgggccccgccagcggcttcaccatcaacgactacacccccgccaacgccatcgagcagcagtacgagtgcgagaacaccatcgtgtggaccgagagccacctgcccagcgaggtgatcagcagcgccgagctgcccagcgtgctgcccgacagcgccggcaagggcagcgagtacctgctggagcagagcagcctggcctgcaacgccgagtgcgtgatgctgcagaacgtgagcaaggagagcttcgagagaaccatcaacatcgccaagggcaacagcagcctgggcatgaccgtgagcgccaacaaggacggcctgggcatgatcgtgagaagcatcatccacggcggcgccatcagcagagacggcagaatcgccatcggcgactgcatcctgagcatcaacgaggagagcaccatcagcgtgaccaacgcccaggccagagccatgctgagaagacacagcctgatcggccccgacatcaagatcacctacgtgcccgccgagcacctggaggagttcaagatcagcctgggccagcagagcggcagagtgatggccctggacatcttcagcagctacaccggcagagacatccccgagctgcccgagagagaggagggcgagggcgaggagagcgagctgcagaacaccgcctacagcaactggaaccagcccagaagagtggagctgtggagagagcccagcaagagcctgggcatcagcatcgtgggcggcagaggcatgggcagcagactgagcaacggcgaggtgatgagaggcatcttcatcaagcacgtgctggaggacagccccgccggcaagaacggcaccctgaagcccggcgacagaatcgtggaggtggacggcatggacctgagagacgccagccacgagcaggccgtggaggccatcagaaaggccggcaaccccgtggtgttcatggtgcagagcatcatcaacagacccagaaagagccccctgcccagcctgctgcacaacctgtaccccaagtacaacttcagcagcaccaaccccttcgccgacagcctgcagatcaacgccgacaaggcccccagccagagcgagagcgagcccgagaaggcccccctgtgcagcgtgcccccccccccccccagcgccttcgccgagatgggcagcgaccacacccagagcagcgccagcaagatcagccaggacgtggacaaggaggacgagttcggctacagctggaagaacatcagagagagatacggcaccctgaccggcgagctgcacatgatcgagctggagaagggccacagcggcctgggcctgagcctggccggcaacaaggacagaagcagaatgagcgtgttcatcgtgggcatcgaccccaacggcgccgccggcaaggacggcagactgcagatcgccgacgagctgctggagatcaacggccagatcctgtacggcagaagccaccagaacgccagcagcatcatcaagtgcgcccccagcaaggtgaagatcatcttcatcagaaacaaggacgccgtgaaccagatggccgtgtgccccggcaacgccgtggagcccctgcccagcaacagcgagaacctgcagaacaaggagaccgagcccaccgtgaccaccagcgacgccgccgtggacctgagcagcttcaagaacgtgcagcacctggagctgcccaaggaccagggcggcctgggcatcgccatcagcgaggaggacaccctgagcggcgtgatcatcaagagcctgaccgagcacggcgtggccgccaccgacggcagactgaaggtgggcgaccagatcctggccgtggacgacgagatcgtggtgggctaccccatcgagaagttcatcagcctgctgaagaccgccaagatgaccgtgaagctgaccatccacgccgagaaccccgacagccaggccgtgcccagcgccgccggcgccgccagcggcgagaagaagaacagcagccagagcctgatggtgccccagagcggcagccccgagcccgagagcatcagaaacaccagcagaagcagcacccccgccatcttcgccagcgaccccgccacctgccccatcatccccggctgcgagaccaccatcgagatcagcaagggcagaaccggcctgggcctgagcatcgtgggcggcagcgacaccctgctgggcgccatcatcatccacgaggtgtacgaggagggcgccgcctgcaaggacggcagactgtgggccggcgaccagatcctggaggtgaacggcatcgacctgagaaaggccacccacgacgaggccatcaacgtgctgagacagaccccccagagagtgagactgaccctgtacagagacgaggccccctacaaggaggaggaggtgtgcgacaccctgaccatcgagctgcagaagaagcccggcaagggcctgggcctgagcatcgtgggcaagagaaacgacaccggcgtgttcgtgagcgacatcgtgaagggcggcatcgccgacgccgacggcagactgatgcagggcgaccagatcctgatggtgaacggcgaggacgtgagaaacgccacccaggaggccgtggccgccctgctgaaggtgagcgagggcagcctgagcagcttcaccttccccctgagcggcagcagcaccagcgagagcctggagagcagcagcaagaagaacgccctggccagcgagatccagggcctgagaaccgtggagatgaagaagggccccaccgacagcctgggcatcagcatcgccggcggcgtgggcagccccctgggcgacgtgcccatcttcatcgccatgatgcaccccaccggcgtggccgcccagacccagaagctgagagtgggcgacagaatcgtgaccatctgcggcaccagcaccgagggcatgacccacacccaggccgtgaacctgctgaagaacgccagcggcagcatcgagatgcaggtggtggccggcggcgacgtgagcgtggtgaccggccaccagcaggagcccgccagcagcagcctgagcttcaccggcctgaccagcagcagcatcttccaggacgacctgggccccccccagtgcaagagcatcaccctggagagaggccccgacggcctgggcttcagcatcgtgggcggctacggcagcccccacggcgacctgcccatctacgtgaagaccgtgttcgccaagggcgccgccagcgaggacggcagactgaagagaggcgaccagatcatcgccgtgaacggccagagcctggagggcgtgacccacgaggaggccgtggccatcctgaagagaaccaagggcaccgtgaccctgatggtgctgagctag

SEQ ID NO: 89595 - DNA, 5853 bp, synthetic construct
  misc_feature 1..5853: note = Description of Artificial Sequence: Synthetic coding sequence
  source 1..5853: mol_type = other DNA
atgctggaggccatcgacaagaacagagccctgcacgccgccgagagactgcagaccaagctgagagagagaggcgacgtggccaacgaggacaagctgagcctgctgaagagcgtgctgcagagccccctgttcagccagatcctgagcctgcagaccagcgtgcagcagctgaaggaccaggtgaacatcgccaccagcgccaccagcaacatcgagtacgcccacgtgccccacctgagccccgccgtgatccccaccctgcagaacgagagcttcctgctgagccccaacaacggcaacctggaggccctgaccggccccggcatcccccacatcaacggcaagcccgcctgcgacgagttcgaccagctgatcaagaacatggcccagggcagacacgtggaggtgttcgagctgctgaagccccccagcggcggcctgggcttcagcgtggtgggcctgagaagcgagaacagaggcgagctgggcatcttcgtgcaggagatccaggagggcagcgtggcccacagagacggcagactgaaggagaccgaccagatcctggccatcaacggccaggccctggaccagaccatcacccaccagcaggccatcagcatcctgcagaaggccaaggacaccgtgcagctggtgatcgccagaggcagcctgccccagctggtgagccccatcgtgagcagaagccccagcgccgccagcaccatcagcgcccacagcaaccccgtgcactggcagcacatggagaccatcgagctggtgaacgacggcagcggcctgggcttcggcatcatcggcggcaaggccaccggcgtgatcgtgaagaccatcctgcccggcggcgtggccgaccagcacggcagactgtgcagcggcgaccacatcctgaagatcggcgacaccgacctggccggcatgagcagcgagcaggtggcccaggtgctgagacagtgcggcaacagagtgaagctgatgatcgccagaggcgccatcgaggagagaaccgcccccaccgccctgggcatcaccctgagcagcagccccaccagcacccccgagctgagagtggacgccagcacccagaagggcgaggagagcgagaccttcgacgtggagctgaccaagaacgtgcagggcctgggcatcaccatcgccggctacatcggcgacaagaagctggagcccagcggcatcttcgtgaagagcatcaccaagagcagcgccgtggagcacgacggcagaatccagatcggcgaccagatcatcgccgtggacggcaccaacctgcagggcttcaccaaccagcaggccgtggaggtgctgagacacaccggccagaccgtgctgctgaccctgatgagaagaggcatgaagcaggaggccgagctgatgagcagagaggacgtgaccaaggacgccgacctgagccccgtgaacgccagcatcatcaaggagaactacgagaaggacgaggacttcctgagcagcaccagaaacaccaacatcctgcccaccgaggaggagggctaccccctgctgagcgccgagatcgaggagatcgaggacgcccagaagcaggaggccgccctgctgaccaagtggcagagaatcatgggcatcaactacgagatcgtggtggcccacgtgagcaagttcagcgagaacagcggcctgggcatcagcctggaggccaccgtgggccaccacttcatcagaagcgtgctgcccgagggccccgtgggccacagcggcaagctgttcagcggcgacgagctgctggaggtgaacggcatcaccctgctgggcgagaaccaccaggacgtggtgaacatcctgaaggagctgcccatcgaggtgaccatggtgtgctgcagaagaaccgtgccccccaccacccagagcgagctggacagcctgggcatccagcacatcgagctggagaagggcagcaagggcctgggcttcagcatcctggactaccaggaccccatcgaccccgccagcaccgtgatcatcatcagaagcctggtgcccggcggcatcgccgagaaggacggcagactgctgcccggcgacagactgatgttcgtgaacgacgtgaacctggagaacagcagcctggaggaggccgtggaggccctgaagggcgcccccagcggcaccgtgagaatcggcgtggccaagcccctgcccctgagccccgaggagggctacgtgagcgccaaggaggacagcttcctgtaccccccccacagctgcgaggaggccggcctggccgacaagcccctgttcagagccgacctggccctggtgggcaccaacgacgccgacctggtggacgagagcaccttcgagagcccctacagccccgagaacgacagcatctacagcacccaggccagcatcctgagcctgcacggcagcagctgcggcgacggcctgaactacggcagcagcctgcccagcagcccccccaaggacgtgatcgagaacagctgcgaccccgtgctggacctgcacatgagcctggaggagctgtacacccagaacctgctgcagagacaggacgagaacacccccagcgtggacatcagcatgggccccgccagcggcttcaccatcaacgactacacccccgccaacgccatcgagcagcagtacgagtgcgagaacaccatcgtgtggaccgagagccacctgcccagcgaggtgatcagcagcgccgagctgcccagcgtgctgcccgacagcgccggcaagggcagcgagtacctgctggagcagagcagcctggcctgcaacgccgagtgcgtgatgctgcagaacgtgagcaaggagagcttcgagagaaccatcaacatcgccaagggcaacagcagcctgggcatgaccgtgagcgccaacaaggacggcctgggcatgatcgtgagaagcatcatccacggcggcgccatcagcagagacggcagaatcgccatcggcgactgcatcctgagcatcaacgaggagagcaccatcagcgtgaccaacgcccaggccagagccatgctgagaagacacagcctgatcggccccgacatcaagatcacctacgtgcccgccgagcacctggaggagttcaagatcagcctgggccagcagagcggcagagtgatggccctggacatcttcagcagctacaccggcagagacatccccgagctgcccgagagagaggagggcgagggcgaggagagcgagctgcagaacaccgcctacagcaactggaaccagcccagaagagtggagctgtggagagagcccagcaagagcctgggcatcagcatcgtgggcggcagaggcatgggcagcagactgagcaacggcgaggtgatgagaggcatcttcatcaagcacgtgctggaggacagccccgccggcaagaacggcaccctgaagcccggcgacagaatcgtggaggcccccagccagagcgagagcgagcccgagaaggcccccctgtgcagcgtgcccccccccccccccagcgccttcgccgagatgggcagcgaccacacccagagcagcgccagcaagatcagccaggacgtggacaaggaggacgagttcggctacagctggaagaacatcagagagagatacggcaccctgaccggcgagctgcacatgatcgagctggagaagggccacagcggcctgggcctgagcctggccggcaacaaggacagaagcagaatgagcgtgttcatcgtgggcatcgaccccaacggcgccgccggcaaggacggcagactgcagatcgccgacgagctgctggagatcaacggccagatcctgtacggcagaagccaccagaacgccagcagcatcatcaagtgcgcccccagcaaggtgaagatcatcttcatcagaaacaaggacgccgtgaaccagatggccgtgtgccccggcaacgccgtggagcccctgcccagcaacagcgagaacctgcagaacaaggagaccgagcccaccgtgaccaccagcgacgccgccgtggacctgagcagcttcaagaacgtgcagcacctggagctgcccaaggaccagggcggcctgggcatcgccatcagcgaggaggacaccctgagcggcgtgatcatcaagagcctgaccgagcacggcgtggccgccaccgacggcagactgaaggtgggcgaccagatcctggccgtggacgacgagatcgtggtgggctaccccatcgagaagttcatcagcctgctgaagaccgccaagatgaccgtgaagctgaccatccacgccgagaaccccgacagccaggccgtgcccagcgccgccggcgccgccagcggcgagaagaagaacagcagccagagcctgatggtgccccagagcggcagccccgagcccgagagcatcagaaacaccagcagaagcagcacccccgccatcttcgccagcgaccccgccacctgccccatcatccccggctgcgagaccaccatcgagatcagcaagggcagaaccggcctgggcctgagcatcgtgggcggcagcgacaccctgctgggcgccatcatcatccacgaggtgtacgaggagggcgccgcctgcaaggacggcagactgtgggccggcgaccagatcctggaggtgaacggcatcgacctgagaaaggccacccacgacgaggccatcaacgtgctgagacagaccccccagagagtgagactgaccctgtacagagacgaggccccctacaaggaggaggaggtgtgcgacaccctgaccatcgagctgcagaagaagcccggcaagggcctgggcctgagcatcgtgggcaagagaaacgacaccggcgtgttcgtgagcgacatcgtgaagggcggcatcgccgacgccgacggcagactgatgcagggcgaccagatcctgatggtgaacggcgaggacgtgagaaacgccacccaggaggccgtggccgccctgctgaagtgcagcctgggcaccgtgaccctggaggtgggcagaatcaaggccggccccttccacagcgagagaagacccagccagagcagccaggtgagcgagggcagcctgagcagcttcaccttccccctgagcggcagcagcaccagcgagagcctggagagcagcagcaagaagaacgccctggccagcgagatccagggcctgagaaccgtggagatgaagaagggccccaccgacagcctgggcatcagcatcgccggcggcgtgggcagccccctgggcgacgtgcccatcttcatcgccatgatgcaccccaccggcgtggccgcccagacccagaagctgagagtgggcgacagaatcgtgaccatctgcggcaccagcaccgagggcatgacccacacccaggccgtgaacctgctgaagaacgccagcggcagcatcgagatgcaggtggtggccggcggcgacgtgagcgtggtgaccggccaccagcaggagcccgccagcagcagcctgagcttcaccggcctgaccagcagcagcatcttccaggacgacctgggccccccccagtgcaagagcatcaccctggagagaggccccgacggcctgggcttcagcatcgtgggcggctacggcagcccccacggcgacctgcccatctacgtgaagaccgtgttcgccaagggcgccgccagcgaggacggcagactgaagagaggcgaccagatcatcgccgtgaacggccagagcctggagggcgtgacccacgaggaggccgtggccatcctgaagagaaccaagggcaccgtgaccctgatggtgctgagctag

SEQ ID NO: 89596 - DNA, 915 bp, synthetic construct
  misc_feature 1..915: note = Description of Artificial Sequence: Synthetic coding sequence
  source 1..915: mol_type = other DNA
atgcagggcgaccagatcctgatggtgaacggcgaggacgtgagaaacgccacccaggaggccgtggccgccctgctgaagtgcagcctgggcaccgtgaccctggaggtgggcagaatcaaggccggccccttccacagcgagagaagacccagccagagcagccaggtgagcgagggcagcctgagcagcttcaccttccccctgagcggcagcagcaccagcgagagcctggagagcagcagcaagaagaacgccctggccagcgagatccagggcctgagaaccgtggagatgaagaagggccccaccgacagcctgggcatcagcatcgccggcggcgtgggcagccccctgggcgacgtgcccatcttcatcgccatgatgcaccccaccggcgtggccgcccagacccagaagctgagagtgggcgacagaatcgtgaccatctgcggcaccagcaccgagggcatgacccacacccaggccgtgaacctgctgaagaacgccagcggcagcatcgagatgcaggtggtggccggcggcgacgtgagcgtggtgaccggccaccagcaggagcccgccagcagcagcctgagcttcaccggcctgaccagcagcagcatcttccaggacgacctgggccccccccagtgcaagagcatcaccctggagagaggccccgacggcctgggcttcagcatcgtgggcggctacggcagcccccacggcgacctgcccatctacgtgaagaccgtgttcgccaagggcgccgccagcgaggacggcagactgaagagaggcgaccagatcatcgccgtgaacggccagagcctggagggcgtgacccacgaggaggccgtggccatcctgaagagaaccaagggcaccgtgaccctgatggtgctgagctag

SEQ ID NO: 89597 - DNA, 6126 bp, synthetic construct; identical to SEQ ID NO: 89594
  misc_feature 1..6126: note = Description of Artificial Sequence: Synthetic coding sequence
  source 1..6126: mol_type = other DNA

SEQ ID NO: 89598 - DNA, 6114 bp, synthetic construct
  misc_feature 1..6114: note = Description of Artificial Sequence: Synthetic coding sequence
  source 1..6114: mol_type = other DNA
atgctggaggccatcgacaagaacagagccctgcacgccgccgagagactgcagaccaagctgagagagagaggcgacgtggccaacgaggacaagctgagcctgctgaagagcgtgctgcagagccccctgttcagccagatcctgagcctgcagaccagcgtgcagcagctgaaggaccaggtgaacatcgccaccagcgccaccagcaacatcgagtacgcccacgtgccccacctgagccccgccgtgatccccaccctgcagaacgagagcttcctgctgagccccaacaacggcaacctggaggccctgaccggccccggcatcccccacatcaacggcaagcccgcctgcgacgagttcgaccagctgatcaagaacatggcccagggcagacacgtggaggtgttcgagctgctgaagccccccagcggcggcctgggcttcagcgtggtgggcctgagaagcgagaacagaggcgagctgggcatcttcgtgcaggagatccaggagggcagcgtggcccacagagacggcagactgaaggagaccgaccagatcctggccatcaacggccaggccctggaccagaccatcacccaccagcaggccatcagcatcctgcagaaggccaaggacaccgtgcagctggtgatcgccagaggcagcctgccccagctggtgagccccatcgtgagcagaagccccagcgccgccagcaccatcagcgcccacagcaaccccgtgcactggcagcacatggagaccatcgagctggtgaacgacggcagcggcctgggcttcggcatcatcggcggcaaggccaccggcgtgatcgtgaagaccatcctgcccggcggcgtggccgaccagcacggcagactgtgcagcggcgaccacatcctgaagatcggcgacaccgacctggccggcatgagcagcgagcaggtggcccaggtgctgagacagtgcggcaacagagtgaagctgatgatcgccagaggcgccatcgaggagagaaccgcccccaccgccctgggcatcaccctgagcagcagccccaccagcacccccgagctgagagtggacgccagcacccagaagggcgaggagagcgagaccttcgacgtggagctgaccaagaacgtgcagggcctgggcatcaccatcgccggctacatcggcgacaagaagctggagcccagcggcatcttcgtgaagagcatcaccaagagcagcgccgtggagcacgacggcagaatccagatcggcgaccagatcatcgccgtggacggcaccaacctgcagggcttcaccaaccagcaggccgtggaggtgctgagacacaccggccagaccgtgctgctgaccctgatgagaagaggcatgaagcaggaggccgagctgatgagcagagaggacgtgaccaaggacgccgacctgagccccgtgaacgccagcatcatcaaggagaactacgagaaggacgaggacttcctgagcagcaccagaaacaccaacatcctgcccaccgaggaggagggctaccccctgctgagcgccgagatcgaggagatcgaggacgcccagaagcaggaggccgccctgctgaccaagtggcagagaatcatgggcatcaactacgagatcgtggtggcccacgtgagcaagttcagcgagaacagcggcctgggcatcagcctggaggccaccgtgggccaccacttcatcagaagcgtgctgcccgagggccccgtgggccacagcggcaagctgttcagcggcgacgagctgctggaggtgaacggcatcaccctgctgggcgagaaccaccaggacgtggtgaacatcctgaaggagctgcccatcgaggtgaccatggtgtgctgcagaagaaccgtgccccccaccacccagagcgagctggacagcctggacctgtgcgacatcgagctgaccgagaagccccacgtggacctgggcgagttcatcggcagcagcgagaccgaggaccccgtgctggccatgaccgacgccggccagagcaccgaggaggtgcaggcccccctggccatgtgggaggccggcatccagcacatcgagctggagaagggcagcaagggcctgggcttcagcatcctggactaccaggaccccatcgaccccgccagcaccgtgatcatcatcagaagcctggtgcccggcggcatcgccgagaaggacggcagactgctgcccggcgacagactgatgttcgtgaacgacgtgaacctggagaacagcagcctggaggaggccgtggaggccctgaagggcgcccccagcggcaccgtgagaatcggcgtggccaagcccctgcccctgagccccgaggagggctacgtgagcgccaaggaggacagcttcctgtaccccccccacagctgcgaggaggccggcctggccgacaagcccctgttcagagccgacctggccctggtgggcaccaacgacgccgacctggtggacgagagcaccttcgagagcccctacagccccgagaacgacagcatctacagcacccaggccagcatcctgagcctgcacggcagcagctgcggcgacggcctgaactacggcagcagcctgcccagcagcccccccaaggacgtgatcgagaacagctgcgaccccgtgctggacctgcacatgagcctggaggagctgtacacccagaacctgctgcagagacaggacgagaacacccccagcgtggacatcagcatgggccccgccagcggcttcaccatcaacgactacacccccgccaacgccatcgagcagcagtacgagtgcgagaacaccatcgtgtggaccgagagccacctgcccagcgaggtgatcagcagcgccgagctgcccagcgtgctgcccgacagcgccggcaagggcagcgagtacctgctggagcagagcagcctggcctgcaacgccgagtgcgtgatgctgcagaacgtgagcaaggagagcttcgagagaaccatcaacatcgccaagggcaacagcagcctgggcatgaccgtgagcgccaacaaggacggcctgggcatgatcgtgagaagcatcatccacggcggcgccatcagcagagacggcagaatcgccatcggcgactgcatcctgagcatcaacgaggagagcaccatcagcgtgaccaacgcccaggccagagccatgctgagaagacacagcctgatcggccccgacatcaagatcacctacgtgcccgccgagcacctggaggagttcaagatcagcctgggccagcagagcggcagagtgatggccctggacatcttcagcagctacaccggcagagacatccccgagctgcccgagagagaggagggcgagggcgaggagagcgagctgcagaacaccgcctacagcaactggaaccagcccagaagagtggagctgtggagagagcccagcaagagcctgggcatcagcatcgtgggcggcagaggcatgggcagcagactgagcaacggcgaggtgatgagaggcatcttcatcaagcacgtgctggaggacagccccgccggcaagaacggcaccctgaagcccggcgacagaatcgtggaggtggacggcatggacctgagagacgccagccacgagcaggccgtggaggccatcagaaaggccggcaaccccgtggtgttcatggtgcagagcatcatcaacagacccagagcccccagccagagcgagagcgagcccgagaaggcccccctgtgcagcgtgcccccccccccccccagcgccttcgccgagatgggcagcgaccacacccagagcagcgccagcaagatcagccaggacgtggacaaggaggacgagttcggctacagctggaagaacatcagagagagatacggcaccctgaccggcgagctgcacatgatcgagctggagaagggccacagcggcctgggcctgagcctggccggcaacaaggacagaagcagaatgagcgtgttcatcgtgggcatcgaccccaacggcgccgccggcaaggacggcagactgcagatcgccgacgagctgctggagatcaacggccagatcctgtacggcagaagccaccagaacgccagcagcatcatcaagtgcgcccccagcaaggtgaagatcatcttcatcagaaacaaggacgccgtgaaccagatggccgtgtgccccggcaacgccgtggagcccctgcccagcaacagcgagaacctgcagaacaaggagaccgagcccaccgtgaccaccagcgacgccgccgtggacctgagcagcttcaagaacgtgcagcacctggagctgcccaaggaccagggcggcctgggcatcgccatcagcgaggaggacaccctgagcggcgtgatcatcaagagcctgaccgagcacggcgtggccgccaccgacggcagactgaaggtgggcgaccagatcctggccgtggacgacgagatcgtggtgggctaccccatcgagaagttcatcagcctgctgaagaccgccaagatgaccgtgaagctgaccatccacgccgagaaccccgacagccaggccgtgcccagcgccgccggcgccgccagcggcgagaagaagaacagcagccagagcctgatggtgccccagagcggcagccccgagcccgagagcatcagaaacaccagcagaagcagcacccccgccatcttcgccagcgaccccgccacctgccccatcatccccggctgcgagaccaccatcgagatcagcaagggcagaaccggcctgggcctgagcatcgtgggcggcagcgacaccctgctgggcgccatcatcatccacgaggtgtacgaggagggcgccgcctgcaaggacggcagactgtgggccggcgaccagatcctggaggtgaacggcatcgacctgagaaaggccacccacgacgaggccatcaacgtgctgagacagaccccccagagagtgagactgaccctgtacagagacgaggccccctacaaggaggaggaggtgtgcgacaccctgaccatcgagctgcagaagaagcccggcaagggcctgggcctgagcatcgtgggcaagagaaacgacaccggcgtgttcgtgagcgacatcgtgaagggcggcatcgccgacgccgacggcagactgatgcagggcgaccagatcctgatggtgaacggcgaggacgtgagaaacgccacccaggaggccgtggccgccctgctgaagtgcagcctgggcaccgtgaccctggaggtgggcagaatcaaggccggccccttccacagcgagagaagacccagccagagcagccaggtgagcgagggcagcctgagcagcttcaccttccccctgagcggcagcagcaccagcgagagcctggagagcagcagcaagaagaacgccctggccagcgagatccagggcctgagaaccgtggagatgaagaagggccccaccgacagcctgggcatcagcatcgccggcggcgtgggcagccccctgggcgacgtgcccatcttcatcgccatgatgcaccccaccggcgtggccgcccagacccagaagctgagagtgggcgacagaatcgtgaccatctgcggcaccagcaccgagggcatgacccacacccaggccgtgaacctgctgaagaacgccagcggcagcatcgagatgcaggtggtggccggcggcgacgtgagcgtggtgaccggccaccagcaggagcccgccagcagcagcctgagcttcaccggcctgaccagcagcagcatcttccaggacgacctgggccccccccagtgcaagagcatcaccctggagagaggccccgacggcctgggcttcagcatcgtgggcggctacggcagcccccacggcgacctgcccatctacgtgaagaccgtgttcgccaagggcgccgccagcgaggacggcagactgaagagaggcgaccagatcatcgccgtgaacggccagagcctggagggcgtgacccacgaggaggccgtggccatcctgaagagaaccaagggcaccgtgaccctgatggtgctgagctag

SEQ ID NO: 89599 - DNA, 6027 bp, synthetic construct
  misc_feature 1..6027: note = Description of Artificial Sequence: Synthetic coding sequence
  source 1..6027: mol_type = other DNA
atgctggaggccatcgacaagaacagagccctgcacgccgccgagagactgcagaccaagctgagagagagaggcgacgtggccaacgaggacaagctgagcctgctgaagagcgtgctgcagagccccctgttcagccagatcctgagcctgcagaccagcgtgcagcagctgaaggaccaggtgaacatcgccaccagcgccaccagcaacatcgagtacgcccacgtgccccacctgagccccgccgtgatccccaccctgcagaacgagagcttcctgctgagccccaacaacggcaacctggaggccctgaccggccccggcatcccccacatcaacggcaagcccgcctgcgacgagttcgaccagctgatcaagaacatggcccagggcagacacgtggaggtgttcgagctgctgaagccccccagcggcggcctgggcttcagcgtggtgggcctgagaagcgagaacagaggcgagctgggcatcttcgtgcaggagatccaggagggcagcgtggcccacagagacggcagactgaaggagaccgaccagatcctggccatcaacggccaggccctggaccagaccatcacccaccagcaggccatcagcatcctgcagaaggccaaggacaccgtgcagctggtgatcgccagaggcagcctgccccagctggtgagccccatcgtgagcagaagccccagcgccgccagcaccatcagcgcccacagcaaccccgtgcactggcagcacatggagaccatcgagctggtgaacgacggcagcggcctgggcttcggcatcatcggcggcaaggccaccggcgtgatcgtgaagaccatcctgcccggcggcgtggccgaccagcacggcagactgtgcagcggcgaccacatcctgaagatcggcgacaccgacctggccggcatgagcagcgagcaggtggcccaggtgctgagacagtgcggcaacagagtgaagctgatgatcgccagaggcgccatcgaggagagaaccgcccccaccgccctgggcatcaccctgagcagcagccccaccagcacccccgagctgagagtggacgccagcacccagaagggcgaggagagcgagaccttcgacgtggagctgaccaagaacgtgcagggcctgggcatcaccatcgccggctacatcggcgacaagaagctggagcccagcggcatcttcgtgaagagcatcaccaagagcagcgccgtggagcacgacggcagaatccagatcggcgaccagatcatcgccgtggacggcaccaacctgcagggcttcaccaaccagcaggccgtggaggtgctgagacacaccggccagaccgtgctgctgaccctgatgagaagaggcatgaagcaggaggccgagctgatgagcagagaggacgtgaccaaggacgccgacctgagccccgtgaacgccagcatcatcaaggagaactacgagaaggacgaggacttcctgagcagcaccagaaacaccaacatcctgcccaccgaggaggagggctaccccctgctgagcgccgagatcgaggagatcgaggacgcccagaagcaggaggccgccctgctgaccaagtggcagagaatcatgggcatcaactacgagatcgtggtggcccacgtgagcaagttcagcgagaacagcggcctgggcatcagcctggaggccaccgtgggccaccacttcatcagaagcgtgctgcccgagggccccgtgggccacagcggcaagctgttcagcggcgacgagctgctggaggtgaacggcatcaccctgctgggcgagaaccaccaggacgtggtgaacatcctgaaggagctgcccatcgaggtgaccatggtgtgctgcagaagaaccgtgccccccaccacccagagcgagctggacagcctggacctgtgcgacatcgagctgaccgagaagccccacgtggacctgggcgagttcatcggcagcagcgagaccgaggaccccgtgctggccatgaccgacgccggccagagcaccgaggaggtgcaggcccccctggccatgtgggaggccggcatccagcacatcgagctggagaagggcagcaagggcctgggcttcagcatcctggactaccaggaccccatcgaccccgccagcaccgtgatcatcatcagaagcctggtgcccggcggcatcgccgagaaggacggcagactgctgcccggcgacagactgatgttcgtgaacgacgtgaacctggagaacagcagcctggaggaggccgtggaggccctgaagggcgcccccagcggcaccgtgagaatcggcgtggccaagcccctgcccctgagccccgaggagggctacgtgagcgccaaggaggacagcttcctgtaccccccccacagctgcgaggaggccggcctggccgacaagcccctgttcagagccgacctggccctggtgggcaccaacgacgccgacctggtggacgagagcaccttcgagagcccctacagccccgagaacgacagcatctacagcacccaggccagcatcctgagcctgcacggcagcagctgcggcgacggcctgaactacggcagcagcctgcccagcagcccccccaaggacgtgatcgagaacagctgcgaccccgtgctggacctgcacatgagcctggaggagctgtacacccagaacctgctgcagagacaggacgagaacacccccagcgtggacatcagcatgggccccgccagcggcttcaccatcaacgactacacccccgccaacgccatcgagcagcagtacgagtgcgagaacaccatcgtgtggaccgagagccacctgcccagcgaggtgatcagcagcgccgagctgcccagcgtgctgcccgacagcgccggcaagggcagcgagtacctgctggagcagagcagcctggcctgcaacgccgagtgcgtgatgctgcagaacgtgagcaaggagagcttcgagagaaccatcaacatcgccaagggcaacagcagcctgggcatgaccgtgagcgccaacaaggacggcctgggcatgatcgtgagaagcatcatccacggcggcgccatcagcagagacggcagaatcgccatcggcgactgcatcctgagcatcaacgaggagagcaccatcagcgtgaccaacgcccaggccagagccatgctgagaagacacagcctgatcggccccgacatcaagatcacctacgtgcccgccgagcacctggaggagttcaagatcagcctgggccagcagagcggcagagtgatggccctggacatcttcagcagctacaccggcagagacatccccgagctgcccgagagagaggagggcgagggcgaggagagcgagctgcagaacaccgcctacagcaactggaaccagcccagaagagtggagctgtggagagagcccagcaagagcctgggcatcagcatcgtgggcggcagaggcatgggcagcagactgagcaacggcgaggtgatgagaggcatcttcatcaagcacgtgctggaggacagccccgccggcaagaacggcaccctgaagcccggcgacagaatcgtggaggtggacggcatggacctgagagacgccagccacgagcaggccgtggaggccatcagaaaggccggcaaccccgtggtgttcatggtgcagagcatcatcaacagacccagagcccccagccagagcgagagcgagcccgagaaggcccccctgtgcagcgtgcccccccccccccccagcgccttcgccgagatgggcagcgaccacacccagagcagcgccagcaagatcagccaggacgtggacaaggaggacgagttcggctacagctggaagaacatcagagagagatacggcaccctgaccggcgagctgcacatgatcgagctggagaagggccacagcggcctgggcctgagcctggccggcaacaaggacagaagcagaatgagcgtgttcatcgtgggcatcgaccccaacggcgccgccggcaaggacggcagactgcagatcgccgacgagctgctggagatcaacggccagatcctgtacggcagaagccaccagaacgccagcagcatcatcaagtgcgcccccagcaaggtgaagatcatcttcatcagaaacaaggacgccgtgaaccagatggccgtgtgccccggcaacgccgtggagcccctgcccagcaacagcgagaacctgcagaacaaggagaccgagcccaccgtgaccaccagcgacgccgccgtggacctgagcagcttcaagaacgtgcagcacctggagctgcccaaggaccagggcggcctgggcatcgccatcagcgaggaggacaccctgagcggcgtgatcatcaagagcctgaccgagcacggcgtggccgccaccgacggcagactgaaggtgggcgaccagatcctggccgtggacgacgagatcgtggtgggctaccccatcgagaagttcatcagcctgctgaagaccgccaagatgaccgtgaagctgaccatccacgccgagaaccccgacagccaggccgtgcccagcgccgccggcgccgccagcggcgagaagaagaacagcagccagagcctgatggtgccccagagcggcagccccgagcccgagagcatcagaaacaccagcagaagcagcacccccgccatcttcgccagcgaccccgccacctgccccatcatccccggctgcgagaccaccatcgagatcagcaagggcagaaccggcctgggcctgagcatcgtgggcggcagcgacaccctgctgggcgccatcatcatccacgaggtgtacgaggagggcgccgcctgcaaggacggcagactgtgggccggcgaccagatcctggaggtgaacggcatcgacctgagaaaggccacccacgacgaggccatcaacgtgctgagacagaccccccagagagtgagactgaccctgtacagagacgaggccccctacaaggaggaggaggtgtgcgacaccctgaccatcgagctgcagaagaagcccggcaagggcctgggcctgagcatcgtgggcaagagaaacgacaccggcgtgttcgtgagcgacatcgtgaagggcggcatcgccgacgccgacggcagactgatgcagggcgaccagatcctgatggtgaacggcgaggacgtgagaaacgccacccaggaggccgtggccgccctgctgaaggtgagcgagggcagcctgagcagcttcaccttccccctgagcggcagcagcaccagcgagagcctggagagcagcagcaagaagaacgccctggccagcgagatccagggcctgagaaccgtggagatgaagaagggccccaccgacagcctgggcatcagcatcgccggcggcgtgggcagccccctgggcgacgtgcccatcttcatcgccatgatgcaccccaccggcgtggccgcccagacccagaagctgagagtgggcgacagaatcgtgaccatctgcggcaccagcaccgagggcatgacccacacccaggccgtgaacctgctgaagaacgccagcggcagcatcgagatgcaggtggtggccggcggcgacgtgagcgtggtgaccggccaccagcaggagcccgccagcagcagcctgagcttcaccggcctgaccagcagcagcatcttccaggacgacctgggccccccccagtgcaagagcatcaccctggagagaggccccgacggcctgggcttcagcatcgtgggcggctacggcagcccccacggcgacctgcccatctacgtgaagaccgtgttcgccaagggcgccgccagcgaggacggcagactgaagagaggcgaccagatcatcgccgtgaacggccagagcctggagggcgtgacccacgaggaggccgtggccatcctgaagagaaccaagggcaccgtgaccctgatggtgctgagctag

SEQ ID NO: 89600 - DNA, 1089 bp, synthetic construct
  misc_feature 1..1089: note = Description of Artificial Sequence: Synthetic coding sequence
  source 1..1089: mol_type = other DNA
atggagaccgacgccccccagcccggcctggccagccccgacagcccccacgacccctgcaagatgttcatcggcggcctgagctggcagaccacccaggagggcctgagagagtacttcggccagttcggcgaggtgaaggagtgcctggtgatgagagaccccctgaccaagagaagcagaggcttcggcttcgtgaccttcatggaccaggccggcgtggacaaggtgctggcccagagcagacacgagctggacagcaagaccatcgaccccaaggtggccttccccagaagagcccagcccaagatggtgaccagaaccaagaagatcttcgtgggcggcctgagcgtgaacaccaccgtggaggacgtgaagcagtacttcgagcagttcggcaaggtggacgacgccatgctgatgttcgacaagaccaccaacagacacagaggcttcggcttcgtgaccttcgagagcgaggacatcgtggagaaggtgtgcgagatccacttccacgagatcaacaacaagatggtggagtgcaagaaggcccagcccaaggaggtgatgagccccaccggcagcgccagaggcagaagcagagtgatgccctacggcatggacgccttcatgctgggcatcggcatgctgggctaccccggcttccaggccaccacctacgccagcagaagctacaccggcctggcccccggctacacctaccagttccccgagttcagagtggagagaacccccctgcccagcgcccccgtgctgcccgagctgaccgccatccccctgaccgcctacggccccatggccgccgccgccgccgccgccgccgtggtgagaggcaccggcagccacccctggaccatggcccccccccccggcagcacccccagcagaaccggcggcttcctgggcaccaccagccccggccccatggccgagctgtacggcgccgccaaccaggacagcggcgtgagcagctacatcagcgccgccagccccgcccccagcaccggcttcggccacagcctgggcggccccctgatcgccaccgccttcaccaacggctaccactag

SEQ ID NO: 89601 - DNA, 627 bp, synthetic construct
  misc_feature 1..627: note = Description of Artificial Sequence: Synthetic coding sequence
  source 1..627: mol_type = other DNA
atggccaccagcgccgtgcccagcgacaacctgcccacctacaagctggtggtggtgggcgacggcggcgtgggcaagagcgccctgaccatccagttcttccagaagatcttcgtgcccgactacgaccccaccatcgaggacagctacctgaagcacaccgagatcgacaaccagtgggccatcctggacgtgctggacaccgccggccaggaggagttcagcgccatgagagagcagtacatgagaaccggcgacggcttcctgatcgtgtacagcgtgaccgacaaggccagcttcgagcacgtggacagattccaccagctgatcctgagagtgaaggacagagagagcttccccatgatcctggtggccaacaaggtggacctgatgcacctgagaaagatcaccagagagcagggcaaggagatggccaccaagcacaacatcccctacatcgagaccagcgccaaggacccccccctgaacgtggacaaggccttccacgacctggtgagagtgatcagacagcagatccccgagaagagccagaagaagaagaagaagaccaagtggagaggcgacagagccaccggcacccacaagctgcagtgcgtgatcctgtag

SEQ ID NO: 89602 - DNA, 627 bp, synthetic construct; identical to SEQ ID NO: 89601
  misc_feature 1..627: note = Description of Artificial Sequence: Synthetic coding sequence
  source 1..627: mol_type = other DNA

SEQ ID NO: 89603 - DNA, 399 bp, synthetic construct
  misc_feature 1..399: note = Description of Artificial Sequence: Synthetic coding sequence
  source 1..399: mol_type = other DNA
atgagagagcagtacatgagaaccggcgacggcttcctgatcgtgtacagcgtgaccgacaaggccagcttcgagcacgtggacagattccaccagctgatcctgagagtgaaggacagagagagcttccccatgatcctggtggccaacaaggtggacctgatgcacctgagaaagatcaccagagagcagggcaaggagatggccaccaagcacaacatcccctacatcgagaccagcgccaaggacccccccctgaacgtggacaaggccttccacgacctggtgagagtgatcagacagcagatccccgagaagagccagaagaagaagaagaagaccaagtggagaggcgacagagccaccggcacccacaagctgcagtgcgtgatcctgtag

SEQ ID NO: 89604 - DNA, 627 bp, synthetic construct; identical to SEQ ID NO: 89601
  misc_feature 1..627: note = Description of Artificial Sequence: Synthetic coding sequence
  source 1..627: mol_type = other DNA

SEQ ID NO: 89605 - DNA, 72 bp, synthetic construct
  misc_feature 1..72: note = Description of Artificial Sequence: Synthetic coding sequence
  source 1..72: mol_type = other DNA
atggccaccagcgccgtgcccagcgacaacctgcccacctacaagctggtggtggtgggcgacggcggctag

SEQ ID NO: 89606 - DNA, 2628 bp, synthetic construct
  misc_feature 1..2628: note = Description of Artificial Sequence: Synthetic coding sequence
  source 1..2628: mol_type = other DNA
atgagagagctggtgaacatccccctggtgcacatcctgaccctggtggccttcagcggcaccgagaagctgcccaaggcccccgtgatcaccacccccctggagaccgtggacgccctggtggaggaggtggccaccttcatgtgcgccgtggagagctacccccagcccgagatcagctggaccagaaacaagatcctgatcaagctgttcgacaccagatacagcatcagagagaacggccagctgctgaccatcctgagcgtggaggacagcgacgacggcatctactgctgcaccgccaacaacggcgtgggcggcgccgtggagagctgcggcgccctgcaggtgaagatgaagcccaagatcaccagaccccccatcaacgtgaagatcatcgagggcctgaaggccgtgctgccctgcaccaccatgggcaaccccaagcccagcgtgagctggatcaagggcgacagccccctgagagagaacagcagaatcgccgtgctggagagcggcagcctgagaatccacaacgtgcagaaggaggacgccggccagtacagatgcgtggccaagaacagcctgggcaccgcctacagcaaggtggtgaagctggaggtggaggtgttcgccagaatcctgagagcccccgagagccacaacgtgaccttcggcagcttcgtgaccctgcactgcaccgccaccggcatccccgtgcccaccatcacctggatcgagaacggcaacgccgtgagcagcggcagcatccaggagagcgtgaaggacagagtgatcgacagcagactgcagctgttcatcaccaagcccggcctgtacacctgcatcgccaccaacaagcacggcgagaagttcagcaccgccaaggccgccgccaccatcagcatcgccgagatgctgttcatcagcagcttcagcaagccccagaaggacaacaagggctactgcgcccagtacagaggcgaggtgtgcaacgccgtgctggccaaggacgccctggtgttcctgaacaccagctacgccgaccccgaggaggcccaggagctgctggtgcacaccgcctggaacgagctgaaggtggtgagccccgtgtgcagacccgccgccgaggccctgctgtgcaaccacatcttccaggagtgcagccccggcgtggtgcccacccccatccccatctgcagagagtactgcctggccgtgaaggagctgttctgcgccaaggagtggctggtgatggaggagaagacccacagaggcctgtacagaagcgagatgcacctgctgagcgtgcccgagtgcagcaagctgcccagcatgcactgggaccccaccgcctgcgccagactgccccacctggactacaacaaggagaacctgaagaccttcccccccatgaccagcagcaagcccagcgtggacatccccaacctgcccagcagcagcagcagcagcttcagcgtgagccccacctacagcatgaccgtgatcatcagcatcatgagcagcttcgccatcttcgtgctgctgaccatcaccaccctgtactgctgcagaagaagaaagcagtggaagaacaagaagagagagagcgccgccgtgaccctgaccaccctgcccagcgagctgctgctggacagactgcaccccaaccccatgtaccagagaatgcccctgctgctgaaccccaagctgctgagcctggagtaccccagaaacaacatcgagtacgtgagagacatcggcgagggcgccttcggcagagtgttccaggccagagcccccggcctgctgccctacgagcccttcaccatggtggccgtgaagatgctgaaggaggaggccagcgccgacatgcaggccgacttccagagagaggccgccctgatggccgagttcgacaaccccaacatcgtgaagctgctgggcgtgtgcgccgtgggcaagcccatgtgcctgctgttcgagtacatggcctacggcgacctgaacgagttcctgagaagcatgagcccccacaccgtgtgcagcctgagccacagcgacctgagcatgagagcccaggtgagcagccccggccccccccccctgagctgcgccgagcagctgtgcatcgccagacaggtggccgccggcatggcctacctgagcgagagaaagttcgtgcacagagacctggccaccagaaactgcctggtgggcgagaacatggtggtgaagatcgccgacttcggcctgagcagaaacatctacagcgccgactactacaaggccaacgagaacgacgccatccccatcagatggatgccccccgagagcatcttctacaacagatacaccaccgagagcgacgtgtgggcctacggcgtggtgctgtgggagatcttcagctacggcctgcagccctactacggcatggcccacgaggaggtgatctactacgtgagagacggcaacatcctgagctgccccgagaactgccccgtggagctgtacaacctgatgagactgtgctggagcaagctgcccgccgacagacccagcttcaccagcatccacagaatcctggagagaatgtgcgagagagccgagggcaccgtgagcgtgtag

SEQ ID NO: 89607 - DNA, 570 bp, synthetic construct
  misc_feature 1..570: note = Description of Artificial Sequence: Synthetic coding sequence
  source 1..570: mol_type = other DNA
atggccggcaacggcagagaggacccccagagaaccctgcagatcagagacgccttcgccgtgagagccagaatgcagcaggccagccagcacgccctgggcccccacggcctgtgccagaccgccaccagcagagagagcgccgccgtgaccctgaccaccctgcccagcgagctgctgctggacagactgcaccccaaccccatgtaccagagaatgcccctgctgctgaaccccaagctgctgagcctggagtaccccagaaacaacatcgagtacgtgagagacatcggcgagggcgccttcggcagagtgttccaggccagagcccccggcctgctgccctacgagcccttcaccatggtggccgtgaagatgctgaaggaggaggccagcgccgacatgcaggccgacttccagagagaggccgccctgatggccgagttcgacaaccccaacatcgtgaagctgctgggcatgaagatccaggtgagaatctgcatcagcagcgagaacagaggcttccccagcttcagccccctggtgagagccttcagcttcagcccctag

SEQ ID NO: 89608 - DNA, 351 bp, synthetic construct
  misc_feature 1..351: note = Description of Artificial Sequence: Synthetic coding sequence
  source 1..351: mol_type = other DNA
atgaagcccaagatcaccagaccccccatcaacgtgaagatcatcgagggcctgaaggccgtgctgccctgcaccaccatgggcaaccccaagcccagcgtgagctggatcaagggcgacagccccctgagagagaacagcagaatcgccgtgctggagagcggcagcctgagaatccacaacgtgcagaaggaggacgccggccagtacagatgcgtggccaagaacagcctgggcaccgcctacagcaaggtggtgaagctggaggtggagggcgccaagggcatccacacccagttcgtggccagcgccctgcagctgagaagcttcctgagctgcccccagatctag

SEQ ID NO: 89609 - DNA, 351 bp, synthetic construct; identical to SEQ ID NO: 89608
  misc_feature 1..351: note = Description of Artificial Sequence: Synthetic coding sequence
  source 1..351: mol_type = other DNA

SEQ ID NO: 89610 - DNA, 570 bp, synthetic construct; identical to SEQ ID NO: 89607
  misc_feature 1..570: note = Description of Artificial Sequence: Synthetic coding sequence
  source 1..570: mol_type = other DNA

SEQ ID NO: 89611 - DNA, 2352 bp, synthetic construct
  misc_feature 1..2352: note = Description of Artificial Sequence: Synthetic coding sequence
  source 1..2352: mol_type = other DNA
atgagagagctggtgaacatccccctggtgcacatcctgaccctggtggccttcagcggcaccgagaagctgcccaaggcccccgtgatcaccacccccctggagaccgtggacgccctggtggaggaggtggccaccttcatgtgcgccgtggagagctacccccagcccgagatcagctggaccagaaacaagatcctgatcaagctgttcgacaccagatacagcatcagagagaacggccagctgctgaccatcctgagcgtggaggacagcgacgacggcatctactgctgcaccgccaacaacggcgtgggcggcgccgtggagagctgcggcgccctgcaggtgaagatgaagcccaagatcaccagaccccccatcaacgtgaagatcatcgagggcctgaaggccgtgctgccctgcaccaccatgggcaaccccaagcccagcgtgagctggatcaagggcgacagccccctgagagagaacagcagaatcgccgtgctggagagcggcagcctgagaatccacaacgtgcagaaggaggacgccggccagtacagatgcgtggccaagaacagcctgggcaccgcctacagcaaggtggtgaagctggaggtggaggaggagagcgagcccgagcaggacaccaaggtgttcgccagaatcctgagagcccccgagagccacaacgtgaccttcggcagcttcgtgaccctgcactgcaccgccaccggcatccccgtgcccaccatcacctggatcgagaacggcaacgccgtgagcagcggcagcatccaggagagcgtgaaggacagagtgatcgacagcagactgcagctgttcatcaccaagcccggcctgtacacctgcatcgccaccaacaagcacggcgagaagttcagcaccgccaaggccgccgccaccatcagcatcgccgacttcagagagtactgcctggccgtgaaggagctgttctgcgccaaggagtggctggtgatggaggagaagacccacagaggcctgtacagaagcgagatgcacctgctgagcgtgcccgagtgcagcaagctgcccagcatgcactgggaccccaccgcctgcgccagactgccccacctggccttcccccccatgaccagcagcaagcccagcgtggacatccccaacctgcccagcagcagcagcagcagcttcagcgtgagccccacctacagcatgaccgtgatcatcagcatcatgagcagcttcgccatcttcgtgctgctgaccatcaccaccctgtactgctgcagaagaagaaagcagtggaagaacaagaagagagagagcgccgccgtgaccctgaccaccctgcccagcgagctgctgctggacagactgcaccccaaccccatgtaccagagaatgcccctgctgctgaaccccaagctgctgagcctggagtaccccagaaacaacatcgagtacgtgagagacatcggcgagggcgccttcggcagagtgttccaggccagagcccccggcctgctgccctacgagcccttcaccatggtggccgtgaagatgctgaaggaggaggccagcgccgacatgcaggccgacttccagagagaggccgccctgatggccgagttcgacaaccccaacatcgtgaagctgctgggcgtgtgcgccgtgggcaagcccatgtgcctgctgttcgagtacatggcctacggcgacctgaacgagttcctgagaagcatgagcccccacaccgtgtgcagcctgagccacagcgacctgagcatgagagcccaggtgagcagccccggccccccccccctgagctgcgccgagcagctgtgcatcgccagacaggtggccgccggcatggcctacctgagcgagagaaagttcgtgcacagagacctggccaccagaaactgcctggtgggcgagaacatggtggtgaagatcgccgacttcggcctgagcagaaacatctacagcgccgactactacaaggccaacgagaacgacgccatccccatcagatggatgccccccgagagcatcttctacaacagatacaccaccgagagcgacgtgtgggcctacggcgtggtgctgtgggagatcttcagctacggcctgcagccctactacggcatggcccacgaggaggtgatctactacgtgagagacggcaacatcctgagctgccccgagaactgccccgtggagctgtacaacctgatgagactgtgctggagcaagctgcccgccgacagacccagcttcaccagcatccacagaatcctggagagaatgtgcgagagagccgagggcaccgtgagcgtgtag

SEQ ID NO: 89612 - DNA, 2610 bp, synthetic construct
  misc_feature 1..2610: note = Description of Artificial Sequence: Synthetic coding sequence
  source 1..2610: mol_type = other DNA
atgagagagctggtgaacatccccctggtgcacatcctgaccctggtggccttcagcggcaccgagaagctgcccaaggcccccgtgatcaccacccccctggagaccgtggacgccctggtggaggaggtggccaccttcatgtgcgccgtggagagctacccccagcccgagatcagctggaccagaaacaagatcctgatcaagctgttcgacaccagatacagcatcagagagaacggccagctgctgaccatcctgagcgtggaggacagcgacgacggcatctactgctgcaccgccaacaacggcgtgggcggcgccgtggagagctgcggcgccctgcaggtgaagatgaagcccaagatcaccagaccccccatcaacgtgaagatcatcgagggcctgaaggccgtgctgccctgcaccaccatgggcaaccccaagcccagcgtgagctggatcaagggcgacagccccctgagagagaacagcagaatcgccgtgctggagagcggcagcctgagaatccacaacgtgcagaaggaggacgccggccagtacagatgcgtggccaagaacagcctgggcaccgcctacagcaaggtggtgaagctggaggtggaggtgttcgccagaatcctgagagcccccgagagccacaacgtgaccttcggcagcttcgtgaccctgcactgcaccgccaccggcatccccgtgcccaccatcacctggatcgagaacggcaacgccgtgagcagcggcagcatccaggagagcgtgaaggacagagtgatcgacagcagactgcagctgttcatcaccaagcccggcctgtacacctgcatcgccaccaacaagcacggcgagaagttcagcaccgccaaggccgccgccaccatcagcatcgccgagtggagcaagccccagaaggacaacaagggctactgcgcccagtacagaggcgaggtgtgcaacgccgtgctggccaaggacgccctggtgttcctgaacaccagctacgccgaccccgaggaggcccaggagctgctggtgcacaccgcctggaacgagctgaaggtggtgagccccgtgtgcagacccgccgccgaggccctgctgtgcaaccacatcttccaggagtgcagccccggcgtggtgcccacccccatccccatctgcagagagtactgcctggccgtgaaggagctgttctgcgccaaggagtggctggtgatggaggagaagacccacagaggcctgtacagaagcgagatgcacctgctgagcgtgcccgagtgcagcaagctgcccagcatgcactgggaccccaccgcctgcgccagactgccccacctggactacaacaaggagaacctgaagaccttcccccccatgaccagcagcaagcccagcgtggacatccccaacctgcccagcagcagcagcagcagcttcagcgtgagccccacctacagcatgaccgtgatcatcagcatcatgagcagcttcgccatcttcgtgctgctgaccatcaccaccctgtactgctgcagaagaagaaagcagtggaagaacaagaagagagagagcgccgccgtgaccctgaccaccctgcccagcgagctgctgctggacagactgcaccccaaccccatgtaccagagaatgcccctgctgctgaaccccaagctgctgagcctggagtaccccagaaacaacatcgagtacgtgagagacatcggcgagggcgccttcggcagagtgttccaggccagagcccccggcctgctgccctacgagcccttcaccatggtggccgtgaagatgctgaaggaggaggccagcgccgacatgcaggccgacttccagagagaggccgccctgatggccgagttcgacaaccccaacatcgtgaagctgctgggcgtgtgcgccgtgggcaagcccatgtgcctgctgttcgagtacatggcctacggcgacctgaacgagttcctgagaagcatgagcccccacaccgtgtgcagcctgagccacagcgacctgagcatgagagcccaggtgagcagccccggccccccccccctgagctgcgccgagcagctgtgcatcgccagacaggtggccgccggcatggcctacctgagcgagagaaagttcgtgcacagagacctggccaccagaaactgcctggtgggcgagaacatggtggtgaagatcgccgacttcggcctgagcagaaacatctacagcgccgactactacaaggccaacgagaacgacgccatccccatcagatggatgccccccgagagcatcttctacaacagatacaccaccgagagcgacgtgtgggcctacggcgtggtgctgtgggagatcttcagctacggcctgcagccctactacggcatggcccacgaggaggtgatctactacgtgagagacggcaacatcctgagctgccccgagaactgccccgtggagctgtacaacctgatgagactgtgctggagcaagctgcccgccgacagacccagcttcaccagcatccacagaatcctggagagaatgtgcgagagagccgagggcaccgtgagcgtgtag

SEQ ID NO: 89613 - DNA, 2604 bp, synthetic construct
  misc_feature 1..2604: note = Description of Artificial Sequence: Synthetic coding sequence
  source 1..2604: mol_type = other DNA
atgagagagctggtgaacatccccctggtgcacatcctgaccctggtggccttcagcggcaccgagaagctgcccaaggcccccgtgatcaccacccccctggagaccgtggacgccctggtggaggaggtggccaccttcatgtgcgccgtggagagctacccccagcccgagatcagctggaccagaaacaagatcctgatcaagctgttcgacaccagatacagcatcagagagaacggccagctgctgaccatcctgagcgtggaggacagcgacgacggcatctactgctgcaccgccaacaacggcgtgggcggcgccgtggagagctgcggcgccctgcaggtgaagatgaagcccaagatcaccagaccccccatcaacgtgaagatcatcgagggcctgaaggccgtgctgccctgcaccaccatgggcaaccccaagcccagcgtgagctggatcaagggcgacagccccctgagagagaacagcagaatcgccgtgctggagagcggcagcctgagaatccacaacgtgcagaaggaggacgccggccagtacagatgcgtggccaagaacagcctgggcaccgcctacagcaaggtggtgaagctggaggtggaggtgttcgccagaatcctgagagcccccgagagccacaacgtgaccttcggcagcttcgtgaccctgcactgcaccgccaccggcatccccgtgcccaccatcacctggatcgagaacggcaacgccgtgagcagcggcagcatccaggagagcgtgaaggacagagtgatcgacagcagactgcagctgttcatcaccaagcccggcctgtacacctgcatcgccaccaacaagcacggcgagaagttcagcaccgccaaggccgccgccaccatcagcatcgccgagatgctgttcatcagcagcttcagcaagccccagaaggacaacaagggctactgcgcccagtacagaggcgaggtgtgcaacgccgtgctggccaaggacgccctggtgttcctgaacaccagctacgccgaccccgaggaggcccaggagctgctggtgcacaccgcctggaacgagctgaaggtggtgagccccgtgtgcagacccgccgccgaggccctgctgtgcaaccacatcttccaggagtgcagccccggcgtggtgcccacccccatccccatctgcagagagtactgcctggccgtgaaggagctgttctgcgccaaggagtggctggtgatggaggagaagacccacagaggcctgtacagaagcgagatgcacctgctgagcgtgcccgagtgcagcaagctgcccagcatgcactgggaccccaccgcctgcgccagactgccccacctggccttcccccccatgaccagcagcaagcccagcgtggacatccccaacctgcccagcagcagcagcagcagcttcagcgtgagccccacctacagcatgaccgtgatcatcagcatcatgagcagcttcgccatcttcgtgctgctgaccatcaccaccctgtactgctgcagaagaagaaagcagtggaagaacaagaagagagagagcgccgccgtgaccctgaccaccctgcccagcgagctgctgctggacagactgcaccccaaccccatgtaccagagaatgcccctgctgctgaaccccaagctgctgagcctggagtaccccagaaacaacatcgagtacgtgagagacatcggcgagggcgccttcggcagagtgttccaggccagagcccccggcctgctgccctacgagcccttcaccatggtggccgtgaagatgctgaaggaggaggccagcgccgacatgcaggccgacttccagagagaggccgccctgatggccgagttcgacaaccccaacatcgtgaagctgctgggcgtgtgcgccgtgggcaagcccatgtgcctgctgttcgagtacatggcctacggcgacctgaacgagttcctgagaagcatgagcccccacaccgtgtgcagcctgagccacagcgacctgagcatgagagcccaggtgagcagccccggccccccccccctgagctgcgccgagcagctgtgcatcgccagacaggtggccgccggcatggcctacctgagcgagagaaagttcgtgcacagagacctggccaccagaaactgcctggtgggcgagaacatggtggtgaagatcgccgacttcggcctgagcagaaacatctacagcgccgactactacaaggccaacgagaacgacgccatccccatcagatggatgccccccgagagcatcttctacaacagatacaccaccgagagcgacgtgtgggcctacggcgtggtgctgtgggagatcttcagctacggcctgcagccctactacggcatggcccacgaggaggtgatctactacgtgagagacggcaacatcctgagctgccccgagaactgccccgtggagctgtacaacctgatgagactgtgctggagcaagctgcccgccgacagacccagcttcaccagcatccacagaatcctggagagaatgtgcgagagagccgagggcaccgtgagcgtgtag

SEQ ID NO: 89614 - DNA, 2610 bp, synthetic construct
  misc_feature 1..2610: note = Description of Artificial Sequence: Synthetic coding sequence
  source 1..2610: mol_type = other DNA
atgagagagctggtgaacatccccctggtgcacatcctgaccctggtggccttcagcggcaccgagaagctgcccaaggcccccgtgatcaccacccccctggagaccgtggacgccctggtggaggaggtggccaccttcatgtgcgccgtggagagctacccccagcccgagatcagctggaccagaaacaagatcctgatcaagctgttcgacaccagatacagcatcagagagaacggccagctgctgaccatcctgagcgtggaggacagcgacgacggcatctactgctgcaccgccaacaacggcgtgggcggcgccgtggagagctgcggcgccctgcaggtgaagatgaagcccaagatcaccagaccccccatcaacgtgaagatcatcgagggcctgaaggccgtgctgccctgcaccaccatgggcaaccccaagcccagcgtgagctggatcaagggcgacagccccctgagagagaacagcagaatcgccgtgctggagagcggcagcctgagaatccacaacgtgcagaaggaggacgccggccagtacagatgcgtggccaagaacagcctgggcaccgcctacagcaaggtggtgaagctggaggtggaggtgttcgccagaatcctgagagcccccgagagccacaacgtgaccttcggcagcttcgtgaccctgcactgcaccgccaccggcatccccgtgcccaccatcacctggatcgagaacggcaacgccgtgagcagcggcagcatccaggagagcgtgaaggacagagtgatcgacagcagactgcagctgttcatcaccaagcccggcctgtacacctgcatcgccaccaacaagcacggcgagaagttcagcaccgccaaggccgccgccaccatcagcatcgccgccttcagcaagccccagaaggacaacaagggctactgcgcccagtacagaggcgaggtgtgcaacgccgtgctggccaaggacgccctggtgttcctgaacaccagctacgccgaccccgaggaggcccaggagctgctggtgcacaccgcctggaacgagctgaaggtggtgagccccgtgtgcagacccgccgccgaggccctgctgtgcaaccacatcttccaggagtgcagccccggcgtggtgcccacccccatccccatctgcagagagtactgcctggccgtgaaggagctgttctgcgccaaggagtggctggtgatggaggagaagacccacagaggcctgtacagaagcgagatgcacctgctgagcgtgcccgagtgcagcaagctgcccagcatgcactgggaccccaccgcctgcgccagactgccccacctggactacaacaaggagaacctgaagaccttcccccccatgaccagcagcaagcccagcgtggacatccccaacctgcccagcagcagcagcagcagcttcagcgtgagccccacctacagcatgaccgtgatcatcagcatcatgagcagcttcgccatcttcgtgctgctgaccatcaccaccctgtactgctgcagaagaagaaagcagtggaagaacaagaagagagagagcgccgccgtgaccctgaccaccctgcccagcgagctgctgctggacagactgcaccccaaccccatgtaccagagaatgcccctgctgctgaaccccaagctgctgagcctggagtaccccagaaacaacatcgagtacgtgagagacatcggcgagggcgccttcggcagagtgttccaggccagagcccccggcctgctgccctacgagcccttcaccatggtggccgtgaagatgctgaaggaggaggccagcgccgacatgcaggccgacttccagagagaggccgccctgatggccgagttcgacaaccccaacatcgtgaagctgctgggcgtgtgcgccgtgggcaagcccatgtgcctgctgttcgagtacatggcctacggcgacctgaacgagttcctgagaagcatgagcccccacaccgtgtgcagcctgagccacagcgacctgagcatgagagcccaggtgagcagccccggccccccccccctgagctgcgccgagcagctgtgcatcgccagacaggtggccgccggcatggcctacctgagcgagagaaagttcgtgcacagagacctggccaccagaaactgcctggtgggcgagaacatggtggtgaagatcgccgacttcggcctgagcagaaacatctacagcgccgactactacaaggccaacgagaacgacgccatccccatcagatggatgccccccgagagcatcttctacaacagatacaccaccgagagcgacgtgtgggcctacggcgtggtgctgtgggagatcttcagctacggcctgcagccctactacggcatggcccacgaggaggtgatctactacgtgagagacggcaacatcctgagctgccccgagaactgccccgtggagctgtacaacctgatgagactgtgctggagcaagctgcccgccgacagacccagcttcaccagcatccacagaatcctggagagaatgtgcgagagagccgagggcaccgtgagcgtgtag

SEQ ID NO: 89615 - DNA, 2352 bp, synthetic construct
  misc_feature 1..2352: note = Description of Artificial Sequence: Synthetic coding sequence
  source 1..2352: mol_type = other DNA
atgagagagctggtgaacatccccctggtgcacatcctgaccctggtggccttcagcggcaccgagaagctgcccaaggcccccgtgatcaccacccccctggagaccgtggacgccctggtggaggaggtggccaccttcatgtgcgccgtggagagctacccccagcccgagatcagctggaccagaaacaagatcctgatcaagctgttcgacaccagatacagcatcagagagaacggccagctgctgaccatcctgagcgtggaggacagcgacgacggcatctactgctgcaccgccaacaacggcgtgggcggcgccgtggagagctgcggcgccctgcaggtgaagatgaagcccaagatcaccagaccccccatcaacgtgaagatcatcgagggcctgaaggccgtgctgccctgcaccaccatgggcaaccccaagcccagcgtgagctggatcaagggcgacagccccctgagagagaacagcagaatcgccgtgctggagagcggcagcctgagaatccacaacgtgcagaaggaggacgccggccagtacagatgcgtggccaagaacagcctgggcaccgcctacagcaaggtggtgaagctggaggtggaggaggagagcgagcccgagcaggacaccaaggtgttcgccagaatcctgagagcccccgagagccacaacgtgaccttcggcagcttcgtgaccctgcactgcaccgccaccggcatccccgtgcccaccatcacctggatcgagaacggcaacgccgtgagcagcggcagcatccaggagagcgtgaaggacagagtgatcgacagcagactgcagctgttcatcaccaagcccggcctgtacacctgcatcgccaccaacaagcacggcgagaagttcagcaccgccaaggccgccgccaccatcagcatcgccgcctggaagaagtactgcctggccgtgaaggagctgttctgcgccaaggagtggctggtgatggaggagaagacccacagaggcctgtacagaagcgagatgcacctgctgagcgtgcccgagtgcagcaagctgcccagcatgcactgggaccccaccgcctgcgccagactgccccacctggccttcccccccatgaccagcagcaagcccagcgtggacatccccaacctgcccagcagcagcagcagcagcttcagcgtgagccccacctacagcatgaccgtgatcatcagcatcatgagcagcttcgccatcttcgtgctgctgaccatcaccaccctgtactgctgcagaagaagaaagcagtggaagaacaagaagagagagagcgccgccgtgaccctgaccaccctgcccagcgagctgctgctggacagactgcaccccaaccccatgtaccagagaatgcccctgctgctgaaccccaagctgctgagcctggagtaccccagaaacaacatcgagtacgtgagagacatcggcgagggcgccttcggcagagtgttccaggccagagcccccggcctgctgccctacgagcccttcaccatggtggccgtgaagatgctgaaggaggaggccagcgccgacatgcaggccgacttccagagagaggccgccctgatggccgagttcgacaaccccaacatcgtgaagctgctgggcgtgtgcgccgtgggcaagcccatgtgcctgctgttcgagtacatggcctacggcgacctgaacgagttcctgagaagcatgagcccccacaccgtgtgcagcctgagccacagcgacctgagcatgagagcccaggtgagcagccccggccccccccccctgagctgcgccgagcagctgtgcatcgccagacaggtggccgccggcatggcctacctgagcgagagaaagttcgtgcacagagacctggccaccagaaactgcctggtgggcgagaacatggtggtgaagatcgccgacttcggcctgagcagaaacatctacagcgccgactactacaaggccaacgagaacgacgccatccccatcagatggatgccccccgagagcatcttctacaacagatacaccaccgagagcgacgtgtgggcctacggcgtggtgctgtgggagatcttcagctacggcctgcagccctactacggcatggcccacgaggaggtgatctactacgtgagagacggcaacatcctgagctgccccgagaactgccccgtggagctgtacaacctgatgagactgtgctggagcaagctgcccgccgacagacccagcttcaccagcatccacagaatcctggagagaatgtgcgagagagccgagggcaccgtgagcgtgtag

SEQ ID NO: 89616 - DNA, 1167 bp, synthetic construct
  misc_feature 1..1167: note = Description of Artificial Sequence: Synthetic coding sequence
  source 1..1167: mol_type = other DNA
atggccgtgagcgtgacccccatcagagacaccaagtggctgaccctggaggtgtgcagagagttccagagaggcacctgcagcagacccgacaccgagtgcaagttcgcccaccccagcaagagctgccaggtggagaacggcagagtgatcgcctgcttcgacagcctgaagggcagatgcagcagagagaactgcaagtacctgcacccccccccccacctgaagacccagctggagatcaacggcagaaacaacctgatccagcagaagaacatggccatgctggcccagcagatgcagctggccaacgccatgatgcccggcgcccccctgcagcccgtgcccatgttcagcgtggcccccagcctggccaccaacgccagcgccgccgccttcaacccctacctgggccccgtgagccccagcctggtgcccgccgagatcctgcccaccgcccccatgctggtgaccggcaaccccggcgtgcccgtgcccgccgccgccgccgccgccgcccagaagctgatgagaaccgacagactggaggtgtgcagagagtaccagagaggcaactgcaacagaggcgagaacgactgcagattcgcccaccccgccgacagcaccatgatcgacaccaacgacaacaccgtgaccgtgtgcatggactacatcaagggcagatgcagcagagagaagtgcaagtacttccacccccccgcccacctgcaggccaagatcaaggccgcccagtaccaggtgaaccaggccgccgccgcccaggccgccgccaccgccgccgccatgacccagagcgccgtgaagagcctgaagagacccctggaggccaccttcgacctgggcatcccccaggccgtgctgccccccctgcccaagagacccgccctggagaagaccaacggcgccaccgccgtgttcaacaccggcatcttccagtaccagcaggccctggccaacatgcagctgcagcagcacaccgccttcctgccccccgtgcccatggtgcacggcgccacccccgccaccgtgagcgccgccaccaccagcgccaccagcgtgcccttcgccgccaccgccaccgccaaccagatccccatcatcagcgccgagcacctgaccagccacaagtacgtgacccagatgtag

SEQ ID NO: 89617 - DNA, 909 bp, synthetic construct
  misc_feature 1..909: note = Description of Artificial Sequence: Synthetic coding sequence
  source 1..909: mol_type = other DNA
atggccgtgagcgtgacccccatcagagacaccaagtggctgaccctggaggtgtgcagagagttccagagaggcacctgcagcagacccgacaccgagtgcaagttcgcccaccccagcaagagctgccaggtggagaacggcagagtgatcgcctgcttcgacagcctgaagggcagatgcagcagagagaactgcaagtacctgcacccccccccccacctgaagacccagctggagatcaacggcagaaacaacctgatccagcagaagaacatggccatgctggcccagcagatgcagctggccaacgccatgatgcccggcgcccccctgcagcccgtggtgtgcagagagtaccagagaggcaactgcaacagaggcgagaacgactgcagattcgcccaccccgccgacagcaccatgatcgacaccaacgacaacaccgtgaccgtgtgcatggactacatcaagggcagatgcagcagagagaagtgcaagtacttccacccccccgcccacctgcaggccaagatcaaggccgcccagtaccaggtgaaccaggccgccgccgcccaggccgccgccaccgccgccgccatgggcatcccccaggccgtgctgccccccctgcccaagagacccgccctggagaagaccaacggcgccaccgccgtgttcaacaccggcatcttccagtaccagcaggccctggccaacatgcagctgcagcagcacaccgccttcctgccccccgtgcccatggtgcacggcgccacccccgccaccgtgagcgccgccaccaccagcgccaccagcgtgcccttcgccgccaccgccaccgccaaccagatccccatcatcagcgccgagcacctgaccagccacaagtacgtgacccagatgtag

SEQ ID NO: 89618 - DNA, 1023 bp, synthetic construct
  misc_feature 1..1023: note = Description of Artificial Sequence: Synthetic coding sequence
  source 1..1023: mol_type = other DNA
atggccgtgagcgtgacccccatcagagacaccaagtggctgaccctggaggtgtgcagagagttccagagaggcacctgcagcagacccgacaccgagtgcaagttcgcccaccccagcaagagctgccaggtggagaacggcagagtgatcgcctgcttcgacagcctgaagggcagatgcagcagagagaactgcaagtacctgcacccccccccccacctgaagacccagctggagatcaacggcagaaacaacctgatccagcagaagaacatggccatgctggcccagcagatgcagctggccaacgccatgatgcccggcgcccccctgcagcccgtgcccatgttcagcgtggcccccagcctggccaccaacgccagcgccgccgccttcaacccctacctgggccccgtgagccccagcctggtgcccgccgagatcctgcccaccgcccccatgctggtgaccggcaaccccggcgtgcccgtgcccgccgccgccgccgccgccgcccagaagctgatgagaaccgacagactggaggtgtgcagagagtaccagagaggcaactgcaacagaggcgagaacgactgcagattcgcccaccccgccgacagcaccatgatcgacaccaacgacaacaccgtgaccgtgtgcatggactacatcaagggcagatgcagcagagagaagtgcaagtacttccacccccccgcccacctgcaggccaagatcaaggccgcccagtaccaggtgaaccaggccgccgccgcccaggccgccgccaccgccgccgccatgttcccctggtgcaccgtgctgagacagcccctgtgcccccagcagcagcacctgccccaggtgttccccagcctgcagcagccccagcccaccagccccatcctggacgccagcaccctgctgggcgccaccagctgccccgccgccgccggcaagatgatccccatcatcagcgccgagcacctgaccagccacaagtacgtgacccagatgtag

SEQ ID NO: 89619 - DNA, 1149 bp, synthetic construct
  misc_feature 1..1149: note = Description of Artificial Sequence: Synthetic coding sequence
  source 1..1149: mol_type = other DNA
atggccgtgagcgtgacccccatcagagacaccaagtggctgaccctggaggtgtgcagagagttccagagaggcacctgcagcagacccgacaccgagtgcaagttcgcccaccccagcaagagctgccaggtggagaacggcagagtgatcgcctgcttcgacagcctgaagggcagatgcagcagagagaactgcaagtacctgcacccccccccccacctgaagacccagctggagatcaacggcagaaacaacctgatccagcagaagaacatggccatgctggcccagcagatgcagctggccaacgccatgatgcccggcgcccccctgcagcccgtgcccatgttcagcgtggcccccagcctggccaccaacgccagcgccgccgccttcaacccctacctgggccccgtgagccccagcctggtgcccgccgagatcctgcccaccgcccccatgctggtgaccggcaaccccggcgtgcccgtgcccgccgccgccgccgccgccgcccagaagctgatgagaaccgacagactggaggtgtgcagagagtaccagagaggcaactgcaacagaggcgagaacgactgcagattcgcccaccccgccgacagcaccatgatcgacaccaacgacaacaccgtgaccgtgtgcatggactacatcaagggcagatgcagcagagagaagtgcaagtacttccacccccccgcccacctgcaggccaagatcaaggccgcccagtaccaggtgaaccaggccgccgccgcccaggccgccgccaccgccgccgccatgggcatcccccaggccgtgctgccccccctgcccaagagacccgccctggagaagaccaacggcgccaccgccgtgttcaacaccggcatcttccagtaccagcaggccctggccaacatgcagctgcagcagcacaccgccttcctgccccccggcagcatcctgtgcatgacccccgccaccagcgtggtgcccatggtgcacggcgccacccccgccaccgtgagcgccgccaccaccagcgccaccagcgtgcccttcgccgccaccgccaccgccaaccagatccccatcatcagcgccgagcacctgaccagccacaagtacgtgacccagatgtag

SEQ ID NO: 89620 - DNA, 1113 bp, synthetic construct
  misc_feature 1..1113: note = Description of Artificial Sequence: Synthetic coding sequence
  source 1..1113: mol_type = other DNA
atggccgtgagcgtgacccccatcagagacaccaagtggctgaccctggaggtgtgcagagagttccagagaggcacctgcagcagacccgacaccgagtgcaagttcgcccaccccagcaagagctgccaggtggagaacggcagagtgatcgcctgcttcgacagcctgaagggcagatgcagcagagagaactgcaagtacctgcacccccccccccacctgaagacccagctggagatcaacggcagaaacaacctgatccagcagaagaacatggccatgctggcccagcagatgcagctggccaacgccatgatgcccggcgcccccctgcagcccgtgcccatgttcagcgtggcccccagcctggccaccaacgccagcgccgccgccttcaacccctacctgggccccgtgagccccagcctggtgcccgccgagatcctgcccaccgcccccatgctggtgaccggcaaccccggcgtgcccgtgcccgccgccgccgccgccgccgcccagaagctgatgagaaccgacagactggaggtgtgcagagagtaccagagaggcaactgcaacagaggcgagaacgactgcagattcgcccaccccgccgacagcaccatgatcgacaccaacgacaacaccgtgaccgtgtgcatggactacatcaagggcagatgcagcagagagaagtgcaagtacttccacccccccgcccacctgcaggccaagatcaaggccgcccagtaccaggtgaaccaggccgccgccgcccaggccgccgccaccgccgccgccatgggcatcccccaggccgtgctgccccccctgcccaagagacccgccctggagaagaccaacggcgccaccgccgtgttcaacaccggcatcttccagtaccagcaggccctggccaacatgcagctgcagcagcacaccgccttcctgccccccgtgcccatggtgcacggcgccacccccgccaccgtgagcgccgccaccaccagcgccaccagcgtgcccttcgccgccaccgccaccgccaaccagatccccatcatcagcgccgagcacctgaccagccacaagtacgtgacccagatgtag

SEQ ID NO: 89621 - DNA, 1029 bp, synthetic construct
  misc_feature 1..1029: note = Description of Artificial Sequence: Synthetic coding sequence
  source 1..1029: mol_type = other DNA
atggccgtgagcgtgacccccatcagagacaccaagtggctgaccctggaggtgtgcagagagttccagagaggcacctgcagcagacccgacaccgagtgcaagttcgcccaccccagcaagagctgccaggtggagaacggcagagtgatcgcctgcttcgacagcctgaagggcagatgcagcagagagaactgcaagtacctgcacccccccccccacctgaagacccagctggagatcaacggcagaaacaacctgatccagcagaagaacatggccatgctggcccagcagatgcagctggccaacgccatgatgcccggcgcccccctgcagcccgtgcccatgttcagcgtggcccccagcctggccaccaacgccagcgccgccgccttcaacccctacctgggccccgtgagccccagcctggtgcccgccgagatcctgcccaccgcccccatgctggtgaccggcaaccccggcgtgcccgtgcccgccgccgccgccgccgccgcccagaagctgatgagaaccgacagactggaggtgtgcagagagtaccagagaggcaactgcaacagaggcgagaacgactgcagattcgcccaccccgccgacagcaccatgatcgacaccaacgacaacaccgtgaccgtgtgcatggactacatcaagggcagatgcagcagagagaagtgcaagtacttccacccccccgcccacctgcaggccaagatcaaggccgcccagtaccaggtgaaccaggccgccgccgcccaggccgccgccaccgccgccgccatgggcatcccccaggccgtgctgccccccctgcccaagagacccgccctggagaagaccaacggcgccaccgccgtgttcaacaccggcatcttccagtaccagcaggccctggccaacatgcagctgcagcagcacaccgccttcctgccccccggcagcatcctgtgcatgacccccgccaccagcgtggacacccacaacatctgcagaaccagcgactag

SEQ ID NO: 89622 - DNA, 1167 bp, synthetic construct; identical to SEQ ID NO: 89616
  misc_feature 1..1167: note = Description of Artificial Sequence: Synthetic coding sequence
  source 1..1167: mol_type = other DNA

SEQ ID NO: 89623 - DNA, 1023 bp, synthetic construct; identical to SEQ ID NO: 89618
  misc_feature 1..1023: note = Description of Artificial Sequence: Synthetic coding sequence
  source 1..1023: mol_type = other DNA

SEQ ID NO: 89624 - DNA, 909 bp, synthetic construct; identical to SEQ ID NO: 89617
  misc_feature 1..909: note = Description of Artificial Sequence: Synthetic coding sequence
  source 1..909: mol_type = other DNA

SEQ ID NO: 89625 - DNA, 1029 bp, synthetic construct; identical to SEQ ID NO: 89621
  misc_feature 1..1029: note = Description of Artificial Sequence: Synthetic coding sequence
  source 1..1029: mol_type = other DNA

SEQ ID NO: 89626 - DNA, 1032 bp, synthetic construct
  misc_feature 1..1032: note = Description of Artificial Sequence: Synthetic coding sequence
  source 1..1032: mol_type = other DNA
atgggcagatgcagcagagagaactgcaagtacctgcacccccccccccacctgaagacccagctggagatcaacggcagaaacaacctgatccagcagaagaacatggccatgctggcccagcagatgcagctggccaacgccatgatgcccggcgcccccctgcagcccgtgcccatgttcagcgtggcccccagcctggccaccaacgccagcgccgccgccttcaacccctacctgggccccgtgagccccagcctggtgcccgccgagatcctgcccaccgcccccatgctggtgaccggcaaccccggcgtgcccgtgcccgccgccgccgccgccgccgcccagaagctgatgagaaccgacagactggaggtgtgcagagagtaccagagaggcaactgcaacagaggcgagaacgactgcagattcgcccaccccgccgacagcaccatgatcgacaccaacgacaacaccgtgaccgtgtgcatggactacatcaagggcagatgcagcagagagaagtgcaagtacttccacccccccgcccacctgcaggccaagatcaaggccgcccagtaccaggtgaaccaggccgccgccgcccaggccgccgccaccgccgccgccatgacccagagcgccgtgaagagcctgaagagacccctggaggccaccttcgacctgggcatcccccaggccgtgctgccccccctgcccaagagacccgccctggagaagaccaacggcgccaccgccgtgttcaacaccggcatcttccagtaccagcaggccctggccaacatgcagctgcagcagcacaccgccttcctgccccccggcagcatcctgtgcatgacccccgccaccagcgtggtgcccatggtgcacggcgccacccccgccaccgtgagcgccgccaccaccagcgccaccagcgtgcccttcgccgccaccgccaccgccaaccagatccccatcatcagcgccgagcacctgaccagccacaagtacgtgacccagatgtag

SEQ ID NO: 89627 - DNA, 945 bp, synthetic construct
  misc_feature 1..945: note = Description of Artificial Sequence: Synthetic coding sequence
  source 1..945: mol_type = other DNA
atggccgtgagcgtgacccccatcagagacaccaagtggctgaccctggaggtgtgcagagagttccagagaggcacctgcagcagacccgacaccgagtgcaagttcgcccaccccagcaagagctgccaggtggagaacggcagagtgatcgcctgcttcgacagcctgaagggcagatgcagcagagagaactgcaagtacctgcacccccccccccacctgaagacccagctggagatcaacggcagaaacaacctgatccagcagaagaacatggccatgctggcccagcagatgcagctggccaacgccatgatgcccggcgcccccctgcagcccgtggtgtgcagagagtaccagagaggcaactgcaacagaggcgagaacgactgcagattcgcccaccccgccgacagcaccatgatcgacaccaacgacaacaccgtgaccgtgtgcatggactacatcaagggcagatgcagcagagagaagtgcaagtacttccacccccccgcccacctgcaggccaagatcaaggccgcccagtaccaggtgaaccaggccgccgccgcccaggccgccgccaccgccgccgccatgggcatcccccaggccgtgctgccccccctgcccaagagacccgccctggagaagaccaacggcgccaccgccgtgttcaacaccggcatcttccagtaccagcaggccctggccaacatgcagctgcagcagcacaccgccttcctgccccccggcagcatcctgtgcatgacccccgccaccagcgtggtgcccatggtgcacggcgccacccccgccaccgtgagcgccgccaccaccagcgccaccagcgtgcccttcgccgccaccgccaccgccaaccagatccccatcatcagcgccgagcacctgaccagccacaagtacgtgacccagatgtag

SEQ ID NO: 89628 - DNA, 1005 bp, synthetic construct
  misc_feature 1..1005: note = Description of Artificial Sequence: Synthetic coding sequence
  source 1..1005: mol_type = other DNA
atgaccgccgtgaacgtggccctgatcagagacaccaagtggctgaccctggaggtgtgcagagagttccagagaggcacctgcagcagagccgacgccgactgcaagttcgcccacccccccagagtgtgccacgtggagaacggcagagtggtggcctgcttcgacagcctgaagggcagatgcaccagagagaactgcaagtacctgcacccccccccccacctgaagacccagctggagatcaacggcagaaacaacctgatccagcagaagaccgccgccgccatgttcgcccagcagatgcagctgatgctgcagaacgcccagatgagcagcctgggcagcttccccatgacccccagcatccccgccaacccccccatggccttcaacccctacatcccccaccccggcatgggcctggtgcccgccgagctggtgcccaacacccccgtgctgatccccggcaacccccccctggccatgcccggcgccgtgggccccaagctgatgagaagcgacaagctggaggtgtgcagagagttccagagaggcaactgcaccagaggcgagaacgactgcagatacgcccaccccaccgacgccagcatgatcgaggccagcgacaacaccgtgaccatctgcatggactacatcaagggcagatgcagcagagagaagtgcaagtacttccacccccccgcccacctgcaggccagactgaaggccgcccaccaccagatgaaccacagcgccgccagcgccatggccctgaccaacctgcagctgccccagcccgccttcatccccgccggccccatcctgtgcatggcccccgccagcaacatcgtgcccatgatgcacggcgccacccccaccaccgtgagcgccgccaccacccccgccaccagcgtgcccttcgccgcccccaccaccggcaaccagatcccccagctgagcatcgacgagctgaacagcagcatgttcgtgagccagatgtag

SEQ ID NO: 89629 - DNA, 777 bp, synthetic construct
  misc_feature 1..777: note = Description of Artificial Sequence: Synthetic coding sequence
  source 1..777: mol_type = other DNA
atgttcgcccagcagatgcagctgatgctgcagaacgcccagatgagcagcctgggcagcttccccatgacccccagcatccccgccaacccccccatggccttcaacccctacatcccccaccccggcatgggcctggtgcccgccgagctggtgcccaacacccccgtgctgatccccggcaacccccccctggccatgcccggcgccgtgggccccaagctgatgagaagcgacaagctggaggtgtgcagagagttccagagaggcaactgcaccagaggcgagaacgactgcagatacgcccaccccaccgacgccagcatgatcgaggccagcgacaacaccgtgaccatctgcatggactacatcaagggcagatgcagcagagagaagtgcaagtacttccacccccccgcccacctgcaggccagactgaaggccgcccaccaccagatgaaccacagcgccgccagcgccatggccctgcagcccggcaccctgcagctgatccccaagagaagcgccctggagaagcccaacggcgccacccccgtgttcaaccccaccgtgttccactgccagcaggccctgaccaacctgcagctgccccagcccgccttcatccccgccggccccatcctgtgcatggcccccgccagcaacatcgtgcccatgatgcacggcgccacccccaccaccgtgagcgccgccaccacccccgccaccagcgtgcccttcgccgcccccaccaccggcaaccagctgaagttctag

SEQ ID NO: 89630 - DNA, 915 bp, synthetic construct
  misc_feature 1..915: note = Description of Artificial Sequence: Synthetic coding sequence
  source 1..915: mol_type = other DNA
atggagagagccagcaagaacctgaagggcagatgcaccagagagaactgcaagtacctgcacccccccccccacctgaagacccagctggagatcaacggcagaaacaacctgatccagcagaagaccgccgccgccatgttcgcccagcagatgcagctgatgctgcagaacgcccagatgagcagcctgggcagcttccccatgacccccagcatccccgccaacccccccatggccttcaacccctacatcccccaccccggcatgggcctggtgcccgccgagctggtgcccaacacccccgtgctgatccccggcaacccccccctggccatgcccggcgccgtgggccccaagctgatgagaagcgacaagctggaggtgtgcagagagttccagagaggcaactgcaccagaggcgagaacgactgcagatacgcccaccccaccgacgccagcatgatcgaggccagcgacaacaccgtgaccatctgcatggactacatcaagggcagatgcagcagagagaagtgcaagtacttccacccccccgcccacctgcaggccagactgaaggccgcccaccaccagatgaaccacagcgccgccagcgccatggccctgcagcccggcaccctgcagctgatccccaagagaagcgccctggagaagcccaacggcgccacccccgtgttcaaccccaccgtgttccactgccagcaggccctgaccaacctgcagctgccccagcccgccttcatccccgccggccccatcctgtgcatggcccccgccagcaacatcgtgcccatgatgcacggcgccacccccaccaccgtgagcgccgccaccacccccgccaccagcgtgcccttcgccgcccccaccaccggcaaccagctgaagttctag

SEQ ID NO: 89631 - DNA, 1065 bp, synthetic construct
  misc_feature 1..1065: note = Description of Artificial Sequence: Synthetic coding sequence
  source 1..1065: mol_type = other DNA
atgaccgccgtgaacgtggccctgatcagagacaccaagtggctgaccctggaggtgtgcagagagttccagagaggcacctgcagcagagccgacgccgactgcaagttcgcccacccccccagagtgtgccacgtggagaacggcagagtggtggcctgcttcgacagcctgaagggcagatgcaccagagagaactgcaagtacctgcacccccccccccacctgaagacccagctggagatcaacggcagaaacaacctgatccagcagaagaccgccgccgccatgttcgcccagcagatgcagctgatgctgcagaacgcccagatgagcagcctgggcagcttccccatgacccccagcatccccgccaacccccccatggccttcaacccctacatcccccaccccggcatgggcctggtgcccgccgagctggtgcccaacacccccgtgctgatccccggcaacccccccctggccatgcccggcgccgtgggccccaagctgatgagaagcgacaagctggaggtgtgcagagagttccagagaggcaactgcaccagaggcgagaacgactgcagatacgcccaccccaccgacgccagcatgatcgaggccagcgacaacaccgtgaccatctgcatggactacatcaagggcagatgcagcagagagaagtgcaagtacttccacccccccgcccacctgcaggccagactgaaggccgcccaccaccagatgaaccacagcgccgccagcgccatggccctgcagcccggcaccctgcagctgatccccaagagaagcgccctggagaagcccaacggcgccacccccgtgttcaaccccaccgtgttccactgccagcaggccctgaccaacctgcagctgccccagcccgccttcatccccgccggccccatcctgtgcatggcccccgccagcaacatcgtgcccatgatgcacggcgccacccccaccaccgtgagcgccgccaccacccccgccaccagcgtgcccttcgccgcccccaccaccggcaaccagctgaagttctag

SEQ ID NO: 89632 - DNA, 1029 bp, synthetic construct
  misc_feature 1..1029: note = Description of Artificial Sequence: Synthetic coding sequence
  source 1..1029: mol_type = other DNA
atgaccgccgtgaacgtggccctgatcagagacaccaagtggctgaccctggaggtgtgcagagagttccagagaggcacctgcagcagagccgacgccgactgcaagttcgcccacccccccagagtgtgccacgtggagaacggcagagtggtggcctgcttcgacagcctgaagggcagatgcaccagagagaactgcaagtacctgcacccccccccccacctgaagacccagctggagatcaacggcagaaacaacctgatccagcagaagaccgccgccgccatgttcgcccagcagatgcagctgatgctgcagaacgcccagatgagcagcctgggcagcttccccatgacccccagcatccccgccaacccccccatggccttcaacccctacatcccccaccccggcatgggcctggtgcccgccgagctggtgcccaacacccccgtgctgatccccggcaacccccccctggccatgcccggcgccgtgggccccaagctgatgagaagcgacaagctggaggtgtgcagagagttccagagaggcaactgcaccagaggcgagaacgactgcagatacgcccaccccaccgacgccagcatgatcgaggccagcgacaacaccgtgaccatctgcatggactacatcaagggcagatgcagcagagagaagtgcaagtacttccacccccccgcccacctgcaggccagactgaaggccgcccaccaccagatgaaccacagcgccgccagcgccatggccctgcagcccggcaccctgcagctgatccccaagagaagcgccctggagaagcccaacggcgccacccccgtgttcaaccccaccgtgttccactgccagcaggccctgaccaacctgcagctgccccagcccgccttcatccccgccgtgcccatgatgcacggcgccacccccaccaccgtgagcgccgccaccacccccgccaccagcgtgcccttcgccgcccccaccaccggcaaccagctgaagttctag

SEQ ID NO: 89633 - DNA, 777 bp, synthetic construct; identical to SEQ ID NO: 89629
  misc_feature 1..777: note = Description of Artificial Sequence: Synthetic coding sequence
  source 1..777: mol_type = other DNA

SEQ ID NO: 89634 - DNA, 672 bp, synthetic construct
  misc_feature 1..672: note = Description of Artificial Sequence: Synthetic coding sequence
  source 1..672: mol_type = other DNA
atgttcgcccagcagatgcagctgatgctgcagaacgcccagatgagcagcctgggcagcttccccatgacccccagcatccccgccaacccccccatggccttcaacccctacatcccccaccccggcatgggcctggtgcccgccgagctggtgcccaacacccccgtgctgatccccggcaacccccccctggccatgcccggcgccgtgggccccaagctgatgagaagcgacaagctggaggtgtgcagagagttccagagaggcaactgcaccagaggcgagaacgactgcagatacgcccaccccaccgacgccagcatgatcgaggccagcgacaacaccgtgaccatctgcatggactacatcaagggcagatgcagcagagagaagtgcaagtacttccacccccccgcccacctgcaggccagactgaaggccgcccaccaccagatgaaccacagcgccgccagcgccatggccctgcagcccggcaccctgcagctgatccccaagagaagcgccctggagaagcccaacggcgccacccccgtgttcaaccccaccgtgttccactgccagcaggccctgaccaacctgcagctgccccagcccgccttcatccccgccggccccatcctgtgcatggcccccgccagcaacatctag

SEQ ID NO: 89635 - DNA, 729 bp, synthetic construct
  misc_feature 1..729: note = Description of Artificial Sequence: Synthetic coding sequence
  source 1..729: mol_type = other DNA
atgttcgcccagcagatgcagctgatgctgcagaacgcccagatgagcagcctgggcagcttccccatgacccccagcatccccgccaacccccccatggccttcaacccctacatcccccaccccggcatgggcctggtgcccgccgagctggtgcccaacacccccgtgctgatccccggcaacccccccctggccatgcccggcgccgtgggccccaagctgatgagaagcgacaagctggaggtgtgcagagagttccagagaggcaactgcaccagaggcgagaacgactgcagatacgcccaccccaccgacgccagcatgatcgaggccagcgacaacaccgtgaccatctgcatggactacatcaagggcagatgcagcagagagaagtgcaagtacttccacccccccgcccacctgcaggccagactgaaggccgcccaccaccagatgaaccacagcgccgccagcgccatggccctgcagcccggcaccctgcagctgatccccaagagaagcgccctggagaagcccaacggcgccacccccgtgttcaaccccaccgtgttccactgccagcaggccctgaccaacctgcagctgccccagcccgccttcatccccgccggccccatcctgtgcatggcccccgccagcaacatcgtgcccatgatgcacggcgccacccccaccaccgtgagcgccgccaccacccccgcctag

SEQ ID NO: 89636 - DNA, 453 bp, synthetic construct
  misc_feature 1..453: note = Description of Artificial Sequence: Synthetic coding sequence
  source 1..453: mol_type = other DNA
atcaagggcagatgcagcagagagaagtgcaagtacttccacccccccgcccacctgcaggccagactgaaggccgcccaccaccagatgaaccacagcgccgccagcgccatggccctgcagcccggcaccctgcagctgatccccaagagaagcgccctggagaagcccaacggcgccacccccgtgttcaaccccaccgtgttccactgccagcaggccctgaccaacctgcagctgccccagcccgccttcatccccgccggccccatcctgtgcatggcccccgccagcaacatcgtgcccatgatgcacggcgccacccccaccaccgtgagcgccgccaccacccccgccaccagcgtgcccttcgccgcccccaccaccggcaaccagatcccccagctgagcatcgacgagctgaacagcagcatgttcgtgagccagatgtag

SEQ ID NO: 89637 - DNA, 879 bp, synthetic construct
  misc_feature 1..879: note = Description of Artificial Sequence: Synthetic coding sequence
  source 1..879: mol_type = other DNA
atggagagagccagcaagaacctgaagggcagatgcaccagagagaactgcaagtacctgcacccccccccccacctgaagacccagctggagatcaacggcagaaacaacctgatccagcagaagaccgccgccgccatgttcgcccagcagatgcagctgatgctgcagaacgcccagatgagcagcctgggcagcttccccatgacccccagcatccccgccaacccccccatggccttcaacccctacatcccccaccccggcatgggcctggtgcccgccgagctggtgcccaacacccccgtgctgatccccggcaacccccccctggccatgcccggcgccgtgggccccaagctgatgagaagcgacaagctggaggtgtgcagagagttccagagaggcaactgcaccagaggcgagaacgactgcagatacgcccaccccaccgacgccagcatgatcgaggccagcgacaacaccgtgaccatctgcatggactacatcaagggcagatgcagcagagagaagtgcaagtacttccacccccccgcccacctgcaggccagactgaaggccgcccaccaccagatgaaccacagcgccgccagcgccatggccctgcagcccggcaccctgcagctgatccccaagagaagcgccctggagaagcccaacggcgccacccccgtgttcaaccccaccgtgttccactgccagcaggccctgaccaacctgcagctgccccagcccgccttcatccccgccgtgcccatgatgcacggcgccacccccaccaccgtgagcgccgccaccacccccgccaccagcgtgcccttcgccgcccccaccaccggcaaccagctgaagttctag

SEQ ID NO: 89638 - DNA, 1377 bp, synthetic construct
  misc_feature 1..1377: note = Description of Artificial Sequence: Synthetic coding sequence
  source 1..1377: mol_type = other DNA
atggagctggagaagagagagaagagaagcctgctgaacaagaacctggaggagaagctgaccgtgagcgccggcggcagcgaggccaagcccctgatcttcaccttcgtgcccaccgtgagaagactgcccacccacacccagctggccgacaccagcaagttcctggtgaagatccccgaggagagcagcgacaagagccccgagaccgtgaacagaagcaagagcaacgactacctgaccctgaacgccggcagccagcaggagagagaccaggccaagctgacctgccccagcgaggtgagcggcaccatcctgcaggagagagagttcgaggccaacaagctgcagggcatgcagcagagcgacctgttcaaggccgagtacgtgctgatcgtggacagcgagggcgaggacgaggccgccagcagaaaggtggagcagggcccccccggcggcatcggcaccgccgccgtgagacccaagagcctggccatcagcagcagcctggtgagcgacgtggtgagacccaagacccagggcaccgacctgaagaccagcagccaccccgagatgctgcacggcatggccccccagcagaagcacggccagcagtacaagaccaagagcagctacaaggccttcgccgccatccccaccaacaccctgctgctggagcagaaggccctggacgagcccgccaagaccgagagcgtgagcaaggacaacaccctggagccccccgtggagctgtacttccccgcccagctgagacagcagaccgaggagctgtgcgccaccatcgacaaggtgctgcaggacagcctgagcatgcacagcagcgacagccccagcagaagccccaagaccctgctgggcagcgacaccgtgaagacccccaccaccctgcccagagccgccggcagagagaccaagtacgccaacctgagcagccccagcagcaccgtgagcgagagccagctgaccaagcccggcgtgatcagacccgtgcccgtgaagagcagaatcctgctgaagaaggaggaggaggtgtacgagcccaaccccttcagcaagtacctggaggacaacagcgacctgttcagcgagcaggacgtgaccgtgccccccaagcccgtgagcctgcaccccctgtaccagaccaagctgtacccccccgccaagagcctgctgcacccccagaccctgagccacgccgactgcctggcccccggccccttcagccacctgagcttcagcctgagcgacgagcaggagaacagccacaccctgctgagccacaacgcctgcaacaagctgagccaccccatggtggccatccccgagcacgaggccctggacagcaaggagcagtag

SEQ ID NO: 89639 - DNA, 873 bp, synthetic construct
  misc_feature 1..873: note = Description of Artificial Sequence: Synthetic coding sequence
  source 1..873: mol_type = other DNA
atgaccagctgcatcctgagcggcagcatccagaccaccccccaggtgagcgccggcggcagcgaggccaagcccctgatcttcaccttcgtgcccaccgtgagaagactgcccacccacacccagctggccgacaccagcaagttcctggtgaagatccccgaggagagcagcgacaagagccccgagaccgtgaacagaagcaagagcaacgactacctgaccctgaacgccggcagccagcaggagagagaccaggccaagctgacctgccccagcgaggtgagcggcaccatcctgcaggagagagagttcgaggccaacaagctgcagggcatgcagcagagcgacctgttcaaggccgagtacgtgctgatcgtggacagcgagggcgaggacgaggccgccagcagaaaggtggagcagggcccccccggcggcatcggcaccgccgccgtgagacccaagagcctggccatcagcagcagcctggtgagcgacgtggtgagacccaagacccagggcaccgacctgaagaccagcagccaccccgagatgctgcacggcatggccccccagcagaagcacggccagacccccaccaccctgcccagagccgccggcagagagaccaagtacgccaacctgagcagccccagcagcaccgtgagcgagagccagctgaccaagcccggcgtgatcagacccgtgcccgtgaagagcagaatcctgctgaagaaggaggaggaggtgtacgagcccaaccccttcagcaagtacctggaggacaacagcgacctgttcagcgagcagctgagccaccccatggtggccatccccgagcacgaggccctggacagcaaggagcagtag

SEQ ID NO: 89640 - DNA, 705 bp, synthetic construct
  misc_feature 1..705: note = Description of Artificial Sequence: Synthetic coding sequence
  source 1..705: mol_type = other DNA
atgtgcagctggtacctgggcttcgagtgcagcagcaagagcaacgactacctgaccctgaacgccggcagccagcaggagagagaccaggccaagctgacctgccccagcgaggtgagcggcaccatcctgcaggagagagagttcgaggccaacaagctgcagggcatgcagcagagcgacctgttcaaggccgagtacgtgctgatcgtggacagcgagggcgaggacgaggccgccagcagaaaggtggagcagggcccccccggcggcatcggcaccgccgccgtgagacccaagagcctggccatcagcagcagcctggtgagcgacgtggtgagacccaagacccagggcaccgacctgaagaccagcagccaccccgagatgctgcacggcatggccccccagcagaagcacggccagacccccaccaccctgcccagagccgccggcagagagaccaagtacgccaacctgagcagccccagcagcaccgtgagcgagagccagctgaccaagcccggcgtgatcagacccgtgcccgtgaagagcagaatcctgctgaagaaggaggaggaggtgtacgagcccaaccccttcagcaagtacctggaggacaacagcgacctgttcagcgagcagctgagccaccccatggtggccatccccgagcacgaggccctggacagcaaggagcagtag

SEQ ID NO: 89641 - DNA, 489 bp, synthetic construct
  misc_feature 1..489: note = Description of Artificial Sequence: Synthetic coding sequence
  source 1..489: mol_type = other DNA
atgcagcagagcgacctgttcaaggccgagtacgtgctgatcgtggacagcgagggcgaggacgaggccgccagcagaaaggtggagcagggcccccccggcggcatcggcaccgccgccgtgagacccaagagcctggccatcagcagcagcctggtgagcgacgtggtgagacccaagacccagggcaccgacctgaagaccagcagccaccccgagatgctgcacggcatggccccccagcagaagcacggccagcagtacaagaccaagagcagctacaaggccttcgccgccatccccaccaacaccctgctgctggagcagaaggccctggacgagcccgccaagaccgagagcgtgagcaaggacaacaccctggagccccccgtggagacccccaccaccctgcccagagccgccggcagagagaccaagtacgccaacctgagcagccccagcagcaccgtgagcgagagccagctgtag

SEQ ID NO: 89642 - DNA, 2208 bp, synthetic construct
  misc_feature 1..2208: note = Description of Artificial Sequence: Synthetic coding sequence
  source 1..2208: mol_type = other DNA
atggccgccggcggcgccgtggccgccgcccccgagtgcagactgctgccctacgccctgcacaagtggagcagcttcagcagcacctacctgcccgagaacatcctggtggacaagcccaacgaccagagcagcagatggagcagcgagagcaactaccccccccagtacctgatcctgaagctggagagacccgccatcgtgcagaacatcaccttcggcaagtacgagaagacccacgtgtgcaacctgaagaagttcaaggtgttcggcggcatgaacgaggagaacatgaccgagctgctgagcagcggcctgaagaacgactacaacaaggagaccttcaccctgaagcacaagatcgacgagcagatgttcccctgcagattcatcaagatcgtgcccctgctgagctggggccccagcttcaacttcagcatctggtacgtggagctgagcggcatcgacgaccccgacatcgtgcagccctgcctgaactggtacagcaagtacagagagcaggaggccatcagactgtgcctgaagcacttcagacagcacaactacaccgaggccttcgagagcctgcagaagaagaccaagatcgccctggagcaccccatgctgaccgacatccacgacaagctggtgctgaagggcgacttcgacgcctgcgaggagctgatcgagaaggccgtgaacgacggcctgttcaaccagtacatcagccagcaggagtacaagcccagatggagccagatcatccccaagagcaccaagggcgacggcgaggacaacagacccggcatgagaggcggccaccagatggtgatcgacgtgcagaccgagaccgtgtacctgttcggcggctgggacggcacccaggacctggccgacttctgggcctacagcgtgaaggagaaccagtggacctgcatcagcagagacaccgagaaggagaacggccccagcgccagaagctgccacaagatgtgcatcgacatccagagaagacagatctacaccctgggcagatacctggacagcagcgtgagaaacagcaagagcctgaagagcgacttctacagatacgacatcgacaccaacacctggatgctgctgagcgaggacaccgccgccgacggcggccccaagctggtgttcgaccaccagatgtgcatggacagcgagaagcacatgatctacaccttcggcggcagaatcctgacctgcaacggcagcgtggacgacagcagagccagcgagccccagttcagcggcctgttcgccttcaactgccagtgccagacctggaagctgctgagagaggacagctgcaacgccggccccgaggacatccagagcagaatcggccactgcatgctgttccacagcaagaacagatgcctgtacgtgttcggcggccagagaagcaagacctacctgaacgacttcttcagctacgacgtggacagcgaccacgtggacatcatcagcgacggcaccaagaaggacagcggcatggtgcccatgaccggcttcacccagagagccaccatcgaccccgagctgaacgagatccacgtgctgagcggcctgagcaaggacaaggagaagagagaggagaacgtgagaaacagcttctggatctacgacatcgtgagaaacagctggagctgcgtgtacaagaacgaccaggccgccaaggacaaccccaccaagagcctgcaggaggaggagccctgccccagattcgcccaccagctggtgtacgacgagctgcacaaggtgcactacctgttcggcggcaaccccggcaagagctgcagccccaagatgagactggacgacttctggagcctgaagctgtgcagacccagcaaggactacctgctgagacactgcaagtacctgatcagaaagcacagattcgaggagaaggcccaggtggaccccctgagcgccctgaagtacctgcagaacgacctgtacatcaccgtggaccacagcgaccccgaggagaccaaggagttccagctgctggccagcgccctgttcaagagcggcagcgacttcaccgccctgggcttcagcgacgtggaccacacctacgcccagagaacccagctgttcgacaccctggtgaacttcttccccgacagcatgaccccccccaagggcaacctggtggacctgatcaccctgtag

SEQ ID NO: 89643 - DNA, 558 bp, synthetic construct
  misc_feature 1..558: note = Description of Artificial Sequence: Synthetic coding sequence
  source 1..558: mol_type = other DNA
atgaccggcttcacccagagagccaccatcgaccccgagctgaacgagatccacgtgctgagcggcctgagcaaggacaaggagaagagagaggagaacgtgagaaacagcttctggatctacgacatcgtgagaaacagctggagctgcgtgtacaagaacgaccaggccgccaaggacaaccccaccaagagcctgcaggaggaggagccctgccccagattcgcccaccagctggtgtacgacgagctgcacaaggtgcactacctgttcggcggcaaccccggcaagagctgcagccccaagatgagactggacgacttctggagcctgaagctgtgcagacccagcaaggactacctgctgagacactgcaagtacctgatcagaaagcacagattcgaggagaaggcccaggtggaccccctgagcgccctgaagtacctgcagaacgacctgtacatcaccgtggaccacagcgaccccgaggagaccaaggaggccttcctgatgtggatcacccccatgctgaaggagctgagcagcctgaccccctag

SEQ ID NO: 89644 - DNA, 3060 bp, synthetic construct
  misc_feature 1..3060: note = Description of Artificial Sequence: Synthetic coding sequence
  source 1..3060: mol_type = other DNA
atgatggccgccgccgccgccgccgccgccggcagcagcagcagcggcggcggcggcggcggcagcggcagcagcagcagcagcagcgacaccagcagcaccggcgaggaggagagaatgagaagactgttccagacctgcgacggcgacggcgacggctacatcagcagaaacgacctgctgatggtgtgcagacagctgaacatggaggagagcgtggccgagatcatgaaccagctgggcgccgacgagaacggcaagatcagcttccaggacttcaccagatgcagaatgcagctggtgagagagatcagaaaggaggaggtggacctgagcgccaagagcgacaacagctgcaccaagaagctgagagacagaatcgccagctggcccaccagcagcgacaacagcctgggcgccctgagcgccgccagagagagctgggagtacgacagcggcgccagagacctgcagagccccgacgtgcagagccagagcgccctgcagaagctgctggagtacggcggcagcagcctgcaccagcaggccgccctgcacaagctgctgacccagagcccccacatcggcaacagcgtgggcggcagctacctggagctggccaacaccctgcacagcgccgccctggccagcctgaagggcgacatcgtggagctgaacaagagactgcagcagaccgagagagagagagacctgctggagaagaagctggccaaggcccagtgcgagcagagccacctgatgagagagcacgaggacgtgcaggagagaaccaccctgagatacgaggagagaatcaccgagctgcacagcgtgatcgccgagctgaacaagaagatcgacagactgcagggcaccaccatcagagaggaggacgagtacagcgagctgagaagcgagctgagccagagccagcacgaggtgaacgaggacagcagaagcatggaccaggaccagaccagcgtgagcatccccgagaaccagagcaccatggtgaccgccgacatggacaactgcagcgacctgaacagcgagctgcagagagtgctgaccggcctggagaacgtggtgtgcggcagaaagaagagcagctgcagcctgagcgtggccgaggtggacaagcacatcgagcagctgaccaccgccagcgagcactgcgacctggccatcaagaccgtggaggagatcgagggcgtgctgggcagagacctgtaccccaacctggccgaggagagaagcagatgggagaaggagctggccggcctgagagaggagaacgagagcctgaccgccatgctgtgcagcaaggaggaggagctgaacagaaccaaggccaccatgaacgccatcagagaggagagagacagactgagaagaagagtgagagagctgcagaccagactgcagagcgtgcaggccaccggccccagcagccccggcagactgaccagcaccaacagacccatcaaccccagcaccggcgagctgagcaccagcagcagcagcaacgacatccccatcgccaagatcgccgagagagtgaagctgagcaagaccagaagcgagagcagcagcagcgacagacccgtgctgggcagcgagatcagcagcatcggcgtgagcagcagcgtggccgagcacctggcccacagcctgcaggactgcagcaacatccaggagatcttccagaccctgtacagccacggcagcgccatcagcgagagcaagatcagagagttcgaggtggagaccgagagactgaacagcagaatcgagcacctgaagagccagaacgacctgctgaccatcaccctggaggagtgcaagagcaacgccgagagaatgagcatgctggtgggcaagtacgagagcaacgccaccgccctgagactggccctgcagtacagcgagcagtgcatcgaggcctacgagctgctgctggccctggccgagagcgagcagagcctgatcctgggccagttcagagccgccggcgtgggcagcagccccggcgaccagagcggcgacgagaacatcacccagatgctgaagagagcccacgactgcagaaagaccgccgagaacgccgccaaggccctgctgatgaagctggacggcagctgcggcggcgccttcgccgtggccggctgcagcgtgcagccctgggagagcctgagcagcaacagccacaccagcaccaccagcagcaccgccagcagctgcgacaccgagttcaccaaggaggacgagcagagactgaaggactacatccagcagctgaagaacgacagagccgccgtgaagctgaccatgctggagctggagagcatccacatcgaccccctgagctacgacgtgaagcccagaggcgacagccagagactggacctggagaacgccgtgctgatgcaggagctgatggccatgaaggaggagatggccgagctgaaggcccagctgtacctgctggagaaggagaagaaggccctggagctgaagctgagcaccagagaggcccaggagcaggcctacctggtgcacatcgagcacctgaagagcgaggtggaggagcagaaggagcagagaatgagaagcctgagcagcaccagcagcggcagcaaggacaagcccggcaaggagtgcgccgacgccgccagccccgccctgagcctggccgagctgagaaccacctgcagcgagaacgagctggccgccgagttcaccaacgccatcagaagagagaagaagctgaaggccagagtgcaggagctggtgagcgccctggagagactgaccaagagcagcgagatcagacaccagcagagcgccgagttcgtgaacgacctgaagagagccaacagcaacctggtggccgcctacgagaaggccaagaagaagcaccagaacaagctgaagaagctggagagccagatgatggccatggtggagagacacgagacccaggtgagaatgctgaagcagagaatcgccctgctggaggaggagaacagcagaccccacaccaacgagaccagcctgtag

SEQ ID NO: 89645 - DNA, 564 bp, synthetic construct
  misc_feature 1..564: note = Description of Artificial Sequence: Synthetic coding sequence
  source 1..564: mol_type = other DNA
atgagcggcggcggcaccgagacccccgtgggctgcgaggccgcccccggcggcggcagcaagaagagagacagcctgggcaccgccggcagcgcccacctgatcatcaaggacctgggcgagatccacagcagactgctggaccacagacccgtgatccagggcgagaccagatacttcgtgaaggagttcgaggagaagagaggcctgagagagatgagagtgctggagaacctgaagaacatgatccacgagaccaacgagcacaccctgcccaagtgcagagacaccatgagagacagcctgagccaggtgctgcagagactgcaggccgccaacgacagcgtgtgcagactgcagcagagagagcaggagagaaagaagatccacagcgaccacctggtggccagcgagaagcagcacatgctgcagtgggacaacttcatgaaggagcagcccaacaagagagccgaggtggacgaggagcacagaaaggccatggagagactgaaggagcagtacgccgagatggagaaggacctggccaagttcagcaccttctag

SEQ ID NO: 89646 - DNA, 372 bp, synthetic construct
  misc_feature 1..372: note = Description of Artificial Sequence: Synthetic coding sequence
  source 1..372: mol_type = other DNA
atggagaagagaggcctgagagagatgagagtgctggagaacctgaagaacatgatccacgagaccaacgagcacaccctgcccaagtgcagagacaccatgagagacagcctgagccaggtgctgcagagactgcaggccgccaacgacagcgtgtgcagactgcagcagagagagcaggagagaaagaagatccacagcgaccacctggtggccagcgagaagcagcacatgctgcagtgggacaacttcatgaaggagcagcccaacaagagagccgaggtggacgaggagcacagaaaggccatggagagactgaaggagcagtacgccgagatggagaaggacctggccaagttcagcaccttctag

SEQ ID NO: 89647 - DNA, 3987 bp, synthetic construct
  misc_feature 1..3987: note = Description of Artificial Sequence: Synthetic coding sequence
  source 1..3987: mol_type = other DNA
atggagagcagagaccccgcccagcccatgagccccggcgaggccacccagagcggcgccagacccgccgacagatacggcctgctgaagcacagcagagagttcctggacttcttctgggacatcgccaagcccgagcaggagaccagactggccgccaccgagaagctgctggagtacctgagaggcagacccaagggcagcgagatgaagtacgccctgaagagactgatcaccggcctgggcgtgggcagagagaccgccagaccctgctacagcctggccctggcccagctgctgcagagcttcgaggacctgcccctgtgcagcatcctgcagcagatccaggagaagtacgacctgcaccaggtgaagaaggccatgctgagacccgccctgttcgccaacctgttcggcgtgctggccctgttccagagcggcagactggtgaaggaccaggaggccctgatgaagagcgtgaagctgctgcaggccctggcccagtaccagaaccacctgcaggagcagcccagaaaggccctggtggacatcctgagcgaggtgagcaaggccaccctgcaggagatcctgcccgaggtgctgaaggccgacctgaacatcatcctgagcagccccgagcagctggagctgttcctgctggcccagcagaaggtgcccagcaagctgaagaagctggtgggcagcgtgaacctgttcagcgacgagaacgtgcccagactggtgaacgtgctgaagatggccgccagcagcgtgaagaaggacagaaagctgcccgccatcgccctggacctgctgagactggccctgaaggaggacaagttccccagattctggaaggaggtggtggagcagggcctgctgaagatgcagttctggcccgccagctacctgtgcttcagactgctgggcgccgccctgcccctgctgaccaaggagcagctgcacctggtgatgcagggcgacgtgatcagacactacggcgagcacgtgtgcaccgccaagctgcccaagcagttcaagttcgcccccgagatggacgactacgtgggcaccttcctggagggctgccaggacgaccccgagagacagctggccgtgctggtggccttcagcagcgtgaccaaccagggcctgcccgtgacccccaccttctggagagtggtgagattcctgagcccccccgccctgcagggctacgtggcctggctgagagccatgttcctgcagcccgacctggacagcctggtggacttcagcaccaacaaccagaagaaggcccaggacagcagcctgcacatgcccgagagagccgtgttcagactgagaaagtggatcatcttcagactggtgagcatcgtggacagcctgcacctggagatggaggaggccctgaccgagcaggtggccagattctgcctgttccacagcttcttcgtgaccaagaagcccaccagccagatccccgagaccaagcaccccttcagcttccccctggagaaccaggccagagaggccgtgagcagcgccttcttcagcctgctgcagaccctgagcacccagttcaagcaggcccccggccagacccagggcggccagccctggacctaccacctggtgcagttcgccgacctgctgctgaaccacagccacaacgtgaccaccgtgacccccttcaccgcccagcagagacaggcctgggacagaatgctgcagaccctgaaggagctggaggcccacagcgccgaggccagagccgccgccttccagcacctgctgctgctggtgggcatccacctgctgaagagccccgccgagagctgcgacctgctgggcgacatccagacctgcatcagaaagagcctgggcgagaagcccagaagaagcagaaccaagaccatcgacccccaggagcccccctgggtggaggtgctggtggagatcctgctggccctgctggcccagcccagccacctgatgagacaggtggccagaagcgtgttcggccacatctgcagccacctgacccccagagccctgcagctgatcctggacgtgctgaaccccgagaccagcgaggacgagaacgacagagtggtggtgaccgacgacagcgacgagagaagactgaagggcgccgaggacaagagcgaggagggcgaggacaacagaagcagcgagagcgaggaggagagcgagggcgaggagagcgaggaggaggagagagacggcgacgtggaccagggcttcagagagcagctgatgaccgtgctgcaggccggcaaggccctgggcggcgaggacagcgagaacgaggaggagctgggcgacgaggccatgatggccctggaccagagcctggccagcctgttcgccgagcagaagctgagaatccaggccagaagagacgagaagaacaagctgcagaaggagaaggccctgagaagagacttccagatcagagtgctggacctggtggaggtgctggtgaccaagcagcccgagaacgccctggtgctggagctgctggagcccctgctgagcatcatcagaagaagcctgagaagcagcagcagcaagcaggagcaggacctgctgcacaagaccgccagaatcttcacccaccacctgtgcagagccagaagatactgccacgacctgggcgagagagccggcgccctgcacgcccaggtggagagactggtgcagcaggccggcagacagcccgacagccccaccgccctgtaccacttcaacgccagcctgtacctgctgagagtgctgaagggcaacaccgccgagggctgcgtgcacgagacccaggagaagcagaaggccggcaccgaccccagccacatgcccaccggcccccaggccgccagctgcctggacctgaacctggtgaccagagtgtacagcaccgccctgagcagcttcctgaccaagagaaacagccccctgaccgtgcccatgttcctgagcctgttcagcagacaccccgtgctgtgccagagcctgctgcccatcctggtgcagcacatcaccggccccgtgagacccagacaccaggcctgcctgctgctgcagaagaccctgagcatgagagaggtgagaagctgcttcgaggaccccgagtggaagcagctgatgggccaggtgctggccaaggtgaccgagaacctgagagtgctgggcgaggcccagaccaaggcccagcaccagcaggccctgagcagcctggagctgctgaacgtgctgttcagaacctgcaagcacgagaagctgaccctggacctgaccgtgctgctgggcgtgctgcagggccagcagcagagcctgcagcagggcgcccacagcaccggcagcagcagactgcacgacctgtactggcaggccatgaagaccctgggcgtgcagagacccaagctggagaagaaggacgccaaggagatccccagcgccacccagagccccatcagcaagaagagaaagaagaagggcttcctgcccgagaccaagaagagaaagaagagaaagagcgaggacggcacccccgccgaggacggcacccccgccgccaccggcggcagccagccccccagcatgggcagaaagaagagaaacagaaccaaggccaaggtgcccgcccaggccaacggcacccccaccaccaagagccccgcccccggcgcccccaccagaagccccagcacccccgccaagagccccaagctgcagaagaagaaccagaagcccagccaggtgaacggcgcccccggcagccccaccgagcccgccggccagaagcagcaccagaaggccctgcccaagaagggcgtgctgggcaagagccccctgagcgccctggccagaaagaaggccagactgagcctggtgatcagaagccccagcctgctgcagagcggcgccaagaagaaggcccaggtgagaaaggccggcaagccctag

SEQ ID NO: 89648 - DNA, 3999 bp, synthetic construct
  misc_feature 1..3999: note = Description of Artificial Sequence: Synthetic coding sequence
  source 1..3999: mol_type = other DNA
atggagagcagagaccccgcccagcccatgagccccggcgaggccacccagagcggcgccagacccgccgacagatacggcctgctgaagcacagcagagagttcctggacttcttctgggacatcgccaagcccgagcaggagaccagactggccgccaccgagaagctgctggagtacctgagaggcagacccaagggcagcgagatgaagtacgccctgaagagactgatcaccggcctgggcgtgggcagagagaccgccagaccctgctacagcctggccctggcccagctgctgcagagcttcgaggacctgcccctgtgcagcatcctgcagcagatccaggagaagtacgacctgcaccaggtgaagaaggccatgctgagacccgccctgttcgccaacctgttcggcgtgctggccctgttccagagcggcagactggtgaaggaccaggaggccctgatgaagagcgtgaagctgctgcaggccctggcccagtaccagaaccacctgcaggagcagcccagaaaggccctggtggacatcctgagcgaggtgagcaaggccaccctgcaggagatcctgcccgaggtgctgaaggccgacctgaacatcatcctgagcagccccgagcagctggagctgttcctgctggcccagcagaaggtgcccagcaagctgaagaagctggtgggcagcgtgaacctgttcagcgacgagaacgtgcccagactggtgaacgtgctgaagatggccgccagcagcgtgaagaaggacagaaagctgcccgccatcgccctggacctgctgagactggccctgaaggaggacaagttccccagattctggaaggaggtggtggagcagggcctgctgaagatgcagttctggcccgccagctacctgtgcttcagactgctgggcgccgccctgcccctgctgaccaaggagcagctgcacctggtgatgcagggcgacgtgatcagacactacggcgagcacgtgtgcaccgccaagctgcccaagcagttcaagttcgcccccgagatggacgactacgtgggcaccttcctggagggctgccaggacgaccccgagagacagctggccgtgctggtggccttcagcagcgtgaccaaccagggcctgcccgtgacccccaccttctggagagtggtgagattcctgagcccccccgccctgcagggctacgtggcctggctgagagccatgttcctgcagcccgacctggacagcctggtggacttcagcaccaacaaccagaagaaggcccaggacagcagcctgcacatgcccgagagagccgtgttcagactgagaaagtggatcatcttcagactggtgagcatcgtggacagcctgcacctggagatggaggaggccctgaccgagcaggtggccagattctgcctgttccacagcttcttcgtgaccaagaagcccaccagccagatccccgagaccaagcaccccttcagcttccccctggagaaccaggccagagaggccgtgagcagcgccttcttcagcctgctgcagaccctgagcacccagttcaagcaggcccccggccagacccagggcggccagccctggacctaccacctggtgcagttcgccgacctgctgctgaaccacagccacaacgtgaccaccgtgacccccttcaccgcccagcagagacaggcctgggacagaatgctgcagaccctgaaggagctggaggcccacagcgccgaggccagagccgccgccttccagcacctgctgctgctggtgggcatccacctgctgaagagccccgccgagagctgcgacctgctgggcgacatccagacctgcatcagaaagagcctgggcgagaagcccagaagaagcagaaccaagaccatcgacccccaggagcccccctgggtggaggtgctggtggagatcctgctggccctgctggcccagcccagccacctgatgagacaggtggccagaagcgtgttcggccacatctgcagccacctgacccccagagccctgcagctgatcctggacgtgctgaaccccgagaccagcgaggacgagaacgacagagtggtggtgaccgacgacagcgacgagagaagactgaagggcgccgaggacaagagcgaggagggcgaggacaacagaagcagcgagagcgaggaggagagcgagggcgaggagagcgaggaggaggagagagacggcgacgtggaccagggcttcagagagcagctgatgaccgtgctgcaggccggcaaggccctgggcggcgaggacagcgagaacgaggaggagctgggcgacgaggccatgatggccctggaccagagcctggccagcctgttcgccgagcagaagctgagaatccaggccagaagagacgagaagaacaagctgcagaaggagaaggccctgagaagagacttccagatcagagtgctggacctggtggaggtgctggtgaccaagcagcccgagaacgccctggtgctggagctgctggagcccctgctgagcatcatcagaagaagcctgagaagcagcagcagcaagcaggagcaggacctgctgcacaagaccgccagaatcttcacccaccacctgtgcagagccagaagatactgccacgacctgggcgagagagccggcgccctgcacgcccaggtggagagactggtgcagcaggccggcagacagcccgacagccccaccgccctgtaccacttcaacgccagcctgtacctgctgagagtgctgaagggcaacaccgccgagggctgcgtgcacgagacccaggagaagcagaaggccggcaccgaccccagccacatgcccaccggcccccaggccgccagctgcctggacctgaacctggtgaccagagtgtacagcaccgccctgagcagcttcctgaccaagagaaacagccccctgaccgtgcccatgttcctgagcctgttcagcagacaccccgtgctgtgccagagcctgctgcccatcctggtgcagcacatcaccggccccgtgagacccagacaccaggcctgcctgctgctgcagaagaccctgagcatgagagaggtgagaagctgcttcgaggaccccgagtggaagcagctgatgggccaggtgctggccaaggtgaccgagaacctgagagtgctgggcgaggcccagaccaaggcccagcaccagcaggccctgagcagcctggagctgctgaacgtgctgttcagaacctgcaagcacgagaagctgaccctggacctgaccgtgctgctgggcgtgctgcagggccagcagcagagcctgcagcagggcgcccacagcaccggcagcagcagactgcacgacctgtactggcaggccatgaagaccctgggcgtgcagagacccaagctggagaagaaggacgccaaggagatccccagcgccacccagagccccatcagcaagaagagaaagaagaagggcttcctgcccgagaccaagaagagaaagaagagaaagagcgaggacggcacccccgccgaggacggcacccccgccgccaccggcggcagccagccccccagcatgggcagaaagaagagaaacagaaccaaggccaaggtgcccgcccaggccaacggcacccccaccaccaagagccccgcccccggcgcccccaccagaagccccagcacccccgccaagagccccaagctgcagaagaagaaccagaagcccagccaggtgaacggcgcccccggcagccccaccgagcccgccggccagaagcagcaccagaaggccctgcccaagaagggcgtgctgggcaagagccccctgagcgccctggccagaaagaaggccagactgagcctggtgatcagaagccccagcctgctgcagagcggcgccaagaagaaggcccagaccctgagattcaccatcagcagcagcaagaagtag

SEQ ID NO: 89649 - DNA, 1812 bp, synthetic construct
  misc_feature 1..1812: note = Description of Artificial Sequence: Synthetic coding sequence
  source 1..1812: mol_type = other DNA
atggagagcagagaccccgcccagcccatgagccccggcgaggccacccagagcggcgccagacccgccgacagatacggcctgctgaagcacagcagagagttcctggacttcttctgggacatcgccaagcccgagcaggagaccagactggccgccaccgagaagctgctggagtacctgagaggcagacccaagggcagcgagatgaagtacgccctgaagagactgatcaccggcctgggcgtgggcagagagaccgccagaccctgctacagcctggccctggcccagctgctgcagagcttcgaggacctgcccctgtgcagcatcctgcagcagatccaggagaagtacgacctgcaccaggtgaagaaggccatgctgagacccgccctgttcgccaacctgttcggcgtgctggccctgttccagagcggcagactggtgaaggaccaggaggccctgatgaagagcgtgaagctgctgcaggccctggcccagtaccagaaccacctgcaggagcagcccagaaaggccctggtggacatcctgagcgaggtgagcaaggccaccctgcaggagatcctgcccgaggtgctgaaggccgacctgaacatcatcctgagcagccccgagcagctggagctgttcctgctggcccagcagaaggtgcccagcaagctgaagaagctggtgggcagcgtgaacctgttcagcgacgagaacgtgcccagactggtgaacgtgctgaagatggccgccagcagcgtgaagaaggacagaaagctgcccgccatcgccctggacctgctgagactggccctgaaggaggacaagttccccagattctggaaggaggtggtggagcagggcctgctgaagatgcagttctggcccgccagctacctgtgcttcagactgctgggcgccgccctgcccctgctgaccaaggagcagctgcacctggtgatgcagggcgacgtgatcagacactacggcgagcacgtgtgcaccgccaagctgcccaagcagttcaagttcgcccccgagatggacgactacgtgggcaccttcctggagggctgccaggacgaccccgagagacagctggccgtgctggtggccttcagcagcgtgaccaaccagggcctgcccgtgacccccaccttctggagagtggtgagattcctgagcccccccgccctgcagggctacgtggcctggctgagagccatgttcctgcagcccgacctggacagcctggtggacttcagcaccaacaaccagaagaaggcccaggacagcagcctgcacatgcccgagagagccgtgttcagactgagaaagtggatcatcttcagactggtgagcatcgtggacagcctgcacctggagatggaggaggccctgaccgagcaggtggccagattctgcctgttccacagcttcttcgtgaccaagaagcccaccagccagatccccgagaccaagccccaggagagaagcgagggccccgcccagcccccccacgcccccggcggccccgagagacccaagctggagaagaaggacgccaaggagatccccagcgccgaggacggcacccccgccgccaccggcggcagccagccccccagcatgggcagaaagaagagaaacagaaccaaggccaaggtgcccgcccaggccaacggcacccccaccaccaagagccccgcccccggcgcccccaccagaagccccagcacccccgccaagagccccaagctgcagaagaaggcccaggtgagaaaggccggcaagccctag

SEQ ID NO: 89650 - DNA, 2487 bp, synthetic construct
  misc_feature 1..2487: note = Description of Artificial Sequence: Synthetic coding sequence
  source 1..2487: mol_type = other DNA
atggccgccgaggaggccgacgtggacatcgagggcgacgtggtggccgccgccggcgcccagcccggcagcggcgagaacaccgccagcgtgctgcagaaggaccactacctggacagcagctggagaaccgagaacggcctgatcccctggaccctggacaacaccatcagcgaggagaacagagccgtgatcgagaagatgctgctggaggaggagtactacctgagcaagaagagccagcccgagaaggtgtggctggaccagaaggaggacgacaagaagtacatgaagagcctgcagaagaccgccaagatcatggtgcacagccccaccaagcccgccagctacagcgtgaagtggaccatcgaggagaaggagctgttcgagcagggcctggccaagttcggcagaagatggaccaagatcagcaagctgatcggcagcagaaccgtgctgcaggtgaagagctacgccagacagtacttcaagaacaaggtgaagtgcggcctggacaaggagacccccaaccagaagaccggccacaacctgcaggtgaagaacgaggacaagggcaccaaggcctggacccccagctgcctgagaggcagagccgaccccaacctgaacgccgtgaagatcgagaagctgagcgacgacgaggaggtggacatcaccgacgaggtggacgagctgagcagccagaccccccagaagaacagcagcagcgacctgctgctggacttccccaacagcaagatgcacgagaccaaccagggcgagttcatcaccagcgacagccaggaggccctgttcagcaagagcagcagaggctgcctgcagaacgagaagcaggacgagaccctgagcagcagcgagatcaccctgtggaccgagaagcagagcaacggcgacaagaagagcatcgagctgaacgaccagaagttcaacgagctgatcaagaactgcaacaagcacgacggcagaggcatcatcgtggacgccagacagctgcccagccccgagccctgcgagatccagaagaacctgaacgacaacgagatgctgttccacagctgccagatggtggaggagagccacgaggaggaggagctgaagccccccgagcaggagatcgagatcgacagaaacatcatccaggaggaggagaagcaggccatccccgagttcttcgagggcagacaggccaagacccccgagagatacctgaagatcagaaactacatcctggaccagtgggagatctgcaagcccaagtacctgaacaagaccagcgtgagacccggcctgaagaactgcggcgacgtgaactgcatcggcagaatccacacctacctggagctgatcggcgccatcaacttcggctgcgagcaggccgtgtacaacagaccccagaccgtggacaaggtgagaatcagagacagaaaggacgccgtggaggcctaccagctggcccagagactgcagagcatgagaaccagaagaagaagagtgagagacccctggggcaactggtgcgacgccaaggacctggagggccagaccttcgagcacctgagcgccgaggagctggccaagagaagagaggaggagaagggcagacccgtgaagagcctgaaggtgcccagacccaccaagagcagcttcgaccccttccagctgatcccctgcaacttcttcagcgaggagaagcaggagcccttccaggtgaaggtggccagcgaggccctgctgatcatggacctgcacgcccacgtgagcatggccgaggtgatcggcctgctgggcggcagatacagcgaggtggacaaggtggtggaggtgtgcgccgccgagccctgcaacagcctgagcaccggcctgcagtgcgagatggaccccgtgagccagacccaggccagcgagaccctggccgtgagaggcttcagcgtgatcggctggtaccacagccaccccgccttcgaccccaaccccagcctgagagacatcgacacccaggccaagtaccagagctacttcagcagaggcggcgccaagttcatcggcatgatcgtgagcccctacaacagaaacaaccccctgccctacagccagatcacctgcctggtgatcagcgaggagatcagccccgacggcagctacagactgccctacaagttcgaggtgcagcagatgctggaggagccccagtggggcctggtgttcgagaagaccagatggatcatcgagaagtacagactgagccacagcagcgtgcccatggacaagatcttcagaagagacagcgacctgacctgcctgcagaagctgctggagtgcatgagaaagaccctgagcaaggtgaccaactgcttcatggccgaggagttcctgaccgagatcgagaacctgttcctgagcaactacaagagcaaccaggagaacggcgtgaccgaggagaactgcaccaaggagctgctgatgtag

SEQ ID NO: 89651 - DNA, 843 bp, synthetic construct
  misc_feature 1..843: note = Description of Artificial Sequence: Synthetic coding sequence
  source 1..843: mol_type = other DNA
atgcccaagaaggccaagcccaccggcagcggcaaggaggagggccccgccccctgcaagcagatgaagctggaggccgccggcggccccagcgccctgaacttcgacagccccagcagcctgttcgagagcctgatcagccccatcaagaccgagaccttcttcaaggagttctgggagcagaagcccctgctgatccagagagacgaccccgccctggccacctactacggcagcctgttcaagctgaccgacctgaagagcctgtgcagcagaggcatgtactacggcagagacgtgaacgtgtgcagatgcgtgaacggcaagaagaaggtgctgaacaaggacggcaaggcccacttcctgcagctgagaaaggacttcgaccagaagagagccaccatccagttccaccagccccagagattcaaggacgagctgtggagaatccaggagaagctggagtgctacttcggcagcctggtgggcagcaacgtgtacatcacccccgccggcagccagggcctgcccccccactacgacgacgtggaggtgttcatcctgcagctggagggcgagaagcactggagactgtaccaccccaccgtgcccctggccagagagtacagcgtggaggccgaggagagaatcggcagacccgtgcacgagttcatgctgaagcccggcgacctgctgtacttccccagaggcaccatccaccaggccgacacccccgccggcctggcccacagcacccacgtgaccatcagcacctaccagaacaacgacgccggcgccagaatgagaagatgcgacctgagagccatcgccccccagaagtag

SEQ ID NO: 89652 - DNA, 1398 bp, synthetic construct
  misc_feature 1..1398: note = Description of Artificial Sequence: Synthetic coding sequence
  source 1..1398: mol_type = other DNA
atgcccaagaaggccaagcccaccggcagcggcaaggaggagggccccgccccctgcaagcagatgaagctggaggccgccggcggccccagcgccctgaacttcgacagccccagcagcctgttcgagagcctgatcagccccatcaagaccgagaccttcttcaaggagttctgggagcagaagcccctgctgatccagagagacgaccccgccctggccacctactacggcagcctgttcaagctgaccgacctgaagagcctgtgcagcagaggcatgtactacggcagagacgtgaacgtgtgcagatgcgtgaacggcaagaagaaggtgctgaacaaggacggcaaggcccacttcctgcagctgagaaaggacttcgaccagaagagagccaccatccagttccaccagccccagagattcaaggacgagctgtggagaatccaggagaagctggagtgctacttcggcagcctggtgggcagcaacgtgtacatcacccccgccggcagccagggcctgcccccccactacgacgacgtggaggtgttcatcctgcagctggagggcgagaagcactggagactgtaccaccccaccgtgcccctggccagagagtacagcgtggaggccgaggagagaatcggcagacccgtgcacgagttcatgctgaagcccggcgacctgctgtacttccccagaggcaccatccaccaggccgacacccccgccggcctggcccacagcacccacgtgaccatcagcacctaccagaacaacagctggggcgacttcctgctggacaccatcagcggcctggtgttcgacaccgccaaggaggacgtggagctgagaaccggcatccccagacagctgctgctgcaggtggagagcaccaccgtggccaccagaagactgagcggcttcctgagaaccctggccgacagactggagggcaccaaggagctgctgagcagcgacatgaagaaggacttcatcatgcacagactgcccccctacagcgccggcgacggcgccgagctgagcacccccggcggcaagctgcccagactggacagcgtggtgagactgcagttcaaggaccacatcgtgctgaccgtgctgcccgaccaggaccagagcgacgaggcccaggagaagatggtgtacatctaccacagcctgaagaacagcagagagacccacatgatgggcaacgaggaggagaccgagttccacggcctgagattccccctgagccacctggacgccctgaagcagatctggaacagccccgccatcagcgtgaaggacctgaagctgaccaccgacgaggagaaggagagcctggtgctgagcctgtggaccgagtgcctgatccaggtggtgtag

SEQ ID NO: 89653 - DNA, 1395 bp, synthetic construct
  misc_feature 1..1395: note = Description of Artificial Sequence: Synthetic coding sequence
  source 1..1395: mol_type = other DNA
atgcccaagaaggccaagcccaccggcagcggcaaggaggagggccccgccccctgcaagcagatgaagctggaggccgccggcggccccagcgccctgaacttcgacagccccagcagcctgttcgagagcctgatcagccccatcaagaccgagaccttcttcaaggagttctgggagcagaagcccctgctgatccagagagacgaccccgccctggccacctactacggcagcctgttcaagctgaccgacctgaagagcctgtgcagcagaggcatgtactacggcagagacgtgaacgtgtgcagatgcgtgaacggcaagaagaaggtgctgaacaaggacggcaaggcccacttcctgcagctgagaaaggacttcgaccagaagagagccaccatccagttccaccagccccagagattcaaggacgagctgtggagaatccaggagaagctggagtgctacttcggcagcctggtgggcagcaacgtgtacatcacccccgccggcagccagggcctgcccccccactacgacgacgtggaggtgttcatcctgcagctggagggcgagaagcactggagactgtaccaccccaccgtgcccctggccagagagtacagcgtggaggccgaggagagaatcggcagacccgtgcacgagttcatgctgaagcccggcgacctgctgtacttccccagaggcaccatccaccaggccgacacccccgccggcctggcccacagcacccacgtgaccatcagcacctaccagaacaacagctggggcgacttcctgctggacaccatcagcggcctggtgttcgacaccgccaaggaggacgtggagctgagaaccggcatccccagacagctgctgctggtggagagcaccaccgtggccaccagaagactgagcggcttcctgagaaccctggccgacagactggagggcaccaaggagctgctgagcagcgacatgaagaaggacttcatcatgcacagactgcccccctacagcgccggcgacggcgccgagctgagcacccccggcggcaagctgcccagactggacagcgtggtgagactgcagttcaaggaccacatcgtgctgaccgtgctgcccgaccaggaccagagcgacgaggcccaggagaagatggtgtacatctaccacagcctgaagaacagcagagagacccacatgatgggcaacgaggaggagaccgagttccacggcctgagattccccctgagccacctggacgccctgaagcagatctggaacagccccgccatcagcgtgaaggacctgaagctgaccaccgacgaggagaaggagagcctggtgctgagcctgtggaccgagtgcctgatccaggtggtgtag

SEQ ID NO: 89654 - DNA, 1398 bp, synthetic construct; identical to SEQ ID NO: 89652
  misc_feature 1..1398: note = Description of Artificial Sequence: Synthetic coding sequence
  source 1..1398: mol_type = other DNA

SEQ ID NO: 89655 - DNA, 636 bp, synthetic construct
  misc_feature 1..636: note = Description of Artificial Sequence: Synthetic coding sequence
  source 1..636: mol_type = other DNA
atgctgctgcaggtgccctgcaacagctggggcgacttcctgctggacaccatcagcggcctggtgttcgacaccgccaaggaggacgtggagctgagaaccggcatccccagacagctgctgctgcaggtggagagcaccaccgtggccaccagaagactgagcggcttcctgagaaccctggccgacagactggagggcaccaaggagctgctgagcagcgacatgaagaaggacttcatcatgcacagactgcccccctacagcgccggcgacggcgccgagctgagcacccccggcggcaagctgcccagactggacagcgtggtgagactgcagttcaaggaccacatcgtgctgaccgtgctgcccgaccaggaccagagcgacgaggcccaggagaagatggtgtacatctaccacagcctgaagaacagcagagagacccacatgatgggcaacgaggaggagaccgagttccacggcctgagattccccctgagccacctggacgccctgaagcagatctggaacagccccgccatcagcgtgaaggacctgaagctgaccaccgacgaggagaaggagagcctggtgctgagcctgtggaccgagtgcctgatccaggtggtgtag

SEQ ID NO: 89656 - DNA, 339 bp, synthetic construct
  misc_feature 1..339: note = Description of Artificial Sequence: Synthetic coding sequence
  source 1..339: mol_type = other DNA
atgcccaagaaggccaagcccaccggcagcggcaaggaggagggccccgccccctgcaagcagatgaagctggaggccgccggcggccccagcgccctgaacttcgacagccccagcagcctgttcgagagcctgatcagccccatcaagaccgagaccttcttcaaggagttctgggagcagaagcccctgctgatccagagagacgaccccgccctggccacctactacggcagcctgttcaagctgaccgacctgaagagcctgtgcagcagaggcatgtactacggcagagacgtgaacgtgtgcagatgcgtgaacggcaagaagaaggtgtag

SEQ ID NO: 89657 - DNA, 459 bp, synthetic construct
  misc_feature 1..459: note = Description of Artificial Sequence: Synthetic coding sequence
  source 1..459: mol_type = other DNA
atgggcccccccagcctgcacagccccacccccagcctgggccccctgggcgccctggtgctgagcagccagcacaccagccccgacagctgcaagagcccctggaccctgaaggccgtgagagccgccagacaggccgccgacttcaccctgaaggtggaggtggagtgcagcagcctgcaggaggccgtgcaggccgccgaggccggcgccgacctggtgctgctggacaacttcaagcccgaggagctgcaccccaccgccaccgtgctgaaggcccagttccccagcgtggccgtggaggccagcggcggcatcaccctggacaacctgccccagttctgcggcccccacatcgacgtgatcagcatgggcatgctgacccaggccgcccccgccctggacttcagcctgaagctgttcgccaaggaggtggcccccgtgcccaagatccactag

SEQ ID NO: 89658 - DNA, 1434 bp, synthetic construct
  misc_feature 1..1434: note = Description of Artificial Sequence: Synthetic coding sequence
  source 1..1434: mol_type = other DNA
atgttccccgtgttcccctgcaccctgctggccccccccttccccgtgctgggcctggacagcagaggcgtgggcggcctgatgaacagcttcccccccccccagggccacgcccagaaccccctgcaggtgggcgccgagctgcagagcagattcttcgccagccagggctgcgcccagagccccttccaggccgcccccgcccccccccccaccccccaggcccccgccgccgagcccctgcaggtggacctgctgcccgtgctggccgccgcccaggagagcgccgccgccgccgccgccgccgccgccgccgccgccgccgtggccgccgccccccccgcccccgccgccgccagcaccgtggacaccgccgccctgaagcagccccccgcccccccccccccccccccccccgtgagcgcccccgccgccgaggccgccccccccgccagcgccgccaccatcgccgccgccgccgccaccgccgtggtggcccccaccagcaccgtggccgtggcccccgtggccagcgccctggagaagaagaccaagagcaagggcccctacatctgcgccctgtgcgccaaggagttcaagaacggctacaacctgagaagacacgaggccatccacaccggcgccaaggccggcagagtgcccagcggcgccatgaagatgcccaccatggtgcccctgagcctgctgagcgtgccccagctgagcggcgccggcggcggcggcggcgaggccggcgccggcggcggcgccgccgccgtggccgccggcggcgtggtgaccaccaccgccagcggcaagagaatcagaaagaaccacgcctgcgagatgtgcggcaaggccttcagagacgtgtaccacctgaacagacacaagctgagccacagcgacgagaagccctaccagtgccccgtgtgccagcagagattcaagagaaaggacagaatgagctaccacgtgagaagccacgacggcgccgtgcacaagccctacaactgcagccactgcggcaagagcttcagcagacccgaccacctgaacagccacgtgagacaggtgcacagcaccgagagacccttcaagtgcgagaagtgcgaggccgccttcgccaccaaggacagactgagagcccacaccgtgagacacgaggagaaggtgccctgccacgtgtgcggcaagatgctgagcagcgcctacatcagcgaccacatgaaggtgcacagccagggcccccaccacgtgtgcgagctgtgcaacaagggcaccggcgaggtgtgccccatggccgccgccgccgccgccgccgccgccgccgccgccgccgccgtggccgccccccccaccgccgtgggcagcctgagcggcgccgagggcgtgcccgtgagcagccagcccctgcccagccagccctggtag

SEQ ID NO: 89659 - DNA, 759 bp, synthetic construct
  misc_feature 1..759: note = Description of Artificial Sequence: Synthetic coding sequence
  source 1..759: mol_type = other DNA
atgaagatgcccaccatggtgcccctgagcctgctgagcgtgccccagctgagcggcgccggcggcggcggcggcgaggccggcgccggcggcggcgccgccgccgtggccgccggcggcgtggtgaccaccaccgccagcggcaagagaatcagaaagaaccacgcctgcgagatgtgcggcaaggccttcagagacgtgtaccacctgaacagacacaagctgagccacagcgacgagaagccctaccagtgccccgtgtgccagcagagattcaagagaaaggacagaatgagctaccacgtgagaagccacagaagatgcgccaagccctacaactgcagccactgcggcaagagcttcagcagacccgaccacctgaacagccacgtgagacaggtgcacagcaccgagagacccttcaagtgcgagaagtgcgaggccgccttcgccaccaaggacagactgagagcccacaccgtgagacacgaggagaaggtgccctgccacgtgtgcggcaagatgctgagcagcgcctacatcagcgaccacatgaaggtgcacagccagggcccccaccacgtgtgcgagctgtgcaacaagggcaccggcgaggtgtgccccatggccgccgccgccgccgccgccgccgccgccgccgccgccgccgtggccgccccccccaccgccgtgggcagcctgagcggcgccgagggcgtgcccgtgagcagccagcccctgcccagccagccctggtag

SEQ ID NO: 89660 - DNA, 1365 bp, synthetic construct
  misc_feature 1..1365: note = Description of Artificial Sequence: Synthetic coding sequence
  source 1..1365: mol_type = other DNA
atggaccccagcaactggagcagcttcatcttccagggccacgcccagaaccccctgcaggtgggcgccgagctgcagagcagattcttcgccagccagggctgcgcccagagccccttccaggccgcccccgcccccccccccaccccccaggcccccgccgccgagcccctgcaggtggacctgctgcccgtgctggccgccgcccaggagagcgccgccgccgccgccgccgccgccgccgccgccgccgccgtggccgccgccccccccgcccccgccgccgccagcaccgtggacaccgccgccctgaagcagccccccgcccccccccccccccccccccccgtgagcgcccccgccgccgaggccgccccccccgccagcgccgccaccatcgccgccgccgccgccaccgccgtggtggcccccaccagcaccgtggccgtggcccccgtggccagcgccctggagaagaagaccaagagcaagggcccctacatctgcgccctgtgcgccaaggagttcaagaacggctacaacctgagaagacacgaggccatccacaccggcgccaaggccggcagagtgcccagcggcgccatgaagatgcccaccatggtgcccctgagcctgctgagcgtgccccagctgagcggcgccggcggcggcggcggcgaggccggcgccggcggcggcgccgccgccgtggccgccggcggcgtggtgaccaccaccgccagcggcaagagaatcagaaagaaccacgcctgcgagatgtgcggcaaggccttcagagacgtgtaccacctgaacagacacaagctgagccacagcgacgagaagccctaccagtgccccgtgtgccagcagagattcaagagaaaggacagaatgagctaccacgtgagaagccacgacggcgccgtgcacaagccctacaactgcagccactgcggcaagagcttcagcagacccgaccacctgaacagccacgtgagacaggtgcacagcaccgagagacccttcaagtgcgagaagtgcgaggccgccttcgccaccaaggacagactgagagcccacaccgtgagacacgaggagaaggtgccctgccacgtgtgcggcaagatgctgagcagcgcctacatcagcgaccacatgaaggtgcacagccagggcccccaccacgtgtgcgagctgtgcaacaagggcaccggcgaggtgtgccccatggccgccgccgccgccgccgccgccgccgccgccgccgccgccgtggccgccccccccaccgccgtgggcagcctgagcggcgccgagggcgtgcccgtgagcagccagcccctgcccagccagccctggtag

SEQ ID NO: 89661 - DNA, 2955 bp, synthetic construct
  misc_feature 1..2955: note = Description of Artificial Sequence: Synthetic coding sequence
  source 1..2955: mol_type = other DNA
atgagagcccccgccagaggcaccggctgctgcggcagaagcggcggcagatggctggccggcgccgcccagcccagatgcctgtgggccggcggcgccggccagagattcatggtgcccggcggcaccatgaagagcctgaagaaggacagcagactgagaatcacccccaccagactgctggaggccagcgagaacgtgaaggagaagaagagagccaagggccccgagcagcccacccccaccatccaggaggagcccgagcccgtgagcaacgtgctgcagggcgacgacatcctggccctggccatcaagaaggaggacctgaaggagcagcacatccccagactgaccgagaaggaggacaagagagtgatcacccagaagttcatcatcagaaagctgaagcccatggaccccagaagaaaggtgtgccacctggtggccagacccgccaaccccgacgaggccaccaagcccctggactacagcggccccggcgacagcttcgacggcagcgaccagatcctgccccaccacatcctgggcagcctgcaggacttcaagagaatcgccctggccagaggcaacacccagctggccgagagaatccccaccagcccctgcctgatgaccctgatcagcgccgagggcgagagcaagcagaaggcccccaaggaggagaagagacccccctgggccccccccccccagcacaacttcctgaagaactggcagagaaacaccgccctgagaaagaagcagcaggaggccctgagcgagcacctgaagaagcccgtgagcgagctgctgatgcacaccggcgagacctacagaagaatccaggaggagagagagctgatcgactgcaccctgcccaccagaagagacagaaagagctgggagaacagcggcttctggagcagactggagtacctgggcgacgagatgaccggcctggtgatgaccaagaccaagacccagagaggcctgatggagcccatcacccacatcagaaagccccacagcatcagagtggagaccggcctgcccgcccagagagacgccagctacagatacacctgggacagaagcctgttcctgatctacagaagaaaggagctgcagagaatcatggaggagctggacttcagccagcaggacatcgacggcctggaggtggtgggcaagggctggcccttcagcgccgtgaccgtggaggactacaccgtgttcgagagaagccagggcagcagcagcgaggacaccgcctacctgggcaccctggccagcagcagcgacgtgagcatgcccatcctgggccccagcctgctgttctgcggcaagcccgcctgctggatcagaggcagcaacccccaggacaagagacaggtgggcatcgccgcccacctgaccttcgagaccctggagggcgagaagaccagcagcgagctgaccgtggtgaacaacggcaccgtggccatctggtacgactggagaagacagcaccagcccgacaccttccaggacctgaagaagaacagaatgcagagattctacttcgacaacagagagggcgtgatcctgcccggcgagatcaagaccttcaccttcttcttcaagagcctgaccgccggcgtgttcagagagttctgggagttcagaacccaccccaccctgctgggcggcgccatcctgcaggtgaacctgcacgccgtgagcctgacccaggacgtgttcgaggacgagagaaaggtgctggagagcaagctgaccgcccacgaggccgtgaccgtggtgagagaggtgctgcaggagctgctgatgggcgtgctgacccccgagagaacccccagccccgtggacgcctacctgaccgaggaggacctgttcagacacagaaacccccccctgcactacgagcaccaggtggtgcagagcctgcaccagctgtggagacagtacatgaccctgcccgccaaggccgaggaggccagacccggcgacaaggagcacgtgagccccatcgccaccgagaaggccagcgtgaacgccgagctgctgcccagattcagaagccccatcagcgagacccaggtgcccagacccgagaacgaggccctgagagagagcggcagccagaaggccagagtgggcaccaagagcccccagagaaagagcatcatggaggagatcctggtggaggagagccccgacgtggacagcaccaagagcccctgggagcccgacggcctgcccctgctggagtggaacctgtgcctggaggacttcagaaaggccgtgatggtgctgcccgacgagaaccacagagaggacgccctgatgagactgaacaaggccgccctggagctgtgccagaagcccagacccctgcagagcaacctgctgcaccagatgtgcctgcagctgtggagagacgtgatcgacagcctggtgggccacagcatgtggctgagaagcgtgctgggcctgcccgagaaggagaccatctacctgaacgtgcccgaggagcaggaccagaagagcccccccatcatggaggtgaaggtgcccgtgggcaaggccggcaaggaggagagaaagggcgccgcccaggagaagaagcagctgggcatcaaggacaaggaggacaagaagggcgccaagctgctgggcaaggaggacagacccaacagcaagaagcacaaggccaaggacgacaagaaggtgatcaagagcgccagccaggacagattcagcctggaggaccccacccccgacatcatcctgagcagccaggagcccatcgaccccctggtgatgggcaagtacacccagagcctgcacagcgaggtgagaggcctgctggacaccctggtgaccgacctgatggtgctggccgacgagctgagccccatcaagaacgtggaggaggccctgagactgtgcagatag

SEQ ID NO: 89662 - DNA, 2829 bp, synthetic construct
  misc_feature 1..2829: note = Description of Artificial Sequence: Synthetic coding sequence
  source 1..2829: mol_type = other DNA
atggtgcccggcggcaccatgaagagcctgaagaaggacagcagactgagaatcacccccaccagactgctggaggccagcgagaacgtgaaggagaagaagagagccaagggccccgagcagcccacccccaccatccaggaggagcccgagcccgtgagcaacgtgctgcagggcgacgacatcctggccctggccatcaagaaggaggacctgaaggagcagcacatccccagactgaccgagaaggaggacaagagagtgatcacccagaagttcatcatcagaaagctgaagcccatggaccccagaagaaaggtgtgccacctggtggccagacccgccaaccccgacgaggccaccaagcccctggactacagcggccccggcgacagcttcgacggcagcgaccagatcctgccccaccacatcctgggcagcctgcaggacttcaagagaatcgccctggccagaggcaacacccagctggccgagagaatccccaccagcccctgcctgatgaccctgatcagcgccgagggcgagagcaagcagaaggcccccaaggaggagaagagacccccctgggccccccccccccagcacaacttcctgaagaactggcagagaaacaccgccctgagaaagaagcagcaggaggccctgagcgagcacctgaagaagcccgtgagcgagctgctgatgcacaccggcgagacctacagaagaatccaggaggagagagagctgatcgactgcaccctgcccaccagaagagacagaaagagctgggagaacagcggcttctggagcagactggagtacctgggcgacgagatgaccggcctggtgatgaccaagaccaagacccagagaggcctgatggagcccatcacccacatcagaaagccccacagcatcagagtggagaccggcctgcccgcccagagagacgccagctacagatacacctgggacagaagcctgttcctgatctacagaagaaaggagctgcagagaatcatggaggagctggacttcagccagcaggacatcgacggcctggaggtggtgggcaagggctggcccttcagcgccgtgaccgtggaggactacaccgtgttcgagagaagccagggcagcagcagcgaggacaccgcctacctgggcaccctggccagcagcagcgacgtgagcatgcccatcctgggccccagcctgctgttctgcggcaagcccgcctgctggatcagaggcagcaacccccaggacaagagacaggtgggcatcgccgcccacctgaccttcgagaccctggagggcgagaagaccagcagcgagctgaccgtggtgaacaacggcaccgtggccatctggtacgactggagaagacagcaccagcccgacaccttccaggacctgaagaagaacagaatgcagagattctacttcgacaacagagagggcgtgatcctgcccggcgagatcaagaccttcaccttcttcttcaagagcctgaccgccggcgtgttcagagagttctgggagttcagaacccaccccaccctgctgggcggcgccatcctgcaggtgaacctgcacgccgtgagcctgacccaggacgtgttcgaggacgagagaaaggtgctggagagcaagctgaccgcccacgaggccgtgaccgtggtgagagaggtgctgcaggagctgctgatgggcgtgctgacccccgagagaacccccagccccgtggacgcctacctgaccgaggaggacctgttcagacacagaaacccccccctgcactacgagcaccaggtggtgcagagcctgcaccagctgtggagacagtacatgaccctgcccgccaaggccgaggaggccagacccggcgacaaggagcacgtgagccccatcgccaccgagaaggccagcgtgaacgccgagctgctgcccagattcagaagccccatcagcgagacccaggtgcccagacccgagaacgaggccctgagagagagcggcagccagaaggccagagtgggcaccaagagcccccagagaaagagcatcatggaggagatcctggtggaggagagccccgacgtggacagcaccaagagcccctgggagcccgacggcctgcccctgctggagtggaacctgtgcctggaggacttcagaaaggccgtgatggtgctgcccgacgagaaccacagagaggacgccctgatgagactgaacaaggccgccctggagctgtgccagaagcccagacccctgcagagcaacctgctgcaccagatgtgcctgcagctgtggagagacgtgatcgacagcctggtgggccacagcatgtggctgagaagcgtgctgggcctgcccgagaaggagaccatctacctgaacgtgcccgaggagcaggaccagaagagcccccccatcatggaggtgaaggtgcccgtgggcaaggccggcaaggaggagagaaagggcgccgcccaggagaagaagcagctgggcatcaaggacaaggaggacaagaagggcgccaagctgctgggcaaggaggacagacccaacagcaagaagcacaaggccaaggacgacaagaaggtgatcaagagcgccagccaggacagattcagcctggaggaccccacccccgacatcatcctgagcagccaggagcccatcgaccccctggtgatgggcaagtacacccagagcctgcacagcgaggtgcaccccggcagatgcgtgccctgggagaacaccatgcagggcgccttccccagcaccaccagatgcggcggcagctgcctgtag

SEQ ID NO: 89663 - DNA, 1992 bp, synthetic construct
  misc_feature 1..1992: note = Description of Artificial Sequence: Synthetic coding sequence
  source 1..1992: mol_type = other DNA
agaagcagaggcgccgaggccaccgagagcaagctgagcggcggcttcagatggacccagaagaccagccccacccagggcgacagcgccatcacccacagcctgtacagaatgatcttcctgaccgccctgcccctgttctggatcatgatcagcgccagcagaggcggccactggggcgcctggatgcccagcagcatcagcgccttcgagggcacctgcgtgagcatcccctgcagattcgacttccccgacgagctgagacccgccgtggtgcacggcgtgtggtacttcaacagcccctaccccaagaactacccccccgtggtgttcaagagcagaacccaggtggtgcacgagagcttccagggcagaagcagactgctgggcgacctgggcctgagaaactgcaccctgctgctgagcaacgtgagccccgagctgggcggcaagtactacttcagaggcgacctgggcggctacaaccagtacaccttcagcgagcacagcgtgctggacatcgtgaacacccccaacatcgtggtgccccccgaggtggtggccggcaccgaggtggaggtgagctgcatggtgcccgacaactgccccgagctgagacccgagctgagctggctgggccacgagggcctgggcgagcccgccgtgctgggcagactgagagaggacgagggcacctgggtgcaggtgagcctgctgcacttcgtgcccaccagagaggccaacggccacagactgggctgccaggccagcttccccaacaccaccctgcagttcgagggctacgccagcatggacgtgaagtacccccccgtgatcgtggagatgaacagcagcgtggaggccatcgagggcagccacgtgagcctgctgtgcggcgccgacagcaaccccccccccctgctgacctggatgagagacggcaccgtgctgagagaggccgtggccgagagcctgctgctggagctggaggaggtgacccccgccgaggacggcgtgtacgcctgcctggccgagaacgcctacggccaggacaacagaaccgtgggcctgagcgtgatgtacgccccctggaagcccaccgtgaacggcaccatggtggccgtggagggcgagaccgtgagcatcctgtgcagcacccagagcaaccccgaccccatcctgaccatcttcaaggagaagcagatcctgagcaccgtgatctacgagagcgagctgcagctggagctgcccgccgtgagccccgaggacgacggcgagtactggtgcgtggccgagaaccagtacggccagagagccaccgccttcaacctgagcgtggagttcgcccccgtgctgctgctggagagccactgcgccgccgccagagacaccgtgcagtgcctgtgcgtggtgaagagcaaccccgagcccagcgtggccttcgagctgcccagcagaaacgtgaccgtgaacgagagcgagagagagttcgtgtacagcgagagaagcggcctggtgctgaccagcatcctgaccctgagaggccaggcccaggccccccccagagtgatctgcaccgccagaaacctgtacggcgccaagagcctggagctgcccttccagggcgcccacagactgatgtgggccaagatcggccccgtgggcgccgtggtggccttcgccatcctgatcgccatcgtgtgctacatcacccagaccagaagaaagaagaacgtgaccgagagccccagcttcagcgccggcgacaacccccccgtgctgttcagcagcgacttcagaatcagcggcgcccccgagaagtacgagagcgagagaagactgggcagcgagagaagactgctgggcctgagaggcgagccccccgagctggacctgagctacagccacagcgacctgggcaagagacccaccaaggacagctacaccctgaccgaggagctggccgagtacgccgagatcagagtgaagtag

SEQ ID NO: 89664 - DNA, 1749 bp, synthetic construct
  misc_feature 1..1749: note = Description of Artificial Sequence: Synthetic coding sequence
  source 1..1749: mol_type = other DNA
atgatcttcctgaccgccctgcccctgttctggatcatgatcagcgccagcagaggcggccactggggcgcctggatgcccagcagcatcagcgccttcgagggcacctgcgtgagcatcccctgcagattcgacttccccgacgagctgagacccgccgtggtgcacggcgtgtggtacttcaacagcccctaccccaagaactacccccccgtggtgttcaagagcagaacccaggtggtgcacgagagcttccagggcagaagcagactgctgggcgacctgggcctgagaaactgcaccctgctgctgagcaacgtgagccccgagctgggcggcaagtactacttcagaggcgacctgggcggctacaaccagtacaccttcagcgagcacagcgtgctggacatcgtgaacacccccaacatcgtggtgccccccgaggtggtggccggcaccgaggtggaggtgagctgcatggtgcccgacaactgccccgagctgagacccgagctgagctggctgggccacgagggcctgggcgagcccgccgtgctgggcagactgagagaggacgagggcacctgggtgcaggtgagcctgctgcacttcgtgcccaccagagaggccaacggccacagactgggctgccaggccagcttccccaacaccaccctgcagttcgagggctacgccagcatggacgtgaagtacccccccgtgatcgtggagatgaacagcagcgtggaggccatcgagggcagccacgtgagcctgctgtgcggcgccgacagcaaccccccccccctgctgacctggatgagagacggcaccgtgctgagagaggccgtggccgagagcctgctgctggagctggaggaggtgacccccgccgaggacggcgtgtacgcctgcctggccgagaacgcctacggccaggacaacagaaccgtgggcctgagcgtgatgtacgccccctggaagcccaccgtgaacggcaccatggtggccgtggagggcgagaccgtgagcatcctgtgcagcacccagagcaaccccgaccccatcctgaccatcttcaaggagaagcagatcctgagcaccgtgatctacgagagcgagctgcagctggagctgcccgccgtgagccccgaggacgacggcgagtactggtgcgtggccgagaaccagtacggccagagagccaccgccttcaacctgagcgtggagttcgcccccgtgctgctgctggagagccactgcgccgccgccagagacaccgtgcagtgcctgtgcgtggtgaagagcaaccccgagcccagcgtggccttcgagctgcccagcagaaacgtgaccgtgaacgagagcgagagagagttcgtgtacagcgagagaagcggcctggtgctgaccagcatcctgaccctgagaggccaggcccaggccccccccagagtgatctgcaccgccagaaacctgtacggcgccaagagcctggagctgcccttccagggcgcccacagactgatgtgggccaagatcggccccgtgggcgccgtggtggccttcgccatcctgatcgccatcgtgtgctacatcacccagaccagaagaaagaagaacgtgaccgagagccccagcttcagcgccggcgacaacccccccgtgctgttcagcagcgacttcagaatcagcggcgcccccgagaagtacgagagcaaggaggtgagcaccctggagagccactag

SEQ ID NO: 89665 - DNA, 1881 bp, synthetic construct
  misc_feature 1..1881: note = Description of Artificial Sequence: Synthetic coding sequence
  source 1..1881: mol_type = other DNA
atgatcttcctgaccgccctgcccctgttctggatcatgatcagcgccagcagaggcggccactggggcgcctggatgcccagcagcatcagcgccttcgagggcacctgcgtgagcatcccctgcagattcgacttccccgacgagctgagacccgccgtggtgcacggcgtgtggtacttcaacagcccctaccccaagaactacccccccgtggtgttcaagagcagaacccaggtggtgcacgagagcttccagggcagaagcagactgctgggcgacctgggcctgagaaactgcaccctgctgctgagcaacgtgagccccgagctgggcggcaagtactacttcagaggcgacctgggcggctacaaccagtacaccttcagcgagcacagcgtgctggacatcgtgaacacccccaacatcgtggtgccccccgaggtggtggccggcaccgaggtggaggtgagctgcatggtgcccgacaactgccccgagctgagacccgagctgagctggctgggccacgagggcctgggcgagcccgccgtgctgggcagactgagagaggacgagggcacctgggtgcaggtgagcctgctgcacttcgtgcccaccagagaggccaacggccacagactgggctgccaggccagcttccccaacaccaccctgcagttcgagggctacgccagcatggacgtgaagtacccccccgtgatcgtggagatgaacagcagcgtggaggccatcgagggcagccacgtgagcctgctgtgcggcgccgacagcaaccccccccccctgctgacctggatgagagacggcaccgtgctgagagaggccgtggccgagagcctgctgctggagctggaggaggtgacccccgccgaggacggcgtgtacgcctgcctggccgagaacgcctacggccaggacaacagaaccgtgggcctgagcgtgatgtacgccccctggaagcccaccgtgaacggcaccatggtggccgtggagggcgagaccgtgagcatcctgtgcagcacccagagcaaccccgaccccatcctgaccatcttcaaggagaagcagatcctgagcaccgtgatctacgagagcgagctgcagctggagctgcccgccgtgagccccgaggacgacggcgagtactggtgcgtggccgagaaccagtacggccagagagccaccgccttcaacctgagcgtggagttcgcccccgtgctgctgctggagagccactgcgccgccgccagagacaccgtgcagtgcctgtgcgtggtgaagagcaaccccgagcccagcgtggccttcgagctgcccagcagaaacgtgaccgtgaacgagagcgagagagagttcgtgtacagcgagagaagcggcctggtgctgaccagcatcctgaccctgagaggccaggcccaggccccccccagagtgatctgcaccgccagaaacctgtacggcgccaagagcctggagctgcccttccagggcgcccacagactgatgtgggccaagatcggccccgtgggcgccgtggtggccttcgccatcctgatcgccatcgtgtgctacatcacccagaccagaagaaagaagaacgtgaccgagagccccagcttcagcgccggcgacaacccccccgtgctgttcagcagcgacttcagaatcagcggcgcccccgagaagtacgagagcgagagaagactgggcagcgagagaagactgctgggcctgagaggcgagccccccgagctggacctgagctacagccacagcgacctgggcaagagacccaccaaggacagctacaccctgaccgaggagctggccgagtacgccgagatcagagtgaagtag

SEQ ID NO: 89666 - DNA, 1806 bp, synthetic construct
  misc_feature 1..1806: note = Description of Artificial Sequence: Synthetic coding sequence
  source 1..1806: mol_type = other DNA
atgcccagcagcatcagcgccttcgagggcacctgcgtgagcatcccctgcagattcgacttccccgacgagctgagacccgccgtggtgcacggcgtgtggtacttcaacagcccctaccccaagaactacccccccgtggtgttcaagagcagaacccaggtggtgcacgagagcttccagggcagaagcagactgctgggcgacctgggcctgagaaactgcaccctgctgctgagcaacgtgagccccgagctgggcggcaagtactacttcagaggcgacctgggcggctacaaccagtacaccttcagcgagcacagcgtgctggacatcgtgaacacccccaacatcgtggtgccccccgaggtggtggccggcaccgaggtggaggtgagctgcatggtgcccgacaactgccccgagctgagacccgagctgagctggctgggccacgagggcctgggcgagcccgccgtgctgggcagactgagagaggacgagggcacctgggtgcaggtgagcctgctgcacttcgtgcccaccagagaggccaacggccacagactgggctgccaggccagcttccccaacaccaccctgcagttcgagggctacgccagcatggacgtgaagtacccccccgtgatcgtggagatgaacagcagcgtggaggccatcgagggcagccacgtgagcctgctgtgcggcgccgacagcaaccccccccccctgctgacctggatgagagacggcaccgtgctgagagaggccgtggccgagagcctgctgctggagctggaggaggtgacccccgccgaggacggcgtgtacgcctgcctggccgagaacgcctacggccaggacaacagaaccgtgggcctgagcgtgatgtacgccccctggaagcccaccgtgaacggcaccatggtggccgtggagggcgagaccgtgagcatcctgtgcagcacccagagcaaccccgaccccatcctgaccatcttcaaggagaagcagatcctgagcaccgtgatctacgagagcgagctgcagctggagctgcccgccgtgagccccgaggacgacggcgagtactggtgcgtggccgagaaccagtacggccagagagccaccgccttcaacctgagcgtggagttcgcccccgtgctgctgctggagagccactgcgccgccgccagagacaccgtgcagtgcctgtgcgtggtgaagagcaaccccgagcccagcgtggccttcgagctgcccagcagaaacgtgaccgtgaacgagagcgagagagagttcgtgtacagcgagagaagcggcctggtgctgaccagcatcctgaccctgagaggccaggcccaggccccccccagagtgatctgcaccgccagaaacctgtacggcgccaagagcctggagctgcccttccagggcgcccacagactgatgtgggccaagatcggccccgtgggcgccgtggtggccttcgccatcctgatcgccatcgtgtgctacatcacccagaccagaagaaagaagaacgtgaccgagagccccagcttcagcgccggcgacaacccccccgtgctgttcagcagcgacttcagaatcagcggcgcccccgagaagtacgagagcgagagaagactgggcagcgagagaagactgctgggcctgagaggcgagccccccgagctggacctgagctacagccacagcgacctgggcaagagacccaccaaggacagctacaccctgaccgaggagctggccgagtacgccgagatcagagtgaagtag

SEQ ID NO: 89667 - DNA, 915 bp, synthetic construct
  misc_feature 1..915: note = Description of Artificial Sequence: Synthetic coding sequence
  source 1..915: mol_type = other DNA
atgggcaaccacgccggcaagagagagctgaacgccgagaaggccagcaccaacagcgagaccaacagaggcgagagcgagaagaagagaaacctgggcgagctgagcagaaccaccagcgaggacaacgaggtgttcggcgaggccgacgccaaccagaacaacggcaccagcagccaggacaccgccgtgaccgacagcaagagaaccgccgaccccaagaacgcctggcaggacgcccaccccgccgaccccggcagcagaccccacctgatcagactgttcagcagagacgcccccggcagagaggacaacaccttcaaggacagacccagcgagagcgacgagctgcagaccatccaggaggacagcgccgccaccagcgagagcctggacgtgatggccagccagaagagacccagccagagacacggcagcaagtacctggccaccgccagcaccatggaccacgccagacacggcttcctgcccagacacagagacaccggcatcctggacagcatcggcagattcttcggcggcgacagaggcgcccccaagagaggcagcggcaaggacagccaccaccccgccagaaccgcccactacggcagcctgccccagaagagccacggcagaacccaggacgagaaccccgtggtgcacttcttcaagaacatcgtgacccccagaacccccccccccagccagggcaagggcagaggcctgagcctgagcagattcagctggggcgccgagggccagagacccggcttcggctacggcggcagagccagcgactacaagagcgcccacaagggcttcaagggcgtggacgcccagggcaccctgagcaagatcttcaagctgggcggcagagacagcagaagcggcagccccatggccagaagatag

SEQ ID NO: 89668 - DNA, 561 bp, synthetic construct
  misc_feature 1..561: note = Description of Artificial Sequence: Synthetic coding sequence
  source 1..561: mol_type = other DNA
atggccagccagaagagacccagccagagacacggcagcaagtacctggccaccgccagcaccatggaccacgccagacacggcttcctgcccagacacagagacaccggcatcctggacagcatcggcagattcttcggcggcgacagaggcgcccccaagagaggcagcggcaaggtgccctggctgaagcccggcagaagccccctgcccagccacgccagaagccagcccggcctgtgcaacatgtacaaggacagccaccaccccgccagaaccgcccactacggcagcctgccccagaagagccacggcagaacccaggacgagaaccccgtggtgcacttcttcaagaacatcgtgacccccagaacccccccccccagccagggcaagggcgccgagggccagagacccggcttcggctacggcggcagagccagcgactacaagagcgcccacaagggcttcaagggcgtggacgcccagggcaccctgagcaagatcttcaagctgggcggcagagacagcagaagcggcagccccatggccagaagatag

SEQ ID NO: 89669 - DNA, 594 bp, synthetic construct
  misc_feature 1..594: note = Description of Artificial Sequence: Synthetic coding sequence
  source 1..594: mol_type = other DNA
atggccagccagaagagacccagccagagacacggcagcaagtacctggccaccgccagcaccatggaccacgccagacacggcttcctgcccagacacagagacaccggcatcctggacagcatcggcagattcttcggcggcgacagaggcgcccccaagagaggcagcggcaaggtgccctggctgaagcccggcagaagccccctgcccagccacgccagaagccagcccggcctgtgcaacatgtacaaggacagccaccaccccgccagaaccgcccactacggcagcctgccccagaagagccacggcagaacccaggacgagaaccccgtggtgcacttcttcaagaacatcgtgacccccagaacccccccccccagccagggcaagggcagaggcctgagcctgagcagattcagctggggcgccgagggccagagacccggcttcggctacggcggcagagccagcgactacaagagcgcccacaagggcttcaagggcgtggacgcccagggcaccctgagcaagatcttcaagctgggcggcagagacagcagaagcggcagccccatggccagaagatag

SEQ ID NO: 89670 - DNA, 594 bp, synthetic construct
  misc_feature 1..594: note = Description of Artificial Sequence: Synthetic coding sequence
  source 1..594: mol_type = other DNA
atgggcaaccacgccggcaagagagagctgaacgccgagaaggccagcaccaacagcgagaccaacagaggcgagagcgagaagaagagaaacctgggcgagctgagcagaaccaccagcgaggacaacgaggtgttcggcgaggccgacgccaaccagaacaacggcaccagcagccaggacaccgccgtgaccgacagcaagagaaccgccgaccccaagaacgcctggcaggacgcccaccccgccgaccccggcagcagaccccacctgatcagactgttcagcagagacgcccccggcagagaggacaacaccttcaaggacagacccagcgagagcgacgagctgcagaccatccaggaggacagcgccgccaccagcgagagcctggacgtgatggccagccagaagagacccagccagagacacggcagcaagtacctggccaccgccagcaccatggaccacgccagacacggcttcctgcccagacacagagacaccggcatcctggacagcatcggcagattcttcggcggcgacagaggcgcccccaagagaggcagcggcaaggtgagcagcgaggagtag

SEQ ID NO: 89671 - DNA, 594 bp, synthetic construct; identical to SEQ ID NO: 89670
  misc_feature 1..594: note = Description of Artificial Sequence: Synthetic coding sequence
  source 1..594: mol_type = other DNA

SEQ ID NO: 89672 - DNA, 483 bp, synthetic construct
  misc_feature 1..483: note = Description of Artificial Sequence: Synthetic coding sequence
  source 1..483: mol_type = other DNA
atggccagccagaagagacccagccagagacacggcagcaagtacctggccaccgccagcaccatggaccacgccagacacggcttcctgcccagacacagagacaccggcatcctggacagcatcggcagattcttcggcggcgacagaggcgcccccaagagaggcagcggcaaggacagccaccaccccgccagaaccgcccactacggcagcctgccccagaagagccacggcagaacccaggacgagaaccccgtggtgcacttcttcaagaacatcgtgacccccagaacccccccccccagccagggcaagggcgccgagggccagagacccggcttcggctacggcggcagagccagcgactacaagagcgcccacaagggcttcaagggcgtggacgcccagggcaccctgagcaagatcttcaagctgggcggcagagacagcagaagcggcagccccatggccagaagatag

SEQ ID NO: 89673 - DNA, 516 bp, synthetic construct
  misc_feature 1..516: note = Description of Artificial Sequence: Synthetic coding sequence
  source 1..516: mol_type = other DNA
atggccagccagaagagacccagccagagacacggcagcaagtacctggccaccgccagcaccatggaccacgccagacacggcttcctgcccagacacagagacaccggcatcctggacagcatcggcagattcttcggcggcgacagaggcgcccccaagagaggcagcggcaaggacagccaccaccccgccagaaccgcccactacggcagcctgccccagaagagccacggcagaacccaggacgagaaccccgtggtgcacttcttcaagaacatcgtgacccccagaacccccccccccagccagggcaagggcagaggcctgagcctgagcagattcagctggggcgccgagggccagagacccggcttcggctacggcggcagagccagcgactacaagagcgcccacaagggcttcaagggcgtggacgcccagggcaccctgagcaagatcttcaagctgggcggcagagacagcagaagcggcagccccatggccagaagatag

SEQ ID NO: 89674 - DNA, 261 bp, synthetic construct
  misc_feature 1..261: note = Description of Artificial Sequence: Synthetic coding sequence
  source 1..261: mol_type = other DNA
atggccagccagaagagacccagccagagacacggcagcaagtacctggccaccgccagcaccatggaccacgccagacacggcttcctgcccagacacagagacaccggcatcctggacagcatcggcagattcttcggcggcgacagaggcgcccccaagagaggcagcggcaaggacagccaccaccccgccagaaccgcccactacggcagcctgccccagaagagccacggcagaacccaggacgagaacccctag

SEQ ID NO: 89675 - DNA, 888 bp, synthetic construct
  misc_feature 1..888: note = Description of Artificial Sequence: Synthetic coding sequence
  source 1..888: mol_type = other DNA
atggccagcctgagcagacccagcctgcccagctgcctgtgcagcttcctgctgctgctgctgctgcaggtgagcagcagctacgccggccagttcagagtgatcggccccagacaccccatcagagccctggtgggcgacgaggtggagctgccctgcagaatcagccccggcaagaacgccaccggcatggaggtgggctggtacagaccccccttcagcagagtggtgcacctgtacagaaacggcaaggaccaggacggcgaccaggcccccgagtacagaggcagaaccgagctgctgaaggacgccatcggcgagggcaaggtgaccctgagaatcagaaacgtgagattcagcgacgagggcggcttcacctgcttcttcagagaccacagctaccaggaggaggccgccatggagctgaaggtggaggaccccttctactgggtgagccccggcgtgctggtgctgctggccgtgctgcccgtgctgctgctgcagatcaccgtgggcctggtgttcctgtgcctgcagtacagactgagaggcaagctgagagccgagatcgagaacctgcacagaaccttcgacccccacttcctgagagtgccctgctggaagatcaccctgttcgtgatcgtgcccgtgctgggccccctggtggccctgatcatctgctacaactggctgcacagaagactggccggccagttcctggaggagctgagaaagttcagcagcctgtgctacaagcagagaatcaagagccaggagagagagaccgaggccaccagaggcagaggcggcctgctgagagaccacatccccagaggcaaggaggagctggagagcctgggcggcggcaagaccccccccggcagatag

SEQ ID NO: 89676 - DNA, 642 bp, synthetic construct
  misc_feature 1..642: note = Description of Artificial Sequence: Synthetic coding sequence
  source 1..642: mol_type = other DNA
atggccagcctgagcagacccagcctgcccagctgcctgtgcagcttcctgctgctgctgctgctgcaggtgagcagcagctacgccggccagttcagagtgatcggccccagacaccccatcagagccctggtgggcgacgaggtggagctgccctgcagaatcagccccggcaagaacgccaccggcatggaggtgggctggtacagaccccccttcagcagagtggtgcacctgtacagaaacggcaaggaccaggacggcgaccaggcccccgagtacagaggcagaaccgagctgctgaaggacgccatcggcgagggcaaggtgaccctgagaatcagaaacgtgagattcagcgacgagggcggcttcacctgcttcttcagagaccacagctaccaggaggaggccgccatggagctgaaggtggaggaccccttctactgggtgagccccggcgtgctggtgctgctggccgtgctgcccgtgctgctgctgcagatcaccgtgggcctggtgttcctgtgcctgcagtacagactgagaggcaagctgagagccgagatcgagaacctgcacagaaccttcggccagttcctggaggagctgctgttccacctggaggccctgagcggctag

SEQ ID NO: 89677 - DNA, 396 bp, synthetic construct
  misc_feature 1..396: note = Description of Artificial Sequence: Synthetic coding sequence
  source 1..396: mol_type = other DNA
atggccagcctgagcagacccagcctgcccagctgcctgtgcagcttcctgctgctgctgctgctgcaggtgagcagcagctacgccgaccccttctactgggtgagccccggcgtgctggtgctgctggccgtgctgcccgtgctgctgctgcagatcaccgtgggcctgatcttcctgtgcctgcagtacagactgagaggcaagctgagagccgagatcgagaacctgcacagaaccttcgacccccacttcctgagagtgccctgctggaagatcaccctgttcgtgatcgtgcccgtgctgggccccctggtggccctgatcatctgctacaactggctgcacagaagactggccggccagttcctggaggagctgagaaaccccttctag

SEQ ID NO: 89678 - DNA, 621 bp, synthetic construct
  misc_feature 1..621: note = Description of Artificial Sequence: Synthetic coding sequence
  source 1..621: mol_type = other DNA
atggccagcctgagcagacccagcctgcccagctgcctgtgcagcttcctgctgctgctgctgctgcaggtgagcagcagctacgccggccagttcagagtgatcggccccagacaccccatcagagccctggtgggcgacgaggtggagctgccctgcagaatcagccccggcaagaacgccaccggcatggaggtgggctggtacagaccccccttcagcagagtggtgcacctgtacagaaacggcaaggaccaggacggcgaccaggcccccgagtacagaggcagaaccgagctgctgaaggacgccatcggcgagggcaaggtgaccctgagaatcagaaacgtgagattcagcgacgagggcggcttcacctgcttcttcagagaccacagctaccaggaggaggccgccatggagctgaaggtggaggaccccttctactgggtgagccccggcgtgctggtgctgctggccgtgctgcccgtgctgctgctgcagatcaccgtgggcctgatcttcctgtgcctgcagtacagactgagaggcaagctgagagccgagatcgagaacctgcacagaaccttcgtgttccacctggaggccctgagcggctag

SEQ ID NO: 89679 - DNA, 759 bp, synthetic construct
  misc_feature 1..759: note = Description of Artificial Sequence: Synthetic coding sequence
  source 1..759: mol_type = other DNA
atggccagcctgagcagacccagcctgcccagctgcctgtgcagcttcctgctgctgctgctgctgcaggtgagcagcagctacgccggccagttcagagtgatcggccccagacaccccatcagagccctggtgggcgacgaggtggagctgccctgcagaatcagccccggcaagaacgccaccggcatggaggtgggctggtacagaccccccttcagcagagtggtgcacctgtacagaaacggcaaggaccaggacggcgaccaggcccccgagtacagaggcagaaccgagctgctgaaggacgccatcggcgagggcaaggtgaccctgagaatcagaaacgtgagattcagcgacgagggcggcttcacctgcttcttcagagaccacagctaccaggaggaggccgccatggagctgaaggtggaggaccccttctactgggtgagccccggcgtgctggtgctgctggccgtgctgcccgtgctgctgctgcagatcaccgtgggcctgatcttcctgtgcctgcagtacagactgagaggcaagctgagagccgagatcgagaacctgcacagaaccttcgacccccacttcctgagagtgccctgctggaagatcaccctgttcgtgatcgtgcccgtgctgggccccctggtggccctgatcatctgctacaactggctgcacagaagactggccggccagttcctggaggagctgctgttccacctggaggccctgagcggctag

SEQ ID NO: 89680 - DNA, 516 bp, synthetic construct
  misc_feature 1..516: note = Description of Artificial Sequence: Synthetic coding sequence
  source 1..516: mol_type = other DNA
atggccagcctgagcagacccagcctgcccagctgcctgtgcagcttcctgctgctgctgctgctgcaggtgagcagcagctacgccggccagttcagagtgatcggccccagacaccccatcagagccctggtgggcgacgaggtggagctgccctgcagaatcagccccggcaagaacgccaccggcatggaggtgggctggtacagaccccccttcagcagagtggtgcacctgtacagaaacggcaaggaccaggacggcgaccaggcccccgagtacagaggcagaaccgagctgctgaaggacgccatcggcgagggcaaggtgaccctgagaatcagaaacgtgagattcagcgacgagggcggcttcacctgcttcttcagagaccacagctaccaggaggaggccgccatggagctgaaggtggaggtgagccacagcgtgacccaggactggctgcagtggcacgaccacggcagcctgcagccccccccccccagactgaagtag

SEQ ID NO: 89681 - DNA, 744 bp, synthetic construct
  misc_feature 1..744: note = Description of Artificial Sequence: Synthetic coding sequence
  source 1..744: mol_type = other DNA
atggccagcctgagcagacccagcctgcccagctgcctgtgcagcttcctgctgctgctgctgctgcaggtgagcagcagctacgccggccagttcagagtgatcggccccagacaccccatcagagccctggtgggcgacgaggtggagctgccctgcagaatcagccccggcaagaacgccaccggcatggaggtgggctggtacagaccccccttcagcagagtggtgcacctgtacagaaacggcaaggaccaggacggcgaccaggcccccgagtacagaggcagaaccgagctgctgaaggacgccatcggcgagggcaaggtgaccctgagaatcagaaacgtgagattcagcgacgagggcggcttcacctgcttcttcagagaccacagctaccaggaggaggccgccatggagctgaaggtggaggaccccttctactgggtgagccccggcgtgctggtgctgctggccgtgctgcccgtgctgctgctgcagatcaccgtgggcctgatcttcctgtgcctgcagtacagactgagaggcaagctgagagccgagatcgagaacctgcacagaaccttcgacccccacttcctgagagtgccctgctggaagatcaccctgttcgtgatcgtgcccgtgctgggccccctggtggccctgatcatctgctacaactggctgcacagaagactggccggccagttcctggaggagctgagaaaccccttctag

SEQ ID NO: 89682 - DNA, 396 bp, synthetic construct
  misc_feature 1..396: note = Description of Artificial Sequence: Synthetic coding sequence
  source 1..396: mol_type = other DNA
atggccagcctgagcagacccagcctgcccagctgcctgtgcagcttcctgctgctgctgctgctgcaggtgagcagcagctacgccgaccccttctactgggtgagccccggcgtgctggtgctgctggccgtgctgcccgtgctgctgctgcagatcaccgtgggcctggtgttcctgtgcctgcagtacagactgagaggcaagctgagagccgagatcgagaacctgcacagaaccttcgacccccacttcctgagagtgccctgctggaagatcaccctgttcgtgatcgtgcccgtgctgggccccctggtggccctgatcatctgctacaactggctgcacagaagactggccggccagttcctggaggagctgagaaaccccttctag

SEQ ID NO: 89683 - DNA, 744 bp, synthetic construct
  misc_feature 1..744: note = Description of Artificial Sequence: Synthetic coding sequence
  source 1..744: mol_type = other DNA
atggccagcctgagcagacccagcctgcccagctgcctgtgcagcttcctgctgctgctgctgctgcaggtgagcagcagctacgccggccagttcagagtgatcggccccagacaccccatcagagccctggtgggcgacgaggtggagctgccctgcagaatcagccccggcaagaacgccaccggcatggaggtgggctggtacagaccccccttcagcagagtggtgcacctgtacagaaacggcaaggaccaggacggcgaccaggcccccgagtacagaggcagaaccgagctgctgaaggacgccatcggcgagggcaaggtgaccctgagaatcagaaacgtgagattcagcgacgagggcggcttcacctgcttcttcagagaccacagctaccaggaggaggccgccatggagctgaaggtggaggaccccttctactgggtgagccccggcgtgctggtgctgctggccgtgctgcccgtgctgctgctgcagatcaccgtgggcctggtgttcctgtgcctgcagtacagactgagaggcaagctgagagccgagatcgagaacctgcacagaaccttcgacccccacttcctgagagtgccctgctggaagatcaccctgttcgtgatcgtgcccgtgctgggccccctggtggccctgatcatctgctacaactggctgcacagaagactggccggccagttcctggaggagctgagaaaccccttctag

SEQ ID NO: 89684 - DNA, 744 bp, synthetic construct; identical to SEQ ID NO: 89683
  misc_feature 1..744: note = Description of Artificial Sequence: Synthetic coding sequence
  source 1..744: mol_type = other DNA

SEQ ID NO: 89685 - DNA, 690 bp, synthetic construct
  misc_feature 1..690: note = Description of Artificial Sequence: Synthetic coding sequence
  source 1..690: mol_type = other DNA
atggccagcctgagcagacccagcctgcccagctgcctgtgcagcttcctgctgctgctgctgctgcaggtgagcagcagctacgccggccagttcagagtgatcggccccagacaccccatcagagccctggtgggcgacgaggtggagctgccctgcagaatcagccccggcaagaacgccaccggcatggaggtgggctggtacagaccccccttcagcagagtggtgcacctgtacagaaacggcaaggaccaggacggcgaccaggcccccgagtacagaggcagaaccgagctgctgaaggacgccatcggcgagggcaaggtgaccctgagaatcagaaacgtgagattcagcgacgagggcggcttcacctgcttcttcagagaccacagctaccaggaggaggccgccatggagctgaaggtggaggaccccttctactgggtgagccccggcgtgctggtgctgctggccgtgctgcccgtgctgctgctgcagatcaccgtgggcctggtgttcctgtgcctgcagtacagactgagaggcaagctgagagccgagatcgagaacctgcacagaaccttcgagagcttcggcgtgctgggcccccaggtgaaggagcccaagaagaccggccagttcctggaggagctgctgttccacctggaggccctgagcggctag

SEQ ID NO: 89686 - DNA, 642 bp, synthetic construct
  misc_feature 1..642: note = Description of Artificial Sequence: Synthetic coding sequence
  source 1..642: mol_type = other DNA
atggccagcctgagcagacccagcctgcccagctgcctgtgcagcttcctgctgctgctgctgctgcaggtgagcagcagctacgccggccagttcagagtgatcggccccagacaccccatcagagccctggtgggcgacgaggtggagctgccctgcagaatcagccccggcaagaacgccaccggcatggaggtgggctggtacagaccccccttcagcagagtggtgcacctgtacagaaacggcaaggaccaggacggcgaccaggcccccgagtacagaggcagaaccgagctgctgaaggacgccatcggcgagggcaaggtgaccctgagaatcagaaacgtgagattcagcgacgagggcggcttcacctgcttcttcagagaccacagctaccaggaggaggccgccatggagctgaaggtggaggaccccttctactgggtgagccccggcgtgctggtgctgctggccgtgctgcccgtgctgctgctgcagatcaccgtgggcctgatcttcctgtgcctgcagtacagactgagaggcaagctgagagccgagatcgagaacctgcacagaaccttcggccagttcctggaggagctgctgttccacctggaggccctgagcggctag

SEQ ID NO: 89687 - DNA, 675 bp, synthetic construct
  misc_feature 1..675: note = Description of Artificial Sequence: Synthetic coding sequence
  source 1..675: mol_type = other DNA
atggccagcctgagcagacccagcctgcccagctgcctgtgcagcttcctgctgctgctgctgctgcaggtgagcagcagctacgccggccagttcagagtgatcggccccagacaccccatcagagccctggtgggcgacgaggtggagctgccctgcagaatcagccccggcaagaacgccaccggcatggaggtgggctggtacagaccccccttcagcagagtggtgcacctgtacagaaacggcaaggaccaggacggcgaccaggcccccgagtacagaggcagaaccgagctgctgaaggacgccatcggcgagggcaaggtgaccctgagaatcagaaacgtgagattcagcgacgagggcggcttcacctgcttcttcagagaccacagctaccaggaggaggccgccatggagctgaaggtggaggaccccttctactgggtgagccccggcgtgctggtgctgctggccgtgctgcccgtgctgctgctgcagatcaccgtgggcctgatcttcctgtgcctgcagtacagactgagaggcaagctgagagccgagatcgagaacctgcacagaaccttcgagagcttcggcgtgctgggcccccaggtgaaggagcccaagaagaccggccagttcctggaggagctgagaaaccccttctag

SEQ ID NO: 89688 - DNA, 675 bp, synthetic construct
  misc_feature 1..675: note = Description of Artificial Sequence: Synthetic coding sequence
  source 1..675: mol_type = other DNA
atggccagcctgagcagacccagcctgcccagctgcctgtgcagcttcctgctgctgctgctgctgcaggtgagcagcagctacgccggccagttcagagtgatcggccccagacaccccatcagagccctggtgggcgacgaggtggagctgccctgcagaatcagccccggcaagaacgccaccggcatggaggtgggctggtacagaccccccttcagcagagtggtgcacctgtacagaaacggcaaggaccaggacggcgaccaggcccccgagtacagaggcagaaccgagctgctgaaggacgccatcggcgagggcaaggtgaccctgagaatcagaaacgtgagattcagcgacgagggcggcttcacctgcttcttcagagaccacagctaccaggaggaggccgccatggagctgaaggtggaggaccccttctactgggtgagccccggcgtgctggtgctgctggccgtgctgcccgtgctgctgctgcagatcaccctgggcctggtgttcctgtgcctgcagtacagactgagaggcaagctgagagccgagatcgagaacctgcacagaaccttcgagagcttcggcgtgctgggcccccaggtgaaggagcccaagaagaccggccagttcctggaggagctgagaaaccccttctag

SEQ ID NO: 89689 - DNA, 690 bp, synthetic construct; identical to SEQ ID NO: 89685
  misc_feature 1..690: note = Description of Artificial Sequence: Synthetic coding sequence
  source 1..690: mol_type = other DNA

SEQ ID NO: 89690 - DNA, 642 bp, synthetic construct; identical to SEQ ID NO: 89676
  misc_feature 1..642: note = Description of Artificial Sequence: Synthetic coding sequence
  source 1..642: mol_type = other DNA

SEQ ID NO: 89691 - DNA, 540 bp, synthetic construct
  misc_feature 1..540: note = Description of Artificial Sequence: Synthetic coding sequence
  source 1..540: mol_type = other DNA
tgacagttcagagtgatcggccccagacaccccatcagagccctggtgggcgacgaggtggagctgccctgcagaatcagccccggcaagaacgccaccggcatggaggtgggctggtacagaccccccttcagcagagtggtgcacctgtacagaaacggcaaggaccaggacggcgaccaggcccccgagtacagaggcagaaccgagctgctgaaggacgccatcggcgagggcaaggtgaccctgagaatcagaaacgtgagattcagcgacgagggcggcttcacctgcttcttcagagaccacagctaccaggaggaggccgccatggagctgaaggtggaggaccccttctactgggtgagccccggcgtgctggtgctgctggccgtgctgcccgtgctgctgctgcagatcaccgtgggcctggtgttcctgtgcctgcagtacagactgagaggcaagctgagagccgagatcgagaacctgcacagaaccttcggccagttcctggaggagctgagaaaccccttctag

SEQ ID NO: 89692 - DNA, 396 bp, synthetic construct; identical to SEQ ID NO: 89682
  misc_feature 1..396: note = Description of Artificial Sequence: Synthetic coding sequence
  source 1..396: mol_type = other DNA

SEQ ID NO: 89693 - DNA, 615 bp, synthetic construct
  misc_feature 1..615: note = Description of Artificial Sequence: Synthetic coding sequence
  source 1..615: mol_type = other DNA
agcctgagcagacccagcctgcccagctgcctgtgcagcttcctgctgctgctgctgctgcaggtgagcagcagctacgccggccagttcagagtgatcggccccagacaccccatcagagccctggtgggcgacgaggtggagctgccctgcagaatcagccccggcaagaacgccaccggcatggaggtgggctggtacagaccccccttcagcagagtggtgcacctgtacagaaacggcaaggaccaggacggcgaccaggcccccgagtacagaggcagaaccgagctgctgaaggacgccatcggcgagggcaaggtgaccctgagaatcagaaacgtgagattcagcgacgagggcggcttcacctgcttcttcagagaccacagctaccaggaggaggccgccatggagctgaaggtggaggaccccttctactgggtgagccccggcgtgctggtgctgctggccgtgctgcccgtgctgctgctgcagatcaccgtgggcctggtgttcctgtgcctgcagtacagactgagaggcaagctgagagccgagatcgagaacctgcacagaaccttcgtgttccacctggaggccctgagcggctag

SEQ ID NO: 89694 - DNA, 396 bp, synthetic construct
  misc_feature 1..396: note = Description of Artificial Sequence: Synthetic coding sequence
  source 1..396: mol_type = other DNA
atggccagcctgagcagacccagcctgcccagctgcctgtgcagcttcctgctgctgctgctgctgcaggtgagcagcagctacgccgaccccttctactgggtgagccccggcgtgctggtgctgctggccgtgctgcccgtgctgctgctgcagatcaccctgggcctggtgttcctgtgcctgcagtacagactgagaggcaagctgagagccgagatcgagaacctgcacagaaccttcgacccccacttcctgagagtgccctgctggaagatcaccctgttcgtgatcgtgcccgtgctgggccccctggtggccctgatcatctgctacaactggctgcacagaagactggccggccagttcctggaggagctgagaaaccccttctag

SEQ ID NO: 89695 - DNA, 675 bp, synthetic construct
  misc_feature 1..675: note = Description of Artificial Sequence: Synthetic coding sequence
  source 1..675: mol_type = other DNA
atggccagcctgagcagacccagcctgcccagctgcctgtgcagcttcctgctgctgctgctgctgcaggtgagcagcagctacgccggccagttcagagtgatcggccccagacaccccatcagagccctggtgggcgacgaggtggagctgccctgcagaatcagccccggcaagaacgccaccggcatggaggtgggctggtacagaccccccttcagcagagtggtgcacctgtacagaaacggcaaggaccaggacggcgaccaggcccccgagtacagaggcagaaccgagctgctgaaggacgccatcggcgagggcaaggtgaccctgagaatcagaaacgtgagattcagcgacgagggcggcttcacctgcttcttcagagaccacagctaccaggaggaggccgccatggagctgaaggtggaggaccccttctactgggtgagccccggcgtgctggtgctgctggccgtgctgcccgtgctgctgctgcagatcaccgtgggcctggtgttcctgtgcctgcagtacagactgagaggcaagctgagagccgagatcgagaacctgcacagaaccttcgagagcttcggcgtgctgggcccccaggtgaaggagcccaagaagaccggccagttcctggaggagctgagaaaccccttctag

SEQ ID NO: 89696 - DNA, 675 bp, synthetic construct; identical to SEQ ID NO: 89695
  misc_feature 1..675: note = Description of Artificial Sequence: Synthetic coding sequence
  source 1..675: mol_type = other DNA

SEQ ID NO: 89697 - DNA, 675 bp, synthetic construct; identical to SEQ ID NO: 89695
  misc_feature 1..675: note = Description of Artificial Sequence: Synthetic coding sequence
  source 1..675: mol_type = other DNA

SEQ ID NO: 89698 - DNA, 759 bp, synthetic construct
  misc_feature 1..759: note = Description of Artificial Sequence: Synthetic coding sequence
  source 1..759: mol_type = other DNA
atggccagcctgagcagacccagcctgcccagctgcctgtgcagcttcctgctgctgctgctgctgcaggtgagcagcagctacgccggccagttcagagtgatcggccccagacaccccatcagagccctggtgggcgacgaggtggagctgccctgcagaatcagccccggcaagaacgccaccggcatggaggtgggctggtacagaccccccttcagcagagtggtgcacctgtacagaaacggcaaggaccaggacggcgaccaggcccccgagtacagaggcagaaccgagctgctgaaggacgccatcggcgagggcaaggtgaccctgagaatcagaaacgtgagattcagcgacgagggcggcttcacctgcttcttcagagaccacagctaccaggaggaggccgccatggagctgaaggtggaggaccccttctactgggtgagccccggcgtgctggtgctgctggccgtgctgcccgtgctgctgctgcagatcaccgtgggcctggtgttcctgtgcctgcagtacagactgagaggcaagctgagagccgagatcgagaacctgcacagaaccttcgacccccacttcctgagagtgccctgctggaagatcaccctgttcgtgatcgtgcccgtgctgggccccctggtggccctgatcatctgctacaactggctgcacagaagactggccggccagttcctggaggagctgctgttccacctggaggccctgagcggctag

SEQ ID NO: 89699 - DNA, 744 bp, synthetic construct; identical to SEQ ID NO: 89683
  misc_feature 1..744: note = Description of Artificial Sequence: Synthetic coding sequence
  source 1..744: mol_type = other DNA

SEQ ID NO: 89700 - DNA, 540 bp, synthetic construct; identical to SEQ ID NO: 89691
  misc_feature 1..540: note = Description of Artificial Sequence: Synthetic coding sequence
  source 1..540: mol_type = other DNA

SEQ ID NO: 89701 - DNA, 540 bp, synthetic construct; identical to SEQ ID NO: 89691
  misc_feature 1..540: note = Description of Artificial Sequence: Synthetic coding sequence
  source 1..540: mol_type = other DNA

SEQ ID NO: 89702 - DNA, 759 bp, synthetic construct; identical to SEQ ID NO: 89698
  misc_feature 1..759: note = Description of Artificial Sequence: Synthetic coding sequence
  source 1..759: mol_type = other DNA

SEQ ID NO: 89703 - DNA, 690 bp, synthetic construct; identical to SEQ ID NO: 89685
  misc_feature 1..690: note = Description of Artificial Sequence: Synthetic coding sequence
  source 1..690: mol_type = other DNA

SEQ ID NO: 89704 - DNA, 888 bp, synthetic construct; identical to SEQ ID NO: 89675
  misc_feature 1..888: note = Description of Artificial Sequence: Synthetic coding sequence
  source 1..888: mol_type = other DNA

SEQ ID NO: 89705 - DNA, 642 bp, synthetic construct; identical to SEQ ID NO: 89676
  misc_feature 1..642: note = Description of Artificial Sequence: Synthetic coding sequence
  source 1..642: mol_type = other DNA

SEQ ID NO: 89706 - DNA, 759 bp, synthetic construct; identical to SEQ ID NO: 89698
  misc_feature 1..759: note = Description of Artificial Sequence: Synthetic coding sequence
  source 1..759: mol_type = other DNA

SEQ ID NO: 89707 - DNA, 540 bp, synthetic construct; identical to SEQ ID NO: 89691
  misc_feature 1..540: note = Description of Artificial Sequence: Synthetic coding sequence
  source 1..540: mol_type = other DNA

SEQ ID NO: 89708 - DNA, 888 bp, synthetic construct; identical to SEQ ID NO: 89675
  misc_feature 1..888: note = Description of Artificial Sequence: Synthetic coding sequence
  source 1..888: mol_type = other DNA

SEQ ID NO: 89709 - DNA, 888 bp, synthetic construct; identical to SEQ ID NO: 89675
  misc_feature 1..888: note = Description of Artificial Sequence: Synthetic coding sequence
  source 1..888: mol_type = other DNA

SEQ ID NO: 89710 - DNA, 396 bp, synthetic construct; identical to SEQ ID NO: 89682
  misc_feature 1..396: note = Description of Artificial Sequence: Synthetic coding sequence
  source 1..396: mol_type = other DNA

SEQ ID NO: 89711 - DNA, 759 bp, synthetic construct; identical to SEQ ID NO: 89698
  misc_feature 1..759: note = Description of Artificial Sequence: Synthetic coding sequence
  source 1..759: mol_type = other DNA

SEQ ID NO: 89712 - DNA, 744 bp, synthetic construct; identical to SEQ ID NO: 89683
  misc_feature 1..744: note = Description of Artificial Sequence: Synthetic coding sequence
  source 1..744: mol_type = other DNA

SEQ ID NO: 89713 - DNA, 615 bp, synthetic construct; identical to SEQ ID NO: 89693
  misc_feature 1..615: note = Description of Artificial Sequence: Synthetic coding sequence
  source 1..615: mol_type = other DNA

SEQ ID NO: 89714 - DNA, 888 bp, synthetic construct
  misc_feature 1..888: note = Description of Artificial Sequence: Synthetic coding sequence
  source 1..888: mol_type = other DNA
atggccagcctgagcagacccagcctgcccagctgcctgtgcagcttcctgctgctgctgctgctgcaggtgagcagcagctacgccggccagttcagagtgatcggccccagacaccccatcagagccctggtgggcgacgaggtggagctgccctgcagaatcagccccggcaagaacgccaccggcatggaggtgggctggtacagaccccccttcagcagagtggtgcacctgtacagaaacggcaaggaccaggacggcgaccaggcccccgagtacagaggcagaaccgagctgctgaaggacgccatcggcgagggcaaggtgaccctgagaatcagaaacgtgagattcagcgacgagggcggcttcacctgcttcttcagagaccacagctaccaggaggaggccgccatggagctgaaggtggaggaccccttctactgggtgagccccggcgtgctggtgctgctggccgtgctgcccgtgctgctgctgcagatcaccctgggcctggtgttcctgtgcctgcagtacagactgagaggcaagctgagagccgagatcgagaacctgcacagaaccttcgacccccacttcctgagagtgccctgctggaagatcaccctgttcgtgatcgtgcccgtgctgggccccctggtggccctgatcatctgctacaactggctgcacagaagactggccggccagttcctggaggagctgagaaagttcagcagcctgtgctacaagcagagaatcaagagccaggagagagagaccgaggccaccagaggcagaggcggcctgctgagagaccacatccccagaggcaaggaggagctggagagcctgggcggcggcaagaccccccccggcagatag

SEQ ID NO: 89715 - DNA, 690 bp, synthetic construct; identical to SEQ ID NO: 89685
  misc_feature 1..690: note = Description of Artificial Sequence: Synthetic coding sequence
  source 1..690: mol_type = other DNA

SEQ ID NO: 89716 - DNA, 396 bp, synthetic construct; identical to SEQ ID NO: 89682
  misc_feature 1..396: note = Description of Artificial Sequence: Synthetic coding sequence
  source 1..396: mol_type = other DNA

SEQ ID NO: 89717 - DNA, 540 bp, synthetic construct
  misc_feature 1..540: note = Description of Artificial Sequence: Synthetic coding sequence
  source 1..540: mol_type = other DNA
tgacagttcagagtgatcggccccagacaccccatcagagccctggtgggcgacgaggtggagctgccctgcagaatcagccccggcaagaacgccaccggcatggaggtgggctggtacagaccccccttcagcagagtggtgcacctgtacagaaacggcaaggaccaggacggcgaccaggcccccgagtacagaggcagaaccgagctgctgaaggacgccatcggcgagggcaaggtgaccctgagaatcagaaacgtgagattcagcgacgagggcggcttcacctgcttcttcagagaccacagctaccaggaggaggccgccatggagctgaaggtggaggaccccttctactgggtgagccccggcgtgctggtgctgctggccgtgctgcccgtgctgctgctgcagatcaccctgggcctggtgttcctgtgcctgcagtacagactgagaggcaagctgagagccgagatcgagaacctgcacagaaccttcggccagttcctggaggagctgagaaaccccttctag

SEQ ID NO: 89718 - DNA, 627 bp, synthetic construct
  misc_feature 1..627: note = Description of Artificial Sequence: Synthetic coding sequence
  source 1..627: mol_type = other DNA
atggccagcctgagcagacccagcctgcccagctgcctgtgcagcttcctgctgctgctgctgctgcaggtgagcagcagctacgccggccagttcagagtgatcggccccagacaccccatcagagccctggtgggcgacgaggtggagctgccctgcagaatcagccccggcaagaacgccaccggcatggaggtgggctggtacagaccccccttcagcagagtggtgcacctgtacagaaacggcaaggaccaggacggcgaccaggcccccgagtacagaggcagaaccgagctgctgaaggacgccatcggcgagggcaaggtgaccctgagaatcagaaacgtgagattcagcgacgagggcggcttcacctgcttcttcagagaccacagctaccaggaggaggccgccatggagctgaaggtggaggaccccttctactgggtgagccccggcgtgctggtgctgctggccgtgctgcccgtgctgctgctgcagatcaccgtgggcctgatcttcctgtgcctgcagtacagactgagaggcaagctgagagccgagatcgagaacctgcacagaaccttcggccagttcctggaggagctgagaaaccccttctag

SEQ ID NO: 89719 - DNA, 744 bp, synthetic construct; identical to SEQ ID NO: 89683
  misc_feature 1..744: note = Description of Artificial Sequence: Synthetic coding sequence
  source 1..744: mol_type = other DNA

SEQ ID NO: 89720 - DNA, 396 bp, synthetic construct; identical to SEQ ID NO: 89682
  misc_feature 1..396: note = Description of Artificial Sequence: Synthetic coding sequence
  source 1..396: mol_type = other DNA

SEQ ID NO: 89721 - DNA, 642 bp, synthetic construct; identical to SEQ ID NO: 89676
  misc_feature 1..642: note = Description of Artificial Sequence: Synthetic coding sequence
  source 1..642: mol_type = other DNA

SEQ ID NO: 89722 - DNA, 615 bp, synthetic construct
  misc_feature 1..615: note = Description of Artificial Sequence: Synthetic coding sequence
  source 1..615: mol_type = other DNA
agcctgagcagacccagcctgcccagctgcctgtgcagcttcctgctgctgctgctgctgcaggtgagcagcagctacgccggccagttcagagtgatcggccccagacaccccatcagagccctggtgggcgacgaggtggagctgccctgcagaatcagccccggcaagaacgccaccggcatggaggtgggctggtacagaccccccttcagcagagtggtgcacctgtacagaaacggcaaggaccaggacggcgaccaggcccccgagtacagaggcagaaccgagctgctgaaggacgccatcggcgagggcaaggtgaccctgagaatcagaaacgtgagattcagcgacgagggcggcttcacctgcttcttcagagaccacagctaccaggaggaggccgccatggagctgaaggtggaggaccccttctactgggtgagccccggcgtgctggtgctgctggccgtgctgcccgtgctgctgctgcagatcaccctgggcctggtgttcctgtgcctgcagtacagactgagaggcaagctgagagccgagatcgagaacctgcacagaaccttcgtgttccacctggaggccctgagcggctag

SEQ ID NO: 89723 - DNA, 675 bp, synthetic construct; identical to SEQ ID NO: 89695
  misc_feature 1..675: note = Description of Artificial Sequence: Synthetic coding sequence
  source 1..675: mol_type = other DNA

SEQ ID NO: 89724 - DNA, 690 bp, synthetic construct; identical to SEQ ID NO: 89685
  misc_feature 1..690: note = Description of Artificial Sequence: Synthetic coding sequence
  source 1..690: mol_type = other DNA

SEQ ID NO: 89725 - DNA, 888 bp, synthetic construct; identical to SEQ ID NO: 89675
  misc_feature 1..888: note = Description of Artificial Sequence: Synthetic coding sequence
  source 1..888: mol_type = other DNA

SEQ ID NO: 89726 - DNA, 540 bp, synthetic construct; identical to SEQ ID NO: 89691
  misc_feature 1..540: note = Description of Artificial Sequence: Synthetic coding sequence
  source 1..540: mol_type = other DNA

SEQ ID NO: 89727 - DNA, 642 bp, synthetic construct; identical to SEQ ID NO: 89676
  misc_feature 1..642: note = Description of Artificial Sequence: Synthetic coding sequence
  source 1..642: mol_type = other DNA

SEQ ID NO: 89728 - DNA, 759 bp, synthetic construct; identical to SEQ ID NO: 89698
  misc_feature 1..759: note = Description of Artificial Sequence: Synthetic coding sequence
  source 1..759: mol_type = other DNA

SEQ ID NO: 89729 - DNA, 642 bp, synthetic construct; identical to SEQ ID NO: 89676
  misc_feature 1..642: note = Description of Artificial Sequence: Synthetic coding sequence
  source 1..642: mol_type = other DNA

SEQ ID NO: 89730 - DNA, 675 bp, synthetic construct; identical to SEQ ID NO: 89695
  misc_feature 1..675: note = Description of Artificial Sequence: Synthetic coding sequence
  source 1..675: mol_type = other DNA

SEQ ID NO: 89731 - DNA, 615 bp, synthetic construct; identical to SEQ ID NO: 89693
  misc_feature 1..615: note = Description of Artificial Sequence: Synthetic coding sequence
  source 1..615: mol_type = other DNA

SEQ ID NO: 89732 - DNA, 675 bp, synthetic construct; identical to SEQ ID NO: 89695
  misc_feature 1..675: note = Description of Artificial Sequence: Synthetic coding sequence
  source 1..675: mol_type = other DNA

SEQ ID NO: 89733 - DNA, 759 bp, synthetic construct; identical to SEQ ID NO: 89698
  misc_feature 1..759: note = Description of Artificial Sequence: Synthetic coding sequence
  source 1..759: mol_type = other DNA

SEQ ID NO: 89734 - DNA, 744 bp, synthetic construct; identical to SEQ ID NO: 89683
  misc_feature 1..744: note = Description of Artificial Sequence: Synthetic coding sequence
  source 1..744: mol_type = other DNA

SEQ ID NO: 89735 - DNA, 615 bp, synthetic construct; identical to SEQ ID NO: 89693
  misc_feature 1..615: note = Description of Artificial Sequence: Synthetic coding sequence
  source 1..615: mol_type = other DNA

SEQ ID NO: 89736 - DNA, 888 bp, synthetic construct; identical to SEQ ID NO: 89675
  misc_feature 1..888: note = Description of Artificial Sequence: Synthetic coding sequence
  source 1..888: mol_type = other DNA

SEQ ID NO: 89737 - DNA, 759 bp, synthetic construct
  misc_feature 1..759: note = Description of Artificial Sequence: Synthetic coding sequence
  source 1..759: mol_type = other DNA
atggccagcctgagcagacccagcctgcccagctgcctgtgcagcttcctgctgctgctgctgctgcaggtgagcagcagctacgccggccagttcagagtgatcggccccagacaccccatcagagccctggtgggcgacgaggtggagctgccctgcagaatcagccccggcaagaacgccaccggcatggaggtgggctggtacagaccccccttcagcagagtggtgcacctgtacagaaacggcaaggaccaggacggcgaccaggcccccgagtacagaggcagaaccgagctgctgaaggacgccatcggcgagggcaaggtgaccctgagaatcagaaacgtgagattcagcgacgagggcggcttcacctgcttcttcagagaccacagctaccaggaggaggccgccatggagctgaaggtggaggaccccttctactgggtgagccccggcgtgctggtgctgctggccgtgctgcccgtgctgctgctgcagatcaccctgggcctggtgttcctgtgcctgcagtacagactgagaggcaagctgagagccgagatcgagaacctgcacagaaccttcgacccccacttcctgagagtgccctgctggaagatcaccctgttcgtgatcgtgcccgtgctgggccccctggtggccctgatcatctgctacaactggctgcacagaagactggccggccagttcctggaggagctgctgttccacctggaggccctgagcggctag

SEQ ID NO: 89738 - DNA, 540 bp, synthetic construct; identical to SEQ ID NO: 89691
  misc_feature 1..540: note = Description of Artificial Sequence: Synthetic coding sequence
  source 1..540: mol_type = other DNA

SEQ ID NO: 89739 - DNA, 396 bp, synthetic construct; identical to SEQ ID NO: 89682
  misc_feature 1..396: note = Description of Artificial Sequence: Synthetic coding sequence
  source 1..396: mol_type = other DNA

SEQ ID NO: 89740 - DNA, 744 bp, synthetic construct
  misc_feature 1..744: note = Description of Artificial Sequence: Synthetic coding sequence
  source 1..744: mol_type = other DNA
atggccagcctgagcagacccagcctgcccagctgcctgtgcagcttcctgctgctgctgctgctgcaggtgagcagcagctacgccggccagttcagagtgatcggccccagacaccccatcagagccctggtgggcgacgaggtggagctgccctgcagaatcagccccggcaagaacgccaccggcatggaggtgggctggtacagaccccccttcagcagagtggtgcacctgtacagaaacggcaaggaccaggacggcgaccaggcccccgagtacagaggcagaaccgagctgctgaaggacgccatcggcgagggcaaggtgaccctgagaatcagaaacgtgagattcagcgacgagggcggcttcacctgcttcttcagagaccacagctaccaggaggaggccgccatggagctgaaggtggaggaccccttctactgggtgagccccggcgtgctggtgctgctggccgtgctgcccgtgctgctgctgcagatcaccctgggcctggtgttcctgtgcctgcagtacagactgagaggcaagctgagagccgagatcgagaacctgcacagaaccttcgacccccacttcctgagagtgccctgctggaagatcaccctgttcgtgatcgtgcccgtgctgggccccctggtggccctgatcatctgctacaactggctgcacagaagactggccggccagttcctggaggagctgagaaaccccttctag

SEQ ID NO: 89741 - DNA, 642 bp, synthetic construct
  misc_feature 1..642: note = Description of Artificial Sequence: Synthetic coding sequence
  source 1..642: mol_type = other DNA
atggccagcctgagcagacccagcctgcccagctgcctgtgcagcttcctgctgctgctgctgctgcaggtgagcagcagctacgccggccagttcagagtgatcggccccagacaccccatcagagccctggtgggcgacgaggtggagctgccctgcagaatcagccccggcaagaacgccaccggcatggaggtgggctggtacagaccccccttcagcagagtggtgcacctgtacagaaacggcaaggaccaggacggcgaccaggcccccgagtacagaggcagaaccgagctgctgaaggacgccatcggcgagggcaaggtgaccctgagaatcagaaacgtgagattcagcgacgagggcggcttcacctgcttcttcagagaccacagctaccaggaggaggccgccatggagctgaaggtggaggaccccttctactgggtgagccccggcgtgctggtgctgctggccgtgctgcccgtgctgctgctgcagatcaccctgggcctggtgttcctgtgcctgcagtacagactgagaggcaagctgagagccgagatcgagaacctgcacagaaccttcggccagttcctggaggagctgctgttccacctggaggccctgagcggctag

SEQ ID NO: 89742 - DNA, 615 bp, synthetic construct; identical to SEQ ID NO: 89693
  misc_feature 1..615: note = Description of Artificial Sequence: Synthetic coding sequence
  source 1..615: mol_type = other DNA

SEQ ID NO: 89743 - DNA, 690 bp, synthetic construct; identical to SEQ ID NO: 89685
  misc_feature 1..690: note = Description of Artificial Sequence: Synthetic coding sequence
  source 1..690: mol_type = other DNA

SEQ ID NO: 89744 - DNA, 615 bp, synthetic construct; identical to SEQ ID NO: 89693
  misc_feature 1..615: note = Description of Artificial Sequence: Synthetic coding sequence
  source 1..615: mol_type = other DNA

SEQ ID NO: 89745 - DNA, 690 bp, synthetic construct
  misc_feature 1..690: note = Description of Artificial Sequence: Synthetic coding sequence
  source 1..690: mol_type = other DNA
atggccagcctgagcagacccagcctgcccagctgcctgtgcagcttcctgctgctgctgctgctgcaggtgagcagcagctacgccggccagttcagagtgatcggccccagacaccccatcagagccctggtgggcgacgaggtggagctgccctgcagaatcagccccggcaagaacgccaccggcatggaggtgggctggtacagaccccccttcagcagagtggtgcacctgtacagaaacggcaaggaccaggacggcgaccaggcccccgagtacagaggcagaaccgagctgctgaaggacgccatcggcgagggcaaggtgaccctgagaatcagaaacgtgagattcagcgacgagggcggcttcacctgcttcttcagagaccacagctaccaggaggaggccgccatggagctgaaggtggaggaccccttctactgggtgagccccggcgtgctggtgctgctggccgtgctgcccgtgctgctgctgcagatcaccctgggcctggtgttcctgtgcctgcagtacagactgagaggcaagctgagagccgagatcgagaacctgcacagaaccttcgagagcttcggcgtgctgggcccccaggtgaaggagcccaagaagaccggccagttcctggaggagctgctgttccacctggaggccctgagcggctag

SEQ ID NO: 89746 - DNA, 690 bp, synthetic construct
  misc_feature 1..690: note = Description of Artificial Sequence: Synthetic coding sequence
  source 1..690: mol_type = other DNA
atggccagcctgagcagacccagcctgcccagctgcctgtgcagcttcctgctgctgctgctgctgcaggtgagcagcagctacgccggccagttcagagtgatcggccccagacaccccatcagagccctggtgggcgacgaggtggagctgccctgcagaatcagccccggcaagaacgccaccggcatggaggtgggctggtacagaccccccttcagcagagtggtgcacctgtacagaaacggcaaggaccaggacggcgaccaggcccccgagtacagaggcagaaccgagctgctgaaggacgccatcggcgagggcaaggtgaccctgagaatcagaaacgtgagattcagcgacgagggcggcttcacctgcttcttcagagaccacagctaccaggaggaggccgccatggagctgaaggtggaggaccccttctactgggtgagccccggcgtgctggtgctgctggccgtgctgcccgtgctgctgctgcagatcaccgtgggcctgatcttcctgtgcctgcagtacagactgagaggcaagctgagagccgagatcgagaacctgcacagaaccttcgagagcttcggcgtgctgggcccccaggtgaaggagcccaagaagaccggccagttcctggaggagctgctgttccacctggaggccctgagcggctag

SEQ ID NO: 89747 - DNA, 516 bp, synthetic construct; identical to SEQ ID NO: 89680
  misc_feature 1..516: note = Description of Artificial Sequence: Synthetic coding sequence
  source 1..516: mol_type = other DNA

SEQ ID NO: 89748 - DNA, 534 bp, synthetic construct
  misc_feature 1..534: note = Description of Artificial Sequence: Synthetic coding sequence
  source 1..534: mol_type = other DNA
atgagccacatcagctgggaggagagatacagaaacggcaaggaccaggacggcgaccaggcccccgagtacagaggcagaaccgagctgctgaaggacgccatcggcgagggcaaggtgaccctgagaatcagaaacgtgagattcagcgacgagggcggcttcacctgcttcttcagagaccacagctaccaggaggaggccgccatggagctgaaggtggaggaccccttctactgggtgagccccggcgtgctggtgctgctggccgtgctgcccgtgctgctgctgcagatcaccgtgggcctggtgttcctgtgcctgcagtacagactgagaggcaagctgagagccgagatcgagaacctgcacagaaccttcgacccccacttcctgagagtgccctgctggaagatcaccctgttcgtgatcgtgcccgtgctgggccccctggtggccctgatcatctgctacaactggctgcacagaagactggccggccagttcctggaggagctgagaaaccccttctag

SEQ ID NO: 89749 - DNA, 174 bp, synthetic construct
  misc_feature 1..174: note = Description of Artificial Sequence: Synthetic coding sequence
  source 1..174: mol_type = other DNA
atggccagcctgagcagacccagcctgcccagctgcctgtgcagcttcctgctgctgctgctgctgcaggtgagcagcagctacgccggcctggtggccgtggccagaagctggctgatcgccgccagcaccagccaggcccaggtgatcctgctgacccagcccctggagtag

SEQ ID NO: 89750 - DNA, 627 bp, synthetic construct
  misc_feature 1..627: note = Description of Artificial Sequence: Synthetic coding sequence
  source 1..627: mol_type = other DNA
atggccagcctgagcagacccagcctgcccagctgcctgtgcagcttcctgctgctgctgctgctgcaggtgagcagcagctacgccggccagttcagagtgatcggccccagacaccccatcagagccctggtgggcgacgaggtggagctgccctgcagaatcagccccggcaagaacgccaccggcatggaggtgggctggtacagaccccccttcagcagagtggtgcacctgtacagaaacggcaaggaccaggacggcgaccaggcccccgagtacagaggcagaaccgagctgctgaaggacgccatcggcgagggcaaggtgaccctgagaatcagaaacgtgagattcagcgacgagggcggcttcacctgcttcttcagagaccacagctaccaggaggaggccgccatggagctgaaggtggaggaccccttctactgggtgagccccggcgtgctggtgctgctggccgtgctgcccgtgctgctgctgcagatcaccgtgggcctggtgttcctgtgcctgcagtacagactgagaggcaagctgagagccgagatcgagaacctgcacagaaccttcggccagttcctggaggagctgagaaaccccttctag

SEQ ID NO: 89751 - DNA, 516 bp, synthetic construct; identical to SEQ ID NO: 89680
  misc_feature 1..516: note = Description of Artificial Sequence: Synthetic coding sequence
  source 1..516: mol_type = other DNA

SEQ ID NO: 89752 - DNA, 516 bp, synthetic construct; identical to SEQ ID NO: 89680
  misc_feature 1..516: note = Description of Artificial Sequence: Synthetic coding sequence
  source 1..516: mol_type = other DNA

SEQ ID NO: 89753 - DNA, 621 bp, synthetic construct
  misc_feature 1..621: note = Description of Artificial Sequence: Synthetic coding sequence
  source 1..621: mol_type = other DNA
atggccagcctgagcagacccagcctgcccagctgcctgtgcagcttcctgctgctgctgctgctgcaggtgagcagcagctacgccggccagttcagagtgatcggccccagacaccccatcagagccctggtgggcgacgaggtggagctgccctgcagaatcagccccggcaagaacgccaccggcatggaggtgggctggtacagaccccccttcagcagagtggtgcacctgtacagaaacggcaaggaccaggacggcgaccaggcccccgagtacagaggcagaaccgagctgctgaaggacgccatcggcgagggcaaggtgaccctgagaatcagaaacgtgagattcagcgacgagggcggcttcacctgcttcttcagagaccacagctaccaggaggaggccgccatggagctgaaggtggaggaccccttctactgggtgagccccggcgtgctggtgctgctggccgtgctgcccgtgctgctgctgcagatcaccgtgggcctggtgttcctgtgcctgcagtacagactgagaggcaagctgagagccgagatcgagaacctgcacagaaccttcgtgttccacctggaggccctgagcggctag

SEQ ID NO: 89754 - DNA, 627 bp, synthetic construct; identical to SEQ ID NO: 89750
  misc_feature 1..627: note = Description of Artificial Sequence: Synthetic coding sequence
  source 1..627: mol_type = other DNA

SEQ ID NO: 89755 - DNA, 621 bp, synthetic construct; identical to SEQ ID NO: 89753
  misc_feature 1..621: note = Description of Artificial Sequence: Synthetic coding sequence
  source 1..621: mol_type = other DNA

SEQ ID NO: 89756 - DNA, 534 bp, synthetic construct; identical to SEQ ID NO: 89748
  misc_feature 1..534: note = Description of Artificial Sequence: Synthetic coding sequence
  source 1..534: mol_type = other DNA

SEQ ID NO: 89757 - DNA, 621 bp, synthetic construct; identical to SEQ ID NO: 89753
  misc_feature 1..621: note = Description of Artificial Sequence: Synthetic coding sequence
  source 1..621: mol_type = other DNA

SEQ ID NO: 89758 - DNA, 621 bp, synthetic construct; identical to SEQ ID NO: 89753
  misc_feature 1..621: note = Description of Artificial Sequence: Synthetic coding sequence
  source 1..621: mol_type = other DNA

SEQ ID NO: 89759 - DNA, 534 bp, synthetic construct; identical to SEQ ID NO: 89748
  misc_feature 1..534: note = Description of Artificial Sequence: Synthetic coding sequence
  source 1..534: mol_type = other DNA

SEQ ID NO: 89760 - DNA, 621 bp, synthetic construct; identical to SEQ ID NO: 89753
  misc_feature 1..621: note = Description of Artificial Sequence: Synthetic coding sequence
  source 1..621: mol_type = other DNA

SEQ ID NO: 89761 - DNA, 174 bp, synthetic construct; identical to SEQ ID NO: 89749
  misc_feature 1..174: note = Description of Artificial Sequence: Synthetic coding sequence
  source 1..174: mol_type = other DNA

SEQ ID NO: 89762 - DNA, 621 bp, synthetic construct; identical to SEQ ID NO: 89753
  misc_feature 1..621: note = Description of Artificial Sequence: Synthetic coding sequence
  source 1..621: mol_type = other DNA

SEQ ID NO: 89763 - DNA, 516 bp, synthetic construct; identical to SEQ ID NO: 89680
  misc_feature 1..516: note = Description of Artificial Sequence: Synthetic coding sequence
  source 1..516: mol_type = other DNA

SEQ ID NO: 89764 - DNA, 621 bp, synthetic construct
  misc_feature 1..621: note = Description of Artificial Sequence: Synthetic coding sequence
  source 1..621: mol_type = other DNA
atggccagcctgagcagacccagcctgcccagctgcctgtgcagcttcctgctgctgctgctgctgcaggtgagcagcagctacgccggccagttcagagtgatcggccccagacaccccatcagagccctggtgggcgacgaggtggagctgccctgcagaatcagccccggcaagaacgccaccggcatggaggtgggctggtacagaccccccttcagcagagtggtgcacctgtacagaaacggcaaggaccaggacggcgaccaggcccccgagtacagaggcagaaccgagctgctgaaggacgccatcggcgagggcaaggtgaccctgagaatcagaaacgtgagattcagcgacgagggcggcttcacctgcttcttcagagaccacagctaccaggaggaggccgccatggagctgaaggtggaggaccccttctactgggtgagccccggcgtgctggtgctgctggccgtgctgcccgtgctgctgctgcagatcaccctgggcctggtgttcctgtgcctgcagtacagactgagaggcaagctgagagccgagatcgagaacctgcacagaaccttcgtgttccacctggaggccctgagcggctag

SEQ ID NO: 89765 - DNA, 516 bp, synthetic construct; identical to SEQ ID NO: 89680
  misc_feature 1..516: note = Description of Artificial Sequence: Synthetic coding sequence
  source 1..516: mol_type = other DNA

SEQ ID NO: 89766 - DNA, 516 bp, synthetic construct; identical to SEQ ID NO: 89680
  misc_feature 1..516: note = Description of Artificial Sequence: Synthetic coding sequence
  source 1..516: mol_type = other DNA

SEQ ID NO: 89767 - DNA, 627 bp, synthetic construct; identical to SEQ ID NO: 89750
  misc_feature 1..627: note = Description of Artificial Sequence: Synthetic coding sequence
  source 1..627: mol_type = other DNA

SEQ ID NO: 89768 - DNA, 174 bp, synthetic construct; identical to SEQ ID NO: 89749
  misc_feature 1..174: note = Description of Artificial Sequence: Synthetic coding sequence
  source 1..174: mol_type = other DNA

SEQ ID NO: 89769 - DNA, 627 bp, synthetic construct; identical to SEQ ID NO: 89750
  misc_feature 1..627: note = Description of Artificial Sequence: Synthetic coding sequence
  source 1..627: mol_type = other DNA

SEQ ID NO: 89770 - DNA, 174 bp, synthetic construct; identical to SEQ ID NO: 89749
  misc_feature 1..174: note = Description of Artificial Sequence: Synthetic coding sequence
  source 1..174: mol_type = other DNA

SEQ ID NO: 89771 - DNA, 534 bp, synthetic construct; identical to SEQ ID NO: 89748
  misc_feature 1..534: note = Description of Artificial Sequence: Synthetic coding sequence
  source 1..534: mol_type = other DNA

SEQ ID NO: 89772 - DNA, 516 bp, synthetic construct; identical to SEQ ID NO: 89680
  misc_feature 1..516: note = Description of Artificial Sequence: Synthetic coding sequence
  source 1..516: mol_type = other DNA

SEQ ID NO: 89773 - DNA, 534 bp, synthetic construct
  misc_feature 1..534: note = Description of Artificial Sequence: Synthetic coding sequence
  source 1..534: mol_type = other DNA
atgagccacatcagctgggaggagagatacagaaacggcaaggaccaggacggcgaccaggcccccgagtacagaggcagaaccgagctgctgaaggacgccatcggcgagggcaaggtgaccctgagaatcagaaacgtgagattcagcgacgagggcggcttcacctgcttcttcagagaccacagctaccaggaggaggccgccatggagctgaaggtggaggaccccttctactgggtgagccccggcgtgctggtgctgctggccgtgctgcccgtgctgctgctgcagatcaccctgggcctggtgttcctgtgcctgcagtacagactgagaggcaagctgagagccgagatcgagaacctgcacagaaccttcgacccccacttcctgagagtgccctgctggaagatcaccctgttcgtgatcgtgcccgtgctgggccccctggtggccctgatcatctgctacaactggctgcacagaagactggccggccagttcctggaggagctgagaaaccccttctag

SEQ ID NO: 89774 - DNA, 627 bp, synthetic construct; identical to SEQ ID NO: 89750
  misc_feature 1..627: note = Description of Artificial Sequence: Synthetic coding sequence
  source 1..627: mol_type = other DNA

SEQ ID NO: 89775 - DNA, 174 bp, synthetic construct; identical to SEQ ID NO: 89749
  misc_feature 1..174: note = Description of Artificial Sequence: Synthetic coding sequence
  source 1..174: mol_type = other DNA

SEQ ID NO: 89776 - DNA, 174 bp, synthetic construct; identical to SEQ ID NO: 89749
  misc_feature 1..174: note = Description of Artificial Sequence: Synthetic coding sequence
  source 1..174: mol_type = other DNA

SEQ ID NO: 89777 - DNA, 534 bp, synthetic construct; identical to SEQ ID NO: 89748
  misc_feature 1..534: note = Description of Artificial Sequence: Synthetic coding sequence
  source 1..534: mol_type = other DNA

SEQ ID NO: 89778 - DNA, 516 bp, synthetic construct; identical to SEQ ID NO: 89680
  misc_feature 1..516: note = Description of Artificial Sequence: Synthetic coding sequence
  source 1..516: mol_type = other DNA

SEQ ID NO: 89779 - DNA, 534 bp, synthetic construct; identical to SEQ ID NO: 89748
  misc_feature 1..534: note = Description of Artificial Sequence: Synthetic coding sequence
  source 1..534: mol_type = other DNA

SEQ ID NO: 89780 - DNA, 174 bp, synthetic construct; identical to SEQ ID NO: 89749
  misc_feature 1..174: note = Description of Artificial Sequence: Synthetic coding sequence
  source 1..174: mol_type = other DNA

SEQ ID NO: 89781 - DNA, 627 bp, synthetic construct; identical to SEQ ID NO: 89750
  misc_feature 1..627: note = Description of Artificial Sequence: Synthetic coding sequence
  source 1..627: mol_type = other DNA

SEQ ID NO: 89782 - DNA, 327 bp, synthetic construct
  misc_feature 1..327: note = Description of Artificial Sequence: Synthetic coding sequence
  source 1..327: mol_type = other DNA
atggccagcctgagcagacccagcctgcccagctgcctgtgcagcttcctgctgctgctgctgctgcaggtgagcagcagctacgccgaccccttctactgggtgagccccggcgtgctggtgctgctggccgtgctgcccgtgctgctgctgcagatcaccgtgggcctgatcttcctgtgcctgcagtacagactgagaggcaagctgagagccgagatcgagaacctgcacagaaccttcgagagcttcggcgtgctgggcccccaggtgaaggagcccaagaagaccggccagttcctggaggagctgagaaaccccttctag

SEQ ID NO: 89783 - DNA, 753 bp, synthetic construct
  misc_feature 1..753: note = Description of Artificial Sequence: Synthetic coding sequence
  source 1..753: mol_type = other DNA
atggcccccggcgcccccagcagcagccccagccccatcctggccgtgctgctgttcagcagcctggtgctgagccccgcccaggccatcgtggtgtacaccgacagagaggtgcacggcgccgtgggcagcagagtgaccctgcactgcagcttctggagcagcgagtgggtgagcgacgacatcagcttcacctggagataccagcccgagggcggcagagacgccatcagcatcttccactacgccaagggccagccctacatcgacgaggtgggcaccttcaaggagagaatccagtgggtgggcgaccccagatggaaggacggcagcatcgtgatccacaacctggactacagcgacaacggcaccttcacctgcgacgtgaagaacccccccgacatcgtgggcaagaccagccaggtgaccctgtacgtgttcgagaaggtgcccaccagatacggcgtggtgctgggcgccgtgatcggcggcgtgctgggcgtggtgctgctgctgctgctgctgttctacgtggtgagatactgctggctgagaagacaggccgccctgcagagaagactgagcgccatggagaagggcaagctgcacaagcccggcaaggacgccagcaagagaggcagacagacccccgtgctgtaccagtgctggaccaccgccgaggcccccaagctgagcgtgagaagaagacccagaggctggggcagcctggccagaatcagaaacagcggctag

SEQ ID NO: 89784 - DNA, 777 bp, synthetic construct
  misc_feature 1..777: note = Description of Artificial Sequence: Synthetic coding sequence
  source 1..777: mol_type = other DNA
atgctgagagcccccgcccccgcccccgccatggcccccggcgcccccagcagcagccccagccccatcctggccgtgctgctgttcagcagcctggtgctgagccccgcccaggccatcgtggtgtacaccgacagagaggtgcacggcgccgtgggcagcagagtgaccctgcactgcagcttctggagcagcgagtgggtgagcgacgacatcagcttcacctggagataccagcccgagggcggcagagacgccatcagcatcttccactacgccaagggccagccctacatcgacgaggtgggcaccttcaaggagagaatccagtgggtgggcgaccccagatggaaggacggcagcatcgtgatccacaacctggactacagcgacaacggcaccttcacctgcgacgtgaagaacccccccgacatcgtgggcaagaccagccaggtgaccctgtacgtgttcgagaaggtgcccaccagatacggcgtggtgctgggcgccgtgatcggcggcgtgctgggcgtggtgctgctgctgctgctgctgttctacgtggtgagatactgctggctgagaagacaggccgccctgcagagaagactgagcgccatggagaagggcaagctgcacaagcccggcaaggacgccagcaagagaggcagacagacccccgtgctgtacgccatgctggaccacagcagaagcaccaaggccgtgagcgagaagaaggccaagggcctgggcgagagcagaaaggacaagaagtag

SEQ ID NO: 89785 - DNA, 747 bp, synthetic construct
  misc_feature 1..747: note = Description of Artificial Sequence: Synthetic coding sequence
  source 1..747: mol_type = other DNA
atggcccccggcgcccccagcagcagccccagccccatcctggccgtgctgctgttcagcagcctggtgctgagccccgcccaggccatcgtggtgtacaccgacagagaggtgcacggcgccgtgggcagcagagtgaccctgcactgcagcttctggagcagcgagtgggtgagcgacgacatcagcttcacctggagataccagcccgagggcggcagagacgccatcagcatcttccactacgccaagggccagccctacatcgacgaggtgggcaccttcaaggagagaatccagtgggtgggcgaccccagatggaaggacggcagcatcgtgatccacaacctggactacagcgacaacggcaccttcacctgcgacgtgaagaacccccccgacatcgtgggcaagaccagccaggtgaccctgtacgtgttcgagaaggtgcccaccagatacggcgtggtgctgggcgccgtgatcggcggcgtgctgggcgtggtgctgctgctgctgctgctgttctacgtggtgagatactgctggctgagaagacaggccgccctgcagagaagactgagcgccatggagaagggcaagctgcacaagcccggcaaggacgccagcaagagaggcagacagacccccgtgctgtacgccatgctggaccacagcagaagcaccaaggccgtgagcgagaagaaggccaagggcctgggcgagagcagaaaggacaagaagtag

SEQ ID NO: 89786 - DNA, 747 bp, synthetic construct; identical to SEQ ID NO: 89785
  misc_feature 1..747: note = Description of Artificial Sequence: Synthetic coding sequence
  source 1..747: mol_type = other DNA

SEQ ID NO: 89787 - DNA, 648 bp, synthetic construct
  misc_feature 1..648: note = Description of Artificial Sequence: Synthetic coding sequence
  source 1..648: mol_type = other DNA
atgtacggcaagagcagcaccagagccgtgctgctgctgctgggcatccagctgaccgccctgtggcccatcgccgccgtggagatctacaccagcagagtgctggaggccgtgaacggcaccgacgccagactgaagtgcaccttcagcagcttcgcccccgtgggcgacgccctgaccgtgacctggaacttcagacccctggacggcggccccgagcagttcgtgttctactaccacatcgaccccttccagcccatgagcggcagattcaaggacagagtgagctgggacggcaaccccgagagatacgacgccagcatcctgctgtggaagctgcagttcgacgacaacggcacctacacctgccaggtgaagaacccccccgacgtggacggcgtgatcggcgagatcagactgagcgtggtgcacaccgtgagattcagcgagatccacttcctggccctggccatcggcagcgcctgcgccctgatgatcatcatcgtgatcgtggtggtgctgttccagcactacagaaagaagagatgggccgagagagcccacaaggtggtggagatcaagagcaaggaggaggagagactgaaccaggagaagaaggtgagcgtgtacctggaggacaccgactag

SEQ ID NO: 89788 - DNA, 648 bp, synthetic construct; identical to SEQ ID NO: 89787
  misc_feature 1..648: note = Description of Artificial Sequence: Synthetic coding sequence
  source 1..648: mol_type = other DNA

SEQ ID NO: 89789 - DNA, 708 bp, synthetic construct
  misc_feature 1..708: note = Description of Artificial Sequence: Synthetic coding sequence
  source 1..708: mol_type = other DNA
atgcagcagagaggcgccgccggcagcagaggctgcgccctgttccccctgctgggcgtgctgttcttccagggcgtgtacatcgtgttcagcctggagatcagagccgacgcccacgtgagaggctacgtgggcgagaagatcaagctgaagtgcaccttcaagagcaccagcgacgtgaccgacaagctgaccatcgactggacctacagaccccccagcagcagccacaccgtgagcatcttccactaccagagcttccagtaccccaccaccgccggcaccttcagagacagaatcagctgggtgggcaacgtgtacaagggcgacgccagcatcagcatcagcaaccccaccatcaaggacaacggcaccttcagctgcgccgtgaagaacccccccgacgtgcaccacaacatccccatgaccgagctgaccgtgaccgagagaggcttcggcaccatgctgagcagcgtggccctgctgagcatcctggtgttcgtgcccagcgccgtggtggtggccctgctgctggtgagaatgggcagaaaggccgccggcctgaagaagagaagcagaagcggctacaagaagagcagcatcgaggtgagcgacgacaccgaccaggaggaggaggaggcctgcatggccagactgtgcgtgagatgcgccgagtgcctggacagcgactacgaggagacctactag

SEQ ID NO: 89790 - DNA, 672 bp, synthetic construct
  misc_feature 1..672: note = Description of Artificial Sequence: Synthetic coding sequence
  source 1..672: mol_type = other DNA
atgcagcagagaggcgccgccggcagcagaggctgcgccctgttccccctgctgggcgtgctgttcttccaggacgcccacgtgagaggctacgtgggcgagaagatcaagctgaagtgcaccttcaagagcaccagcgacgtgaccgacaagctgaccatcgactggacctacagaccccccagcagcagccacaccgtgagcatcttccactaccagagcttccagtaccccaccaccgccggcaccttcagagacagaatcagctgggtgggcaacgtgtacaagggcgacgccagcatcagcatcagcaaccccaccatcaaggacaacggcaccttcagctgcgccgtgaagaacccccccgacgtgcaccacaacatccccatgaccgagctgaccgtgaccgagagaggcttcggcaccatgctgagcagcgtggccctgctgagcatcctggtgttcgtgcccagcgccgtggtggtggccctgctgctggtgagaatgggcagaaaggccgccggcctgaagaagagaagcagaagcggctacaagaagagcagcatcgaggtgagcgacgacaccgaccaggaggaggaggaggcctgcatggccagactgtgcgtgagatgcgccgagtgcctggacagcgactacgaggagacctactag

SEQ ID NO: 89791 - DNA, 3366 bp, synthetic construct
  misc_feature 1..3366: note = Description of Artificial Sequence: Synthetic coding sequence
  source 1..3366: mol_type = other DNA
atgagcctggagaacgaggacaagagagccagaaccagaagcaaggccctgagaggcccccccgagaccaccgccgccgacctgagctgccccacccccggctgcaccggcagcggccacgtgagaggcaagtacagcagacacagaagcctgcagagctgccccctggccaagaagagaaagctggagggcgccgaggccgagcacctggtgagcaagagaaagagccaccccctgaagctggccctggacgagggctacggcgtggacagcgacggcagcgaggacaccgaggtgaaggacgccagcgtgagcgacgagagcgagggcaccctggagggcgccgaggccgagaccagcggccaggacgagatccacagacccgagaccgccgagggcagaagccccgtgaagagccacttcggcagcaaccccatcggcagcgccaccgccagcagcaagggcagctacagcagctaccagggcatcatcgccaccagcctgctgaacctgggccagatcgccgaggagaccctggtggaggaggacctgggccaggccgccaagcccggccccggcatcgtgcacctgctgcaggaggccgccgagggcgccgccagcgaggagggcgagaagggcctgttcatccagcccgaggacgccgaggaggtggtggaggtgaccaccgagagaagccaggacctgtgcccccagagcctggaggacgccgccagcgaggagagcagcaagcagaagggcatcctgagccacgaggaggaggacgaggaggaggaggaggaggaggaggaggaggaggaggacgaggaggaggaggaggaggaggaggaggaggaggaggaggaggaggaggaggaggaggaggaggaggaggaggaggaggaggaggaggaggaggaggccgcccccgacgtgatcttccaggaggacaccagccacaccagcgcccagaaggcccccgagctgagaggccccgagagccccagccccaagcccgagtacagcgtgatcgtggaggtgagaagcgacgacgacaaggacgaggacacccacagcagaaagagcaccgtgaccgacgagagcgagatgcaggacatgatgaccagaggcaacctgggcctgctggagcaggccatcgccctgaaggccgagcaggtgagaaccgtgtgcgagcccggctgcccccccgccgagcagagccagctgggcctgggcgagcccggcaaggccgccaagcccctggacaccgtgagaaagagctactacagcaaggaccccagcagagccgagaagagagagatcaagtgccccacccccggctgcgacggcaccggccacgtgaccggcctgtacccccaccacagaagcctgagcggctgcccccacaaggacagaatcccccccgagatcctggccatgcacgagaacgtgctgaagtgccccacccccggctgcaccggccagggccacgtgaacagcaacagaaacacccacagaagcctgagcggctgccccatcgccgccgccgagaagctggccaagagccacgagaagcagcagccccagaccggcgaccccagcaagagcagcagcaacagcgacagaatcctgagacccatgtgcttcgtgaagcagctggaggtgcccccctacggcagctacagacccaacgtggcccccgccacccccagagccaacctggccaaggagctggagaagttcagcaaggtgaccttcgactacgccagcttcgacgcccaggtgttcggcaagagaatgctggcccccaagatccagaccagcgagaccagccccaaggccttccagtgcttcgactacagccaggacgccgaggccgcccacatggccgccaccgccatcctgaacctgagcaccagatgctgggagatgcccgagaacctgagcaccaagccccaggacctgcccagcaagagcgtggacatcgaggtggacgagaacggcaccctggacctgagcatgcacaagcacagaaagagagagaacgccttccccagcagcagcagctgcagcagcagccccggcgtgaagagccccgacgccagccagagacacagcagcaccagcgcccccagcagcagcatgaccagcccccagagcagccaggccagcagacaggacgagtgggacagacccctggactacaccaagcccagcagactgagagaggaggagcccgaggagagcgagcccgccgcccacagcttcgccagcagcgaggccgacgaccaggaggtgagcgaggagaacttcgaggagagaaagtaccccggcgaggtgaccctgaccaacttcaagctgaagttcctgagcaaggacatcaagaaggagctgctgacctgccccacccccggctgcgacggcagcggccacatcaccggcaactacgccagccacagaagcctgagcggctgccccctggccgacaagagcctgagaaacctgatggccgcccacagcgccgacctgaagtgccccacccccggctgcgacggcagcggccacatcaccggcaactacgccagccacagaagcctgagcggctgccccagagccaagaagagcggcgtgaaggtggcccccaccaaggacgacaaggaggaccccgagctgatgaagtgccccgtgcccggctgcgtgggcctgggccacatcagcggcaagtacgccagccacagaagcgccagcggctgccccctggccgccagaagacagaaggagggcagcctgaacggcagcagcttcagctggaagagcctgaagaacgagggccccacctgccccacccccggctgcgacggcagcggccacgccaacggcagcttcctgacccacagaagcctgagcggctgccccagagccaccttcgccggcaagaagggcaagctgagcggcgacgaggtgctgagccccaagttcaagaccagcgacgtgctggagaacgacgaggagatcaagcagctgaaccaggagatcagagacctgaacgagagcaacagcgagatggaggccgccatggtgcagctgcagagccagatcagcagcatggagaagaacctgaagaacatcgaggaggagaacaagctgatcgaggagcagaacgaggccctgttcctggagctgagcggcctgagccaggccctgatccagagcctggccaacatcagactgccccacatggagcccatctgcgagcagaacttcgacgcctacgtgagcaccctgaccgacatgtacagcaaccaggaccccgagaacaaggacctgctggagagcatcaagcaggccgtgagaggcatccaggtgtag

SEQ ID NO: 89792 - DNA, 1776 bp, synthetic construct
  misc_feature 1..1776: note = Description of Artificial Sequence: Synthetic coding sequence
  source 1..1776: mol_type = other DNA
atgagcctggagaacgaggacaagagagccagaaccagaagcaaggccctgagaggcccccccgagaccaccgccgccgacctgagctgccccacccccggctgcaccggcagcggccacgtgagaggcaagtacagcagacacagaagcctgcagagctgccccctggccaagaagagaaagctggagggcgccgaggccgagcacctggtgagcaagagaaagagccaccccctgaagctggccctggacgagggctacggcgtggacagcgacggcagcgaggacaccgaggtgaaggacgccagcgtgagcgacgagagcgagggcaccctggagggcgccgaggccgagaccagcggccaggacgagatccacagacccgagaccgccgaggaccccagcagagccgagaagagagagatcaagtgccccacccccggctgcgacggcaccggccacgtgaccggcctgtacccccaccacagaagcctgagcggctgcccccacaaggacagaatcccccccgagatcctggccatgcacgagaacgtgctgaagtgccccacccccggctgcaccggccagggccacgtgaacagcaacagaaacacccacagaagcctgagcggctgccccatcgccgccgccgagaagctggccaagagccacgagaagcagcagccccagaccggcgaccccagcaagagcagcagcaacagcgacagaatcctgagacccatgtgcttcgtgaagcagctggaggtgcccccctacggcagctacagacccaacgtggcccccgccacccccagagccaacctggccaaggagctggagaagttcagcaaggtgaccttcgactacgccagcttcgacgcccaggtgttcggcaagagaatgctggcccccaagatccagaccagcgagaccagccccaaggccttccagtgcttcgactacagccaggacgccgaggccgcccacatggccgccaccgccatcctgaacctgagcaccagatgctgggagatgcccgagaacctgagcaccaagccccaggacctgcccagcaagagcgtggacatcgaggtggacgagaacggcaccctggacctgagcatgcacaagcacagaaagagagagaacgccttccccagcagcagcagctgcagcagcagccccggcgtgaagagccccgacgccagccagagacacagcagcaccagcgcccccagcagcagcatgaccagcccccagagcagccaggccagcagacaggacgagtgggacagacccctggactacaccaagcccagcagactgagagaggaggagcccgaggagagcgagcccgccgcccacagcttcgccagcagcgaggccgacgaccaggaggtgagcgaggagaacttcgaggagagaaagtaccccggcgaggtgaccctgaccaacttcaagctgaagttcctgagcaaggacatcaagaaggagctgctgacctgccccacccccggctgcgacggcagcggccacatcaccggcaactacgccagccacagaagatgccccacccccggctgcgacggcagcggccacatcaccggcaactacgccagccacagaagcctgagcggctgccccagagccaagaagagcggcgtgaaggtggcccccaccaaggacgacaaggaggaccccgagctgatgaagtacgtgggcccctgctggctgttccactgcatcgccgagctgagattcagctgcgtgctgtag

SEQ ID NO: 89793 - DNA, 3447 bp, synthetic construct
  misc_feature 1..3447: note = Description of Artificial Sequence: Synthetic coding sequence
  source 1..3447: mol_type = other DNA
atgagcctggagaacgaggacaagagagccagaaccagaagcaaggccctgagaggcccccccgagaccaccgccgccgacctgagctgccccacccccggctgcaccggcagcggccacgtgagaggcaagtacagcagacacagaagcctgcagagctgccccctggccaagaagagaaagctggagggcgccgaggccgagcacctggtgagcaagagaaagagccaccccctgaagctggccctggacgagggctacggcgtggacagcgacggcagcgaggacaccgaggtgaaggacgccagcgtgagcgacgagagcgagggcaccctggagggcgccgaggccgagaccagcggccaggacgagatccacagacccgagaccgccgagggcagaagccccgtgaagagccacttcggcagcaaccccatcggcagcgccaccgccagcagcaagggcagctacagcagctaccagggcatcatcgccaccagcctgctgaacctgggccagatcgccgaggagaccctggtggaggaggacctgggccaggccgccaagcccggccccggcatcgtgcacctgctgcaggaggccgccgagggcgccgccagcgaggagggcgagaagggcctgttcatccagcccgaggacgccgaggaggtggtggaggtgaccaccgagagaagccaggacctgtgcccccagagcctggaggacgccgccagcgaggagagcagcaagcagaagggcatcctgagccacgaggaggaggacgaggaggaggaggaggaggaggaggaggaggaggaggacgaggaggaggaggaggaggaggaggaggaggaggaggaggaggaggaggaggaggaggaggaggaggaggaggaggaggaggaggaggaggaggaggccgcccccgacgtgatcttccaggaggacaccagccacaccagcgcccagaaggcccccgagctgagaggccccgagagccccagccccaagcccgagtacagcgtgatcgtggaggtgagaagcgacgacgacaaggacgaggacacccacagcagaaagagcaccgtgaccgacgagagcgagatgcaggacatgatgaccagaggcaacctgggcctgctggagcaggccatcgccctgaaggccgagcaggtgagaaccgtgtgcgagcccggctgcccccccgccgagcagagccagctgggcctgggcgagcccggcaaggccgccaagcccctggacaccgtgagaaagagctactacagcaaggaccccagcagagccgagaagagagagatcaagtgccccacccccggctgcgacggcaccggccacgtgaccggcctgtacccccaccacagaagcctgagcggctgcccccacaaggacagaatcccccccgagatcctggccatgcacgagaacgtgctgaagtgccccacccccggctgcaccggccagggccacgtgaacagcaacagaaacacccacagaagcctgagcggctgccccatcgccgccgccgagaagctggccaagagccacgagaagcagcagccccagaccggcgaccccagcaagagcagcagcaacagcgacagaatcctgagacccatgtgcttcgtgaagcagctggaggtgcccccctacggcagctacagacccaacgtggcccccgccacccccagagccaacctggccaaggagctggagaagttcagcaaggtgaccttcgactacgccagcttcgacgcccaggtgttcggcaagagaatgctggcccccaagatccagaccagcgagaccagccccaaggccttccagagcaagcccttccccaaggccagcagccccagacacagccccagcagcagctacgtgagaagcaccagcagcagcagcgccggcttcgactacagccaggacgccgaggccgcccacatggccgccaccgccatcctgaacctgagcaccagatgctgggagatgcccgagaacctgagcaccaagccccaggacctgcccagcaagagcgtggacatcgaggtggacgagaacggcaccctggacctgagcatgcacaagcacagaaagagagagaacgccttccccagcagcagcagctgcagcagcagccccggcgtgaagagccccgacgccagccagagacacagcagcaccagcgcccccagcagcagcatgaccagcccccagagcagccaggccagcagacaggacgagtgggacagacccctggactacaccaagcccagcagactgagagaggaggagcccgaggagagcgagcccgccgcccacagcttcgccagcagcgaggccgacgaccaggaggtgagcgaggagaacttcgaggagagaaagtaccccggcgaggtgaccctgaccaacttcaagctgaagttcctgagcaaggacatcaagaaggagctgctgacctgccccacccccggctgcgacggcagcggccacatcaccggcaactacgccagccacagaagcctgagcggctgccccctggccgacaagagcctgagaaacctgatggccgcccacagcgccgacctgaagtgccccacccccggctgcgacggcagcggccacatcaccggcaactacgccagccacagaagcctgagcggctgccccagagccaagaagagcggcgtgaaggtggcccccaccaaggacgacaaggaggaccccgagctgatgaagtgccccgtgcccggctgcgtgggcctgggccacatcagcggcaagtacgccagccacagaagcgccagcggctgccccctggccgccagaagacagaaggagggcagcctgaacggcagcagcttcagctggaagagcctgaagaacgagggccccacctgccccacccccggctgcgacggcagcggccacgccaacggcagcttcctgacccacagaagcctgagcggctgccccagagccaccttcgccggcaagaagggcaagctgagcggcgacgaggtgctgagccccaagttcaagaccagcgacgtgctggagaacgacgaggagatcaagcagctgaaccaggagatcagagacctgaacgagagcaacagcgagatggaggccgccatggtgcagctgcagagccagatcagcagcatggagaagaacctgaagaacatcgaggaggagaacaagctgatcgaggagcagaacgaggccctgttcctggagctgagcggcctgagccaggccctgatccagagcctggccaacatcagactgccccacatggagcccatctgcgagcagaacttcgacgcctacgtgagcaccctgaccgacatgtacagcaaccaggaccccgagaacaaggacctgctggagagcatcaagcaggccgtgagaggcatccaggtgtag

SEQ ID NO: 89794 - DNA, 3399 bp, synthetic construct
  misc_feature 1..3399: note = Description of Artificial Sequence: Synthetic coding sequence
  source 1..3399: mol_type = other DNA
atggaggtggacaccgaggagaagagacacagaaccagaagcaagggcgtgagagtgcccgtggagcccgccatccaggagctgttcagctgccccacccccggctgcgacggcagcggccacgtgagcggcaagtacgccagacacagaagcgtgtacggctgccccctggccaagaagagaaagacccaggacaagcagccccaggagcccgcccccaagagaaagcccttcgccgtgaaggccgacagcagcagcgtggacgagtgcgacgacagcgacggcaccgaggacatggacgagaaggaggaggacgaggaggaggaggaggaggaggaggaggagaacgaggaccaccagatgaactgccacaacaccagaatcatgcaggacaccgagaaggacgacaacaacaacgacgagtacgacaactacgacgagctggtggccaagagcctgctgaacctgggcaagatcgccgaggacgccgcctacagagccagaaccgagagcgagatgaacagcaacaccagcaacagcctggaggacgacagcgacaagaacgagaacctgggcagaaagagcgagctgagcctggacctggacagcgacgtggtgagagagaccgtggacagcctgaagctgctggcccagggccacggcgtggtgctgagcgagaacatgaacgacagaaactacgccgacagcatgagccagcaggacagcagaaacatgaactacgtgatgctgggcaagcccatgaacaacggcctgatggagaagatggtggaggagagcgacgaggaggtgtgcctgagcagcctggagtgcctgagaaaccagtgcttcgacctggccagaaagctgagcgagaccaacccccaggagagaaacccccagcagaacatgaacatcagacagcacgtgagacccgaggaggacttccccggcagaacccccgacagaaactacagcgacatgctgaacctgatgagactggaggagcagctgagccccagaagcagagtgttcgccagctgcgccaaggaggacggctgccacgagagagacgacgacaccaccagcgtgaacagcgacagaagcgaggaggtgttcgacatgaccaagggcaacctgaccctgctggagaaggccatcgccctggagaccgagagagccaaggccatgagagagaagatggccatggaggccggcagaagagacaacatgagaagctacgaggaccagagccccagacagctgcccggcgaggacagaaagcccaagagcagcgacagccacgtgaagaagccctactacgaccccagcagaaccgagaagaaggagagcaagtgccccacccccggctgcgacggcaccggccacgtgaccggcctgtacccccaccacagaagcctgagcggctgcccccacaaggacagagtgccccccgagatcctggccatgcacgagagcgtgctgaagtgccccacccccggctgcaccggcagaggccacgtgaacagcaacagaaacagccacagaagcctgagcggctgccccatcgccgccgccgagaagctggccaaggcccaggagaagcaccagagctgcgacgtgagcaagagcagccaggccagcgacagagtgctgagacccatgtgcttcgtgaagcagctggagatcccccagtacggctacagaaacaacgtgcccaccaccacccccagaagcaacctggccaaggagctggagaagtacagcaagaccagcttcgagtacaacagctacgacaaccacacctacggcaagagagccatcgcccccaaggtgcagaccagagacatcagccccaagggctacgacgacgccaagagatactgcaaggaccccagccccagcagcagcagcaccagcagctacgcccccagcagcagcagcaacctgagctgcggcggcggcagcagcgccagcagcacctgcagcaagagcagcttcgactacacccacgacatggaggccgcccacatggccgccaccgccatcctgaacctgagcaccagatgcagagagatgccccagaacctgagcaccaagccccaggacctgtgcgccaccagaaaccccgacatggaggtggacgagaacggcaccctggacctgagcatgaacaagcagagacccagagacagctgctgccccatcctgacccccctggagcccatgagcccccagcagcaggccgtgatgaacaacagatgcttccagctgggcgagggcgactgctgggacctgcccgtggactacaccaagatgaagcccagaagaatcgacgaggacgagagcaaggacatcacccccgaggacctggaccccttccaggaggccctggaggagagaagataccccggcgaggtgaccatccccagccccaagcccaagtacccccagtgcaaggagagcaagaaggacctgatcaccctgagcggctgccccctggccgacaagagcatcagaagcatgctggccaccagcagccaggagctgaagtgccccacccccggctgcgacggcagcggccacatcaccggcaactacgccagccacagaagcctgagcggctgccccagagccaagaagagcggcatcagaatcgcccagagcaaggaggacaaggaggaccaggagcccatcagatgccccgtgcccggctgcgacggccagggccacatcaccggcaagtacgccagccacagaagcgccagcggctgccccctggccgccaagagacagaaggacggctacctgaacggcagccagttcagctggaagagcgtgaagaccgagggcatgagctgccccacccccggctgcgacggcagcggccacgtgagcggcagcttcctgacccacagaagcctgagcggctgccccagagccaccagcgccatgaagaaggccaagctgagcggcgagcagatgctgaccatcaagcagagagccagcaacggcatcgagaacgacgaggagatcaagcagctggacgaggagatcaaggagctgaacgagagcaacagccagatggaggccgacatgatcaagctgagaacccagatcaccaccatggagagcaacctgaagaccatcgaggaggagaacaaggtgatcgagcagcagaacgagagcctgctgcacgagctggccaacctgagccagagcctgatccacagcctggccaacatccagctgccccacatggaccccatcaacgagcagaacttcgacgcctacgtgaccaccctgaccgagatgtacaccaaccaggacagataccagagccccgagaacaaggccctgctggagaacatcaagcaggccgtgagaggcatccaggtgtag

SEQ ID NO: 89795 - DNA, 3561 bp, synthetic construct
  misc_feature 1..3561: note = Description of Artificial Sequence: Synthetic coding sequence
  source 1..3561: mol_type = other DNA
atggaggtggacaccgaggagaagagacacagaaccagaagcaagggcgtgagagtgcccgtggagcccgccatccaggagctgttcagctgccccacccccggctgcgacggcagcggccacgtgagcggcaagtacgccagacacagaagcgtgtacggctgccccctggccaagaagagaaagacccaggacaagcagccccaggagcccgcccccaagagaaagcccttcgccgtgaaggccgacagcagcagcgtggacgagtgcgacgacagcgacggcaccgaggacatggacgagaaggaggaggacgagggcgaggagtacagcgaggacaacgacgagcccggcgacgaggacgaggaggacgaggagggcgacagagaggaggaggaggagatcgaggaggaggacgaggacgacgacgaggacggcgaggacgtggaggacgaggaggaggaggaggaggaggaggaggaggaggaggaggaggaggagaacgaggaccaccagatgaactgccacaacaccagaatcatgcaggacaccgagaaggacgacaacaacaacgacgagtacgacaactacgacgagctggtggccaagagcctgctgaacctgggcaagatcgccgaggacgccgcctacagagccagaaccgagagcgagatgaacagcaacaccagcaacagcctggaggacgacagcgacaagaacgagaacctgggcagaaagagcgagctgagcctggacctggacagcgacgtggtgagagagaccgtggacagcctgaagctgctggcccagggccacggcgtggtgctgagcgagaacatgaacgacagaaactacgccgacagcatgagccagcaggacagcagaaacatgaactacgtgatgctgggcaagcccatgaacaacggcctgatggagaagatggtggaggagagcgacgaggaggtgtgcctgagcagcctggagtgcctgagaaaccagtgcttcgacctggccagaaagctgagcgagaccaacccccaggagagaaacccccagcagaacatgaacatcagacagcacgtgagacccgaggaggacttccccggcagaacccccgacagaaactacagcgacatgctgaacctgatgagactggaggagcagctgagccccagaagcagagtgttcgccagctgcgccaaggaggacggctgccacgagagagacgacgacaccaccagcgtgaacagcgacagaagcgaggaggtgttcgacatgaccaagggcaacctgaccctgctggagaaggccatcgccctggagaccgagagagccaaggccatgagagagaagatggccatggaggccggcagaagagacaacatgagaagctacgaggaccagagccccagacagctgcccggcgaggacagaaagcccaagagcagcgacagccacgtgaagaagccctactacggcaaggaccccagcagaaccgagaagaaggagagcaagtgccccacccccggctgcgacggcaccggccacgtgaccggcctgtacccccaccacagaagcctgagcggctgcccccacaaggacagagtgccccccgagatcctggccatgcacgagagcgtgctgaagtgccccacccccggctgcaccggcagaggccacgtgaacagcaacagaaacagccacagaagcctgagcggctgccccatcgccgccgccgagaagctggccaaggcccaggagaagcaccagagctgcgacgtgagcaagagcagccaggccagcgacagagtgctgagacccatgtgcttcgtgaagcagctggagatcccccagtacggctacagaaacaacgtgcccaccaccacccccagaagcaacctggccaaggagctggagaagtacagcaagaccagcttcgagtacaacagctacgacaaccacacctacggcaagagagccatcgcccccaaggtgcagaccagagacatcagccccaagggctacgacgacgccaagagatactgcaaggaccccagccccagcagcagcagcaccagcagctacgcccccagcagcagcagcaacctgagctgcggcggcggcagcagcgccagcagcacctgcagcaagagcagcttcgactacacccacgacatggaggccgcccacatggccgccaccgccatcctgaacctgagcaccagatgcagagagatgccccagaacctgagcaccaagccccaggacctgtgcgccaccagaaaccccgacatggaggtggacgagaacggcaccctggacctgagcatgaacaagcagagacccagagacagctgctgccccatcctgacccccctggagcccatgagcccccagcagcaggccgtgatgaacaacagatgcttccagctgggcgagggcgactgctgggacctgcccgtggactacaccaagatgaagcccagaagaatcgacgaggacgagagcaaggacatcacccccgaggacctggaccccttccaggaggccctggaggagagaagataccccggcgaggtgaccatccccagccccaagcccaagtacccccagtgcaaggagagcaagaaggacctgatcaccctgagcggctgccccctggccgacaagagcatcagaagcatgctggccaccagcagccaggagctgaagtgccccacccccggctgcgacggcagcggccacatcaccggcaactacgccagccacagaagcctgagcggctgccccagagccaagaagagcggcatcagaatcgcccagagcaaggaggacaaggaggaccaggagcccatcagatgccccgtgcccggctgcgacggccagggccacatcaccggcaagtacgccagccacagaagcgccagcggctgccccctggccgccaagagacagaaggacggctacctgaacggcagccagttcagctggaagagcgtgaagaccgagggcatgagctgccccacccccggctgcgacggcagcggccacgtgagcggcagcttcctgacccacagaagcctgagcggctgccccagagccaccagcgccatgaagaaggccaagctgagcggcgagcagatgctgaccatcaagcagagagccagcaacggcatcgagaacgacgaggagatcaagcagctggacgaggagatcaaggagctgaacgagagcaacagccagatggaggccgacatgatcaagctgagaacccagatcaccaccatggagagcaacctgaagaccatcgaggaggagaacaaggtgatcgagcagcagaacgagagcctgctgcacgagctggccaacctgagccagagcctgatccacagcctggccaacatccagctgccccacatggaccccatcaacgagcagaacttcgacgcctacgtgaccaccctgaccgagatgtacaccaaccaggacagataccagagccccgagaacaaggccctgctggagaacatcaagcaggccgtgagaggcatccaggtgtag

SEQ ID NO: 89796 - DNA, 555 bp, synthetic construct
  misc_feature 1..555: note = Description of Artificial Sequence: Synthetic coding sequence
  source 1..555: mol_type = other DNA
atgagctgccccacccccggctgcgacggcagcggccacgtgagcggcagcttcctgacccacagaagcctgagcggctgccccagagccaccagcgccatgaagaaggccaagctgagcggcgagcagatgctgaccatcaagcagagagccagcaacggcatcgagaacgacgaggagatcaagcagctggacgaggagatcaaggagctgaacgagagcaacagccagatggaggccgacatgatcaagctgagaacccaggtgaccatcaccaccatggagagcaacctgaagaccatcgaggaggagaacaaggtgatcgagcagcagaacgagagcctgctgcacgagctggccaacctgagccagagcctgatccacagcctggccaacatccagctgccccacatggaccccatcaacgagcagaacttcgacgcctacgtgaccaccctgaccgagatgtacaccaaccaggacagataccagagccccgagaacaaggccctgctggagaacatcaagcaggccgtgagaggcatccaggtgtag

SEQ ID NO: 89797 - DNA, 3555 bp, synthetic construct
  misc_feature 1..3555: note = Description of Artificial Sequence: Synthetic coding sequence
  source 1..3555: mol_type = other DNA
atggaggtggacaccgaggagaagagacacagaaccagaagcaagggcgtgagagtgcccgtggagcccgccatccaggagctgttcagctgccccacccccggctgcgacggcagcggccacgtgagcggcaagtacgccagacacagaagcgtgtacggctgccccctggccaagaagagaaagacccaggacaagcagccccaggagcccgcccccaagagaaagcccttcgccgtgaaggccgacagcagcagcgtggacgagtgcgacgacagcgacggcaccgaggacatggacgagaaggaggaggacgagggcgaggagtacagcgaggacaacgacgagcccggcgacgaggacgaggaggacgaggagggcgacagagaggaggaggaggagatcgaggaggaggacgaggacgacgacgaggacggcgaggacgtggaggacgaggaggaggaggaggaggaggaggaggaggaggaggaggaggaggagaacgaggaccaccagatgaactgccacaacaccagaatcatgcaggacaccgagaaggacgacaacaacaacgacgagtacgacaactacgacgagctggtggccaagagcctgctgaacctgggcaagatcgccgaggacgccgcctacagagccagaaccgagagcgagatgaacagcaacaccagcaacagcctggaggacgacagcgacaagaacgagaacctgggcagaaagagcgagctgagcctggacctggacagcgacgtggtgagagagaccgtggacagcctgaagctgctggcccagggccacggcgtggtgctgagcgagaacatgaacgacagaaactacgccgacagcatgagccagcaggacagcagaaacatgaactacgtgatgctgggcaagcccatgaacaacggcctgatggagaagatggtggaggagagcgacgaggaggtgtgcctgagcagcctggagtgcctgagaaaccagtgcttcgacctggccagaaagctgagcgagaccaacccccaggagagaaacccccagcagaacatgaacatcagacagcacgtgagacccgaggaggacttccccggcagaacccccgacagaaactacagcgacatgctgaacctgatgagactggaggagcagctgagccccagaagcagagtgttcgccagctgcgccaaggaggacggctgccacgagagagacgacgacaccaccagcgtgaacagcgacagaagcgaggaggtgttcgacatgaccaagggcaacctgaccctgctggagaaggccatcgccctggagaccgagagagccaaggccatgagagagaagatggccatggaggccggcagaagagacaacatgagaagctacgaggaccagagccccagacagctgcccggcgaggacagaaagcccaagagcagcgacagccacgtgaagaagccctactacgaccccagcagaaccgagaagaaggagagcaagtgccccacccccggctgcgacggcaccggccacgtgaccggcctgtacccccaccacagaagcctgagcggctgcccccacaaggacagagtgccccccgagatcctggccatgcacgagagcgtgctgaagtgccccacccccggctgcaccggcagaggccacgtgaacagcaacagaaacagccacagaagcctgagcggctgccccatcgccgccgccgagaagctggccaaggcccaggagaagcaccagagctgcgacgtgagcaagagcagccaggccagcgacagagtgctgagacccatgtgcttcgtgaagcagctggagatcccccagtacggctacagaaacaacgtgcccaccaccacccccagaagcaacctggccaaggagctggagaagtacagcaagaccagcttcgagtacaacagctacgacaaccacacctacggcaagagagccatcgcccccaaggtgcagaccagagacatcagccccaagggctacgacgacgccaagagatactgcaaggaccccagccccagcagcagcagcaccagcagctacgcccccagcagcagcagcaacctgagctgcggcggcggcagcagcgccagcagcacctgcagcaagagcagcttcgactacacccacgacatggaggccgcccacatggccgccaccgccatcctgaacctgagcaccagatgcagagagatgccccagaacctgagcaccaagccccaggacctgtgcgccaccagaaaccccgacatggaggtggacgagaacggcaccctggacctgagcatgaacaagcagagacccagagacagctgctgccccatcctgacccccctggagcccatgagcccccagcagcaggccgtgatgaacaacagatgcttccagctgggcgagggcgactgctgggacctgcccgtggactacaccaagatgaagcccagaagaatcgacgaggacgagagcaaggacatcacccccgaggacctggaccccttccaggaggccctggaggagagaagataccccggcgaggtgaccatccccagccccaagcccaagtacccccagtgcaaggagagcaagaaggacctgatcaccctgagcggctgccccctggccgacaagagcatcagaagcatgctggccaccagcagccaggagctgaagtgccccacccccggctgcgacggcagcggccacatcaccggcaactacgccagccacagaagcctgagcggctgccccagagccaagaagagcggcatcagaatcgcccagagcaaggaggacaaggaggaccaggagcccatcagatgccccgtgcccggctgcgacggccagggccacatcaccggcaagtacgccagccacagaagcgccagcggctgccccctggccgccaagagacagaaggacggctacctgaacggcagccagttcagctggaagagcgtgaagaccgagggcatgagctgccccacccccggctgcgacggcagcggccacgtgagcggcagcttcctgacccacagaagcctgagcggctgccccagagccaccagcgccatgaagaaggccaagctgagcggcgagcagatgctgaccatcaagcagagagccagcaacggcatcgagaacgacgaggagatcaagcagctggacgaggagatcaaggagctgaacgagagcaacagccagatggaggccgacatgatcaagctgagaacccagatcaccaccatggagagcaacctgaagaccatcgaggaggagaacaaggtgatcgagcagcagaacgagagcctgctgcacgagctggccaacctgagccagagcctgatccacagcctggccaacatccagctgccccacatggaccccatcaacgagcagaacttcgacgcctacgtgaccaccctgaccgagatgtacaccaaccaggacagataccagagccccgagaacaaggccctgctggagaacatcaagcaggccgtgagaggcatccaggtgtag

SEQ ID NO: 89798 - DNA, 552 bp, synthetic construct
  misc_feature 1..552: note = Description of Artificial Sequence: Synthetic coding sequence
  source 1..552: mol_type = other DNA
atgagccagaagcccgccaaggagggccccagactgagcaagaaccagaagtacagcgagcacttcagcatccactgctgcccccccttcaccttcctgaacagcaagaaggagatcgtggacagaaagtacagcatctgcaagagcggctgcttctaccagaagaaggaggaggactggatctgctgcgcctgccagaagaccagaaccagcagaagagccaagagcccccagagacccaagcagcagcccgccgccccccccgccgtggtgagagcccccgccaagcccagaagcccccccagaagcgagagacagcccagaagcccccccagaagcgagagacagcccagaagcccccccagaagcgagagacagcccagaagcccccccagaagcgagagacagcccagacccagacccgaggtgagacccccccccgccaagcagagacccccccagaagagcaagcagcagcccagaagcagccccctgagaggccccggcgccagcagaggcggcagccccgtgaaggccagcagattctggtag

SEQ ID NO: 89799 - DNA, 246 bp, synthetic construct
  misc_feature 1..246: note = Description of Artificial Sequence: Synthetic coding sequence
  source 1..246: mol_type = other DNA
atgagccagaagcccgccaaggagggccccagactgagcaagaaccagaagtacagcgagcacttcagcatccactgctgcccccccttcaccttcctgaacagcaagaaggagatcgtggacagaaagtacagcatctgcaagagcggctgcttctaccagaagaaggaggaggactggatctgctgcgcctgccagaagaccagactgaagagaaagatcagacccacccccaagaagaagtag

SEQ ID NO: 89800 - DNA, 246 bp, synthetic construct; identical to SEQ ID NO: 89799
  misc_feature 1..246: note = Description of Artificial Sequence: Synthetic coding sequence
  source 1..246: mol_type = other DNA

SEQ ID NO: 89801 - DNA, 246 bp, synthetic construct; identical to SEQ ID NO: 89799
  misc_feature 1..246: note = Description of Artificial Sequence: Synthetic coding sequence
  source 1..246: mol_type = other DNA

SEQ ID NO: 89802 - DNA, 552 bp, synthetic construct; identical to SEQ ID NO: 89798
  misc_feature 1..552: note = Description of Artificial Sequence: Synthetic coding sequence
  source 1..552: mol_type = other DNA

SEQ ID NO: 89803 - DNA, 552 bp, synthetic construct; identical to SEQ ID NO: 89798
  misc_feature 1..552: note = Description of Artificial Sequence: Synthetic coding sequence
  source 1..552: mol_type = other DNA

SEQ ID NO: 89804 - DNA, 246 bp, synthetic construct; identical to SEQ ID NO: 89799
  misc_feature 1..246: note = Description of Artificial Sequence: Synthetic coding sequence
  source 1..246: mol_type = other DNA

SEQ ID NO: 89805 - DNA, 552 bp, synthetic construct; identical to SEQ ID NO: 89798
  misc_feature 1..552: note = Description of Artificial Sequence: Synthetic coding sequence
  source 1..552: mol_type = other DNA

SEQ ID NO: 89806 - DNA, 246 bp, synthetic construct; identical to SEQ ID NO: 89799
  misc_feature 1..246: note = Description of Artificial Sequence: Synthetic coding sequence
  source 1..246: mol_type = other DNA

SEQ ID NO: 89807 - DNA, 177 bp, synthetic construct
  misc_feature 1..177: note = Description of Artificial Sequence: Synthetic coding sequence
  source 1..177: mol_type = other DNA
atgagccagaagcccgccaaggagggccccagactgagcaagaaccagaagtacagcgagcacttcagcatccactgctgcccccccttcaccttcctgaacagcaagaaggagatcgtggacagaaagtacagcatctgcaagagcggctgcttctaccagaagaaggaggagtag

SEQ ID NO: 89808 - DNA, 423 bp, synthetic construct
  misc_feature 1..423: note = Description of Artificial Sequence: Synthetic coding sequence
  source 1..423: mol_type = other DNA
atgctgcaggccgccgacttcatcgagagaaccgagaccgccggcgagctgagcagaggcctgatcggcgtgctgagcagccagatcagctggtgcctgctgaacgtgaacctgagcaagctgcccaccagactgcagagactgagctgcagcgtgctgaacagcagccccgccatgagaggcggcgccagaggcagaccccagctgaccctggagagacccctgagacccggctgcagactgcacagctgcagcgaggccgagaagggcggcttcgtgagaagaaaggagatcatcctgttccccccctgcgaggaccccgccagaggctggctgagcgccaaccccggcagagagcccagccccggcatctgctggcacctgaacctgggcctgcccagcctgcacaactgcgaggagtag

SEQ ID NO: 89809 - DNA, 816 bp, synthetic construct
  misc_feature 1..816: note = Description of Artificial Sequence: Synthetic coding sequence
  source 1..816: mol_type = other DNA
atgttcggcctgaagagaaacgccgtgatcggcctgaacctgtactgcggcggcgccggcctgggcgccggcagcggcggcgccaccagacccggcggcagactgctggccaccgagaaggaggccagcgccagaagagagatcggcggcggcgaggccggcgccgtgatcggcggcagcgccggcgccagcccccccagcaccctgacccccgacagcagaagagtggccagacccccccccatcggcgccgaggtgcccgacgtgaccgccacccccgccagactgctgttcttcgcccccaccagaagagccgcccccctggaggagatggaggcccccgccgccgacgccatcatgagccccgaggaggagctggacggctacgagcccgagcccctgggcaagagacccgccgtgctgcccctgctggagctggtgggcgagagcggcaacaacaccagcaccgacggcagcctgcccagcacccccccccccgccgaggaggaggaggacgagctgtacagacagagcctggagatcatcagcagatacctgagagagcaggccaccggcgccaaggacaccaagcccatgggcagaagcggcgccaccagcagaaaggccctggagaccctgagaagagtgggcgacggcgtgcagagaaaccacgagaccgccttccagggctgggtgtgcggcgtgctgccctgcagaggccccagaagatggcaccaggagtgcgccgccggcttctgcagatgctgctggagcagaagctggttcggcatcagcaacaagatcgccctgctgtag

SEQ ID NO: 89810 - DNA, 1053 bp, synthetic construct
  misc_feature 1..1053: note = Description of Artificial Sequence: Synthetic coding sequence
  source 1..1053: mol_type = other DNA
atgttcggcctgaagagaaacgccgtgatcggcctgaacctgtactgcggcggcgccggcctgggcgccggcagcggcggcgccaccagacccggcggcagactgctggccaccgagaaggaggccagcgccagaagagagatcggcggcggcgaggccggcgccgtgatcggcggcagcgccggcgccagcccccccagcaccctgacccccgacagcagaagagtggccagacccccccccatcggcgccgaggtgcccgacgtgaccgccacccccgccagactgctgttcttcgcccccaccagaagagccgcccccctggaggagatggaggcccccgccgccgacgccatcatgagccccgaggaggagctggacggctacgagcccgagcccctgggcaagagacccgccgtgctgcccctgctggagctggtgggcgagagcggcaacaacaccagcaccgacggcagcctgcccagcacccccccccccgccgaggaggaggaggacgagctgtacagacagagcctggagatcatcagcagatacctgagagagcaggccaccggcgccaaggacaccaagcccatgggcagaagcggcgccaccagcagaaaggccctggagaccctgagaagagtgggcgacggcgtgcagagaaaccacgagaccgccttccagggcatgctgagaaagctggacatcaagaacgaggacgacgtgaagagcctgagcagagtgatgatccacgtgttcagcgacggcgtgaccaactggggcagaatcgtgaccctgatcagcttcggcgccttcgtggccaagcacctgaagaccatcaaccaggagagctgcatcgagcccctggccgagagcatcaccgacgtgctggtgagaaccaagagagactggctggtgaagcagagaggctgggacggcttcgtggagttcttccacgtggaggacctggagggcggcatcagaaacgtgctgctggccttcgccggcgtggccggcgtgggcgccggcctggcctacctgatcagatag

SEQ ID NO: 89811 - DNA, 840 bp, synthetic construct
  misc_feature 1..840: note = Description of Artificial Sequence: Synthetic coding sequence
  source 1..840: mol_type = other DNA
atgttcggcctgaagagaaacgccgtgatcggcctgaacctgtactgcggcggcgccggcctgggcgccggcagcggcggcgccaccagacccggcggcagactgctggccaccgagatggaggcccccgccgccgacgccatcatgagccccgaggaggagctggacggctacgagcccgagcccctgggcaagagacccgccgtgctgcccctgctggagctggtgggcgagagcggcaacaacaccagcaccgacggcagcctgcccagcacccccccccccgccgaggaggaggaggacgagctgtacagacagagcctggagatcatcagcagatacctgagagagcaggccaccggcgccaaggacaccaagcccatgggcagaagcggcgccaccagcagaaaggccctggagaccctgagaagagtgggcgacggcgtgcagagaaaccacgagaccgccttccagggcatgctgagaaagctggacatcaagaacgaggacgacgtgaagagcctgagcagagtgatgatccacgtgttcagcgacggcgtgaccaactggggcagaatcgtgaccctgatcagcttcggcgccttcgtggccaagcacctgaagaccatcaaccaggagagctgcatcgagcccctggccgagagcatcaccgacgtgctggtgagaaccaagagagactggctggtgaagcagagaggctgggacggcttcgtggagttcttccacgtggaggacctggagggcggcatcagaaacgtgctgctggccttcgccggcgtggccggcgtgggcgccggcctggcctacctgatcagatag

SEQ ID NO: 89812 - DNA, 1224 bp, synthetic construct
  misc_feature 1..1224: note = Description of Artificial Sequence: Synthetic coding sequence
  source 1..1224: mol_type = other DNA
atggtgaacgagtacaagaagatcctgctgctgaagggcttcgagctgatggacgactaccacttcaccagcatcaagagcctgctggcctacgacctgggcctgaccaccaagatgcaggaggagtacaacagaatcaagatcaccgacctgatggagaagaagttccagggcgtggcctgcctggacaagctgatcgagctggccaaggacatgcccagcctgaagaacctggtgaacaacctgagaaaggagaagagcaaggtggccaagaagatcaagacccaggagaaggcccccgtgaagaagatcaaccaggaggaggtgggcctggccgcccccgcccccaccgccagaaacaagctgaccagcgaggccagaggcagaatccccgtggcccagaagagaaagacccccaacaaggagaagaccgaggccaagagaaacaaggtgagccaggagcagagcaagccccccggccccagcggcgccagcaccagcgccgccgtggaccacccccccctgccccagaccagcagcagcacccccagcaacaccagcttcacccccaaccaggagacccaggcccagagacaggtggacgccagaagaaacgtgccccagaacgaccccgtgaccgtggtggtgctgaaggccaccgcccccttcaagtacgagagccccgagaacggcaagagcaccatgttccacgccaccgtggccagcaagacccagtacttccacgtgaaggtgttcgacatcaacctgaaggagaagttcgtgagaaagaaggtgatcaccatcagcgactacagcgagtgcaagggcgtgatggagatcaaggaggccagcagcgtgagcgacttcaaccagaacttcgaggtgcccaacagaatcatcgagatcgccaacaagacccccaagatcagccagctgtacaagcaggccagcggcaccatggtgtacggcctgttcatgctgcagaagaagagcgtgcacaagaagaacaccatctacgagatccaggacaacaccggcagcatggacgtggtgggcagcggcaagtggcacaacatcaagtgcgagaagggcgacaagctgagactgttctgcctgcagctgagaaccgtggacagaaagctgaagctggtgtgcggcagccacagcttcatcaaggtgatcaaggccaagaagaacaaggagggccccatgaacgtgaactag

SEQ ID NO: 89813 - DNA, 315 bp, synthetic construct
  misc_feature 1..315: note = Description of Artificial Sequence: Synthetic coding sequence
  source 1..315: mol_type = other DNA
tgacccaacagaatcatcgagatcgccaacaagacccccaagatcagccagctgtacaagcaggccagcggcaccatggtgtacggcctgttcatgctgcagaagaagagcgtgcacaagaagaacaccatctacgagatccaggacaacaccggcagcatggacgtggtgggcagcggcaagtggcacaacatcaagtgcgagaagggcgacaagctgagactgttctgcctgcagctgagaaccgtggacagaaagctgaagctggtgatcaaggccaagaagaacaaggagggccccatgaacgtgaactag

SEQ ID NO: 89814 - DNA, 795 bp, synthetic construct
  misc_feature 1..795: note = Description of Artificial Sequence: Synthetic coding sequence
  source 1..795: mol_type = other DNA
atgagacccgacagagccgaggcccccggcccccccgccatggccgccggcggccccggcgccggcagcgccgcccccgtgagcagcaccagcagcctgcccctggccgccctgaacatgagagtgagaagaagactgagcctgttcctgaacgtgagaacccaggtggccgccgactggaccgccctggccgaggagatggacttcgagtacctggagatcagacagctggagacccaggccgaccccaccggcagactgctggacgcctggcagggcagacccggcgccagcgtgggcagactgctggagctgctgaccaagctgggcagagacgacgtgctgctggagctgggccccagcatcggccacatgcccgagagattcgacgccttcatctgctactgccccagcgacatccagttcgtgcaggagatgatcagacagctggagcagaccaactacagactgaagctgtgcgtgagcgacagagacgtgctgcccggcacctgcgtgtggagcatcgccagcgagctgatcgagaagagatgcagaagaatggtggtggtggtgagcgacgactacctgcagagcaaggagtgcgacttccagaccaagttcgccctgagcctgagccccggcgcccaccagaagagactgatccccatcaagtacaaggccatgaagaaggagttccccagcatcctgagattcatcaccgtgtgcgactacaccaacccctgcaccaagagctggttctggaccagactggccaaggccctgagcctgccctag

SEQ ID NO: 89815 - DNA, 615 bp, synthetic construct
  misc_feature 1..615: note = Description of Artificial Sequence: Synthetic coding sequence
  source 1..615: mol_type = other DNA
atgagacccgacagagccgaggcccccggcccccccgccatggccgccggcggccccggcgccggcagcgccgcccccgtgagcagcaccagcagcctgcccctggccgccctgaacatgagagtgagaagaagactgagcctgttcctgaacgtgagaacccaggtggccgccgactggaccgccctggccgaggagatggacttcgagtacctggagatcagacagctggagacccaggccgaccccaccggcagactgctggacgcctggcagggcagacccggcgccagcgtgggcagactgctggagctgctgaccaagctgggcagagacgacgtgctgctggagctgggccccagcatcgaggaggactgccagaagtacatcctgaagcagcagcaggaggaggccgagaagcccctgcaggtggccgccgtggacagcagcgtgcccagaaccgccgagctggccggcatcaccaccctggacgaccccctgggcgccgccggctggtggtggctgagcctgatgatcacctgcagagccagaaacgtgaccagcagacccaacctgcacagcgccagcctgcaggtgcccatcagaagcgactag

SEQ ID NO: 89816 - DNA, 480 bp, synthetic construct
  misc_feature 1..480: note = Description of Artificial Sequence: Synthetic coding sequence
  source 1..480: mol_type = other DNA
atgagacccgacagagccgaggcccccggcccccccgccatggccgccggcggccccggcgccggcagcgccgcccccgtgagcagcaccagcagcctgcccctggccgccctgaacatgagagtgagaagaagactgagcctgttcctgaacgtgagaacccaggtggccgccgactggaccgccctggccgaggagatggacttcgagtacctggagatcagacagctggagacccaggccgaccccaccggcagactgctggacgcctggcagggcagacccggcgccagcgtgggcagactgctggagctgctgaccaagctgggcagagacgacgtgctgctggagctgggccccagcatcggcgccgccggctggtggtggctgagcctgatgatcacctgcagagccagaaacgtgaccagcagacccaacctgcacagcgccagcctgcaggtgcccatcagaagcgactag

SEQ ID NO: 89817 - DNA, 807 bp, synthetic construct
  misc_feature 1..807: note = Description of Artificial Sequence: Synthetic coding sequence
  source 1..807: mol_type = other DNA
atgttcagaatgctgaacagcagcttcgaggacgaccccttcttcagcgagagcatcctggcccacagagagaacatgagacagatgatcagaagcttcagcgagcccttcggcagagacctgctgagcatcagcgacggcagaggcagagcccacaacagaagaggccacaacgacggcgaggacagcctgacccacaccgacgtgagcagcttccagaccatggaccagatggtgagcaacatgagaaactacatgcagaagctggagagaaacttcggccagctgagcgtggaccccaacggccacagcttctgcagcagcagcgtgatgacctacagcaagatcggcgacgagccccccaaggtgttccaggccagcacccagaccagaagagcccccggcggcatcaaggagaccagaaaggccatgagagacagcgacagcggcctggagaagatggccatcggccaccacatccacgacagagcccacgtgatcaagaagagcaagaacaagaagaccggcgacgaggaggtgaaccaggagttcatcaacatgaacgagagcgacgcccacgccttcgacgaggagtggcagagcgaggtgctgaagtacaagcccggcagacacaacctgggcaacaccagaatgagaagcgtgggccacgagaaccccggcagcagagagctgaagagaagagagaagccccagcagagccccgccatcgagcacggcagaagaagcaacgtgctgggcgacaagctgcacatcaagggcagcagcgtgaagagcaacaagaagtag

SEQ ID NO: 89818 - DNA, 732 bp, synthetic construct
  misc_feature 1..732: note = Description of Artificial Sequence: Synthetic coding sequence
  source 1..732: mol_type = other DNA
atgagacagatgatcagaagcttcagcgagcccttcggcagagacctgctgagcatcagcgacggcagaggcagagcccacaacagaagaggccacaacgacggcgaggacagcctgacccacaccgacgtgagcagcttccagaccatggaccagatggtgagcaacatgagaaactacatgcagaagctggagagaaacttcggccagctgagcgtggaccccaacggccacagcttctgcagcagcagcgtgatgacctacagcaagatcggcgacgagccccccaaggtgttccaggccagcacccagaccagaagagcccccggcggcatcaaggagaccagaaaggccatgagagacagcgacagcggcctggagaagatggccatcggccaccacatccacgacagagcccacgtgatcaagaagagcaagaacaagaagaccggcgacgaggaggtgaaccaggagttcatcaacatgaacgagagcgacgcccacgccttcgacgaggagtggcagagcgaggtgctgaagtacaagcccggcagacacaacctgggcaacaccagaatgagaagcgtgggccacgagaaccccggcagcagagagctgaagagaagagagaagccccagcagagccccgccatcgagcacggcagaagaagcaacgtgctgggcgacaagctgcacatcaagggcagcagcgtgaagagcaacaagaagtag

SEQ ID NO: 89819 - DNA, 900 bp, synthetic construct
  misc_feature 1..900: note = Description of Artificial Sequence: Synthetic coding sequence
  source 1..900: mol_type = other DNA
atgctgaaggaggtgctgcagagagagggcaagagctacaagagcgagaccctgatgtacatcaagaaggccagagccagcgagaacaagctgagcgagagcatcctggcccacagagagaacatgagacagatgatcagaagcttcagcgagcccttcggcagagacctgctgagcatcagcgacggcagaggcagagcccacaacagaagaggccacaacgacggcgaggacagcctgaccgccaccagctgcagcctggtgcccttcggcgacttcggcggcatgcacaccgacgtgagcagcttccagaccatggaccagatggtgagcaacatgagaaactacatgcagaagctggagagaaacttcggccagctgagcgtggaccccaacggccacagcttctgcagcagcagcgtgatgacctacagcaagatcggcgacgagccccccaaggtgttccaggccagcacccagaccagaagagcccccggcggcatcaaggagaccagaaaggccatgagagacagcgacagcggcctggagaagatggccatcggccaccacatccacgacagagcccacgtgatcaagaagagcaagaacaagaagaccggcgacgaggaggtgaaccaggagttcatcaacatgaacgagagcgacgcccacgccttcgacgaggagtggcagagcgaggtgctgaagtacaagcccggcagacacaacctgggcaacaccagaatgagaagcgtgggccacgagaaccccggcagcagagagctgaagagaagagagaagccccagcagagccccgccatcgagcacggcagaagaagcaacgtgctgggcgacaagctgcacatcaagggcagcagcgtgaagagcaacaagaagtag

SEQ ID NO: 89820 - DNA, 777 bp, synthetic construct
  misc_feature 1..777: note = Description of Artificial Sequence: Synthetic coding sequence
  source 1..777: mol_type = other DNA
atgagacagatgatcagaagcttcagcgagcccttcggcagagacctgctgagcatcagcgacggcagaggcagagcccacaacagaagaggccacaacgacggcgaggacagcctgaccgccaccagctgcagcctggtgcccttcggcgacttcggcggcatgcacaccgacgtgagcagcttccagaccatggaccagatggtgagcaacatgagaaactacatgcagaagctggagagaaacttcggccagctgagcgtggaccccaacggccacagcttctgcagcagcagcgtgatgacctacagcaagatcggcgacgagccccccaaggtgttccaggccagcacccagaccagaagagcccccggcggcatcaaggagaccagaaaggccatgagagacagcgacagcggcctggagaagatggccatcggccaccacatccacgacagagcccacgtgatcaagaagagcaagaacaagaagaccggcgacgaggaggtgaaccaggagttcatcaacatgaacgagagcgacgcccacgccttcgacgaggagtggcagagcgaggtgctgaagtacaagcccggcagacacaacctgggcaacaccagaatgagaagcgtgggccacgagaaccccggcagcagagagctgaagagaagagagaagccccagcagagccccgccatcgagcacggcagaagaagcaacgtgctgggcgacaagctgcacatcaagggcagcagcgtgaagagcaacaagaagtag

SEQ ID NO: 89821 - DNA, 777 bp, synthetic construct; identical to SEQ ID NO: 89820
  misc_feature 1..777: note = Description of Artificial Sequence: Synthetic coding sequence
  source 1..777: mol_type = other DNA

SEQ ID NO: 89822 - DNA, 732 bp, synthetic construct; identical to SEQ ID NO: 89818
  misc_feature 1..732: note = Description of Artificial Sequence: Synthetic coding sequence
  source 1..732: mol_type = other DNA

SEQ ID NO: 89823 - DNA, 732 bp, synthetic construct; identical to SEQ ID NO: 89818
  misc_feature 1..732: note = Description of Artificial Sequence: Synthetic coding sequence
  source 1..732: mol_type = other DNA

SEQ ID NO: 89824 - DNA, 603 bp, synthetic construct
  misc_feature 1..603: note = Description of Artificial Sequence: Synthetic coding sequence
  source 1..603: mol_type = other DNA
atgagacagatgatcagaagcttcagcgagcccttcggcagagacctgctgagcatcagcgacggcagaggcagagcccacaacagaagaggccacaacgacggcgaggacagcctgacccacaccgacgtgagcagcttccagaccatggaccagatggtgagcaacatgagaaactacatgcagaagctggagagaaacttcatcaaggagaccagaaaggccatgagagacagcgacagcggcctggagaagatggccatcggccaccacatccacgacagagcccacgtgatcaagaagagcaagaacaagaagaccggcgacgaggaggtgaaccaggagttcatcaacatgaacgagagcgacgcccacgccttcgacgaggagtggcagagcgaggtgctgaagtacaagcccggcagacacaacctgggcaacaccagaatgagaagcgtgggccacgagaaccccggcagcagagagctgaagagaagagagaagccccagcagagccccgccatcgagcacggcagaagaagcaacgtgctgggcgacaagctgcacatcaagggcagcagcgtgaagagcaacaagaagtag

SEQ ID NO: 89825 - DNA, 747 bp, synthetic construct
  misc_feature 1..747: note = Description of Artificial Sequence: Synthetic coding sequence
  source 1..747: mol_type = other DNA
atgttcagattcatgagagacgtggagcccgaggaccccatgttcctgatggaccccttcgccatccacagacagcacatgagcagaatgctgagcggcggcttcggctacagccccttcctgagcatcaccgacggcaacatgcccggcaccagacccgccagcagaagaatgcagcaggccggcgccgtgagccccttcggcatgctgggcatgagcggcggcttcatggacatgttcggcatgatgaacgacatgatcggcaacatggagcacatgaccgccggcggcaactgccagaccttcagcagcagcaccgtgatcagctacagcaacaccggcgacggcgcccccaaggtgtaccaggagaccagcgagatgagaagcgcccccggcggcatcagagagaccagaagaaccgtgagagacagcgacagcggcctggagcagatgagcatcggccaccacatcagagacagagcccacatcctgcagagaagcagaaaccacagaaccggcgaccaggaggagagacaggactacatcaacctggacgagagcgaggccgccgccttcgacgacgagtggagaagagagaccagcagattcagacagcagagacccctggagttcagaagactggagagcagcggcgccggcggcagaagagccgagggcccccccagactggccatccagggccccgaggacagccccagcagacagagcagaagatacgactggtag

SEQ ID NO: 89826 - DNA, 747 bp, synthetic construct; identical to SEQ ID NO: 89825
  misc_feature 1..747: note = Description of Artificial Sequence: Synthetic coding sequence
  source 1..747: mol_type = other DNA

SEQ ID NO: 89827 - DNA, 747 bp, synthetic construct; identical to SEQ ID NO: 89825
  misc_feature 1..747: note = Description of Artificial Sequence: Synthetic coding sequence
  source 1..747: mol_type = other DNA

SEQ ID NO: 89828 - DNA, 747 bp, synthetic construct; identical to SEQ ID NO: 89825
  misc_feature 1..747: note = Description of Artificial Sequence: Synthetic coding sequence
  source 1..747: mol_type = other DNA

SEQ ID NO: 89829 - DNA, 684 bp, synthetic construct
  misc_feature 1..684: note = Description of Artificial Sequence: Synthetic coding sequence
  source 1..684: mol_type = other DNA
atgatggccgccggcgccgccctggccctggccctgtggctgctgatgccccccgtggaggtgggcggcgccggccccccccccatccaggacggcgagttcaccttcctgctgcccgccggcagaaagcagtgcttctaccagagcgcccccgccaacgccagcctggagaccgagtaccaggtgatcggcggcgccggcctggacgtggacttcaccctggagagcccccagggcgtgctgctggtgagcgagagcagaaaggccgacggcgtgcacaccgtggagcccaccgaggccggcgactacaagctgtgcttcgacaacagcttcagcaccatcagcgagaagctggtgttcttcgagctgatcttcgacagcctgcaggacgacgaggaggtggagggctgggccgaggccgtggagcccgaggagatgctggacgtgaagatggaggacatcaaggagagcatcgagaccatgagaaccagactggagagaagcatccagatgctgaccctgctgagagccttcgaggccagagacagaaacctgcaggagggcaacctggagagagtgaacttctggagcgccgtgaacgtggccgtgctgctgctggtggccgtgctgcaggtgtgcaccctgaagagattcttccaggacaagagacccgtgcccacctag

SEQ ID NO: 89830 - DNA, 873 bp, synthetic construct
  misc_feature 1..873: note = Description of Artificial Sequence: Synthetic coding sequence
  source 1..873: mol_type = other DNA
atgagacccgccgtgctgggcagccccgacagagccccccccgaggacgagggccccgtgatggtgaagctggaggacagcgaggaggagggcgaggccgccctgtgggaccccggccccgaggccgccagactgagattcagatgcttcagatacgaggaggccaccggcccccaggaggccctggcccagctgagagagctgtgcagacagtggctgagacccgaggtgagaagcaaggagcagatgctggagctgctggtgctggagcagttcctgggcgccctgccccccgagatccaggccagagtgcagggccagagacccggcagccccgaggaggccgccgccctggtggacggcctgagaagagagcccggcggccccagaagatgggtgaccgtgcaggtgcagggccaggaggtgctgagcgagaagatggagcccagcagcttccagcccctgcccgagaccgagccccccacccccgagcccggccccaagaccccccccagaaccatgcaggagagccccctgggcctgcaggtgaaggaggagagcgaggtgaccgaggacagcgacttcctggagagcggccccctggccgccacccaggagagcgtgcccaccctgctgcccgaggaggcccagagatgcggcaccgtgctggaccagatcttcccccacagcaagaccggccccgagggccccagctggagagagcaccccagagccctgtggcacgaggaggccggcggcatcttcagccccggcgccggcgccggcgccgcccccgccctgggcgccggctggctgggcgccgccgtggccatgtacgtggccagatgcagcgccaacgccgccacctgctag

SEQ ID NO: 89831 - DNA, 2205 bp, synthetic construct
  misc_feature 1..2205: note = Description of Artificial Sequence: Synthetic coding sequence
  source 1..2205: mol_type = other DNA
atgagacccgccgtgctgggcagccccgacagagccccccccgaggacgagggccccgtgatggtgaagctggaggacagcgaggaggagggcgaggccgccctgtgggaccccggccccgaggccgccagactgagattcagatgcttcagatacgaggaggccaccggcccccaggaggccctggcccagctgagagagctgtgcagacagtggctgagacccgaggtgagaagcaaggagcagatgctggagctgctggtgctggagcagttcctgggcgccctgccccccgagatccaggccagagtgcagggccagagacccggcagccccgaggaggccgccgccctggtggacggcctgagaagagagcccggcggccccagaagatgggtgaccgtgcaggtgcagggccaggaggtgctgagcgagaagatggagcccagcagcttccagcccctgcccgagaccgagccccccacccccgagcccggccccaagaccccccccagaaccatgcaggagagccccctgggcctgcaggtgaaggaggagagcgaggtgaccgaggacagcgacttcctggagagcggccccctggccgccacccaggagagcgtgcccaccctgctgcccgaggaggcccagagatgcggcaccgtgctggaccagatcttcccccacagcaagaccggccccgagggccccagctggagagagcaccccagagccctgtggcacgaggaggccggcggcatcttcagccccggcttcgccctgcagctgggcagcatcagcgccggccccggcagcgtgagcccccacctgcacgtgccctgggacctgggcatggccggcctgagcggccagatccagagccccagcagagagggcggcttcgcccacgccctgctgctgcccagcgacctgagaagcgagcaggaccccaccgacgaggacccctgcagaggcgtgggccccgccctgatcaccaccagatggagaagccccagaggcagaagcagaggcagacccagcaccggcggcggcgtggtgagaggcggcagatgcgacgtgtgcggcaaggtgttcagccagagaagcaacctgctgagacaccagaagatccacaccggcgagagacccttcgtgtgcagcgagtgcggcagaagcttcagcagaagcagccacctgctgagacaccagctgacccacaccgaggagagacccttcgtgtgcggcgactgcggccagggcttcgtgagaagcgccagactggaggagcacagaagagtgcacaccggcgagcagcccttcagatgcgccgagtgcggccagagcttcagacagagaagcaacctgctgcagcaccagagaatccacggcgacccccccggccccggcgccaagccccccgccccccccggcgcccccgagccccccggccccttcccctgcagcgagtgcagagagagcttcgccagaagagccgtgctgctggagcaccaggccgtgcacaccggcgacaagagcttcggctgcgtggagtgcggcgagagattcggcagaagaagcgtgctgctgcagcacagaagagtgcacagcggcgagagacccttcgcctgcgccgagtgcggccagagcttcagacagagaagcaacctgacccagcacagaagaatccacaccggcgagagacccttcgcctgcgccgagtgcggcaaggccttcagacagagacccaccctgacccagcacctgagagtgcacaccggcgagaagcccttcgcctgccccgagtgcggccagagattcagccagagactgaagctgaccagacaccagagaacccacaccggcgagaagccctaccactgcggcgagtgcggcctgggcttcacccaggtgagcagactgaccgagcaccagagaatccacaccggcgagagacccttcgcctgccccgagtgcggccagagcttcagacagcacgccaacctgacccagcacagaagaatccacaccggcgagagaccctacgcctgccccgagtgcggcaaggccttcagacagagacccaccctgacccagcacctgagaacccacagaagagagaagcccttcgcctgccaggactgcggcagaagattccaccagagcaccaagctgatccagcaccagagagtgcacagcgccgagtag

SEQ ID NO: 89832 - DNA, 1539 bp, synthetic construct
  misc_feature 1..1539: note = Description of Artificial Sequence: Synthetic coding sequence
  source 1..1539: mol_type = other DNA
atggcccacagctgcagatggagattccccgccagacccggcaccaccggcggcggcggcggcggcggcagaagaggcctgggcggcgcccccagacagagagtgcccgccctgctgctgccccccggcccccccgtgggcggcggcggccccggcgccccccccagcccccccgccgtggccgccgccgccgccgccgccggcagcagcggcgccggcgtgcccggcggcgccgccgccgccagcgccgccagcagcagcagcgccagcagcagcagcagcagcagcagcagcgccagcagcggccccgccctgctgagagtgggccccggcttcgacgccgccctgcaggtgagcgccgccatcggcaccaacctgagaagattcagagccgtgttcggcgagagcggcggcggcggcggcagcggcgagctgaccacccagatcccctgcagctggagaaccaagggccacatccacgacaagaagaccgagcccttcagactgctggcctggagctggtgcctgaacgacgagcagttcctgggcttcggcagcgacgaggaggtgagagtgagaagccccaccagaagccccagcgtgaagaccagccccagaaagcccagaggcagacccagaagcggcagcgacagaaacagcgccatcctgagcgaccccagcgtgttcagccccctgaacaagagcgagaccaagagcggcgacaagatcaagaagaaggacagcaagagcatcgagaagaagagaggcagaccccccaccttccccggcgtgaagatcaagatcacccacggcaaggacatcagcgagctgcccaagggcaacaaggaggacagcctgaagaagatcaagagaacccccagcgccaccttccagcaggccaccaagatcaagaagctgagagccggcaagctgagccccctgaagagcaagttcaagaccggcaagctgcagatcggcagaaagggcgtgcagatcgtgagaagaagaggcagaccccccagcaccgagagaatcaagacccccagcggcctgctgatcaacagcgagctggagaagccccagaaggtgagaaaggacaaggagggcaccccccccctgaccaaggaggacaagaccgtggtgagacagagccccagaagaatcaagcccgtgagaatcatccccagcagcaagagaaccgacgccaccatcgccaagcagctgctgcagagagccaagaagggcgcccagaagaagatcgagaaggaggccgcccagctgcagggcagaaaggtgaagacccaggtgaagaacatcagacagttcatcatgcccgtggtgagcgccatcagcagcagaatcatcaagacccccagaagattcatcgaggacgaggactacgacccccccatcaagatcgccagactggagagcacccccaacagcagattcagcgcccccagctgcggcagcagcgagaagagcagcgccgccagccagcacagcagccagatgagcagcgacagcagcagaagctag

SEQ ID NO: 89833 - DNA, 11796 bp, synthetic construct
  misc_feature 1..11796: note = Description of Artificial Sequence: Synthetic coding sequence
  source 1..11796: mol_type = other DNA
atggcccacagctgcagatggagattccccgccagacccggcaccaccggcggcggcggcggcggcggcagaagaggcctgggcggcgcccccagacagagagtgcccgccctgctgctgccccccggcccccccgtgggcggcggcggccccggcgccccccccagcccccccgccgtggccgccgccgccgccgccgccggcagcagcggcgccggcgtgcccggcggcgccgccgccgccagcgccgccagcagcagcagcgccagcagcagcagcagcagcagcagcagcgccagcagcggccccgccctgctgagagtgggccccggcttcgacgccgccctgcaggtgagcgccgccatcggcaccaacctgagaagattcagagccgtgttcggcgagagcggcggcggcggcggcagcggcgaggacgagcagttcctgggcttcggcagcgacgaggaggtgagagtgagaagccccaccagaagccccagcgtgaagaccagccccagaaagcccagaggcagacccagaagcggcagcgacagaaacagcgccatcctgagcgaccccagcgtgttcagccccctgaacaagagcgagaccaagagcggcgacaagatcaagaagaaggacagcaagagcatcgagaagaagagaggcagaccccccaccttccccggcgtgaagatcaagatcacccacggcaaggacatcagcgagctgcccaagggcaacaaggaggacagcctgaagaagatcaagagaacccccagcgccaccttccagcaggccaccaagatcaagaagctgagagccggcaagctgagccccctgaagagcaagttcaagaccggcaagctgcagatcggcagaaagggcgtgcagatcgtgagaagaagaggcagaccccccagcaccgagagaatcaagacccccagcggcctgctgatcaacagcgagctggagaagccccagaaggtgagaaaggacaaggagggcaccccccccctgaccaaggaggacaagaccgtggtgagacagagccccagaagaatcaagcccgtgagaatcatccccagcagcaagagaaccgacgccaccatcgccaagcagctgctgcagagagccaagaagggcgcccagaagaagatcgagaaggaggccgcccagctgcagggcagaaaggtgaagacccaggtgaagaacatcagacagttcatcatgcccgtggtgagcgccatcagcagcagaatcatcaagacccccagaagattcatcgaggacgaggactacgacccccccatcaagatcgccagactggagagcacccccaacagcagattcagcgcccccagctgcggcagcagcgagaagagcagcgccgccagccagcacagcagccagatgagcagcgacagcagcagaagcagcagccccagcgtggacaccagcaccgacagccaggccagcgaggagatccaggtgctgcccgaggagagaagcgacacccccgaggtgcacccccccctgcccatcagccagagccccgagaacgagagcaacgacagaagaagcagaagatacagcgtgagcgagagaagcttcggcagcagaaccaccaagaagctgagcaccctgcagagcgccccccagcagcagaccagcagcagcccccccccccccctgctgaccccccccccccccctgcagcccgccagcagcatcagcgaccacaccccctggctgatgccccccaccatccccctggccagccccttcctgcccgccagcaccgcccccatgcagggcaagagaaagagcatcctgagagagcccaccttcagatggaccagcctgaagcacagcagaagcgagccccagtacttcagcagcgccaagtacgccaaggagggcctgatcagaaagcccatcttcgacaacttcagacccccccccctgacccccgaggacgtgggcttcgccagcggcttcagcgccagcggcaccgccgccagcgccagactgttcagccccctgcacagcggcaccagattcgacatgcacaagagaagccccctgctgagagcccccagattcacccccagcgaggcccacagcagaatcttcgagagcgtgaccctgcccagcaacagaaccagcgccggcaccagcagcagcggcgtgagcaacagaaagagaaagagaaaggtgttcagccccatcagaagcgagcccagaagccccagccacagcatgagaaccagaagcggcagactgagcagcagcgagctgagccccctgaccccccccagcagcgtgagcagcagcctgagcatcagcgtgagccccctggccaccagcgccctgaaccccaccttcaccttccccagccacagcctgacccagagcggcgagagcgccgagaagaaccagagacccagaaagcagaccagcgcccccgccgagcccttcagcagcagcagccccacccccctgttcccctggttcacccccggcagccagaccgagagaggcagaaacaaggacaaggcccccgaggagctgagcaaggacagagacgccgacaagagcgtggagaaggacaagagcagagagagagacagagagagagagaaggagaacaagagagagagcagaaaggagaagagaaagaagggcagcgagatccagagcagcagcgccctgtaccccgtgggcagagtgagcaaggagaaggtggtgggcgaggacgtggccaccagcagcagcgccaagaaggccaccggcagaaagaagagcagcagccacgacagcggcaccgacatcaccagcgtgaccctgggcgacaccaccgccgtgaagaccaagatcctgatcaagaagggcagaggcaacctggagaagaccaacctggacctgggccccaccgcccccagcctggagaaggagaagaccctgtgcctgagcacccccagcagcagcaccgtgaagcacagcaccagcagcatcggcagcatgctggcccaggccgacaagctgcccatgaccgacaagagagtggccagcctgctgaagaaggccaaggcccagctgtgcaagatcgagaagagcaagagcctgaagcagaccgaccagcccaaggcccagggccaggagagcgacagcagcgagaccagcgtgagaggccccagaatcaagcacgtgtgcagaagagccgccgtggccctgggcagaaagagagccgtgttccccgacgacatgcccaccctgagcgccctgccctgggaggagagagagaagatcctgagcagcatgggcaacgacgacaagagcagcatcgccggcagcgaggacgccgagcccctggccccccccatcaagcccatcaagcccgtgaccagaaacaaggccccccaggagccccccgtgaagaagggcagaagaagcagaagatgcggccagtgccccggctgccaggtgcccgaggactgcggcgtgtgcaccaactgcctggacaagcccaagttcggcggcagaaacatcaagaagcagtgctgcaagatgagaaagtgccagaacctgcagtggatgcccagcaaggcctacctgcagaagcaggccaaggccgtgaagaagaaggagaagaagagcaagaccagcgagaagaaggacagcaaggagagcagcgtggtgaagaacgtggtggacagcagccagaagcccacccccagcgccagagaggaccccgcccccaagaagagcagcagcgagcccccccccagaaagcccgtggaggagaagagcgaggagggcaacgtgagcgcccccggccccgagagcaagcaggccaccacccccgccagcagaaagagcagcaagcaggtgagccagcccgccctggtgatccccccccagccccccaccaccggcccccccagaaaggaggtgcccaagaccacccccagcgagcccaagaagaagcagccccccccccccgagagcggccccgagcagagcaagcagaagaaggtggcccccagacccagcatccccgtgaagcagaagcccaaggagaaggagaagcccccccccgtgaacaagcaggagaacgccggcaccctgaacatcctgagcaccctgagcaacggcaacagcagcaagcagaagatccccgccgacggcgtgcacagaatcagagtggacttcaagttcgtgtactgccaggtgtgctgcgagcccttccacaagttctgcctggaggagaacgagagacccctggaggaccagctggagaactggtgctgcagaagatgcaagttctgccacgtgtgcggcagacagcaccaggccaccaagcagctgctggagtgcaacaagtgcagaaacagctaccaccccgagtgcctgggccccaactaccccaccaagcccaccaagaagaagaaggtgtggatctgcaccaagtgcgtgagatgcaagagctgcggcagcaccacccccggcaagggctgggacgcccagtggagccacgacttcagcctgtgccacgactgcgccaagctgttcgccaagggcaacttctgccccctgtgcgacaagtgctacgacgacgacgactacgagagcaagatgatgcagtgcggcaagtgcgacagatgggtgcacagcaagtgcgagaacctgagcgacgagatgtacgagatcctgagcaacctgcccgagagcgtggcctacacctgcgtgaactgcaccgagagacaccccgccgagtggagactggccctggagaaggagctgcagatcagcctgaagcaggtgctgaccgccctgctgaacagcagaaccaccagccacctgctgagatacagacaggccgccaagccccccgacctgaaccccgagaccgaggagagcatccccagcagaagcagccccgagggccccgacccccccgtgctgaccgaggtgagcaagcaggacgaccagcagcccctggacctggagggcgtgaagagaaagatggaccagggcaactacaccagcgtgctggagttcagcgacgacatcgtgaagatcatccaggccgccatcaacagcgacggcggccagcccgagatcaagaaggccaacagcatggtgaagagcttcttcatcagacagatggagagagtgttcccctggttcagcgtgaagaagagcagattctgggagcccaacaaggtgagcagcaacagcggcatgctgcccaacgccgtgctgccccccagcctggaccacaactacgcccagtggcaggagagagaggagaacagccacaccgagcagccccccctgatgaagaagatcatccccgcccccaagcccaagggccccggcgagcccgacagccccacccccctgcacccccccaccccccccatcctgagcaccgacagaagcagagaggacagccccgagctgaaccccccccccggcatcgaggacaacagacagtgcgccctgtgcctgacctacggcgacgacagcgccaacgacgccggcagactgctgtacatcggccagaacgagtggacccacgtgaactgcgccctgtggagcgccgaggtgttcgaggacgacgacggcagcctgaagaacgtgcacatggccgtgatcagaggcaagcagctgagatgcgagttctgccagaagcccggcgccaccgtgggctgctgcctgaccagctgcaccagcaactaccacttcatgtgcagcagagccaagaactgcgtgttcctggacgacaagaaggtgtactgccagagacacagagacctgatcaagggcgaggtggtgcccgagaacggcttcgaggtgttcagaagagtgttcgtggacttcgagggcatcagcctgagaagaaagttcctgaacggcctggagcccgagaacatccacatgatgatcggcagcatgaccatcgactgcctgggcatcctgaacgacctgagcgactgcgaggacaagctgttccccatcggctaccagtgcagcagagtgtactggagcaccaccgacgccagaaagagatgcgtgtacacctgcaagatcgtggagtgcagaccccccgtggtggagcccgacatcaacagcaccgtggagcacgacgagaacagaaccatcgcccacagccccaccagcttcaccgagagcagcagcaaggagagccagaacaccgccgagatcatcagcccccccagccccgacagacccccccacagccagaccagcggcagctgctactaccacgtgatcagcaaggtgcccagaatcagaacccccagctacagccccacccagagaagccccggctgcagacccctgcccagcgccggcagccccacccccaccacccacgagatcgtgaccgtgggcgaccccctgctgagcagcggcctgagaagcatcggcagcagaagacacagcaccagcagcctgagcccccagagaagcaagctgagaatcatgagccccatgagaaccggcaacacctacagcagaaacaacgtgagcagcgtgagcaccaccggcaccgccaccgacctggagagcagcgccaaggtggtggaccacgtgctgggccccctgaacagcagcaccagcctgggccagaacaccagcaccagcagcaacctgcagagaaccgtggtgaccgtgggcaacaagaacagccacctggacggcagcagcagcagcgagatgaagcagagcagcgccagcgacctggtgagcaagagcagcagcctgaagggcgagaagaccaaggtgctgagcagcaagagcagcgagggcagcgcccacaacgtggcctaccccggcatccccaagctggccccccaggtgcacaacaccaccagcagagagctgaacgtgagcaagatcggcagcttcgccgagcccagcagcgtgagcttcagcagcaaggaggccctgagcttcccccacctgcacctgagaggccagagaaacgacagagaccagcacaccgacagcacccagagcgccaacagcagccccgacgaggacaccgaggtgaagaccctgaagctgagcggcatgagcaacagaagcagcatcatcaacgagcacatgggcagcagcagcagagacagaagacagaagggcaagaagagctgcaaggagaccttcaaggagaagcacagcagcaagagcttcctggagcccggccaggtgaccaccggcgaggagggcaacctgaagcccgagttcatggacgaggtgctgacccccgagtacatgggccagagaccctgcaacaacgtgagcagcgacaagatcggcgacaagggcctgagcatgcccggcgtgcccaaggccccccccatgcaggtggagggcagcgccaaggagctgcaggcccccagaaagagaaccgtgaaggtgaccctgacccccctgaagatggagaacgagagccagagcaagaacgccctgaaggagagcagccccgccagccccctgcagatcgagagcaccagccccaccgagcccatcagcgccagcgagaaccccggcgacggccccgtggcccagcccagccccaacaacaccagctgccaggacagccagagcaacaactaccagaacctgcccgtgcaggacagaaacctgatgctgcccgacggccccaagccccaggaggacggcagcttcaagagaagataccccagaagaagcgccagagccagaagcaacatgttcttcggcctgacccccctgtacggcgtgagaagctacggcgaggaggacatccccttctacagcagcagcaccggcaagaagagaggcaagagaagcgccgagggccaggtggacggcgccgacgacctgagcaccagcgacgaggacgacctgtactactacaacttcaccagaaccgtgatcagcagcggcggcgaggagagactggccagccacaacctgttcagagaggaggagcagtgcgacctgcccaagatcagccagctggacggcgtggacgacggcaccgagagcgacaccagcgtgaccgccaccaccagaaagagcagccagatccccaagagaaacggcaaggagaacggcaccgagaacctgaagatcgacagacccgaggacgccggcgagaaggagcacgtgaccaagagcagcgtgggccacaagaacgagcccaagatggacaactgccacagcgtgagcagagtgaagacccagggccaggacagcctggaggcccagctgagcagcctggagagcagcagaagagtgcacaccagcacccccagcgacaagaacctgctggacacctacaacaccgagctgctgaagagcgacagcgacaacaacaacagcgacgactgcggcaacatcctgcccagcgacatcatggacttcgtgctgaagaacacccccagcatgcaggccctgggcgagagccccgagagcagcagcagcgagctgctgaacctgggcgagggcctgggcctggacagcaacagagagaaggacatgggcctgttcgaggtgttcagccagcagctgcccaccaccgagcccgtggacagcagcgtgagcagcagcatcagcgccgaggagcagttcgagctgcccctggagctgcccagcgacctgagcgtgctgaccaccagaagccccaccgtgcccagccagaaccccagcagactggccgtgatcagcgacagcggcgagaagagagtgaccatcaccgagaagagcgtggccagcagcgagagcgaccccgccctgctgagccccggcgtggaccccacccccgagggccacatgacccccgaccacttcatccagggccacatggacgccgaccacatcagcagccccccctgcggcagcgtggagcagggccacggcaacaaccaggacctgaccagaaacagcagcacccccggcctgcaggtgcccgtgagccccaccgtgcccatccagaaccagaagtacgtgcccaacagcaccgacagccccggccccagccagatcagcaacgccgccgtgcagaccacccccccccacctgaagcccgccaccgagaagctgatcgtggtgaaccagaacatgcagcccctgtacgtgctgcagaccctgcccaacggcgtgacccagaagatccagctgaccagcagcgtgagcagcacccccagcgtgatggagaccaacaccagcgtgctgggccccatgggcggcggcctgaccctgaccaccggcctgaaccccagcctgcccaccagccagagcctgttccccagcgccagcaagggcctgctgcccatgagccaccaccagcacctgcacagcttccccgccgccacccagagcagcttcccccccaacatcagcaacccccccagcggcctgctgatcggcgtgcagcccccccccgacccccagctgctggtgagcgagagcagccagagaaccgacctgagcaccaccgtggccacccccagcagcggcctgaagaagagacccatcagcagactgcagaccagaaagaacaagaagctggcccccagcagcacccccagcaacatcgcccccagcgacgtggtgagcaacatgaccctgatcaacttcacccccagccagctgcccaaccaccccagcctgctggacctgggcagcctgaacaccagcagccacagaaccgtgcccaacatcatcaagagaagcaagagcagcatcatgtacttcgagcccgcccccctgctgccccagagcgtgggcggcaccgccgccaccgccgccggcaccagcaccatcagccaggacaccagccacctgaccagcggcagcgtgagcggcctggccagcagcagcagcgtgctgaacgtggtgagcatgcagaccaccaccacccccaccagcagcgccagcgtgcccggccacgtgaccctgaccaaccccagactgctgggcacccccgacatcggcagcatcagcaacctgctgatcaaggccagccagcagagcctgggcatccaggaccagcccgtggccctgccccccagcagcggcatgttcccccagctgggcaccagccagacccccagcaccgccgccatcaccgccgccagcagcatctgcgtgctgcccagcacccagaccaccggcatcaccgccgccagccccagcggcgaggccgacgagcactaccagctgcagcacgtgaaccagctgctggccagcaagaccggcatccacagcagccagagagacctggacagcgccagcggcccccaggtgagcaacttcacccagaccgtggacgcccccaacagcatgggcctggagcagaacaaggccctgagcagcgccgtgcaggccagccccaccagccccggcggcagccccagcagccccagcagcggccagagaagcgccagccccagcgtgcccggccccaccaagcccaagcccaagaccaagagattccagctgcccctggacaagggcaacggcaagaagcacaaggtgagccacctgagaaccagcagcagcgaggcccacatccccgaccaggagaccaccagcctgaccagcggcaccggcacccccggcgccgaggccgagcagcaggacaccgccagcgtggagcagagcagccagaaggagtgcggccagcccgccggccaggtggccgtgctgcccgaggtgcaggtgacccagaaccccgccaacgagcaggagagcgccgagcccaagaccgtggaggaggaggagagcaacttcagcagccccctgatgctgtggctgcagcaggagcagaagagaaaggagagcatcaccgagaagaagcccaagaagggcctggtgttcgagatcagcagcgacgacggcttccagatctgcgccgagagcatcgaggacgcctggaagagcctgaccgacaaggtgcaggaggccagaagcaacgccagactgaagcagctgagcttcgccggcgtgaacggcctgagaatgctgggcatcctgcacgacgccgtggtgttcctgatcgagcagctgagcggcgccaagcactgcagaaactacaagttcagattccacaagcccgaggaggccaacgagccccccctgaacccccacggcagcgccagagccgaggtgcacctgagaaagagcgccttcgacatgttcaacttcctggccagcaagcacagacagccccccgagtacaaccccaacgacgaggaggaggaggaggtgcagctgaagagcgccagaagagccaccagcatggacctgcccatgcccatgagattcagacacctgaagaagaccagcaaggaggccgtgggcgtgtacagaagccccatccacggcagaggcctgttctgcaagagaaacatcgacgccggcgagatggtgatcgagtacgccggcaacgtgatcagaagcatccagaccgacaagagagagaagtactacgacagcaagggcatcggctgctacatgttcagaatcgacgacagcgaggtggtggacgccaccatgcacggcaacgccgccagattcatcaaccacagctgcgagcccaactgctacagcagagtgatcaacatcgacggccagaagcacatcgtgatcttcgccatgagaaagatctacagaggcgaggagctgacctacgactacaagttccccatcgaggacgccagcaacaagctgccctgcaactgcggcgccaagaagtgcagaaagttcctgaactag

SEQ ID NO: 89834 - DNA, 8640 bp, synthetic construct
  misc_feature 1..8640: note = Description of Artificial Sequence: Synthetic coding sequence
  source 1..8640: mol_type = other DNA
cacgcccaccccgagtgcctgaccatggagagagagaagatcctgagcagcatgggcaacgacgacaagagcagcatcgccggcagcgaggacgccgagcccctggccccccccatcaagcccatcaagcccgtgaccagaaacaaggccccccaggagccccccgtgaagaagggcagaagaagcagaagatgcggccagtgccccggctgccaggtgcccgaggactgcggcgtgtgcaccaactgcctggacaagcccaagttcggcggcagaaacatcaagaagcagtgctgcaagatgagaaagtgccagaacctgcagtggatgcccagcaaggcctacctgcagaagcaggccaaggccgtgaagaagaaggagaagaagagcaagaccagcgagaagaaggacagcaaggagagcagcgtggtgaagaacgtggtggacagcagccagaagcccacccccagcgccagagaggaccccgcccccaagaagagcagcagcgagcccccccccagaaagcccgtggaggagaagagcgaggagggcaacgtgagcgcccccggccccgagagcaagcaggccaccacccccgccagcagaaagagcagcaagcaggtgagccagcccgccctggtgatccccccccagccccccaccaccggcccccccagaaaggaggtgcccaagaccacccccagcgagcccaagaagaagcagccccccccccccgagagcggccccgagcagagcaagcagaagaaggtggcccccagacccagcatccccgtgaagcagaagcccaaggagaaggagaagcccccccccgtgaacaagcaggagaacgccggcaccctgaacatcctgagcaccctgagcaacggcaacagcagcaagcagaagatccccgccgacggcgtgcacagaatcagagtggacttcaaggaggactgcgaggccgagaacgtgtgggagatgggcggcctgggcatcctgaccagcgtgcccatcacccccagagtggtgtgcttcctgtgcgccagcagcggccacgtggagttcgtgtactgccaggtgtgctgcgagcccttccacaagttctgcctggaggagaacgagagacccctggaggaccagctggagaactggtgctgcagaagatgcaagttctgccacgtgtgcggcagacagcaccaggccaccaagcagctgctggagtgcaacaagtgcagaaacagctaccaccccgagtgcctgggccccaactaccccaccaagcccaccaagaagaagaaggtgtggatctgcaccaagtgcgtgagatgcaagagctgcggcagcaccacccccggcaagggctgggacgcccagtggagccacgacttcagcctgtgccacgactgcgccaagctgttcgccaagggcaacttctgccccctgtgcgacaagtgctacgacgacgacgactacgagagcaagatgatgcagtgcggcaagtgcgacagatgggtgcacagcaagtgcgagaacctgagcgacgagatgtacgagatcctgagcaacctgcccgagagcgtggcctacacctgcgtgaactgcaccgagagacaccccgccgagtggagactggccctggagaaggagctgcagatcagcctgaagcaggtgctgaccgccctgctgaacagcagaaccaccagccacctgctgagatacagacaggccgccaagccccccgacctgaaccccgagaccgaggagagcatccccagcagaagcagccccgagggccccgacccccccgtgctgaccgaggtgagcaagcaggacgaccagcagcccctggacctggagggcgtgaagagaaagatggaccagggcaactacaccagcgtgctggagttcagcgacgacatcgtgaagatcatccaggccgccatcaacagcgacggcggccagcccgagatcaagaaggccaacagcatggtgaagagcttcttcatcagacagatggagagagtgttcccctggttcagcgtgaagaagagcagattctgggagcccaacaaggtgagcagcaacagcggcatgctgcccaacgccgtgctgccccccagcctggaccacaactacgcccagtggcaggagagagaggagaacagccacaccgagcagccccccctgatgaagaagatcatccccgcccccaagcccaagggccccggcgagcccgacagccccacccccctgcacccccccaccccccccatcctgagcaccgacagaagcagagaggacagccccgagctgaaccccccccccggcatcgaggacaacagacagtgcgccctgtgcctgacctacggcgacgacagcgccaacgacgccggcagactgctgtacatcggccagaacgagtggacccacgtgaactgcgccctgtggagcgccgaggtgttcgaggacgacgacggcagcctgaagaacgtgcacatggccgtgatcagaggcaagcagctgagatgcgagttctgccagaagcccggcgccaccgtgggctgctgcctgaccagctgcaccagcaactaccacttcatgtgcagcagagccaagaactgcgtgttcctggacgacaagaaggtgtactgccagagacacagagacctgatcaagggcgaggtggtgcccgagaacggcttcgaggtgttcagaagagtgttcgtggacttcgagggcatcagcctgagaagaaagttcctgaacggcctggagcccgagaacatccacatgatgatcggcagcatgaccatcgactgcctgggcatcctgaacgacctgagcgactgcgaggacaagctgttccccatcggctaccagtgcagcagagtgtactggagcaccaccgacgccagaaagagatgcgtgtacacctgcaagatcgtggagtgcagaccccccgtggtggagcccgacatcaacagcaccgtggagcacgacgagaacagaaccatcgcccacagccccaccagcttcaccgagagcagcagcaaggagagccagaacaccgccgagatcatcagcccccccagccccgacagacccccccacagccagaccagcggcagctgctactaccacgtgatcagcaaggtgcccagaatcagaacccccagctacagccccacccagagaagccccggctgcagacccctgcccagcgccggcagccccacccccaccacccacgagatcgtgaccgtgggcgaccccctgctgagcagcggcctgagaagcatcggcagcagaagacacagcaccagcagcctgagcccccagagaagcaagctgagaatcatgagccccatgagaaccggcaacacctacagcagaaacaacgtgagcagcgtgagcaccaccggcaccgccaccgacctggagagcagcgccaaggtggtggaccacgtgctgggccccctgaacagcagcaccagcctgggccagaacaccagcaccagcagcaacctgcagagaaccgtggtgaccgtgggcaacaagaacagccacctggacggcagcagcagcagcgagatgaagcagagcagcgccagcgacctggtgagcaagagcagcagcctgaagggcgagaagaccaaggtgctgagcagcaagagcagcgagggcagcgcccacaacgtggcctaccccggcatccccaagctggccccccaggtgcacaacaccaccagcagagagctgaacgtgagcaagatcggcagcttcgccgagcccagcagcgtgagcttcagcagcaaggaggccctgagcttcccccacctgcacctgagaggccagagaaacgacagagaccagcacaccgacagcacccagagcgccaacagcagccccgacgaggacaccgaggtgaagaccctgaagctgagcggcatgagcaacagaagcagcatcatcaacgagcacatgggcagcagcagcagagacagaagacagaagggcaagaagagctgcaaggagaccttcaaggagaagcacagcagcaagagcttcctggagcccggccaggtgaccaccggcgaggagggcaacctgaagcccgagttcatggacgaggtgctgacccccgagtacatgggccagagaccctgcaacaacgtgagcagcgacaagatcggcgacaagggcctgagcatgcccggcgtgcccaaggccccccccatgcaggtggagggcagcgccaaggagctgcaggcccccagaaagagaaccgtgaaggtgaccctgacccccctgaagatggagaacgagagccagagcaagaacgccctgaaggagagcagccccgccagccccctgcagatcgagagcaccagccccaccgagcccatcagcgccagcgagaaccccggcgacggccccgtggcccagcccagccccaacaacaccagctgccaggacagccagagcaacaactaccagaacctgcccgtgcaggacagaaacctgatgctgcccgacggccccaagccccaggaggacggcagcttcaagagaagataccccagaagaagcgccagagccagaagcaacatgttcttcggcctgacccccctgtacggcgtgagaagctacggcgaggaggacatccccttctacagcagcagcaccggcaagaagagaggcaagagaagcgccgagggccaggtggacggcgccgacgacctgagcaccagcgacgaggacgacctgtactactacaacttcaccagaaccgtgatcagcagcggcggcgaggagagactggccagccacaacctgttcagagaggaggagcagtgcgacctgcccaagatcagccagctggacggcgtggacgacggcaccgagagcgacaccagcgtgaccgccaccaccagaaagagcagccagatccccaagagaaacggcaaggagaacggcaccgagaacctgaagatcgacagacccgaggacgccggcgagaaggagcacgtgaccaagagcagcgtgggccacaagaacgagcccaagatggacaactgccacagcgtgagcagagtgaagacccagggccaggacagcctggaggcccagctgagcagcctggagagcagcagaagagtgcacaccagcacccccagcgacaagaacctgctggacacctacaacaccgagctgctgaagagcgacagcgacaacaacaacagcgacgactgcggcaacatcctgcccagcgacatcatggacttcgtgctgaagaacacccccagcatgcaggccctgggcgagagccccgagagcagcagcagcgagctgctgaacctgggcgagggcctgggcctggacagcaacagagagaaggacatgggcctgttcgaggtgttcagccagcagctgcccaccaccgagcccgtggacagcagcgtgagcagcagcatcagcgccgaggagcagttcgagctgcccctggagctgcccagcgacctgagcgtgctgaccaccagaagccccaccgtgcccagccagaaccccagcagactggccgtgatcagcgacagcggcgagaagagagtgaccatcaccgagaagagcgtggccagcagcgagagcgaccccgccctgctgagccccggcgtggaccccacccccgagggccacatgacccccgaccacttcatccagggccacatggacgccgaccacatcagcagccccccctgcggcagcgtggagcagggccacggcaacaaccaggacctgaccagaaacagcagcacccccggcctgcaggtgcccgtgagccccaccgtgcccatccagaaccagaagtacgtgcccaacagcaccgacagccccggccccagccagatcagcaacgccgccgtgcagaccacccccccccacctgaagcccgccaccgagaagctgatcgtggtgaaccagaacatgcagcccctgtacgtgctgcagaccctgcccaacggcgtgacccagaagatccagctgaccagcagcgtgagcagcacccccagcgtgatggagaccaacaccagcgtgctgggccccatgggcggcggcctgaccctgaccaccggcctgaaccccagcctgcccaccagccagagcctgttccccagcgccagcaagggcctgctgcccatgagccaccaccagcacctgcacagcttccccgccgccacccagagcagcttcccccccaacatcagcaacccccccagcggcctgctgatcggcgtgcagcccccccccgacccccagctgctggtgagcgagagcagccagagaaccgacctgagcaccaccgtggccacccccagcagcggcctgaagaagagacccatcagcagactgcagaccagaaagaacaagaagctggcccccagcagcacccccagcaacatcgcccccagcgacgtggtgagcaacatgaccctgatcaacttcacccccagccagctgcccaaccaccccagcctgctggacctgggcagcctgaacaccagcagccacagaaccgtgcccaacatcatcaagagaagcaagagcagcatcatgtacttcgagcccgcccccctgctgccccagagcgtgggcggcaccgccgccaccgccgccggcaccagcaccatcagccaggacaccagccacctgaccagcggcagcgtgagcggcctggccagcagcagcagcgtgctgaacgtggtgagcatgcagaccaccaccacccccaccagcagcgccagcgtgcccggccacgtgaccctgaccaaccccagactgctgggcacccccgacatcggcagcatcagcaacctgctgatcaaggccagccagcagagcctgggcatccaggaccagcccgtggccctgccccccagcagcggcatgttcccccagctgggcaccagccagacccccagcaccgccgccatcaccgccgccagcagcatctgcgtgctgcccagcacccagaccaccggcatcaccgccgccagccccagcggcgaggccgacgagcactaccagctgcagcacgtgaaccagctgctggccagcaagaccggcatccacagcagccagagagacctggacagcgccagcggcccccaggtgagcaacttcacccagaccgtggacgcccccaacagcatgggcctggagcagaacaaggccctgagcagcgccgtgcaggccagccccaccagccccggcggcagccccagcagccccagcagcggccagagaagcgccagccccagcgtgcccggccccaccaagcccaagcccaagaccaagagattccagctgcccctggacaagggcaacggcaagaagcacaaggtgagccacctgagaaccagcagcagcgaggcccacatccccgaccaggagaccaccagcctgaccagcggcaccggcacccccggcgccgaggccgagcagcaggacaccgccagcgtggagcagagcagccagaaggagtgcggccagcccgccggccaggtggccgtgctgcccgaggtgcaggtgacccagaaccccgccaacgagcaggagagcgccgagcccaagaccgtggaggaggaggagagcaacttcagcagccccctgatgctgtggctgcagcaggagcagaagagaaaggagagcatcaccgagaagaagcccaagaagggcctggtgttcgagatcagcagcgacgacggcttccagatctgcgccgagagcatcgaggacgcctggaagagcctgaccgacaaggtgcaggaggccagaagcaacgccagactgaagcagctgagcttcgccggcgtgaacggcctgagaatgctgggcatcctgcacgacgccgtggtgttcctgatcgagcagctgagcggcgccaagcactgcagaaactacaagttcagattccacaagcccgaggaggccaacgagccccccctgaacccccacggcagcgccagagccgaggtgcacctgagaaagagcgccttcgacatgttcaacttcctggccagcaagcacagacagccccccgagtacaaccccaacgacgaggaggaggaggaggtgcagctgaagagcgccagaagagccaccagcatggacctgcccatgcccatgagattcagacacctgaagaagaccagcaaggaggccgtgggcgtgtacagaagccccatccacggcagaggcctgttctgcaagagaaacatcgacgccggcgagatggtgatcgagtacgccggcaacgtgatcagaagcatccagaccgacaagagagagaagtactacgacagcaagggcatcggctgctacatgttcagaatcgacgacagcgaggtggtggacgccaccatgcacggcaacgccgccagattcatcaaccacagctgcgagcccaactgctacagcagagtgatcaacatcgacggccagaagcacatcgtgatcttcgccatgagaaagatctacagaggcgaggagctgacctacgactacaagttccccatcgaggacgccagcaacaagctgccctgcaactgcggcgccaagaagtgcagaaagttcctgaactag

SEQ ID NO: 89835 - DNA, 11910 bp, synthetic construct
  misc_feature 1..11910: note = Description of Artificial Sequence: Synthetic coding sequence
  source 1..11910: mol_type = other DNA
atggcccacagctgcagatggagattccccgccagacccggcaccaccggcggcggcggcggcggcggcagaagaggcctgggcggcgcccccagacagagagtgcccgccctgctgctgccccccggcccccccgtgggcggcggcggccccggcgccccccccagcccccccgccgtggccgccgccgccgccgccgccggcagcagcggcgccggcgtgcccggcggcgccgccgccgccagcgccgccagcagcagcagcgccagcagcagcagcagcagcagcagcagcgccagcagcggccccgccctgctgagagtgggccccggcttcgacgccgccctgcaggtgagcgccgccatcggcaccaacctgagaagattcagagccgtgttcggcgagagcggcggcggcggcggcagcggcgaggacgagcagttcctgggcttcggcagcgacgaggaggtgagagtgagaagccccaccagaagccccagcgtgaagaccagccccagaaagcccagaggcagacccagaagcggcagcgacagaaacagcgccatcctgagcgaccccagcgtgttcagccccctgaacaagagcgagaccaagagcggcgacaagatcaagaagaaggacagcaagagcatcgagaagaagagaggcagaccccccaccttccccggcgtgaagatcaagatcacccacggcaaggacatcagcgagctgcccaagggcaacaaggaggacagcctgaagaagatcaagagaacccccagcgccaccttccagcaggccaccaagatcaagaagctgagagccggcaagctgagccccctgaagagcaagttcaagaccggcaagctgcagatcggcagaaagggcgtgcagatcgtgagaagaagaggcagaccccccagcaccgagagaatcaagacccccagcggcctgctgatcaacagcgagctggagaagccccagaaggtgagaaaggacaaggagggcaccccccccctgaccaaggaggacaagaccgtggtgagacagagccccagaagaatcaagcccgtgagaatcatccccagcagcaagagaaccgacgccaccatcgccaagcagctgctgcagagagccaagaagggcgcccagaagaagatcgagaaggaggccgcccagctgcagggcagaaaggtgaagacccaggtgaagaacatcagacagttcatcatgcccgtggtgagcgccatcagcagcagaatcatcaagacccccagaagattcatcgaggacgaggactacgacccccccatcaagatcgccagactggagagcacccccaacagcagattcagcgcccccagctgcggcagcagcgagaagagcagcgccgccagccagcacagcagccagatgagcagcgacagcagcagaagcagcagccccagcgtggacaccagcaccgacagccaggccagcgaggagatccaggtgctgcccgaggagagaagcgacacccccgaggtgcacccccccctgcccatcagccagagccccgagaacgagagcaacgacagaagaagcagaagatacagcgtgagcgagagaagcttcggcagcagaaccaccaagaagctgagcaccctgcagagcgccccccagcagcagaccagcagcagcccccccccccccctgctgaccccccccccccccctgcagcccgccagcagcatcagcgaccacaccccctggctgatgccccccaccatccccctggccagccccttcctgcccgccagcaccgcccccatgcagggcaagagaaagagcatcctgagagagcccaccttcagatggaccagcctgaagcacagcagaagcgagccccagtacttcagcagcgccaagtacgccaaggagggcctgatcagaaagcccatcttcgacaacttcagacccccccccctgacccccgaggacgtgggcttcgccagcggcttcagcgccagcggcaccgccgccagcgccagactgttcagccccctgcacagcggcaccagattcgacatgcacaagagaagccccctgctgagagcccccagattcacccccagcgaggcccacagcagaatcttcgagagcgtgaccctgcccagcaacagaaccagcgccggcaccagcagcagcggcgtgagcaacagaaagagaaagagaaaggtgttcagccccatcagaagcgagcccagaagccccagccacagcatgagaaccagaagcggcagactgagcagcagcgagctgagccccctgaccccccccagcagcgtgagcagcagcctgagcatcagcgtgagccccctggccaccagcgccctgaaccccaccttcaccttccccagccacagcctgacccagagcggcgagagcgccgagaagaaccagagacccagaaagcagaccagcgcccccgccgagcccttcagcagcagcagccccacccccctgttcccctggttcacccccggcagccagaccgagagaggcagaaacaaggacaaggcccccgaggagctgagcaaggacagagacgccgacaagagcgtggagaaggacaagagcagagagagagacagagagagagagaaggagaacaagagagagagcagaaaggagaagagaaagaagggcagcgagatccagagcagcagcgccctgtaccccgtgggcagagtgagcaaggagaaggtggtgggcgaggacgtggccaccagcagcagcgccaagaaggccaccggcagaaagaagagcagcagccacgacagcggcaccgacatcaccagcgtgaccctgggcgacaccaccgccgtgaagaccaagatcctgatcaagaagggcagaggcaacctggagaagaccaacctggacctgggccccaccgcccccagcctggagaaggagaagaccctgtgcctgagcacccccagcagcagcaccgtgaagcacagcaccagcagcatcggcagcatgctggcccaggccgacaagctgcccatgaccgacaagagagtggccagcctgctgaagaaggccaaggcccagctgtgcaagatcgagaagagcaagagcctgaagcagaccgaccagcccaaggcccagggccaggagagcgacagcagcgagaccagcgtgagaggccccagaatcaagcacgtgtgcagaagagccgccgtggccctgggcagaaagagagccgtgttccccgacgacatgcccaccctgagcgccctgccctgggaggagagagagaagatcctgagcagcatgggcaacgacgacaagagcagcatcgccggcagcgaggacgccgagcccctggccccccccatcaagcccatcaagcccgtgaccagaaacaaggccccccaggagccccccgtgaagaagggcagaagaagcagaagatgcggccagtgccccggctgccaggtgcccgaggactgcggcgtgtgcaccaactgcctggacaagcccaagttcggcggcagaaacatcaagaagcagtgctgcaagatgagaaagtgccagaacctgcagtggatgcccagcaaggcctacctgcagaagcaggccaaggccgtgaagaagaaggagaagaagagcaagaccagcgagaagaaggacagcaaggagagcagcgtggtgaagaacgtggtggacagcagccagaagcccacccccagcgccagagaggaccccgcccccaagaagagcagcagcgagcccccccccagaaagcccgtggaggagaagagcgaggagggcaacgtgagcgcccccggccccgagagcaagcaggccaccacccccgccagcagaaagagcagcaagcaggtgagccagcccgccctggtgatccccccccagccccccaccaccggcccccccagaaaggaggtgcccaagaccacccccagcgagcccaagaagaagcagccccccccccccgagagcggccccgagcagagcaagcagaagaaggtggcccccagacccagcatccccgtgaagcagaagcccaaggagaaggagaagcccccccccgtgaacaagcaggagaacgccggcaccctgaacatcctgagcaccctgagcaacggcaacagcagcaagcagaagatccccgccgacggcgtgcacagaatcagagtggacttcaaggaggactgcgaggccgagaacgtgtgggagatgggcggcctgggcatcctgaccagcgtgcccatcacccccagagtggtgtgcttcctgtgcgccagcagcggccacgtggagttcgtgtactgccaggtgtgctgcgagcccttccacaagttctgcctggaggagaacgagagacccctggaggaccagctggagaactggtgctgcagaagatgcaagttctgccacgtgtgcggcagacagcaccaggccaccaagcagctgctggagtgcaacaagtgcagaaacagctaccaccccgagtgcctgggccccaactaccccaccaagcccaccaagaagaagaaggtgtggatctgcaccaagtgcgtgagatgcaagagctgcggcagcaccacccccggcaagggctgggacgcccagtggagccacgacttcagcctgtgccacgactgcgccaagctgttcgccaagggcaacttctgccccctgtgcgacaagtgctacgacgacgacgactacgagagcaagatgatgcagtgcggcaagtgcgacagatgggtgcacagcaagtgcgagaacctgagcgacgagatgtacgagatcctgagcaacctgcccgagagcgtggcctacacctgcgtgaactgcaccgagagacaccccgccgagtggagactggccctggagaaggagctgcagatcagcctgaagcaggtgctgaccgccctgctgaacagcagaaccaccagccacctgctgagatacagacaggccgccaagccccccgacctgaaccccgagaccgaggagagcatccccagcagaagcagccccgagggccccgacccccccgtgctgaccgaggtgagcaagcaggacgaccagcagcccctggacctggagggcgtgaagagaaagatggaccagggcaactacaccagcgtgctggagttcagcgacgacatcgtgaagatcatccaggccgccatcaacagcgacggcggccagcccgagatcaagaaggccaacagcatggtgaagagcttcttcatcagacagatggagagagtgttcccctggttcagcgtgaagaagagcagattctgggagcccaacaaggtgagcagcaacagcggcatgctgcccaacgccgtgctgccccccagcctggaccacaactacgcccagtggcaggagagagaggagaacagccacaccgagcagccccccctgatgaagaagatcatccccgcccccaagcccaagggccccggcgagcccgacagccccacccccctgcacccccccaccccccccatcctgagcaccgacagaagcagagaggacagccccgagctgaaccccccccccggcatcgaggacaacagacagtgcgccctgtgcctgacctacggcgacgacagcgccaacgacgccggcagactgctgtacatcggccagaacgagtggacccacgtgaactgcgccctgtggagcgccgaggtgttcgaggacgacgacggcagcctgaagaacgtgcacatggccgtgatcagaggcaagcagctgagatgcgagttctgccagaagcccggcgccaccgtgggctgctgcctgaccagctgcaccagcaactaccacttcatgtgcagcagagccaagaactgcgtgttcctggacgacaagaaggtgtactgccagagacacagagacctgatcaagggcgaggtggtgcccgagaacggcttcgaggtgttcagaagagtgttcgtggacttcgagggcatcagcctgagaagaaagttcctgaacggcctggagcccgagaacatccacatgatgatcggcagcatgaccatcgactgcctgggcatcctgaacgacctgagcgactgcgaggacaagctgttccccatcggctaccagtgcagcagagtgtactggagcaccaccgacgccagaaagagatgcgtgtacacctgcaagatcgtggagtgcagaccccccgtggtggagcccgacatcaacagcaccgtggagcacgacgagaacagaaccatcgcccacagccccaccagcttcaccgagagcagcagcaaggagagccagaacaccgccgagatcatcagcccccccagccccgacagacccccccacagccagaccagcggcagctgctactaccacgtgatcagcaaggtgcccagaatcagaacccccagctacagccccacccagagaagccccggctgcagacccctgcccagcgccggcagccccacccccaccacccacgagatcgtgaccgtgggcgaccccctgctgagcagcggcctgagaagcatcggcagcagaagacacagcaccagcagcctgagcccccagagaagcaagctgagaatcatgagccccatgagaaccggcaacacctacagcagaaacaacgtgagcagcgtgagcaccaccggcaccgccaccgacctggagagcagcgccaaggtggtggaccacgtgctgggccccctgaacagcagcaccagcctgggccagaacaccagcaccagcagcaacctgcagagaaccgtggtgaccgtgggcaacaagaacagccacctggacggcagcagcagcagcgagatgaagcagagcagcgccagcgacctggtgagcaagagcagcagcctgaagggcgagaagaccaaggtgctgagcagcaagagcagcgagggcagcgcccacaacgtggcctaccccggcatccccaagctggccccccaggtgcacaacaccaccagcagagagctgaacgtgagcaagatcggcagcttcgccgagcccagcagcgtgagcttcagcagcaaggaggccctgagcttcccccacctgcacctgagaggccagagaaacgacagagaccagcacaccgacagcacccagagcgccaacagcagccccgacgaggacaccgaggtgaagaccctgaagctgagcggcatgagcaacagaagcagcatcatcaacgagcacatgggcagcagcagcagagacagaagacagaagggcaagaagagctgcaaggagaccttcaaggagaagcacagcagcaagagcttcctggagcccggccaggtgaccaccggcgaggagggcaacctgaagcccgagttcatggacgaggtgctgacccccgagtacatgggccagagaccctgcaacaacgtgagcagcgacaagatcggcgacaagggcctgagcatgcccggcgtgcccaaggccccccccatgcaggtggagggcagcgccaaggagctgcaggcccccagaaagagaaccgtgaaggtgaccctgacccccctgaagatggagaacgagagccagagcaagaacgccctgaaggagagcagccccgccagccccctgcagatcgagagcaccagccccaccgagcccatcagcgccagcgagaaccccggcgacggccccgtggcccagcccagccccaacaacaccagctgccaggacagccagagcaacaactaccagaacctgcccgtgcaggacagaaacctgatgctgcccgacggccccaagccccaggaggacggcagcttcaagagaagataccccagaagaagcgccagagccagaagcaacatgttcttcggcctgacccccctgtacggcgtgagaagctacggcgaggaggacatccccttctacagcagcagcaccggcaagaagagaggcaagagaagcgccgagggccaggtggacggcgccgacgacctgagcaccagcgacgaggacgacctgtactactacaacttcaccagaaccgtgatcagcagcggcggcgaggagagactggccagccacaacctgttcagagaggaggagcagtgcgacctgcccaagatcagccagctggacggcgtggacgacggcaccgagagcgacaccagcgtgaccgccaccaccagaaagagcagccagatccccaagagaaacggcaaggagaacggcaccgagaacctgaagatcgacagacccgaggacgccggcgagaaggagcacgtgaccaagagcagcgtgggccacaagaacgagcccaagatggacaactgccacagcgtgagcagagtgaagacccagggccaggacagcctggaggcccagctgagcagcctggagagcagcagaagagtgcacaccagcacccccagcgacaagaacctgctggacacctacaacaccgagctgctgaagagcgacagcgacaacaacaacagcgacgactgcggcaacatcctgcccagcgacatcatggacttcgtgctgaagaacacccccagcatgcaggccctgggcgagagccccgagagcagcagcagcgagctgctgaacctgggcgagggcctgggcctggacagcaacagagagaaggacatgggcctgttcgaggtgttcagccagcagctgcccaccaccgagcccgtggacagcagcgtgagcagcagcatcagcgccgaggagcagttcgagctgcccctggagctgcccagcgacctgagcgtgctgaccaccagaagccccaccgtgcccagccagaaccccagcagactggccgtgatcagcgacagcggcgagaagagagtgaccatcaccgagaagagcgtggccagcagcgagagcgaccccgccctgctgagccccggcgtggaccccacccccgagggccacatgacccccgaccacttcatccagggccacatggacgccgaccacatcagcagccccccctgcggcagcgtggagcagggccacggcaacaaccaggacctgaccagaaacagcagcacccccggcctgcaggtgcccgtgagccccaccgtgcccatccagaaccagaagtacgtgcccaacagcaccgacagccccggccccagccagatcagcaacgccgccgtgcagaccacccccccccacctgaagcccgccaccgagaagctgatcgtggtgaaccagaacatgcagcccctgtacgtgctgcagaccctgcccaacggcgtgacccagaagatccagctgaccagcagcgtgagcagcacccccagcgtgatggagaccaacaccagcgtgctgggccccatgggcggcggcctgaccctgaccaccggcctgaaccccagcctgcccaccagccagagcctgttccccagcgccagcaagggcctgctgcccatgagccaccaccagcacctgcacagcttccccgccgccacccagagcagcttcccccccaacatcagcaacccccccagcggcctgctgatcggcgtgcagcccccccccgacccccagctgctggtgagcgagagcagccagagaaccgacctgagcaccaccgtggccacccccagcagcggcctgaagaagagacccatcagcagactgcagaccagaaagaacaagaagctggcccccagcagcacccccagcaacatcgcccccagcgacgtggtgagcaacatgaccctgatcaacttcacccccagccagctgcccaaccaccccagcctgctggacctgggcagcctgaacaccagcagccacagaaccgtgcccaacatcatcaagagaagcaagagcagcatcatgtacttcgagcccgcccccctgctgccccagagcgtgggcggcaccgccgccaccgccgccggcaccagcaccatcagccaggacaccagccacctgaccagcggcagcgtgagcggcctggccagcagcagcagcgtgctgaacgtggtgagcatgcagaccaccaccacccccaccagcagcgccagcgtgcccggccacgtgaccctgaccaaccccagactgctgggcacccccgacatcggcagcatcagcaacctgctgatcaaggccagccagcagagcctgggcatccaggaccagcccgtggccctgccccccagcagcggcatgttcccccagctgggcaccagccagacccccagcaccgccgccatcaccgccgccagcagcatctgcgtgctgcccagcacccagaccaccggcatcaccgccgccagccccagcggcgaggccgacgagcactaccagctgcagcacgtgaaccagctgctggccagcaagaccggcatccacagcagccagagagacctggacagcgccagcggcccccaggtgagcaacttcacccagaccgtggacgcccccaacagcatgggcctggagcagaacaaggccctgagcagcgccgtgcaggccagccccaccagccccggcggcagccccagcagccccagcagcggccagagaagcgccagccccagcgtgcccggccccaccaagcccaagcccaagaccaagagattccagctgcccctggacaagggcaacggcaagaagcacaaggtgagccacctgagaaccagcagcagcgaggcccacatccccgaccaggagaccaccagcctgaccagcggcaccggcacccccggcgccgaggccgagcagcaggacaccgccagcgtggagcagagcagccagaaggagtgcggccagcccgccggccaggtggccgtgctgcccgaggtgcaggtgacccagaaccccgccaacgagcaggagagcgccgagcccaagaccgtggaggaggaggagagcaacttcagcagccccctgatgctgtggctgcagcaggagcagaagagaaaggagagcatcaccgagaagaagcccaagaagggcctggtgttcgagatcagcagcgacgacggcttccagatctgcgccgagagcatcgaggacgcctggaagagcctgaccgacaaggtgcaggaggccagaagcaacgccagactgaagcagctgagcttcgccggcgtgaacggcctgagaatgctgggcatcctgcacgacgccgtggtgttcctgatcgagcagctgagcggcgccaagcactgcagaaactacaagttcagattccacaagcccgaggaggccaacgagccccccctgaacccccacggcagcgccagagccgaggtgcacctgagaaagagcgccttcgacatgttcaacttcctggccagcaagcacagacagccccccgagtacaaccccaacgacgaggaggaggaggaggtgcagctgaagagcgccagaagagccaccagcatggacctgcccatgcccatgagattcagacacctgaagaagaccagcaaggaggccgtgggcgtgtacagaagccccatccacggcagaggcctgttctgcaagagaaacatcgacgccggcgagatggtgatcgagtacgccggcaacgtgatcagaagcatccagaccgacaagagagagaagtactacgacagcaagggcatcggctgctacatgttcagaatcgacgacagcgaggtggtggacgccaccatgcacggcaacgccgccagattcatcaaccacagctgcgagcccaactgctacagcagagtgatcaacatcgacggccagaagcacatcgtgatcttcgccatgagaaagatctacagaggcgaggagctgacctacgactacaagttccccatcgaggacgccagcaacaagctgccctgcaactgcggcgccaagaagtgcagaaagttcctgaactag

SEQ ID NO: 89836 - DNA, 336 bp, synthetic construct
  misc_feature 1..336: note = Description of Artificial Sequence: Synthetic coding sequence
  source 1..336: mol_type = other DNA
gacttcaaggacgagcagttcctgggcttcggcagcgacgaggaggtgagagtgagaagccccaccagaagccccagcggcagcatgctggcccaggccgacaagctgcccatgaccgacaagagagtggccagcctgctgaagaaggccaaggcccagctgtgcaagatcgagaagagcaagagcctgaagcagaccgaccagcccaaggcccagggccaggagagcgacagcagcgagaccagcgtgagaggccccagaatcaagcacgtgtgcagaagagccgccgtggccctgggcagaaagagagccgtgttccccgacgacatgccctag

SEQ ID NO: 89837 - DNA, 4320 bp, synthetic construct
  misc_feature 1..4320: note = Description of Artificial Sequence: Synthetic coding sequence
  source 1..4320: mol_type = other DNA
atggcccacagctgcagatggagattccccgccagacccggcaccaccggcggcggcggcggcggcggcagaagaggcctgggcggcgcccccagacagagagtgcccgccctgctgctgccccccggcccccccgtgggcggcggcggccccggcgccccccccagcccccccgccgtggccgccgccgccgccgccgccggcagcagcggcgccggcgtgcccggcggcgccgccgccgccagcgccgccagcagcagcagcgccagcagcagcagcagcagcagcagcagcgccagcagcggccccgccctgctgagagtgggccccggcttcgacgccgccctgcaggtgagcgccgccatcggcaccaacctgagaagattcagagccgtgttcggcgagagcggcggcggcggcggcagcggcgagctgaccacccagatcccctgcagctggagaaccaagggccacatccacgacaagaagaccgagcccttcagactgctggcctggagctggtgcctgaacgacgagcagttcctgggcttcggcagcgacgaggaggtgagagtgagaagccccaccagaagccccagcgtgaagaccagccccagaaagcccagaggcagacccagaagcggcagcgacagaaacagcgccatcctgagcgaccccagcgtgttcagccccctgaacaagagcgagaccaagagcggcgacaagatcaagaagaaggacagcaagagcatcgagaagaagagaggcagaccccccaccttccccggcgtgaagatcaagatcacccacggcaaggacatcagcgagctgcccaagggcaacaaggaggacagcctgaagaagatcaagagaacccccagcgccaccttccagcaggccaccaagatcaagaagctgagagccggcaagctgagccccctgaagagcaagttcaagaccggcaagctgcagatcggcagaaagggcgtgcagatcgtgagaagaagaggcagaccccccagcaccgagagaatcaagacccccagcggcctgctgatcaacagcgagctggagaagccccagaaggtgagaaaggacaaggagggcaccccccccctgaccaaggaggacaagaccgtggtgagacagagccccagaagaatcaagcccgtgagaatcatccccagcagcaagagaaccgacgccaccatcgccaagcagctgctgcagagagccaagaagggcgcccagaagaagatcgagaaggaggccgcccagctgcagggcagaaaggtgaagacccaggtgaagaacatcagacagttcatcatgcccgtggtgagcgccatcagcagcagaatcatcaagacccccagaagattcatcgaggacgaggactacgacccccccatcaagatcgccagactggagagcacccccaacagcagattcagcgcccccagctgcggcagcagcgagaagagcagcgccgccagccagcacagcagccagatgagcagcgacagcagcagaagcagcagccccagcgtggacaccagcaccgacagccaggccagcgaggagatccaggtgctgcccgaggagagaagcgacacccccgaggtgcacccccccctgcccatcagccagagccccgagaacgagagcaacgacagaagaagcagaagatacagcgtgagcgagagaagcttcggcagcagaaccaccaagaagctgagcaccctgcagagcgccccccagcagcagaccagcagcagcccccccccccccctgctgaccccccccccccccctgcagcccgccagcagcatcagcgaccacaccccctggctgatgccccccaccatccccctggccagccccttcctgcccgccagcaccgcccccatgcagggcaagagaaagagcatcctgagagagcccaccttcagatggaccagcctgaagcacagcagaagcgagccccagtacttcagcagcgccaagtacgccaaggagggcctgatcagaaagcccatcttcgacaacttcagacccccccccctgacccccgaggacgtgggcttcgccagcggcttcagcgccagcggcaccgccgccagcgccagactgttcagccccctgcacagcggcaccagattcgacatgcacaagagaagccccctgctgagagcccccagattcacccccagcgaggcccacagcagaatcttcgagagcgtgaccctgcccagcaacagaaccagcgccggcaccagcagcagcggcgtgagcaacagaaagagaaagagaaaggtgttcagccccatcagaagcgagcccagaagccccagccacagcatgagaaccagaagcggcagactgagcagcagcgagctgagccccctgaccccccccagcagcgtgagcagcagcctgagcatcagcgtgagccccctggccaccagcgccctgaaccccaccttcaccttccccagccacagcctgacccagagcggcgagagcgccgagaagaaccagagacccagaaagcagaccagcgcccccgccgagcccttcagcagcagcagccccacccccctgttcccctggttcacccccggcagccagaccgagagaggcagaaacaaggacaaggcccccgaggagctgagcaaggacagagacgccgacaagagcgtggagaaggacaagagcagagagagagacagagagagagagaaggagaacaagagagagagcagaaaggagaagagaaagaagggcagcgagatccagagcagcagcgccctgtaccccgtgggcagagtgagcaaggagaaggtggtgggcgaggacgtggccaccagcagcagcgccaagaaggccaccggcagaaagaagagcagcagccacgacagcggcaccgacatcaccagcgtgaccctgggcgacaccaccgccgtgaagaccaagatcctgatcaagaagggcagaggcaacctggagaagaccaacctggacctgggccccaccgcccccagcctggagaaggagaagaccctgtgcctgagcacccccagcagcagcaccgtgaagcacagcaccagcagcatcggcagcatgctggcccaggccgacaagctgcccatgaccgacaagagagtggccagcctgctgaagaaggccaaggcccagctgtgcaagatcgagaagagcaagagcctgaagcagaccgaccagcccaaggcccagggccaggagagcgacagcagcgagaccagcgtgagaggccccagaatcaagcacgtgtgcagaagagccgccgtggccctgggcagaaagagagccgtgttccccgacgacatgcccaccctgagcgccctgccctgggaggagagagagaagatcctgagcagcatgggcaacgacgacaagagcagcatcgccggcagcgaggacgccgagcccctggccccccccatcaagcccatcaagcccgtgaccagaaacaaggccccccaggagccccccgtgaagaagggcagaagaagcagaagatgcggccagtgccccggctgccaggtgcccgaggactgcggcgtgtgcaccaactgcctggacaagcccaagttcggcggcagaaacatcaagaagcagtgctgcaagatgagaaagtgccagaacctgcagtggatgcccagcaaggcctacctgcagaagcaggccaaggccgtgaagaagaaggagaagaagagcaagaccagcgagaagaaggacagcaaggagagcagcgtggtgaagaacgtggtggacagcagccagaagcccacccccagcgccagagaggaccccgcccccaagaagagcagcagcgagcccccccccagaaagcccgtggaggagaagagcgaggagggcaacgtgagcgcccccggccccgagagcaagcaggccaccacccccgccagcagaaagagcagcaagcaggtgagccagcccgccctggtgatccccccccagccccccaccaccggcccccccagaaaggaggtgcccaagaccacccccagcgagcccaagaagaagcagccccccccccccgagagcggccccgagcagagcaagcagaagaaggtggcccccagacccagcatccccgtgaagcagaagcccaaggagaaggagaagcccccccccgtgaacaagcaggagaacgccggcaccctgaacatcctgagcaccctgagcaacggcaacagcagcaagcagaagatccccgccgacggcgtgcacagaatcagagtggacttcaagtag

SEQ ID NO: 89838 - DNA, 11919 bp, synthetic construct
  misc_feature 1..11919: note = Description of Artificial Sequence: Synthetic coding sequence
  source 1..11919: mol_type = other DNA
atggcccacagctgcagatggagattccccgccagacccggcaccaccggcggcggcggcggcggcggcagaagaggcctgggcggcgcccccagacagagagtgcccgccctgctgctgccccccggcccccccgtgggcggcggcggccccggcgccccccccagcccccccgccgtggccgccgccgccgccgccgccggcagcagcggcgccggcgtgcccggcggcgccgccgccgccagcgccgccagcagcagcagcgccagcagcagcagcagcagcagcagcagcgccagcagcggccccgccctgctgagagtgggccccggcttcgacgccgccctgcaggtgagcgccgccatcggcaccaacctgagaagattcagagccgtgttcggcgagagcggcggcggcggcggcagcggcgaggacgagcagttcctgggcttcggcagcgacgaggaggtgagagtgagaagccccaccagaagccccagcgtgaagaccagccccagaaagcccagaggcagacccagaagcggcagcgacagaaacagcgccatcctgagcgaccccagcgtgttcagccccctgaacaagagcgagaccaagagcggcgacaagatcaagaagaaggacagcaagagcatcgagaagaagagaggcagaccccccaccttccccggcgtgaagatcaagatcacccacggcaaggacatcagcgagctgcccaagggcaacaaggaggacagcctgaagaagatcaagagaacccccagcgccaccttccagcaggccaccaagatcaagaagctgagagccggcaagctgagccccctgaagagcaagttcaagaccggcaagctgcagatcggcagaaagggcgtgcagatcgtgagaagaagaggcagaccccccagcaccgagagaatcaagacccccagcggcctgctgatcaacagcgagctggagaagccccagaaggtgagaaaggacaaggagggcaccccccccctgaccaaggaggacaagaccgtggtgagacagagccccagaagaatcaagcccgtgagaatcatccccagcagcaagagaaccgacgccaccatcgccaagcagctgctgcagagagccaagaagggcgcccagaagaagatcgagaaggaggccgcccagctgcagggcagaaaggtgaagacccaggtgaagaacatcagacagttcatcatgcccgtggtgagcgccatcagcagcagaatcatcaagacccccagaagattcatcgaggacgaggactacgacccccccatcaagatcgccagactggagagcacccccaacagcagattcagcgcccccagctgcggcagcagcgagaagagcagcgccgccagccagcacagcagccagatgagcagcgacagcagcagaagcagcagccccagcgtggacaccagcaccgacagccaggccagcgaggagatccaggtgctgcccgaggagagaagcgacacccccgaggtgcacccccccctgcccatcagccagagccccgagaacgagagcaacgacagaagaagcagaagatacagcgtgagcgagagaagcttcggcagcagaaccaccaagaagctgagcaccctgcagagcgccccccagcagcagaccagcagcagcccccccccccccctgctgaccccccccccccccctgcagcccgccagcagcatcagcgaccacaccccctggctgatgccccccaccatccccctggccagccccttcctgcccgccagcaccgcccccatgcagggcaagagaaagagcatcctgagagagcccaccttcagatggaccagcctgaagcacagcagaagcgagccccagtacttcagcagcgccaagtacgccaaggagggcctgatcagaaagcccatcttcgacaacttcagacccccccccctgacccccgaggacgtgggcttcgccagcggcttcagcgccagcggcaccgccgccagcgccagactgttcagccccctgcacagcggcaccagattcgacatgcacaagagaagccccctgctgagagcccccagattcacccccagcgaggcccacagcagaatcttcgagagcgtgaccctgcccagcaacagaaccagcgccggcaccagcagcagcggcgtgagcaacagaaagagaaagagaaaggtgttcagccccatcagaagcgagcccagaagccccagccacagcatgagaaccagaagcggcagactgagcagcagcgagctgagccccctgaccccccccagcagcgtgagcagcagcctgagcatcagcgtgagccccctggccaccagcgccctgaaccccaccttcaccttccccagccacagcctgacccagagcggcgagagcgccgagaagaaccagagacccagaaagcagaccagcgcccccgccgagcccttcagcagcagcagccccacccccctgttcccctggttcacccccggcagccagaccgagagaggcagaaacaaggacaaggcccccgaggagctgagcaaggacagagacgccgacaagagcgtggagaaggacaagagcagagagagagacagagagagagagaaggagaacaagagagagagcagaaaggagaagagaaagaagggcagcgagatccagagcagcagcgccctgtaccccgtgggcagagtgagcaaggagaaggtggtgggcgaggacgtggccaccagcagcagcgccaagaaggccaccggcagaaagaagagcagcagccacgacagcggcaccgacatcaccagcgtgaccctgggcgacaccaccgccgtgaagaccaagatcctgatcaagaagggcagaggcaacctggagaagaccaacctggacctgggccccaccgcccccagcctggagaaggagaagaccctgtgcctgagcacccccagcagcagcaccgtgaagcacagcaccagcagcatcggcagcatgctggcccaggccgacaagctgcccatgaccgacaagagagtggccagcctgctgaagaaggccaaggcccagctgtgcaagatcgagaagagcaagagcctgaagcagaccgaccagcccaaggcccagggccaggagagcgacagcagcgagaccagcgtgagaggccccagaatcaagcacgtgtgcagaagagccgccgtggccctgggcagaaagagagccgtgttccccgacgacatgcccaccctgagcgccctgccctgggaggagagagagaagatcctgagcagcatgggcaacgacgacaagagcagcatcgccggcagcgaggacgccgagcccctggccccccccatcaagcccatcaagcccgtgaccagaaacaaggccccccaggagccccccgtgaagaagggcagaagaagcagaagatgcggccagtgccccggctgccaggtgcccgaggactgcggcgtgtgcaccaactgcctggacaagcccaagttcggcggcagaaacatcaagaagcagtgctgcaagatgagaaagtgccagaacctgcagtggatgcccagcaaggcctacctgcagaagcaggccaaggccgtgaagaagaaggagaagaagagcaagaccagcgagaagaaggacagcaaggagagcagcgtggtgaagaacgtggtggacagcagccagaagcccacccccagcgccagagaggaccccgcccccaagaagagcagcagcgagcccccccccagaaagcccgtggaggagaagagcgaggagggcaacgtgagcgcccccggccccgagagcaagcaggccaccacccccgccagcagaaagagcagcaagcaggtgagccagcccgccctggtgatccccccccagccccccaccaccggcccccccagaaaggaggtgcccaagaccacccccagcgagcccaagaagaagcagccccccccccccgagagcggccccgagcagagcaagcagaagaaggtggcccccagacccagcatccccgtgaagcagaagcccaaggagaaggagaagcccccccccgtgaacaagcaggagaacgccggcaccctgaacatcctgagcaccctgagcaacggcaacagcagcaagcagaagatccccgccgacggcgtgcacagaatcagagtggacttcaaggaggactgcgaggccgagaacgtgtgggagatgggcggcctgggcatcctgaccagcgtgcccatcacccccagagtggtgtgcttcctgtgcgccagcagcggccacgtggagttcgtgtactgccaggtgtgctgcgagcccttccacaagttctgcctggaggagaacgagagacccctggaggaccagctggagaactggtgctgcagaagatgcaagttctgccacgtgtgcggcagacagcaccaggccaccaagcagctgctggagtgcaacaagtgcagaaacagctaccaccccgagtgcctgggccccaactaccccaccaagcccaccaagaagaagaaggtgtggatctgcaccaagtgcgtgagatgcaagagctgcggcagcaccacccccggcaagggctgggacgcccagtggagccacgacttcagcctgtgccacgactgcgccaagctgttcgccaagggcaacttctgccccctgtgcgacaagtgctacgacgacgacgactacgagagcaagatgatgcagtgcggcaagtgcgacagatgggtgcacagcaagtgcgagaacctgagcggcaccgaggacgagatgtacgagatcctgagcaacctgcccgagagcgtggcctacacctgcgtgaactgcaccgagagacaccccgccgagtggagactggccctggagaaggagctgcagatcagcctgaagcaggtgctgaccgccctgctgaacagcagaaccaccagccacctgctgagatacagacaggccgccaagccccccgacctgaaccccgagaccgaggagagcatccccagcagaagcagccccgagggccccgacccccccgtgctgaccgaggtgagcaagcaggacgaccagcagcccctggacctggagggcgtgaagagaaagatggaccagggcaactacaccagcgtgctggagttcagcgacgacatcgtgaagatcatccaggccgccatcaacagcgacggcggccagcccgagatcaagaaggccaacagcatggtgaagagcttcttcatcagacagatggagagagtgttcccctggttcagcgtgaagaagagcagattctgggagcccaacaaggtgagcagcaacagcggcatgctgcccaacgccgtgctgccccccagcctggaccacaactacgcccagtggcaggagagagaggagaacagccacaccgagcagccccccctgatgaagaagatcatccccgcccccaagcccaagggccccggcgagcccgacagccccacccccctgcacccccccaccccccccatcctgagcaccgacagaagcagagaggacagccccgagctgaaccccccccccggcatcgaggacaacagacagtgcgccctgtgcctgacctacggcgacgacagcgccaacgacgccggcagactgctgtacatcggccagaacgagtggacccacgtgaactgcgccctgtggagcgccgaggtgttcgaggacgacgacggcagcctgaagaacgtgcacatggccgtgatcagaggcaagcagctgagatgcgagttctgccagaagcccggcgccaccgtgggctgctgcctgaccagctgcaccagcaactaccacttcatgtgcagcagagccaagaactgcgtgttcctggacgacaagaaggtgtactgccagagacacagagacctgatcaagggcgaggtggtgcccgagaacggcttcgaggtgttcagaagagtgttcgtggacttcgagggcatcagcctgagaagaaagttcctgaacggcctggagcccgagaacatccacatgatgatcggcagcatgaccatcgactgcctgggcatcctgaacgacctgagcgactgcgaggacaagctgttccccatcggctaccagtgcagcagagtgtactggagcaccaccgacgccagaaagagatgcgtgtacacctgcaagatcgtggagtgcagaccccccgtggtggagcccgacatcaacagcaccgtggagcacgacgagaacagaaccatcgcccacagccccaccagcttcaccgagagcagcagcaaggagagccagaacaccgccgagatcatcagcccccccagccccgacagacccccccacagccagaccagcggcagctgctactaccacgtgatcagcaaggtgcccagaatcagaacccccagctacagccccacccagagaagccccggctgcagacccctgcccagcgccggcagccccacccccaccacccacgagatcgtgaccgtgggcgaccccctgctgagcagcggcctgagaagcatcggcagcagaagacacagcaccagcagcctgagcccccagagaagcaagctgagaatcatgagccccatgagaaccggcaacacctacagcagaaacaacgtgagcagcgtgagcaccaccggcaccgccaccgacctggagagcagcgccaaggtggtggaccacgtgctgggccccctgaacagcagcaccagcctgggccagaacaccagcaccagcagcaacctgcagagaaccgtggtgaccgtgggcaacaagaacagccacctggacggcagcagcagcagcgagatgaagcagagcagcgccagcgacctggtgagcaagagcagcagcctgaagggcgagaagaccaaggtgctgagcagcaagagcagcgagggcagcgcccacaacgtggcctaccccggcatccccaagctggccccccaggtgcacaacaccaccagcagagagctgaacgtgagcaagatcggcagcttcgccgagcccagcagcgtgagcttcagcagcaaggaggccctgagcttcccccacctgcacctgagaggccagagaaacgacagagaccagcacaccgacagcacccagagcgccaacagcagccccgacgaggacaccgaggtgaagaccctgaagctgagcggcatgagcaacagaagcagcatcatcaacgagcacatgggcagcagcagcagagacagaagacagaagggcaagaagagctgcaaggagaccttcaaggagaagcacagcagcaagagcttcctggagcccggccaggtgaccaccggcgaggagggcaacctgaagcccgagttcatggacgaggtgctgacccccgagtacatgggccagagaccctgcaacaacgtgagcagcgacaagatcggcgacaagggcctgagcatgcccggcgtgcccaaggccccccccatgcaggtggagggcagcgccaaggagctgcaggcccccagaaagagaaccgtgaaggtgaccctgacccccctgaagatggagaacgagagccagagcaagaacgccctgaaggagagcagccccgccagccccctgcagatcgagagcaccagccccaccgagcccatcagcgccagcgagaaccccggcgacggccccgtggcccagcccagccccaacaacaccagctgccaggacagccagagcaacaactaccagaacctgcccgtgcaggacagaaacctgatgctgcccgacggccccaagccccaggaggacggcagcttcaagagaagataccccagaagaagcgccagagccagaagcaacatgttcttcggcctgacccccctgtacggcgtgagaagctacggcgaggaggacatccccttctacagcagcagcaccggcaagaagagaggcaagagaagcgccgagggccaggtggacggcgccgacgacctgagcaccagcgacgaggacgacctgtactactacaacttcaccagaaccgtgatcagcagcggcggcgaggagagactggccagccacaacctgttcagagaggaggagcagtgcgacctgcccaagatcagccagctggacggcgtggacgacggcaccgagagcgacaccagcgtgaccgccaccaccagaaagagcagccagatccccaagagaaacggcaaggagaacggcaccgagaacctgaagatcgacagacccgaggacgccggcgagaaggagcacgtgaccaagagcagcgtgggccacaagaacgagcccaagatggacaactgccacagcgtgagcagagtgaagacccagggccaggacagcctggaggcccagctgagcagcctggagagcagcagaagagtgcacaccagcacccccagcgacaagaacctgctggacacctacaacaccgagctgctgaagagcgacagcgacaacaacaacagcgacgactgcggcaacatcctgcccagcgacatcatggacttcgtgctgaagaacacccccagcatgcaggccctgggcgagagccccgagagcagcagcagcgagctgctgaacctgggcgagggcctgggcctggacagcaacagagagaaggacatgggcctgttcgaggtgttcagccagcagctgcccaccaccgagcccgtggacagcagcgtgagcagcagcatcagcgccgaggagcagttcgagctgcccctggagctgcccagcgacctgagcgtgctgaccaccagaagccccaccgtgcccagccagaaccccagcagactggccgtgatcagcgacagcggcgagaagagagtgaccatcaccgagaagagcgtggccagcagcgagagcgaccccgccctgctgagccccggcgtggaccccacccccgagggccacatgacccccgaccacttcatccagggccacatggacgccgaccacatcagcagccccccctgcggcagcgtggagcagggccacggcaacaaccaggacctgaccagaaacagcagcacccccggcctgcaggtgcccgtgagccccaccgtgcccatccagaaccagaagtacgtgcccaacagcaccgacagccccggccccagccagatcagcaacgccgccgtgcagaccacccccccccacctgaagcccgccaccgagaagctgatcgtggtgaaccagaacatgcagcccctgtacgtgctgcagaccctgcccaacggcgtgacccagaagatccagctgaccagcagcgtgagcagcacccccagcgtgatggagaccaacaccagcgtgctgggccccatgggcggcggcctgaccctgaccaccggcctgaaccccagcctgcccaccagccagagcctgttccccagcgccagcaagggcctgctgcccatgagccaccaccagcacctgcacagcttccccgccgccacccagagcagcttcccccccaacatcagcaacccccccagcggcctgctgatcggcgtgcagcccccccccgacccccagctgctggtgagcgagagcagccagagaaccgacctgagcaccaccgtggccacccccagcagcggcctgaagaagagacccatcagcagactgcagaccagaaagaacaagaagctggcccccagcagcacccccagcaacatcgcccccagcgacgtggtgagcaacatgaccctgatcaacttcacccccagccagctgcccaaccaccccagcctgctggacctgggcagcctgaacaccagcagccacagaaccgtgcccaacatcatcaagagaagcaagagcagcatcatgtacttcgagcccgcccccctgctgccccagagcgtgggcggcaccgccgccaccgccgccggcaccagcaccatcagccaggacaccagccacctgaccagcggcagcgtgagcggcctggccagcagcagcagcgtgctgaacgtggtgagcatgcagaccaccaccacccccaccagcagcgccagcgtgcccggccacgtgaccctgaccaaccccagactgctgggcacccccgacatcggcagcatcagcaacctgctgatcaaggccagccagcagagcctgggcatccaggaccagcccgtggccctgccccccagcagcggcatgttcccccagctgggcaccagccagacccccagcaccgccgccatcaccgccgccagcagcatctgcgtgctgcccagcacccagaccaccggcatcaccgccgccagccccagcggcgaggccgacgagcactaccagctgcagcacgtgaaccagctgctggccagcaagaccggcatccacagcagccagagagacctggacagcgccagcggcccccaggtgagcaacttcacccagaccgtggacgcccccaacagcatgggcctggagcagaacaaggccctgagcagcgccgtgcaggccagccccaccagccccggcggcagccccagcagccccagcagcggccagagaagcgccagccccagcgtgcccggccccaccaagcccaagcccaagaccaagagattccagctgcccctggacaagggcaacggcaagaagcacaaggtgagccacctgagaaccagcagcagcgaggcccacatccccgaccaggagaccaccagcctgaccagcggcaccggcacccccggcgccgaggccgagcagcaggacaccgccagcgtggagcagagcagccagaaggagtgcggccagcccgccggccaggtggccgtgctgcccgaggtgcaggtgacccagaaccccgccaacgagcaggagagcgccgagcccaagaccgtggaggaggaggagagcaacttcagcagccccctgatgctgtggctgcagcaggagcagaagagaaaggagagcatcaccgagaagaagcccaagaagggcctggtgttcgagatcagcagcgacgacggcttccagatctgcgccgagagcatcgaggacgcctggaagagcctgaccgacaaggtgcaggaggccagaagcaacgccagactgaagcagctgagcttcgccggcgtgaacggcctgagaatgctgggcatcctgcacgacgccgtggtgttcctgatcgagcagctgagcggcgccaagcactgcagaaactacaagttcagattccacaagcccgaggaggccaacgagccccccctgaacccccacggcagcgccagagccgaggtgcacctgagaaagagcgccttcgacatgttcaacttcctggccagcaagcacagacagccccccgagtacaaccccaacgacgaggaggaggaggaggtgcagctgaagagcgccagaagagccaccagcatggacctgcccatgcccatgagattcagacacctgaagaagaccagcaaggaggccgtgggcgtgtacagaagccccatccacggcagaggcctgttctgcaagagaaacatcgacgccggcgagatggtgatcgagtacgccggcaacgtgatcagaagcatccagaccgacaagagagagaagtactacgacagcaagggcatcggctgctacatgttcagaatcgacgacagcgaggtggtggacgccaccatgcacggcaacgccgccagattcatcaaccacagctgcgagcccaactgctacagcagagtgatcaacatcgacggccagaagcacatcgtgatcttcgccatgagaaagatctacagaggcgaggagctgacctacgactacaagttccccatcgaggacgccagcaacaagctgccctgcaactgcggcgccaagaagtgcagaaagttcctgaactag

SEQ ID NO: 89839 - DNA, 1680 bp, synthetic construct
  misc_feature 1..1680: note = Description of Artificial Sequence: Synthetic coding sequence
  source 1..1680: mol_type = other DNA
atggacaaccagtgcaccgtgcaggtgagactggagctgggccacagagcccagctgagaaagaagcccaccaccgagggcttcacccacgactggatggtgttcgtgagaggccccgagcagtgcgacatccagcacttcgtggagaaggtggtgttctggctgcacgacagcttccccaagcccagaagagtgtgcaaggagcccccctacaaggtggaggagagcggctacgccggcttcatcatgcccatcgaggtgcacttcaagaacaaggaggagcccagaaaggtgtgcttcacctacgacctgttcctgaacctggagggcaacccccccgtgaaccacctgagatgcgagaagctgaccttcaacaaccccaccaccgagttcagatacaagctgctgagagccggcggcgtgatggtgatgcccgagggcgccgacaccgtgagcagacccagccccgactaccccatgctgcccaccatccccctgagcgccttcagcgaccccaagaagaccaagcccagccacggcagcaaggacgccaacaaggagagcagcaagaccagcaagccccacaaggtgaccaaggagcacagagagagacccagaaaggacagcgagagcaagagcagcagcaaggagctggagagagagcaggccaagagcagcaaggacaccagcagaaagctgggcgagggcagactgcccaaggaggagaaggcccccccccccaaggccgccttcaaggagcccaagatggccctgaaggagaccaagctggagagcaccagccccaagggcggccccccccccccccccccccccccccccagagccagcagcaagagacccgccaccgccgacagccccaagcccagcgccaagaagcagaagaagagcagcagcaagggcagcagaagcgcccccggcaccagccccagaaccagcagcagcagcagcttcagcgacaagaagcccgccaaggacaagagcagcaccagaggcgagaaggtgaaggccgagagcgagcccagagaggccaagaaggccctggaggtggaggagagcaacagcgaggacgaggccagcttcaagagcgagagcgcccagagcagccccagcaacagcagcagcagcagcgacagcagcagcgacagcgacttcgagcccagccagaaccacagccagggccccctgagaagcatggtggaggacctgcagagcgaggagagcgacgaggacgacagcagcagcggcgaggaggccgccggcaagaccaaccccggcagagacagcagactgagcttcagcgacagcgagagcgacaacagcgccgacagcagcctgcccagcagagagcccccccccccccagaagccccccccccccaacagcaaggtgagcggcagaagaagccccgagagctgcagcaagcccgagaagatcctgaagaagggcacctacgacaaggcctacaccgacgagctggtggagctgcacagaagactgatggccctgagagagagaaacgtgctgcagcagatcgtgaacctgatcgaggagaccggccacttcaacgtgaccaacaccaccttcgacttcgacctgttcagcctggacgagaccaccgtgagaaagctgcagagctgcctggaggccgtggccacctag

SEQ ID NO: 89840 - DNA, 273 bp, synthetic construct
  misc_feature 1..273: note = Description of Artificial Sequence: Synthetic coding sequence
  source 1..273: mol_type = other DNA
atgagagaccccgtgagcagccagtacagcagcttcctgttctggagaatgcccatccccgagctggacctgagcgagctggagggcctgggcctgagcgacaccgccacctacaaggtgaaggacagcagcgtgggcaagatgatcggccaggccaccgccgccgaccaggagaagaaccccgagggcgacggcctgctggagtacagcaccttcaacttctggagagcccccatcgccagcatccacagcttcgagctggacctgctgtag

SEQ ID NO: 89841 - DNA, 417 bp, synthetic construct
  misc_feature 1..417: note = Description of Artificial Sequence: Synthetic coding sequence
  source 1..417: mol_type = other DNA
atgaaggacctgcacagcgacgacaacgaggaggagagcgacgaggtggaggacaacgacaacgacagcgagatggagagacccgtgaacagaggcggcagcagaagcagaagagtgagcctgagcgacggcagcgacagcgagagcagcagcgccagcagccccctgcaccacgagccccccccccccctgctgaagaccaacaacaaccagatcctggaggtgaagagccccatcaagcagagcaagagcgacaagcagatcaagaacggcgagtgcgacaagatcgtgaacctgatcgaggagaccggccacttccacatcaccaacaccaccttcgacttcgacctgtgcagcctggacaagaccaccgtgagaaagctgcagagctacctggagaccagcggcaccagctag

SEQ ID NO: 89842 - DNA, 489 bp, synthetic construct
  misc_feature 1..489: note = Description of Artificial Sequence: Synthetic coding sequence
  source 1..489: mol_type = other DNA
atgaaggacctgcacagcgacgacaacgaggaggagagcgacgaggtggaggacaacgacaacgacagcgagatggagagacccgtgaacagaggcggcagcagaagcagaagagtgagcctgagcgacggcagcgacagcgagagcagcagcgccagcagccccctgcaccacgagccccccccccccctgctgaagaccaacaacaaccagatcctggaggtgaagagccccatcaagcagagcaagagcgacaagcagatcaagaacggcgagtgcgacaaggcctacctggacgagctggtggagctgcacagaagactgatgaccctgagagagagacacatcctgcagcagatcgtgaacctgatcgaggagaccggccacttccacatcaccaacaccaccttcgacttcgacctgtgcagcctggacaagaccaccgtgagaaagctgcagagctacctggagaccagcggcaccagctag

SEQ ID NO: 89843 - DNA, 417 bp, synthetic construct; identical to SEQ ID NO: 89841
  misc_feature 1..417: note = Description of Artificial Sequence: Synthetic coding sequence
  source 1..417: mol_type = other DNA

SEQ ID NO: 89844 - DNA, 1707 bp, synthetic construct
  misc_feature 1..1707: note = Description of Artificial Sequence: Synthetic coding sequence
  source 1..1707: mol_type = other DNA
atggccagcagctgcgccgtgcaggtgaagctggagctgggccacagagcccaggtgagaaagaagcccaccgtggagggcttcacccacgactggatggtgttcgtgagaggccccgagcacagcaacatccagcacttcgtggagaaggtggtgttccacctgcacgagagcttccccagacccaagagagtgtgcaaggaccccccctacaaggtggaggagagcggctacgccggcttcatcctgcccatcgaggtgtacttcaagaacaaggaggagcccagaaaggtgagattcgactacgacctgttcctgcacctggagggccacccccccgtgaaccacctgagatgcgagaagctgaccttcaacaaccccaccgaggacttcagaagaaagctgctgaaggccggcggcgaccccaacagaagcatccacaccagcagcagcagcagcagcagcagcagcagcagcagcagcagcagcagcagcagcagcagcagcagcagcagcagcagcagcagcagcagcagcagcagcagcagcagcagcagcagcagcagcagcaccagcttcagcaagccccacaagctgatgaaggagcacaaggagaagcccagcaaggacagcagagagcacaagagcgccttcaaggagcccagcagagaccacaacaagagcagcaaggagagcagcaagaagcccaaggagaacaagcccctgaaggaggagaagatcgtgcccaagatggccttcaaggagcccaagcccatgagcaaggagcccaagcccgacagcaacctgctgaccatcaccagcggccaggacaagaaggcccccagcaagagaccccccatcagcgacagcgaggagctgagcgccaagaagagaaagaagagcagcagcgaggccctgttcaagagcttcagcagcgccccccccctgatcctgacctgcagcgccgacaagaagcagatcaaggacaagagccacgtgaagatgggcaaggtgaagatcgagagcgagaccagcgagaagaagaagagcaccctgccccccttcgacgacatcgtggaccccaacgacagcgacgtggaggagaacatcagcagcaagagcgacagcgagcagcccagccccgccagcagcagcagcagcagcagcagcagcttcacccccagccagaccagacagcagggccccctgagaagcatcatgaaggacctgcacagcgacgacaacgaggaggagagcgacgaggtggaggacaacgacaacgacagcgagatggagagacccgtgaacagaggcggcagcagaagcagaagagtgagcctgagcgacggcagcgacagcgagagcagcagcgccagcagccccctgcaccacgagccccccccccccctgctgaagaccaacaacaaccagatcctggaggtgaagagccccatcaagcagagcaagagcgacaagcagatcaagaacggcgagtgcgacaaggcctacctggacgagctggtggagctgcacagaagactgatgaccctgagagagagacacatcctgcagcagatcgtgaacctgatcgaggagaccggccacttccacatcaccaacaccaccttcgacttcgacctgtgcagcctggacaagaccaccgtgagaaagctgcagagctacctggagaccagcggcaccagctag

SEQ ID NO: 89845 - DNA, 1698 bp, synthetic construct
  misc_feature 1..1698: note = Description of Artificial Sequence: Synthetic coding sequence
  source 1..1698: mol_type = other DNA
atgtgcgccgtgcaggtgaagctggagctgggccacagagcccaggtgagaaagaagcccaccgtggagggcttcacccacgactggatggtgttcgtgagaggccccgagcacagcaacatccagcacttcgtggagaaggtggtgttccacctgcacgagagcttccccagacccaagagagtgtgcaaggaccccccctacaaggtggaggagagcggctacgccggcttcatcctgcccatcgaggtgtacttcaagaacaaggaggagcccagaaaggtgagattcgactacgacctgttcctgcacctggagggccacccccccgtgaaccacctgagatgcgagaagctgaccttcaacaaccccaccgaggacttcagaagaaagctgctgaaggccggcggcgaccccaacagaagcatccacaccagcagcagcagcagcagcagcagcagcagcagcagcagcagcagcagcagcagcagcagcagcagcagcagcagcagcagcagcagcagcagcagcagcagcagcagcagcagcagcagcagcagcaccagcttcagcaagccccacaagctgatgaaggagcacaaggagaagcccagcaaggacagcagagagcacaagagcgccttcaaggagcccagcagagaccacaacaagagcagcaaggagagcagcaagaagcccaaggagaacaagcccctgaaggaggagaagatcgtgcccaagatggccttcaaggagcccaagcccatgagcaaggagcccaagcccgacagcaacctgctgaccatcaccagcggccaggacaagaaggcccccagcaagagaccccccatcagcgacagcgaggagctgagcgccaagaagagaaagaagagcagcagcgaggccctgttcaagagcttcagcagcgccccccccctgatcctgacctgcagcgccgacaagaagcagatcaaggacaagagccacgtgaagatgggcaaggtgaagatcgagagcgagaccagcgagaagaagaagagcaccctgccccccttcgacgacatcgtggaccccaacgacagcgacgtggaggagaacatcagcagcaagagcgacagcgagcagcccagccccgccagcagcagcagcagcagcagcagcagcttcacccccagccagaccagacagcagggccccctgagaagcatcatgaaggacctgcacagcgacgacaacgaggaggagagcgacgaggtggaggacaacgacaacgacagcgagatggagagacccgtgaacagaggcggcagcagaagcagaagagtgagcctgagcgacggcagcgacagcgagagcagcagcgccagcagccccctgcaccacgagccccccccccccctgctgaagaccaacaacaaccagatcctggaggtgaagagccccatcaagcagagcaagagcgacaagcagatcaagaacggcgagtgcgacaaggcctacctggacgagctggtggagctgcacagaagactgatgaccctgagagagagacacatcctgcagcagatcgtgaacctgatcgaggagaccggccacttccacatcaccaacaccaccttcgacttcgacctgtgcagcctggacaagaccaccgtgagaaagctgcagagctacctggagaccagcggcaccagctag

SEQ ID NO: 89846 - DNA, 1824 bp, synthetic construct
  misc_feature 1..1824: note = Description of Artificial Sequence: Synthetic coding sequence
  source 1..1824: mol_type = other DNA
atgcagagagccccccccttccccttcatgtgcgtgagcagaagaagaaagaagtgccaggcccagagaagcctgcccaagcccagactgcccgtgatccacggctgcctgagcagcccctgcccccagtgcgccgtgcaggtgaagctggagctgggccacagagcccaggtgagaaagaagcccaccgtggagggcttcacccacgactggatggtgttcgtgagaggccccgagcacagcaacatccagcacttcgtggagaaggtggtgttccacctgcacgagagcttccccagacccaagagagtgtgcaaggaccccccctacaaggtggaggagagcggctacgccggcttcatcctgcccatcgaggtgtacttcaagaacaaggaggagcccagaaaggtgagattcgactacgacctgttcctgcacctggagggccacccccccgtgaaccacctgagatgcgagaagctgaccttcaacaaccccaccgaggacttcagaagaaagctgctgaaggccggcggcgaccccaacagaagcatccacaccagcagcagcagcagcagcagcagcagcagcagcagcagcagcagcagcagcagcagcagcagcagcagcagcagcagcagcagcagcagcagcagcagcagcagcagcagcagcagcagcagcagcaccagcttcagcaagccccacaagctgatgaaggagcacaaggagaagcccagcaaggacagcagagagcacaagagcgccttcaaggagcccagcagagaccacaacaagagcagcaaggagagcagcaagaagcccaaggagaacaagcccctgaaggaggagaagatcgtgcccaagatggccttcaaggagcccaagcccatgagcaaggagcccaagcccgacagcaacctgctgaccatcaccagcggccaggacaagaaggcccccagcaagagaccccccatcagcgacagcgaggagctgagcgccaagaagagaaagaagagcagcagcgaggccctgttcaagagcttcagcagcgccccccccctgatcctgacctgcagcgccgacaagaagcagatcaaggacaagagccacgtgaagatgggcaaggtgaagatcgagagcgagaccagcgagaagaagaagagcaccctgccccccttcgacgacatcgtggaccccaacgacagcgacgtggaggagaacatcagcagcaagagcgacagcgagcagcccagccccgccagcagcagcagcagcagcagcagcagcttcacccccagccagaccagacagcagggccccctgagaagcatcatgaaggacctgcacagcgacgacaacgaggaggagagcgacgaggtggaggacaacgacaacgacagcgagatggagagacccgtgaacagaggcggcagcagaagcagaagagtgagcctgagcgacggcagcgacagcgagagcagcagcgccagcagccccctgcaccacgagccccccccccccctgctgaagaccaacaacaaccagatcctggaggtgaagagccccatcaagcagagcaagagcgacaagcagatcaagaacggcgagtgcgacaaggcctacctggacgagctggtggagctgcacagaagactgatgaccctgagagagagacacatcctgcagcagatcgtgaacctgatcgaggagaccggccacttccacatcaccaacaccaccttcgacttcgacctgtgcagcctggacaagaccaccgtgagaaagctgcagagctacctggagaccagcggcaccagctag

SEQ ID NO: 89847 - DNA, 4986 bp, synthetic construct
  misc_feature 1..4986: note = Description of Artificial Sequence: Synthetic coding sequence
  source 1..4986: mol_type = other DNA
atgagcgccggcggcagagacgaggagagaagaaagctggccgacatcatccaccactggaacgccaacagactggacctgttcgagatcagccagcccaccgaggacctggagttccacggcgtgatgagattctacttccaggacaaggccgccggcaacttcgccaccaagtgcatcagagtgagcagcaccgccaccacccaggacgtgatcgagaccctggccgagaagttcagacccgacatgagaatgctgagcagccccaagtacagcctgtacgaggtgcacgtgagcggcgagagaagactggacatcgacgagaagcccctggtggtgcagctgaactggaacaaggacgacagagagggcagattcgtgctgaagaacgagaacgacgccatcccccccaagaaggcccagagcaacggccccgagaagcaggagaaggagggcgtgatccagaacttcaagagaaccctgagcaagaaggagaagaaggagaagaagaagagagagaaggaggccctgagacaggccagcgacaaggacgacagacccttccagggcgaggacgtggagaacagcagactggccgccgaggtgtacaaggacatgcccgagaccagcttcaccagaaccatcagcaaccccgaggtggtgatgaagagaagaagacagcagaagctggagaagagaatgcaggagttcagaagcagcgacggcagacccgacagcggcggcaccctgagaatctacgccgacagcctgaagcccaacatcccctacaagaccatcctgctgagcaccaccgaccccgccgacttcgccgtggccgaggccctggagaagtacggcctggagaaggagaaccccaaggactactgcatcgccagagtgatgctgccccccggcgcccagcacagcgacgagaagggcgccaaggagatcatcctggacgacgacgagtgccccctgcagatcttcagagagtggcccagcgacaagggcatcctggtgttccagctgaagagaagaccccccgaccacatccccaagaagaccaagaagcacctggagggcaagacccccaagggcaaggagagagccgacggcagcggctacggcagcaccctgccccccgagaagctgccctacctggtggagctgagccccggcagaagaaaccacttcgcctactacaactaccacacctacgaggacggcagcgacagcagagacaagcccaagctgtacagactgcagctgagcgtgaccgaggtgggcaccgagaagctggacgacaacagcatccagctgttcggccccggcatccagccccaccactgcgacctgaccaacatggacggcgtggtgaccgtgacccccagaagcatggacgccgagacctacgtggagggccagagaatcagcgagaccaccatgctgcagagcggcatgaaggtgcagttcggcgccagccacgtgttcaagttcgtggaccccagccaggaccacgccctggccaagagaagcgtggacggcggcctgatggtgaagggccccagacacaagcccggcatcgtgcaggagaccaccttcgacctgggcggcgacatccacagcggcaccgccctgcccaccagcaagagcaccaccagactggacagcgacagagtgagcagcgccagcagcaccgccgagagaggcatggtgaagcccatgatcagagtggagcagcagcccgactacagaagacaggagagcagaacccaggacgccagcggccccgagctgatcctgcccgccagcatcgagttcagagagagcagcgaggacagcttcctgagcgccatcatcaactacaccaacagcagcaccgtgcacttcaagctgagccccacctacgtgctgtacatggcctgcagatacgtgctgagcaaccagtacagacccgacatcagccccaccgagagaacccacaaggtgatcgccgtggtgaacaagatggtgagcatgatggagggcgtgatccagaagcagaagaacatcgccggcgccctggccttctggatggccaacgccagcgagctgctgaacttcatcaagcaggacagagacctgagcagaatcaccctggacgcccaggacgtgctggcccacctggtgcagatggccttcaagtacctggtgcactgcctgcagagcgagctgaacaactacatgcccgccttcctggacgaccccgaggagaacagcctgcagagacccaagatcgacgacgtgctgcacaccctgaccggcgccatgagcctgctgagaagatgcagagtgaacgccgccctgaccatccagctgttcagccagctgttccacttcatcaacatgtggctgttcaacagactggtgaccgaccccgacagcggcctgtgcagccactactggggcgccatcatcagacagcagctgggccacatcgaggcctgggccgagaagcagggcctggagctggccgccgactgccacctgagcagaatcgtgcaggccaccaccctgctgaccatggacaagtacgcccccgacgacatccccaacatcaacagcacctgcttcaagctgaacagcctgcagctgcaggccctgctgcagaactaccactgcgcccccgacgagcccttcatccccaccgacctgatcgagaacgtggtgaccgtggccgagaacaccgccgacgagctggccagaagcgacggcagagaggtgcagctggaggaggaccccgacctgcagctgcccttcctgctgcccgaggacggctacagctgcgacgtggtgagaaacatccccaacggcctgcaggagttcctggaccccctgtgccagagaggcttctgcagactgatcccccacaccagaagccccggcacctggaccatctacttcgagggcgccgactacgagagccacctgctgagagagaacaccgagctggccatccccctgagaaaggagcccgagatcatcaccgtgaccctgaagaagcagaacggcatgggcctgagcatcgtggccgccaagggcgccggccaggacaagctgggcatctacgtgaagagcgtggtgaagggcggcgccgccgacgtggacggcagactggccgccggcgaccagctgctgagcgtggacggcagaagcctggtgggcctgagccaggagagagccgccgagctgatgaccagaaccagcagcgtggtgaccctggaggtggccaagcagggcgccatctaccacggcctggccaccctgctgaaccagcccagccccatgatgcagagaatcagcgacagaagaggcagcggcaagcccagacccaagagcgagggcttcgagctgtacaacaacagcacccagaacggcagccccgagagcccccagctgccctgggccgagtacagcgagcccaagaagctgcccggcgacgacagactgatgaagaacagagccgaccacagaagcagccccaacgtggccaaccagccccccagccccggcggcaagagcgcctacgccagcggcaccaccgccaagatcaccagcgtgagcaccggcaacctgtgcaccgaggagcagacccccccccccagacccgaggcctaccccatccccacccagacctacaccagagagtacttcaccttccccgccagcaagagccaggacagaatggcccccccccagaaccagtggcccaactacgaggagaagccccacatgcacaccgacagcaaccacagcagcatcgccatccagagagtgaccagaagccaggaggagctgagagaggacaaggcctaccagctggagagacacagaatcgaggccgccatggacagaaagagcgacagcgacatgtggatcaaccagagcagcagcctggacagcagcaccagcagccaggagcacctgaaccacagcagcaagagcgtgacccccgccagcaccctgaccaagagcggccccggcagatggaagacccccgccgccatccccgccacccccgtggccgtgagccagcccatcagaaccgacctgccccccccccccccccccccccccgtgcactacgccggcgacttcgacggcatgagcatggacctgcccctgccccccccccccagcgccaaccagatcggcctgcccagcgcccaggtggccgccgccgagagaagaaagagagaggagcaccagagatggtacgagaaggagaaggccagactggaggaggagagagagagaaagagaagagagcaggagagaaagctgggccagatgagaacccagagcctgaaccccgcccccttcagccccctgaccgcccagcagatgaagcccgagaagcccagcaccctgcagagaccccaggagaccgtgatcagagagctgcagccccagcagcagcccagaaccatcgagagaagagacctgcagtacatcaccgtgagcaaggaggagctgagcagcggcgacagcctgagccccgacccctggaagagagacgccaaggagaagctggagaagcagcagcagatgcacatcgtggacatgctgagcaaggagatccaggagctgcagagcaagcccgacagaagcgccgaggagagcgacagactgagaaagctgatgctggagtggcagttccagaagagactgcaggagagcaagcagaaggacgaggacgacgaggaggaggaggacgacgacgtggacaccatgctgatcatgcagagactggaggccgagagaagagccagacagaccgccatgcccgccatcagcgtgctggacctgctgcaggacgaggagagaagaagacagcagcagctggaggagatgagaaagagagaggccgaggacagagccagacaggaggaggagagaagaagacaggaggaggagagaaccaagagagacgccgaggagaagtag

SEQ ID NO: 89848 - DNA, 4998 bp, synthetic construct
  misc_feature 1..4998: note = Description of Artificial Sequence: Synthetic coding sequence
  source 1..4998: mol_type = other DNA
atgagcgccggcggcagagacgaggagagaagaaagctggccgacatcatccaccactggaacgccaacagactggacctgttcgagatcagccagcccaccgaggacctggagttccacggcgtgatgagattctacttccaggacaaggccgccggcaacttcgccaccaagtgcatcagagtgagcagcaccgccaccacccaggacgtgatcgagaccctggccgagaagttcagacccgacatgagaatgctgagcagccccaagtacagcctgtacgaggtgcacgtgagcggcgagagaagactggacatcgacgagaagcccctggtggtgcagctgaactggaacaaggacgacagagagggcagattcgtgctgaagaacgagaacgacgccatcccccccaagaaggcccagagcaacggccccgagaagcaggagaaggagggcgtgatccagaacttcaagagaaccctgagcaagaaggagaagaaggagaagaagaagagagagaaggaggccctgagacaggccagcgacaaggacgacagacccttccagggcgaggacgtggagaacagcagactggccgccgaggtgtacaaggacatgcccgagaccagcttcaccagaaccatcagcaaccccgaggtggtgatgaagagaagaagacagcagaagctggagaagagaatgcaggagttcagaagcagcgacggcagacccgacagcggcggcaccctgagaatctacgccgacagcctgaagcccaacatcccctacaagaccatcctgctgagcaccaccgaccccgccgacttcgccgtggccgaggccctggagaagtacggcctggagaaggagaaccccaaggactactgcatcgccagagtgatgctgccccccggcgcccagcacagcgacgagaagggcgccaaggagatcatcctggacgacgacgagtgccccctgcagatcttcagagagtggcccagcgacaagggcatcctggtgttccagctgaagagaagaccccccgaccacatccccaagaagaccaagaagcacctggagggcaagacccccaagggcaaggagagagccgacggcagcggctacggcagcaccctgccccccgagaagctgccctacctggtggagctgagccccggcagaagaaaccacttcgcctactacaactaccacacctacgaggacggcagcgacagcagagacaagcccaagctgtacagactgcagctgagcgtgaccgaggtgggcaccgagaagctggacgacaacagcatccagctgttcggccccggcatccagccccaccactgcgacctgaccaacatggacggcgtggtgaccgtgacccccagaagcatggacgccgagacctacgtggagggccagagaatcagcgagaccaccatgctgcagagcggcatgaaggtgcagttcggcgccagccacgtgttcaagttcgtggaccccagccaggaccacgccctggccaagagaagcgtggacggcggcctgatggtgaagggccccagacacaagcccggcatcgtgcaggagaccaccttcgacctgggcggcgacatccacagcggcaccgccctgcccaccagcaagagcaccaccagactggacagcgacagagtgagcagcgccagcagcaccgccgagagaggcatggtgaagcccatgatcagagtggagcagcagcccgactacagaagacaggagagcagaacccaggacgccagcggccccgagctgatcctgcccgccagcatcgagttcagagagagcagcgaggacagcttcctgagcgccatcatcaactacaccaacagcagcaccgtgcacttcaagctgagccccacctacgtgctgtacatggcctgcagatacgtgctgagcaaccagtacagacccgacatcagccccaccgagagaacccacaaggtgatcgccgtggtgaacaagatggtgagcatgatggagggcgtgatccagaagcagaagaacatcgccggcgccctggccttctggatggccaacgccagcgagctgctgaacttcatcaagcaggacagagacctgagcagaatcaccctggacgcccaggacgtgctggcccacctggtgcagatggccttcaagtacctggtgcactgcctgcagagcgagctgaacaactacatgcccgccttcctggacgaccccgaggagaacagcctgcagagacccaagatcgacgacgtgctgcacaccctgaccggcgccatgagcctgctgagaagatgcagagtgaacgccgccctgaccatccagctgttcagccagctgttccacttcatcaacatgtggctgttcaacagactggtgaccgaccccgacagcggcctgtgcagccactactggggcgccatcatcagacagcagctgggccacatcgaggcctgggccgagaagcagggcctggagctggccgccgactgccacctgagcagaatcgtgcaggccaccaccctgctgaccatggacaagtacgcccccgacgacatccccaacatcaacagcacctgcttcaagctgaacagcctgcagctgcaggccctgctgcagaactaccactgcgcccccgacgagcccttcatccccaccgacctgatcgagaacgtggtgaccgtggccgagaacaccgccgacgagctggccagaagcgacggcagagaggtgcagctggaggaggaccccgacctgcagctgcccttcctgctgcccgaggacggctacagctgcgacgtggtgagaaacatccccaacggcctgcaggagttcctggaccccctgtgccagagaggcttctgcagactgatcccccacaccagaagccccggcacctggaccatctacttcgagggcgccgactacgagagccacctgctgagagagaacaccgagctggcccagcccctgagaaaggagcccgagatcatcaccgtgaccctgaagaagcagaacggcatgggcctgagcatcgtggccgccaagggcgccggccaggacaagctgggcatctacgtgaagagcgtggtgaagggcggcgccgccgacgtggacggcagactggccgccggcgaccagctgctgagcgtggacggcagaagcctggtgggcctgagccaggagagagccgccgagctgatgaccagaaccagcagcgtggtgaccctggaggtggccaagcagggcgccatctaccacggcctggccaccctgctgaaccagcccagccccatgatgcagagaatcagcgacagaagaggcagcggcaagcccagacccaagagcgagggcttcgagctgtacaacaacagcacccagaacggcagccccgagagcccccagctgccctgggccgagtacagcgagcccaagaagctgcccggcgacgacagactgatgaagaacagagccgaccacagaagcagccccaacgtggccaaccagccccccagccccggcggcaagagcgcctacgccagcggcaccaccgccaagatcaccagcgtgagcaccggcaacctgtgcaccgaggagcagacccccccccccagacccgaggcctaccccatccccacccagacctacaccagagagtacttcaccttccccgccagcaagagccaggacagaatggcccccccccagaaccagtggcccaactacgaggagaagccccacatgcacaccgacagcaaccacagcagcatcgccatccagagagtgaccagaagccaggaggagctgagagaggacaaggcctaccagctggagagacacagaatcgaggccgccatggacagaaagagcgacagcgacatgtggatcaaccagagcagcagcctggacagcagcaccagcagccaggagcacctgaaccacagcagcaagagcgtgacccccgccagcaccctgaccaagagcggccccggcagatggaagacccccgccgccatccccgccacccccgtggccgtgagccagcccatcagaaccgacctgccccccccccccccccccccccccgtgcactacgccggcgacttcgacggcatgagcatggacctgcccctgccccccccccccagcgccaaccagatcggcctgcccagcgcccaggtggccgccgccgagagaagaaagagagaggagcaccagagatggtacgagaaggagaaggccagactggaggaggagagagagagaaagagaagagagcaggagagaaagctgggccagatgagaacccagagcctgaaccccgcccccttcagccccctgaccgcccagcagatgaagcccgagaagcccagcaccctgcagagaccccaggagaccgtgatcagagagctgcagccccagcagcagcccagaaccatcgagagaagagacctgcagtacatcaccgtgagcaaggaggagctgagcagcggcgacagcctgagccccgacccctggaagagagacgccaaggagaagctggagaagcagcagcagatgcacatcgtggacatgctgagcaaggagatccaggagctgcagagcaagcccgacagaagcgccgaggagagcgacagactgagaaagctgatgctggagtggcagttccagaagagactgcaggagagcaagcagaaggacgaggacgacgaggaggaggaggacgacgacgtggacaccatgctgatcatgcagagactggaggccgagagaagagccagacagaccgccatgcccgccatcagcgtgctggacctgctgcaggacgaggagagaagaagacagcagcagctggaggagatgagaaagagagaggccgaggacagagccagacaggaggaggagagaagaagacaggaggaggagagaaccaagagagacgccgaggagaaggtgatggtgctgtag

SEQ ID NO: 89849 - DNA, 5475 bp, synthetic construct
  misc_feature 1..5475: note = Description of Artificial Sequence: Synthetic coding sequence
  source 1..5475: mol_type = other DNA
atgagcgccggcggcagagacgaggagagaagaaagctggccgacatcatccaccactggaacgccaacagactggacctgttcgagatcagccagcccaccgaggacctggagttccacggcgtgatgagattctacttccaggacaaggccgccggcaacttcgccaccaagtgcatcagagtgagcagcaccgccaccacccaggacgtgatcgagaccctggccgagaagttcagacccgacatgagaatgctgagcagccccaagtacagcctgtacgaggtgcacgtgagcggcgagagaagactggacatcgacgagaagcccctggtggtgcagctgaactggaacaaggacgacagagagggcagattcgtgctgaagaacgagaacgacgccatcccccccaagaaggcccagagcaacggccccgagaagcaggagaaggagggcgtgatccagaacttcaagagaaccctgagcaagaaggagaagaaggagaagaagaagagagagaaggaggccctgagacaggccagcgacaaggacgacagacccttccagggcgaggacgtggagaacagcagactggccgccgaggtgtacaaggacatgcccgagaccagcttcaccagaaccatcagcaaccccgaggtggtgatgaagagaagaagacagcagaagctggagaagagaatgcaggagttcagaagcagcgacggcagacccgacagcggcggcaccctgagaatctacgccgacagcctgaagcccaacatcccctacaagaccatcctgctgagcaccaccgaccccgccgacttcgccgtggccgaggccctggagaagtacggcctggagaaggagaaccccaaggactactgcatcgccagagtgatgctgccccccggcgcccagcacagcgacgagaagggcgccaaggagatcatcctggacgacgacgagtgccccctgcagatcttcagagagtggcccagcgacaagggcatcctggtgttccagctgaagagaagaccccccgaccacatccccaagaagaccaagaagcacctggagggcaagacccccaagggcaaggagagagccgacggcagcggctacggcagcaccctgccccccgagaagctgccctacctggtggagctgagccccggcagaagaaaccacttcgcctactacaactaccacacctacgaggacggcagcgacagcagagacaagcccaagctgtacagactgcagctgagcgtgaccgaggtgggcaccgagaagctggacgacaacagcatccagctgttcggccccggcatccagccccaccactgcgacctgaccaacatggacggcgtggtgaccgtgacccccagaagcatggacgccgagacctacgtggagggccagagaatcagcgagaccaccatgctgcagagcggcatgaaggtgcagttcggcgccagccacgtgttcaagttcgtggaccccagccaggaccacgccctggccaagagaagcgtggacggcggcctgatggtgaagggccccagacacaagcccggcatcgtgcaggagaccaccttcgacctgggcggcgacatccacagcggcaccgccctgcccaccagcaagagcaccaccagactggacagcgacagagtgagcagcgccagcagcaccgccgagagaggcatggtgaagcccatgatcagagtggagcagcagcccgactacagaagacaggagagcagaacccaggacgccagcggccccgagctgatcctgcccgccagcatcgagttcagagagagcagcgaggacagcttcctgagcgccatcatcaactacaccaacagcagcaccgtgcacttcaagctgagccccacctacgtgctgtacatggcctgcagatacgtgctgagcaaccagtacagacccgacatcagccccaccgagagaacccacaaggtgatcgccgtggtgaacaagatggtgagcatgatggagggcgtgatccagaagcagaagaacatcgccggcgccctggccttctggatggccaacgccagcgagctgctgaacttcatcaagcaggacagagacctgagcagaatcaccctggacgcccaggacgtgctggcccacctggtgcagatggccttcaagtacctggtgcactgcctgcagagcgagctgaacaactacatgcccgccttcctggacgaccccgaggagaacagcctgcagagacccaagatcgacgacgtgctgcacaccctgaccggcgccatgagcctgctgagaagatgcagagtgaacgccgccctgaccatccagctgttcagccagctgttccacttcatcaacatgtggctgttcaacagactggtgaccgaccccgacagcggcctgtgcagccactactggggcgccatcatcagacagcagctgggccacatcgaggcctgggccgagaagcagggcctggagctggccgccgactgccacctgagcagaatcgtgcaggccaccaccctgctgaccatggacaagtacgcccccgacgacatccccaacatcaacagcacctgcttcaagctgaacagcctgcagctgcaggccctgctgcagaactaccactgcgcccccgacgagcccttcatccccaccgacctgatcgagaacgtggtgaccgtggccgagaacaccgccgacgagctggccagaagcgacggcagagaggtgcagctggaggaggaccccgacctgcagctgcccttcctgctgcccgaggacggctacagctgcgacgtggtgagaaacatccccaacggcctgcaggagttcctggaccccctgtgccagagaggcttctgcagactgatcccccacaccagaagccccggcacctggaccatctacttcgagggcgccgactacgagagccacctgctgagagagaacaccgagctggccatccccctgagaaaggagcccgagatcatcaccgtgaccctgaagaagcagaacggcatgggcctgagcatcgtggccgccaagggcgccggccaggacaagctgggcatctacgtgaagagcgtggtgaagggcggcgccgccgacgtggacggcagactggccgccggcgaccagctgctgagcgtggacggcagaagcctggtgggcctgagccaggagagagccgccgagctgatgaccagaaccagcagcgtggtgaccctggaggtggccaagcagggcgccatctaccacggcctggccaccctgctgaaccagcccagccccatgatgcagagaatcagcgacagaagaggcagcggcaagcccagacccaagagcgagggcttcgagctgtacaacaacagcacccagaacggcagccccgagagcccccagctgccctgggccgagtacagcgagcccaagaagctgcccggcgacgacagactgatgaagaacagagccgaccacagaagcagccccaacgtggccaaccagccccccagccccggcggcaagagcgcctacgccagcggcaccaccgccaagatcaccagcgtgagcaccggcaacctgtgcaccgaggagcagacccccccccccagacccgaggcctaccccatccccacccagacctacaccagagagtacttcaccttccccgccagcaagagccaggacagaatggcccccccccagaaccagtggcccaactacgaggagaagccccacatgcacaccgacagcaaccacagcagcatcgccatccagagagtgaccagaagccaggaggagctgagagaggacaaggcctaccagctggagagacacagaatcgaggccgccatggacagaaagagcgacagcgacatgtggatcaaccagagcagcagcctggacagcagcaccagcagccaggagcacctgaaccacagcagcaagagcgtgacccccgccagcaccctgaccaagagcggccccggcagatggaagacccccgccgccatccccgccacccccgtggccgtgagccagcccatcagaaccgacctgccccccccccccccccccccccccgtgcactacgccggcgacttcgacggcatgagcatggacctgcccctgccccccccccccagcgccaaccagatcggcctgcccagcgcccaggtggccgccgccgagagaagaaagagagaggagcaccagagatggtacgagaaggagaaggccagactggaggaggagagagagagaaagagaagagagcaggagagaaagctgggccagatgagaacccagagcctgaaccccgcccccttcagccccctgaccgcccagcagatgaagcccgagaagcccagcaccctgcagagaccccaggagaccgtgatcagagagctgcagccccagcagcagcccagaaccatcgagagaagagacctgcagtacatcaccgtgagcaaggaggagctgagcagcggcgacagcctgagccccgacccctggaagagagacgccaaggagaagctggagaagcagcagcagatgcacatcgtggacatgctgagcaaggagatccaggagctgcagagcaagcccgacagaagcgccgaggagagcgacagactgagaaagctgatgctggagtggcagttccagaagagactgcaggagagcaagcagaaggacgaggacgacgaggaggaggaggacgacgacgtggacaccatgctgatcatgcagagactggaggccgagagaagagccagactgcaggacgaggagagaagaagacagcagcagctggaggagatgagaaagagagaggccgaggacagagccagacaggaggaggagagaagaagacaggaggaggagagaaccaagagagacgccgaggagaagagaagacaggaggagggctactacagcagactggaggccgagagaagaagacagcacgacgaggccgccagaagactgctggagcccgaggcccccggcctgtgcagaccccccctgcccagagactacgagccccccagccccagccccgcccccggcgccccccccccccccccccagagaaacgccagctacctgaagacccaggtgctgagccccgacagcctgttcaccgccaagttcgtggcctacaacgaggaggaggaggaggaggactgcagcctggccggccccaacagctaccccggcagcaccggcgccgccgtgggcgcccacgacgcctgcagagacgccaaggagaagagaagcaagagccaggacgccgacagccccggcagcagcggcgcccccgagaacctgaccttcaaggagagacagagactgttcagccagggccaggacgtgagcaacaaggtgaaggccagcagaaagctgaccgagctggagaacgagctgaacaccaagtag

SEQ ID NO: 89850 - DNA, 4956 bp, synthetic construct
  misc_feature 1..4956: note = Description of Artificial Sequence: Synthetic coding sequence
  source 1..4956: mol_type = other DNA
atgagcgccggcggcagagacgaggagagaagaaagctggccgacatcatccaccactggaacgccaacagactggacctgttcgagatcagccagcccaccgaggacctggagttccacggcgtgatgagattctacttccaggacaaggccgccggcaacttcgccaccaagtgcatcagagtgagcagcaccgccaccacccaggacgtgatcgagaccctggccgagaagttcagacccgacatgagaatgctgagcagccccaagtacagcctgtacgaggtgcacgtgagcggcgagagaagactggacatcgacgagaagcccctggtggtgcagctgaactggaacaaggacgacagagagggcagattcgtgctgaagaacgagaacgacgccatcccccccaagaaggcccagagcaacggccccgagaagcaggagaaggagggcgtgatccagaacttcaagagaaccctgagcaagaaggagaagaaggagaagaagaagagagagaaggaggccctgagacaggccagcgacaaggacgacagacccttccagggcgaggacgtggagaacagcagactggccgccgaggtgtacaaggacatgcccgagaccagcttcaccagaaccatcagcaaccccgaggtggtgatgaagagaagaagacagcagaagctggagaagagaatgcaggagttcagaagcagcgacggcagacccgacagcggcggcaccctgagaatctacgccgacagcctgaagcccaacatcccctacaagaccatcctgctgagcaccaccgaccccgccgacttcgccgtggccgaggccctggagaagtacggcctggagaaggagaaccccaaggactactgcatcgccagagtgatgctgccccccggcgcccagcacagcgacgagaagggcgccaaggagatcatcctggacgacgacgagtgccccctgcagatcttcagagagtggcccagcgacaagggcatcctggtgttccagctgaagagaagaccccccgaccacatccccaagaagaccaagaagcacctggagggcaagacccccaagggcaaggagagagccgacggcagcggctacggcagcaccctgccccccgagaagctgccctacctggtggagctgagccccggcagaagaaaccacttcgcctactacaactaccacacctacgaggacggcagcgacagcagagacaagcccaagctgtacagactgcagctgagcgtgaccgaggtgggcaccgagaagctggacgacaacagcatccagctgttcggccccggcatccagccccaccactgcgacctgaccaacatggacggcgtggtgaccgtgacccccagaagcatggacgccgagacctacgtggagggccagagaatcagcgagaccaccatgctgcagagcggcatgaaggtgcagttcggcgccagccacgtgttcaagttcgtggaccccagccaggaccacgccctggccaagagaagcgtggacggcggcctgatggtgaagggccccagacacaagcccggcatcgtgcaggagaccaccttcgacctgggcggcgacatccacagcggcaccgccctgcccaccagcaagagcaccaccagactggacagcgacagagtgagcagcgccagcagcaccgccgagagaggcatggtgaagcccatgatcagagtggagcagcagcccgactacagaagacaggagagcagaacccaggacgccagcggccccgagctgatcctgcccgccagcatcgagttcagagagagcagcgaggacagcttcctgagcgccatcatcaactacaccaacagcagcaccgtgcacttcaagctgagccccacctacgtgctgtacatggcctgcagatacgtgctgagcaaccagtacagacccgacatcagccccaccgagagaacccacaaggtgatcgccgtggtgaacaagatggtgagcatgatggagggcgtgatccagaagcagaagaacatcgccggcgccctggccttctggatggccaacgccagcgagctgctgaacttcatcaagcaggacagagacctgagcagaatcaccctggacgcccaggacgtgctggcccacctggtgcagatggccttcaagtacctggtgcactgcctgcagagcgagctgaacaactacatgcccgccttcctggacgaccccgaggagaacagcctgcagagacccaagatcgacgacgtgctgcacaccctgaccggcgccatgagcctgctgagaagatgcagagtgaacgccgccctgaccatccagctgttcagccagctgttccacttcatcaacatgtggctgttcaacagactggtgaccgaccccgacagcggcctgtgcagccactactggggcgccatcatcagacagcagctgggccacatcgaggcctgggccgagaagcagggcctggagctggccgccgactgccacctgagcagaatcgtgcaggccaccaccctgctgaccatggacaagtacgcccccgacgacatccccaacatcaacagcacctgcttcaagctgaacagcctgcagctgcaggccctgctgcagaactaccactgcgcccccgacgagcccttcatccccaccgacctgatcgagaacgtggtgaccgtggccgagaacaccgccgacgagctggccagaagcgacggcagagaggtgcagctggaggaggaccccgacctgcagctgcccttcctgctgcccgaggacggctacagctgcgacgtggtgagaaacatccccaacggcctgcaggagttcctggaccccctgtgccagagaggcttctgcagactgatcccccacaccagaagccccggcacctggaccatctacttcgagggcgccgactacgagagccacctgctgagagagaacaccgagctggcccagcccctgagaaaggagcccgagatcatcaccgtgaccctgaagaagcagaacggcatgggcctgagcatcgtggccgccaagggcgccggccaggacaagctgggcatctacgtgaagagcgtggtgaagggcggcgccgccgacgtggacggcagactggccgccggcgaccagctgctgagcgtggacggcagaagcctggtgggcctgagccaggagagagccgccgagctgatgaccagaaccagcagcgtggtgaccctggaggtggccaagcagggcgccatctaccacggcctggccaccctgctgaaccagcccagccccatgatgcagagaatcagcgacagaagaggcagcggcaagcccagacccaagagcgagggcttcgagctgtacaacaacagcacccagaacggcagccccgagagcccccagctgccctgggccgagtacagcgagcccaagaagctgcccggcgacgacagactgatgaagaacagagccgaccacagaagcagccccaacgtggccaaccagccccccagccccggcggcaagagcgcctacgccagcggcaccaccgccaagatcaccagcgtgagcaccggcaacctgtgcaccgaggagcagacccccccccccagacccgaggcctaccccatccccacccagacctacaccagagagtacttcaccttccccgccagcaagagccaggacagaatggcccccccccagaaccagtggcccaactacgaggagaagccccacatgcacaccgacagcaaccacagcagcatcgccatccagagagtgaccagaagccaggaggagctgagagaggacaaggcctaccagctggagagacacagaatcgaggccgccatggacagaaagagcgacagcgacatgtggatcaaccagagcagcagcctggacagcagcaccagcagccaggagcacctgaaccacagcagcaagagcgtgacccccgccagcaccctgaccaagagcggccccggcagatggaagacccccgccgccatccccgccacccccgtggccgtgagccagcccatcagaaccgacctgccccccccccccccccccccccccgtgcactacgccggcgacttcgacggcatgagcatggacctgcccctgccccccccccccagcgccaaccagatcggcctgcccagcgcccaggtggccgccgccgagagaagaaagagagaggagcaccagagatggtacgagaaggagaaggccagactggaggaggagagagagagaaagagaagagagcaggagagaaagctgggccagatgagaacccagagcctgaaccccgcccccttcagccccctgaccgcccagcagatgaagcccgagaagcccagcaccctgcagagaccccaggagaccgtgatcagagagctgcagccccagcagcagcccagaaccatcgagagaagagacctgcagtacatcaccgtgagcaaggaggagctgagcagcggcgacagcctgagccccgacccctggaagagagacgccaaggagaagctggagaagcagcagcagatgcacatcgtggacatgctgagcaaggagatccaggagctgcagagcaagcccgacagaagcgccgaggagagcgacagactgagaaagctgatgctggagtggcagttccagaagagactgcaggagagcaagcagaaggacgaggacgacgaggaggaggaggacgacgacgtggacaccatgctgatcatgcagagactggaggccgagagaagagccagagacgaggagagaagaagacagcagcagctggaggagatgagaaagagagaggccgaggacagagccagacaggaggaggagagaagaagacaggaggaggagagaaccaagagagacgccgaggagaaggtgatggtgctgtag

SEQ ID NO: 89851 - DNA, 5232 bp, synthetic construct
  misc_feature 1..5232: note = Description of Artificial Sequence: Synthetic coding sequence
  source 1..5232: mol_type = other DNA
atgagcgccggcggcagagacgaggagagaagaaagctggccgacatcatccaccactggaacgccaacagactggacctgttcgagatcagccagcccaccgaggacctggagttccacggcgtgatgagattctacttccaggacaaggccgccggcaacttcgccaccaagtgcatcagagtgagcagcaccgccaccacccaggacgtgatcgagaccctggccgagaagttcagacccgacatgagaatgctgagcagccccaagtacagcctgtacgaggtgcacgtgagcggcgagagaagactggacatcgacgagaagcccctggtggtgcagctgaactggaacaaggacgacagagagggcagattcgtgctgaagaacgagaacgacgccatcccccccaaggcccagagcaacggccccgagaagcaggagaaggagggcgtgatccagaacttcaagagaaccctgagcaagaaggagaagaaggagaagaagaagagagagaaggaggccctgagacaggccagcgacaaggacgacagacccttccagggcgaggacgtggagaacagcagactggccgccgaggtgtacaaggacatgcccgagaccagcttcaccagaaccatcagcaaccccgaggtggtgatgaagagaagaagacagcagaagctggagaagagaatgcaggagttcagaagcagcgacggcagacccgacagcggcggcaccctgagaatctacgccgacagcctgaagcccaacatcccctacaagaccatcctgctgagcaccaccgaccccgccgacttcgccgtggccgaggccctggagaagtacggcctggagaaggagaaccccaaggactactgcatcgccagagtgatgctgccccccggcgcccagcacagcgacgagaagggcgccaaggagatcatcctggacgacgacgagtgccccctgcagatcttcagagagtggcccagcgacaagggcatcctggtgttccagctgaagagaagaccccccgaccacatccccaagaagaccaagaagcacctggagggcaagacccccaagggcaaggagagagccgacggcagcggctacggcagcaccctgccccccgagaagctgccctacctggtggagctgagccccgacggcagcgacagcagagacaagcccaagctgtacagactgcagctgagcgtgaccgaggtgggcaccgagaagctggacgacaacagcatccagctgttcggccccggcatccagccccaccactgcgacctgaccaacatggacggcgtggtgaccgtgacccccagaagcatggacgccgagacctacgtggagggccagagaatcagcgagaccaccatgctgcagagcggcatgaaggtgcagttcggcgccagccacgtgttcaagttcgtggaccccagccaggaccacgccctggccaagagaagcgtggacggcggcctgatggtgaagggccccagacacaagcccggcatcgtgcaggagaccaccttcgacctgggcggcgacatccacagcggcaccgccctgcccaccagcaagagcaccaccagactggacagcgacagagtgagcagcgccagcagcaccgccgagagaggcatggtgaagcccatgatcagagtggagcagcagcccgactacagaagacaggagagcagaacccaggacgccagcggccccgagctgatcctgcccgccagcatcgagttcagagagagcagcgaggacagcttcctgagcgccatcatcaactacaccaacagcagcaccgtgcacttcaagctgagccccacctacgtgctgtacatggcctgcagatacgtgctgagcaaccagtacagacccgacatcagccccaccgagagaacccacaaggtgatcgccgtggtgaacaagatggtgagcatgatggagggcgtgatccagaagcagaagaacatcgccggcgccctggccttctggatggccaacgccagcgagctgctgaacttcatcaagcaggacagagacctgagcagaatcaccctggacgcccaggacgtgctggcccacctggtgcagatggccttcaagtacctggtgcactgcctgcagagcgagctgaacaactacatgcccgccttcctggacgaccccgaggagaacagcctgcagagacccaagatcgacgacgtgctgcacaccctgaccggcgccatgagcctgctgagaagatgcagagtgaacgccgccctgaccatccagctgttcagccagctgttccacttcatcaacatgtggctgttcaacagactggtgaccgaccccgacagcggcctgtgcagccactactggggcgccatcatcagacagcagctgggccacatcgaggcctgggccgagaagcagggcctggagctggccgccgactgccacctgagcagaatcgtgcaggccaccaccctgctgaccatggacaagtacgcccccgacgacatccccaacatcaacagcacctgcttcaagctgaacagcctgcagctgcaggccctgctgcagaactaccactgcgcccccgacgagcccttcatccccaccgacctgatcgagaacgtggtgaccgtggccgagaacaccgccgacgagctggccagaagcgacggcagagaggtgcagctggaggaggaccccgacctgcagctgcccttcctgctgcccgaggacggctacagctgcgacgtggtgagaaacatccccaacggcctgcaggagttcctggaccccctgtgccagagaggcttctgcagactgatcccccacaccagaagccccggcacctggaccatctacttcgagggcgccgactacgagagccacctgctgagagagaacaccgagctggccatccccctgagaaaggagcccgagatcatcaccgtgaccctgaagaagcagaacggcatgggcctgagcatcgtggccgccaagggcgccggccaggacaagctgggcatctacgtgaagagcgtggtgaagggcggcgccgccgacgacggcagactggccgccggcgaccagctgctgagcgtggacggcagaagcctggtgggcctgagccaggagagagccgccgagctgatgaccagaaccagcagcgtggtgaccctggaggtggccaagcagggcgccatctaccacggcctggccaccctgctgaaccagcccagccccatgatgcagagaatcagcgacagaagaggcagcggcaagcccagacccaagagcgagggcttcgagctgtacaacaacagcacccagaacggcagccccgagagcccccagctgccctgggccgagtacagcgagcccaagaagctgcccggcgacgacagactgatgaagaacagagccgaccacagaagcagccccaacgtggccaaccagccccccagccccggcggcaagagcgcctacgccagcggcaccaccgccaagatcaccagcgtgagcaccggcaacctgtgcaccgaggagcagacccccccccccagacccgaggcctaccccatccccacccagacctacaccagagagtacttcaccttccccgccagcaagagccaggacagaatggcccccccccagaaccagtggcccaactacgaggagaagccccacatgcacaccgacagcaaccacagcagcatcgccatccagagagtgaccagaagccaggaggagctgagagaggacaaggcctaccagctggagagacacagaatcgaggccgccatggacagaaagagcgacagcgacatgtggatcaaccagagcagcagcctggacagcagcaccagcagccaggagcacctgaaccacagcagcaagagcgtgacccccgccagcaccctgaccaagagcggccccggcagatggaagacccccgccgccatccccgccacccccgtggccgtgagccagcccatcagaaccgacctgccccccccccccccccccccccccgtgcactacgccggcgacttcgacggcatgagcatggacctgcccctgccccccccccccagcgccaaccagatcggcctgcccagcgcccaggtggccgccgccgagagaagaaagagagaggagcaccagagatggtacgagaaggagaaggccagactggaggaggagagagagagaaagagaagagagcaggagagaaagctgggccagatgagaacccagagcctgaaccccgcccccttcagccccctgaccgcccagcagatgaagcccgagaagcccagcaccctgcagagaccccaggagaccgtgatcagagagctgcagccccagcagcagcccagaaccatcgagagaagagacctgcagtacatcaccgtgagcaaggaggagctgagcagcggcgacagcctgagccccgacccctggaagagagacgccaaggagaagctggagaagcagcagcagatgcacatcgtggacatgctgagcaaggagatccaggagctgcagagcaagcccgacagaagcgccgaggagagcgacagactgagaaagctgatgctggagtggcagttccagaagagactgcaggagagcaagcagaaggacgaggacgacgaggaggaggaggacgacgacgtggacaccatgctgatcatgcagagactggaggccgagagaagagccagactgcaggacgaggagagaagaagacagcagcagctggaggagatgagaaagagagaggccgaggacagagccagacaggaggaggagagaagaagacaggaggaggagagaaccaagagagacgccgaggagaagagaagacaggaggagggctactacagcagactggaggccgagagaagaagacagcacgacgaggccgccagaagactgctggagcccgaggcccccggccccaacagctaccccggcagcaccggcgccgccgtgggcgcccacgacgcctgcagagacgccaaggagaagagaagcaagagccaggacgccgacagccccggcagcagcggcgcccccgagaacctgaccttcaaggagagacagagactgttcagccagggccaggacgtgagcaacaaggtgaaggccagcagaaagctgaccgagctggagaacgagctgaacaccaagtag

SEQ ID NO: 89852 - DNA, 5475 bp, synthetic construct
  misc_feature 1..5475: note = Description of Artificial Sequence: Synthetic coding sequence
  source 1..5475: mol_type = other DNA
atgagcgccggcggcagagacgaggagagaagaaagctggccgacatcatccaccactggaacgccaacagactggacctgttcgagatcagccagcccaccgaggacctggagttccacggcgtgatgagattctacttccaggacaaggccgccggcaacttcgccaccaagtgcatcagagtgagcagcaccgccaccacccaggacgtgatcgagaccctggccgagaagttcagacccgacatgagaatgctgagcagccccaagtacagcctgtacgaggtgcacgtgagcggcgagagaagactggacatcgacgagaagcccctggtggtgcagctgaactggaacaaggacgacagagagggcagattcgtgctgaagaacgagaacgacgccatcccccccaagaaggcccagagcaacggccccgagaagcaggagaaggagggcgtgatccagaacttcaagagaaccctgagcaagaaggagaagaaggagaagaagaagagagagaaggaggccctgagacaggccagcgacaaggacgacagacccttccagggcgaggacgtggagaacagcagactggccgccgaggtgtacaaggacatgcccgagaccagcttcaccagaaccatcagcaaccccgaggtggtgatgaagagaagaagacagcagaagctggagaagagaatgcaggagttcagaagcagcgacggcagacccgacagcggcggcaccctgagaatctacgccgacagcctgaagcccaacatcccctacaagaccatcctgctgagcaccaccgaccccgccgacttcgccgtggccgaggccctggagaagtacggcctggagaaggagaaccccaaggactactgcatcgccagagtgatgctgccccccggcgcccagcacagcgacgagaagggcgccaaggagatcatcctggacgacgacgagtgccccctgcagatcttcagagagtggcccagcgacaagggcatcctggtgttccagctgaagagaagaccccccgaccacatccccaagaagaccaagaagcacctggagggcaagacccccaagggcaaggagagagccgacggcagcggctacggcagcaccctgccccccgagaagctgccctacctggtggagctgagccccggcagaagaaaccacttcgcctactacaactaccacacctacgaggacggcagcgacagcagagacaagcccaagctgtacagactgcagctgagcgtgaccgaggtgggcaccgagaagctggacgacaacagcatccagctgttcggccccggcatccagccccaccactgcgacctgaccaacatggacggcgtggtgaccgtgacccccagaagcatggacgccgagacctacgtggagggccagagaatcagcgagaccaccatgctgcagagcggcatgaaggtgcagttcggcgccagccacgtgttcaagttcgtggaccccagccaggaccacgccctggccaagagaagcgtggacggcggcctgatggtgaagggccccagacacaagcccggcatcgtgcaggagaccaccttcgacctgggcggcgacatccacagcggcaccgccctgcccaccagcaagagcaccaccagactggacagcgacagagtgagcagcgccagcagcaccgccgagagaggcatggtgaagcccatgatcagagtggagcagcagcccgactacagaagacaggagagcagaacccaggacgccagcggccccgagctgatcctgcccgccagcatcgagttcagagagagcagcgaggacagcttcctgagcgccatcatcaactacaccaacagcagcaccgtgcacttcaagctgagccccacctacgtgctgtacatggcctgcagatacgtgctgagcaaccagtacagacccgacatcagccccaccgagagaacccacaaggtgatcgccgtggtgaacaagatggtgagcatgatggagggcgtgatccagaagcagaagaacatcgccggcgccctggccttctggatggccaacgccagcgagctgctgaacttcatcaagcaggacagagacctgagcagaatcaccctggacgcccaggacgtgctggcccacctggtgcagatggccttcaagtacctggtgcactgcctgcagagcgagctgaacaactacatgcccgccttcctggacgaccccgaggagaacagcctgcagagacccaagatcgacgacgtgctgcacaccctgaccggcgccatgagcctgctgagaagatgcagagtgaacgccgccctgaccatccagctgttcagccagctgttccacttcatcaacatgtggctgttcaacagactggtgaccgaccccgacagcggcctgtgcagccactactggggcgccatcatcagacagcagctgggccacatcgaggcctgggccgagaagcagggcctggagctggccgccgactgccacctgagcagaatcgtgcaggccaccaccctgctgaccatggacaagtacgcccccgacgacatccccaacatcaacagcacctgcttcaagctgaacagcctgcagctgcaggccctgctgcagaactaccactgcgcccccgacgagcccttcatccccaccgacctgatcgagaacgtggtgaccgtggccgagaacaccgccgacgagctggccagaagcgacggcagagaggtgcagctggaggaggaccccgacctgcagctgcccttcctgctgcccgaggacggctacagctgcgacgtggtgagaaacatccccaacggcctgcaggagttcctggaccccctgtgccagagaggcttctgcagactgatcccccacaccagaagccccggcacctggaccatctacttcgagggcgccgactacgagagccacctgctgagagagaacaccgagctggcccagcccctgagaaaggagcccgagatcatcaccgtgaccctgaagaagcagaacggcatgggcctgagcatcgtggccgccaagggcgccggccaggacaagctgggcatctacgtgaagagcgtggtgaagggcggcgccgccgacgtggacggcagactggccgccggcgaccagctgctgagcgtggacggcagaagcctggtgggcctgagccaggagagagccgccgagctgatgaccagaaccagcagcgtggtgaccctggaggtggccaagcagggcgccatctaccacggcctggccaccctgctgaaccagcccagccccatgatgcagagaatcagcgacagaagaggcagcggcaagcccagacccaagagcgagggcttcgagctgtacaacaacagcacccagaacggcagccccgagagcccccagctgccctgggccgagtacagcgagcccaagaagctgcccggcgacgacagactgatgaagaacagagccgaccacagaagcagccccaacgtggccaaccagccccccagccccggcggcaagagcgcctacgccagcggcaccaccgccaagatcaccagcgtgagcaccggcaacctgtgcaccgaggagcagacccccccccccagacccgaggcctaccccatccccacccagacctacaccagagagtacttcaccttccccgccagcaagagccaggacagaatggcccccccccagaaccagtggcccaactacgaggagaagccccacatgcacaccgacagcaaccacagcagcatcgccatccagagagtgaccagaagccaggaggagctgagagaggacaaggcctaccagctggagagacacagaatcgaggccgccatggacagaaagagcgacagcgacatgtggatcaaccagagcagcagcctggacagcagcaccagcagccaggagcacctgaaccacagcagcaagagcgtgacccccgccagcaccctgaccaagagcggccccggcagatggaagacccccgccgccatccccgccacccccgtggccgtgagccagcccatcagaaccgacctgccccccccccccccccccccccccgtgcactacgccggcgacttcgacggcatgagcatggacctgcccctgccccccccccccagcgccaaccagatcggcctgcccagcgcccaggtggccgccgccgagagaagaaagagagaggagcaccagagatggtacgagaaggagaaggccagactggaggaggagagagagagaaagagaagagagcaggagagaaagctgggccagatgagaacccagagcctgaaccccgcccccttcagccccctgaccgcccagcagatgaagcccgagaagcccagcaccctgcagagaccccaggagaccgtgatcagagagctgcagccccagcagcagcccagaaccatcgagagaagagacctgcagtacatcaccgtgagcaaggaggagctgagcagcggcgacagcctgagccccgacccctggaagagagacgccaaggagaagctggagaagcagcagcagatgcacatcgtggacatgctgagcaaggagatccaggagctgcagagcaagcccgacagaagcgccgaggagagcgacagactgagaaagctgatgctggagtggcagttccagaagagactgcaggagagcaagcagaaggacgaggacgacgaggaggaggaggacgacgacgtggacaccatgctgatcatgcagagactggaggccgagagaagagccagactgcaggacgaggagagaagaagacagcagcagctggaggagatgagaaagagagaggccgaggacagagccagacaggaggaggagagaagaagacaggaggaggagagaaccaagagagacgccgaggagaagagaagacaggaggagggctactacagcagactggaggccgagagaagaagacagcacgacgaggccgccagaagactgctggagcccgaggcccccggcctgtgcagaccccccctgcccagagactacgagccccccagccccagccccgcccccggcgccccccccccccccccccagagaaacgccagctacctgaagacccaggtgctgagccccgacagcctgttcaccgccaagttcgtggcctacaacgaggaggaggaggaggaggactgcagcctggccggccccaacagctaccccggcagcaccggcgccgccgtgggcgcccacgacgcctgcagagacgccaaggagaagagaagcaagagccaggacgccgacagccccggcagcagcggcgcccccgagaacctgaccttcaaggagagacagagactgttcagccagggccaggacgtgagcaacaaggtgaaggccagcagaaagctgaccgagctggagaacgagctgaacaccaagtag

SEQ ID NO: 89853 - DNA, 3282 bp, synthetic construct
  misc_feature 1..3282: note = Description of Artificial Sequence: Synthetic coding sequence
  source 1..3282: mol_type = other DNA
atgaaggagatggtgggcggctgctgcgtgtgcagcgacgagagaggctgggccgagaaccccctggtgtactgcgacggccacgcctgcagcgtggtggtgcaccaggcctgctacggcatcgtgcaggtgcccaccggcccctggttctgcagaaagtgcgagagccaggagagagccgccagagtgagatgcgagctgtgcccccacaaggacggcgccctgaagagaaccgacaacggcggctgggcccacgtggtgtgcgccctgtacatccccgaggtgcagttcgccaacgtgctgaccatggagcccatcgtgctgcagtacgtgccccacgacagattcaacaagacctgctacatctgcgaggagcagggcagagagagcaaggccgccagcggcgcctgcatgacctgcaacagacacggctgcagacaggccttccacgtgacctgcgcccagatggccggcctgctgtgcgaggaggaggtgctggaggtggacaacgtgaagtactgcggctactgcaagtaccacttcagcaagatgaagaccagcagacacagcagcggcggcggcggcggcggcgccggcggcggcggcggcagcatgggcggcggcggcagcggcttcatcagcggcagaagaagcagaagcgccagccccagcacccagcaggagaagcaccccacccaccacgagagaggccagaagaagagcagaaaggacaaggagagactgaagcagaagcacaagaagagacccgagagcccccccagcatcctgaccccccccgtggtgcccaccgccgacaaggtgagcagcagcgccagcagcagcagccaccacgaggccagcacccaggagaccagcgagagcagcagagagagcaagggcaagaagagcagcagccacagcctgagccacaagggcaagaagctgagcagcggcaagggcgtgagcagcttcaccagcgccagcagcagcagcagcagcagcagcagcagcagcggcggccccttccagcccgccgtgagcagcctgcagagcagccccgacttcagcgccttccccaagctggagcagcccgaggaggacaagtacagcaagcccaccgcccccgcccccagcgccccccccagccccagcgcccccgagccccccaaggccgacctgttcgagcagaaggtggtgttcagcggcttcggccccatcatgagattcagcaccaccaccagcagcagcggcagagccagagcccccagccccggcgactacaagagcccccacgtgaccggcagcggcgccagcgccggcacccacaagagaatgcccgccctgagcgccacccccgtgcccgccgacgagacccccgagaccggcctgaaggagaagaagcacaaggccagcaagagaagcagacacggccccggcagacccaagggcagcagaaacaaggagggcaccggcggccccgccgcccccagcctgcccagcgcccagctggccggcttcaccgccaccgccgccagccccttcagcggcggcagcctggtgagcagcggcctgggcggcctgagcagcagaaccttcggccccagcggcagcctgcccagcctgagcctggagagccccctgctgggcgccggcatctacaccagcaacaaggaccccatcagccacagcggcggcatgctgagagccgtgtgcagcacccccctgagcagcagcctgctgggcccccccggcaccagcgccctgcccagactgagcagaagccccttcaccagcaccctgcccagcagcagcgccagcatcagcaccacccaggtgttcagcctggccggcagcaccttcagcctgcccagcacccacatcttcggcacccccatgggcgccgtgaaccccctgctgagccaggccgagagcagccacaccgagcccgacctggaggactgcagcttcagatgcagaggcaccagcccccaggagagcctgagcagcatgagccccatcagcagcctgcccgccctgttcgaccagaccgccagcgccccctgcggcggcggccagctggaccccgccgcccccggcaccaccaacatggagcagctgctggagaagcagggcgacggcgaggccggcgtgaacatcgtggagatgctgaaggccctgcacgccctgcagaaggagaaccagagactgcaggagcagatcctgagcctgaccgccaagaaggagagactgcagatcctgaacgtgcagctgagcgtgcccttccccgccctgcccgccgccctgcccgccgccaacggccccgtgcccggcccctacggcctgcccccccaggccggcagcagcgacagcctgagcaccagcaagagcccccccggcaagagcagcctgggcctggacaacagcctgagcaccagcagcgaggacccccacagcggctgccccagcagaagcagcagcagcctgagcttccacagcacccccccccccctgcccctgctgcagcagagccccgccaccctgcccctggccctgcccggcgcccccgcccccctgcccccccagccccagaacggcctgggcagagcccccggcgccgccggcctgggcgccatgcccatggccgagggcctgctgggcggcctggccggcagcggcggcctgcccctgaacggcctgctgggcggcctgaacggcgccgccgcccccaaccccgccagcctgagccaggccggcggcgcccccaccctgcagctgcccggctgcctgaacagcctgaccgagcagcagagacacctgctgcagcagcaggagcagcagctgcagcagctgcagcagctgctggccagcccccagctgacccccgagcaccagaccgtggtgtaccagatgatccagcagatccagcagaagagagagctgcagagactgcagatggccggcggcagccagctgcccatggccagcctgctggccggcagcagcacccccctgctgagcgccggcacccccggcctgctgcccaccgccagcgccccccccctgctgcccgccggcgccctggtggcccccagcctgggcaacaacaccagcctgatggccgccgccgccgccgccgccgccgtggccgccgccggcggcccccccgtgctgaccgcccagaccaaccccttcctgagcctgagcggcgccgagggcagcggcggcggccccaagggcggcaccgccgacaagggcgccagcgccaaccaggagaagggctag

SEQ ID NO: 89854 - DNA, 978 bp, synthetic construct
  misc_feature 1..978: note = Description of Artificial Sequence: Synthetic coding sequence
  source 1..978: mol_type = other DNA
atgaaggagatggtgggcggctgctgcgtgtgcagcgacgagagaggctgggccgagaaccccctggtgtactgcgacggccacgcctgcagcgtggtggtgcaccaggcctgctacggcatcgtgcaggtgcccaccggcccctggttctgcagaaagtgcgagagccaggagagagccgccagagtgagatgcgagctgtgcccccacaaggacggcgccctgaagagaaccgacaacggcggctgggcccacgtggtgtgcgccctgtacatccccgaggtgcagttcgccaacgtgctgaccatggagcccatcgtgctgcagtacgtgccccacgacagattcaacaagacctgctacatctgcgaggagcagggcagagagagcaaggccgccagcggcgcctgcatgacctgcaacagacacggctgcagacaggccttccacgtgacctgcgcccagatggccggcctgctgtgcgaggaggaggtgctggaggtggacaacgtgaagtactgcggctactgcaagtaccacttcagcaagatgaagaccagcagacacagcagcggcggcggcggcggcggcgccggcggcggcggcggcagcatgggcggcggcggcagcggcttcatcagcggcagaagaagcagaagcgccagccccagcacccagcaggagaagcaccccacccaccacgagagaggccagaagaagagcagaaaggacaaggagagactgaagcagaagcacaagaagagacccgagagcccccccagcatcctgaccccccccgtggtgcccaccgccgacaagcccagaagaggccaccagagccccaccaaccacggcatcggcagcctgggctgctgcctgcccgacacccccatctgcctgtgccccgagggcctgagccccggcctgctgagcgccgagagcggcggcagacacagcggcctgctgagcaagttctag

SEQ ID NO: 89855 - DNA, 16614 bp, synthetic construct
  misc_feature 1..16614: note = Description of Artificial Sequence: Synthetic coding sequence
  source 1..16614: mol_type = other DNA
atggacagccagaagctggccggcgaggacaaggacagcgagcccgccgccgacggccccgccgccagcgaggaccccagcgccaccgagagcgacctgcccaacccccacgtgggcgaggtgagcgtgctgagcagcggcagccccagactgcaggagaccccccaggactgcagcggcggccccgtgagaagatgcgccctgtgcaactgcggcgagcccagcctgcacggccagagagagctgagaagattcgagctgcccttcgactggcccagatgccccgtggtgagccccggcggcagccccggccccaacgaggccgtgctgcccagcgaggacctgagccagatcggcttccccgagggcctgacccccgcccacctgggcgagcccggcggcagctgctgggcccaccactggtgcgccgcctggagcgccggcgtgtggggccaggagggccccgagctgtgcggcgtggacaaggccatcttcagcggcatcagccagagatgcagccactgcaccagactgggcgccagcatcccctgcagaagccccggctgccccagactgtaccacttcccctgcgccaccgccagcggcagcttcctgagcatgaagaccctgcagctgctgtgccccgagcacagcgagggcgccgcctacctggaggaggccagatgcgccgtgtgcgagggccccggcgagctgtgcgacctgttcttctgcaccagctgcggccaccactaccacggcgcctgcctggacaccgccctgaccgccagaaagagagccggctggcagtgccccgagtgcaaggtgtgccaggcctgcagaaagcccggcaacgacagcaagatgctggtgtgcgagacctgcgacaagggctaccacaccttctgcctgaagccccccatggaggagctgcccgcccacagctggaagtgcaaggcctgcagagtgtgcagagcctgcggcgccggcagcgccgagctgaaccccaacagcgagtggttcgagaactacagcctgtgccacagatgccacaaggcccagggcggccagaccatcagaagcgtggccgagcagcacacccccgtgtgcagcagattcagcccccccgagcccggcgacacccccaccgacgagcccgacgccctgtacgtggcctgccagggccagcccaagggcggccacgtgaccagcatgcagcccaaggagcccggccccctgcagtgcgaggccaagcccctgggcaaggccggcgtgcagctggagccccagctggaggcccccctgaacgaggagatgcccctgctgcccccccccgaggagagccccctgagccccccccccgaggagagccccaccagccccccccccgaggccagcagactgagccccccccccgaggagctgcccgccagccccctgcccgaggccctgcacctgagcagacccctggaggagagccccctgagccccccccccgaggagagccccctgagccccccccccgagagcagccccttcagccccctggaggagagccccctgagcccccccgaggagagcccccccagccccgccctggagacccccctgagccccccccccgaggccagccccctgagcccccccttcgaggagagccccctgagccccccccccgaggagctgcccaccagccccccccccgaggccagcagactgagccccccccccgaggagagccccatgagccccccccccgaggagagccccatgagccccccccccgaggccagcagactgttcccccccttcgaggagagccccctgagccccccccccgaggagagccccctgagccccccccccgaggccagcagactgagccccccccccgaggacagccccatgagccccccccccgaggagagccccatgagccccccccccgaggtgagcagactgagccccctgcccgtggtgagcagactgagccccccccccgaggagagccccctgagccccccccccgaggagagccccaccagccccccccccgaggccagcagactgagccccccccccgaggacagccccaccagccccccccccgaggacagccccgccagccccccccccgaggacagcctgatgagcctgcccctggaggagagccccctgctgcccctgcccgaggagccccagctgtgccccagaagcgagggcccccacctgagccccagacccgaggagccccacctgagccccagacccgaggagccccacctgagcccccaggccgaggagccccacctgagcccccagcccgaggagccctgcctgtgcgccgtgcccgaggagccccacctgagcccccaggccgagggcccccacctgagcccccagcccgaggagctgcacctgagcccccagaccgaggagccccacctgagccccgtgcccgaggagccctgcctgagcccccagcccgaggagagccacctgagcccccagagcgaggagccctgcctgagccccagacccgaggagagccacctgagccccgagctggagaagccccccctgagccccagacccgagaagccccccgaggagcccggccagtgccccgcccccgaggagctgcccctgttccccccccccggcgagcccagcctgagccccctgctgggcgagcccgccctgagcgagcccggcgagccccccctgagccccctgcccgaggagctgcccctgagccccagcggcgagcccagcctgagcccccagctgatgccccccgaccccctgcccccccccctgagccccatcatcaccgccgccgccccccccgccctgagccccctgggcgagctggagtaccccttcggcgccaagggcgacagcgaccccgagagccccctggccgcccccatcctggagacccccatcagccccccccccgaggccaactgcaccgaccccgagcccgtgccccccatgatcctgccccccagccccggcagccccgtgggccccgccagccccatcctgatggagcccctgcccccccagtgcagccccctgctgcagcacagcctggtgccccagaacagcccccccagccagtgcagcccccccgccctgcccctgagcgtgcccagccccctgagccccatcggcaaggtggtgggcgtgagcgacgaggccgagctgcacgagatggagaccgagaaggtgagcgagcccgagtgccccgccctggagcccagcgccaccagccccctgcccagccccatgggcgacctgagctgccccgcccccagccccgcccccgccctggacgacttcagcggcctgggcgaggacaccgcccccctggacggcatcgacgcccccggcagccagcccgagcccggccagacccccggcagcctggccagcgagctgaagggcagccccgtgctgctggaccccgaggagctggcccccgtgacccccatggaggtgtaccccgagtgcaagcagaccgccggccagggcagcccctgcgaggagcaggaggagcccagagcccccgtggcccccaccccccccaccctgatcaagagcgacatcgtgaacgagatcagcaacctgagccagggcgacgccagcgccagcttccccggcagcgagcccctgctgggcagccccgaccccgagggcggcggcagcctgagcatggagctgggcgtgagcaccgacgtgagccccgccagagacgagggcagcctgagactgtgcaccgacagcctgcccgagaccgacgacagcctgctgtgcgacgccggcaccgccatcagcggcggcaaggccgagggcgagaagggcagaagaagaagcagccccgccagaagcagaatcaagcagggcagaagcagcagcttccccggcagaagaagacccagaggcggcgcccacggcggcagaggcagaggcagagccagactgaagagcaccgccagcagcatcgagaccctggtggtggccgacatcgacagcagccccagcaaggaggaggaggaggaggacgacgacaccatgcagaacaccgtggtgctgttcagcaacaccgacaagttcgtgctgatgcaggacatgtgcgtggtgtgcggcagcttcggcagaggcgccgagggccacctgctggcctgcagccagtgcagccagtgctaccacccctactgcgtgaacagcaagatcaccaaggtgatgctgctgaagggctggagatgcgtggagtgcatcgtgtgcgaggtgtgcggccaggccagcgaccccagcagactgctgctgtgcgacgactgcgacatcagctaccacacctactgcctggacccccccctgctgaccgtgcccaagggcggctggaagtgcaagtggtgcgtgagctgcatgcagtgcggcgccgccagccccggcttccactgcgagtggcagaacagctacacccactgcggcccctgcgccagcctggtgacctgccccatctgccacgccccctacgtggaggaggacctgctgatccagtgcagacactgcgagagatggatgcacgccggctgcgagagcctgttcaccgaggacgacgtggagcaggccgccgacgagggcttcgactgcgtgagctgccagccctacgtggtgaagcccgtggcccccgtggccccccccgagctggtgcccatgaaggtgaaggagcccgagccccagtacttcagattcgagggcgtgtggctgaccgagaccggcatggccctgctgagaaacctgaccatgagccccctgcacaagagaagacagagaagaggcagactgggcctgcccggcgaggccggcctggagggcagcgagcccagcgacgccctgggccccgacgacaagaaggacggcgacctggacaccgacgagctgctgaagggcgagggcggcgtggagcacatggagtgcgagatcaagctggagggccccgtgagccccgacgtggagcccggcaaggaggagaccgaggagagcaagaagagaaagagaaagccctacagacccggcatcggcggcttcatggtgagacagagaaagagccacaccagaaccaagaagggccccgccgcccaggccgaggtgctgagcggcgacggccagcccgacgaggtgatccccgccgacctgcccgccgagggcgccgtggagcagagcctggccgagggcgacgagaagaagaagcagcagagaagaggcagaaagaagagcaagctggaggacatgttccccgcctacctgcaggaggccttcttcggcaaggagctgctggacctgagcagaaaggccctgttcgccgtgggcgtgggcagacccagcttcggcctgggcacccccaaggccaagggcgacggcggcagcgagagaaaggagctgcccaccagccagaagggcgacgacggccccgacatcgccgacgaggagagcagaggcctggagggcaaggccgacacccccggccccgaggacggcggcgtgaaggccagccccgtgcccagcgaccccgagaagcccggcacccccggcgagggcatgctgagcagcgacctggacagaatcagcaccgaggagctgcccaagatggagagcaaggacctgcagcagctgttcaaggacgtgctgggcagcgagagagagcagcacctgggctgcggcacccccggcctggagggcagcagaacccccctgcagagacccttcctgcagggcggcctgcccctgggcaacctgcccagcagcagccccatggacagctaccccggcctgtgccagagccccttcctggacagcagagagagaggcggcttcttcagccccgagcccggcgagcccgacagcccctggaccggcagcggcggcaccacccccagcacccccaccacccccaccaccgagggcgagggcgacggcctgagctacaaccagagaagcctgcagagatgggagaaggacgaggagctgggccagctgagcaccatcagccccgtgctgtacgccaacatcaacttccccaacctgaagcaggactaccccgactggagcagcagatgcaagcagatcatgaagctgtggagaaaggtgcccgccgccgacaaggccccctacctgcagaaggccaaggacaacagagccgcccacagaatcaacaaggtgcagaagcaggccgagagccagatcaacaagcagaccaaggtgggcgacatcgccagaaagaccgacagacccgccctgcacctgagaatccccccccagcccggcgccctgggcagccccccccccgccgccgcccccaccatcttcatcggcagccccaccacccccgccggcctgagcaccagcgccgacggcttcctgaagccccccgccggcagcgtgcccggccccgacagccccggcgagctgttcctgaagctgcccccccaggtgcccgcccaggtgcccagccaggaccccttcggcctggcccccgcctaccccctggagcccagattccccaccgccccccccacctaccccccctaccccagccccaccggcgcccccgcccagccccccatgctgggcgccagcagcagacccggcgccggccagcccggcgagttccacaccaccccccccggcacccccagacaccagcccagcacccccgaccccttcctgaagcccagatgccccagcctggacaacctggccgtgcccgagagccccggcgtgggcggcggcaaggccagcgagcccctgctgagccccccccccttcggcgagagcagaaaggccctggaggtgaagaaggaggagctgggcgccagcagccccagctacggcccccccaacctgggcttcgtggacagccccagcagcggcacccacctgggcggcctggagctgaagacccccgacgtgttcaaggcccccctgacccccagagccagccaggtggagccccagagccccggcctgggcctgagaccccaggagcccccccccgcccaggccctggcccccagcccccccagccaccccgacatcttcagacccggcagctacaccgacccctacgcccagccccccctgacccccagaccccagccccccccccccgagagctgctgcgccctgccccccagaagcctgcccagcgaccccttcagcagagtgcccgccagcccccagagccagagcagcagccagagccccctgacccccagacccctgagcgccgaggccttctgccccagccccgtgacccccagattccagagccccgacccctacagcagaccccccagcagaccccagagcagagaccccttcgcccccctgcacaagccccccagaccccagccccccgaggtggccttcaaggccggcagcctggcccacaccagcctgggcgccggcggcttccccgccgccctgcccgccggccccgccggcgagctgcacgccaaggtgcccagcggccagccccccaacttcgtgagaagccccggcaccggcgccttcgtgggcacccccagccccatgagattcaccttcccccaggccgtgggcgagcccagcctgaagccccccgtgccccagcccggcctgccccccccccacggcatcaacagccacttcggccccggccccaccctgggcaagccccagagcaccaactacaccgtggccaccggcaacttccaccccagcggcagccccctgggccccagcagcggcagcaccggcgagagctacggcctgagccccctgagaccccccagcgtgctgcccccccccgcccccgacggcagcctgccctacctgagccacggcgccagccagagaagcggcatcaccagccccgtggagaagagagaggaccccggcaccggcatgggcagcagcctggccaccgccgagctgcccggcacccaggaccccggcatgagcggcctgagccagaccgagctggagaagcagagacagagacagagactgagagagctgctgatcagacagcagatccagagaaacaccctgagacaggagaaggagaccgccgccgccgccgccggcgccgtgggcccccccggcagctggggcgccgagcccagcagccccgccttcgagcagctgagcagaggccagacccccttcgccggcacccaggacaagagcagcctggtgggcctgccccccagcaagctgagcggccccatcctgggccccggcagcttccccagcgacgacagactgagcagaccccccccccccgccacccccagcagcatggacgtgaacagcagacagctggtgggcggcagccaggccttctaccagagagccccctaccccggcagcctgcccctgcagcagcagcagcagcagctgtggcagcagcagcaggccaccgccgccaccagcatgagattcgccatgagcgccagattccccagcacccccggccccgagctgggcagacaggccctgggcagccccctggccggcatcagcaccagactgcccggccccggcgagcccgtgcccggccccgccggccccgcccagttcatcgagctgagacacaacgtgcagaagggcctgggccccggcggcacccccttccccggccagggccccccccagagacccagattctaccccgtgagcgaggacccccacagactggcccccgagggcctgagaggcctggccgtgagcggcctgcccccccagaagcccagcgccccccccgcccccgagctgaacaacagcctgcaccccaccccccacaccaagggccccaccctgcccaccggcctggagctggtgaacagaccccccagcagcaccgagctgggcagacccaaccccctggccctggaggccggcaagctgccctgcgaggaccccgagctggacgacgacttcgacgcccacaaggccctggaggacgacgaggagctggcccacctgggcctgggcgtggacgtggccaagggcgacgacgagctgggcaccctggagaacctggagaccaacgacccccacctggacgacctgctgaacggcgacgagttcgacctgctggcctacaccgaccccgagctggacaccggcgacaagaaggacatcttcaacgagcacctgagactggtggagagcgccaacgagaaggccgagagagaggccctgctgagaggcgtggagcccggccccctgggccccgaggagagacccccccccgccgccgacgccagcgagcccagactggccagcgtgctgcccgaggtgaagcccaaggtggaggagggcggcagacaccccagcccctgccagttcaccatcgccacccccaaggtggagcccgcccccgccgccaacagcctgggcctgggcctgaagcccggccagagcatgatgggcagcagagacaccagaatgggcaccggccccttcagcagcagcggccacaccgccgagaaggccagcttcggcgccaccggcggcccccccgcccacctgctgacccccagccccctgagcggccccggcggcagcagcctgctggagaagttcgagctggagagcggcgccctgaccctgcccggcggccccgccgccagcggcgacgagctggacaagatggagagcagcctggtggccagcgagctgcccctgctgatcgaggacctgctggagcacgagaagaaggagctgcagaagaagcagcagctgagcgcccagctgcagcccgcccagcagcagcagcagcagcagcagcagcacagcctgctgagcgcccccggccccgcccaggccatgagcctgccccacgagggcagcagccccagcctggccggcagccagcagcagctgagcctgggcctggccggcgccagacagcccggcctgccccagcccctgatgcccacccagccccccgcccacgccctgcagcagagactggcccccagcatggccatggtgagcaaccagggccacatgctgagcggccagcacggcggccaggccggcctggtgccccagcagagcagccagcccgtgctgagccagaagcccatgggcaccatgccccccagcatgtgcatgaagccccagcagctggccatgcagcagcagctggccaacagcttcttccccgacaccgacctggacaagttcgccgccgaggacatcatcgaccccatcgccaaggccaagatggtggccctgaagggcatcaagaaggtgatggcccagggcagcatcggcgtggcccccggcatgaacagacagcaggtgagcctgctggcccagagactgagcggcggccccagcagcgacctgcagaaccacgtggccgccggcagcggccaggagagaagcgccggcgaccccagccagcccagacccaacccccccaccttcgcccagggcgtgatcaacgaggccgaccagagacagtacgaggagtggctgttccacacccagcagctgctgcagatgcagctgaaggtgctggaggagcagatcggcgtgcacagaaagagcagaaaggccctgtgcgccaagcagagaaccgccaagaaggccggcagagagttccccgaggccgacgccgagaagctgaagctggtgaccgagcagcagagcaagatccagaagcagctggaccaggtgagaaagcagcagaaggagcacaccaacctgatggccgagtacagaaacaagcagcagcagcagcagcagcagcagcagcagcagcagcagcagcacagcgccgtgctggccctgagccccagccagagccccagactgctgaccaagctgcccggccagctgctgcccggccacggcctgcagcccccccagggcccccccggcggccaggccggcggcctgagactgacccccggcggcatggccctgcccggccagcccggcggccccttcctgaacaccgccctggcccagcagcagcagcagcagcacagcggcggcgccggcagcctggccggccccagcggcggcttcttccccggcaacctggccctgagaagcctgggccccgacagcagactgctgcaggagagacagctgcagctgcagcagcagagaatgcagctggcccagaagctgcagcagcagcagcagcagcagcagcagcagcagcacctgctgggccaggtggccatccagcagcagcagcagcagggccccggcgtgcagaccaaccaggccctgggccccaagccccagggcctgatgccccccagcagccaccagggcctgctggtgcagcagctgagcccccagcccccccagggcccccagggcatgctgggccccgcccaggtggccgtgctgcagcagcagcaccccggcgccctgggcccccagggcccccacagacaggtgctgatgacccagagcagagtgctgagcagcccccagctggcccagcagggccagggcctgatgggccacagactggtgaccgcccagcagcagcagcagcagcagcagcaccagcagcagggcagcatggccggcctgagccacctgcagcagagcctgatgagccacagcggccagcccaagctgagcgcccagcccatgggcagcctgcagcagctgcagcagcagcagcagctgcagcagcagcagcagctgcagcagcagcagcagcagcagctgcagcagcagcagcagctgcagcagcagcagctgcagcagcagcagcagcagcagcagctgcagcagcagcagcagcagcagctgcagcagcagcagcagcagctgcagcagcagcagcagcagcagcagcagcagttccagcagcagcagcagcagcagcagatgggcctgctgaaccagagcagaaccctgctgagcccccagcagcagcagcagcagcaggtggccctgggccccggcatgcccgccaagcccctgcagcacttcagcagccccggcgccctgggccccaccctgctgctgaccggcaaggagcagaacaccgtggaccccgccgtgagcagcgaggccaccgagggccccagcacccaccagggcggccccctggccatcggcaccacccccgagagcatggccaccgagcccggcgaggtgaagcccagcctgagcggcgacagccagctgctgctggtgcagccccagccccagccccagcccagcagcctgcagctgcagccccccctgagactgcccggccagcagcagcagcaggtgagcctgctgcacaccgccggcggcggcagccacggccagctgggcagcggcagcagcagcgaggccagcagcgtgccccacctgctggcccagcccagcgtgagcctgggcgaccagcccggcagcatgacccagaacctgctgggcccccagcagcccatgctggagagacccatgcagaacaacaccggcccccagccccccaagcccggccccgtgctgcagagcggccagggcctgcccggcgtgggcatcatgcccaccgtgggccagctgagagcccagctgcagggcgtgctggccaagaacccccagctgagacacctgagcccccagcagcagcagcagctgcaggccctgctgatgcagagacagctgcagcagagccaggccgtgagacagacccccccctaccaggagcccggcacccagaccagccccctgcagggcctgctgggctgccagccccagctgggcggcttccccggcccccagaccggccccctgcaggagctgggcgccggccccagaccccagggcccccccagactgcccgccccccccggcgccctgagcaccggccccgtgctgggccccgtgcaccccacccccccccccagcagcccccaggagcccaagagacccagccagctgcccagccccagcagccagctgcccaccgaggcccagctgccccccacccaccccggcacccccaagccccagggccccaccctggagcccccccccggcagagtgagccccgccgccgcccagctggccgacaccctgttcagcaagggcctgggcccctgggacccccccgacaacctggccgagacccagaagcccgagcagagcagcctggtgcccggccacctggaccaggtgaacggccaggtggtgcccgaggccagccagctgagcatcaagcaggagcccagagaggagccctgcgccctgggcgcccagagcgtgaagagagaggccaacggcgagcccatcggcgcccccggcaccagcaaccacctgctgctggccggccccagaagcgaggccggccacctgctgctgcagaagctgctgagagccaagaacgtgcagctgagcaccggcagaggcagcgagggcctgagagccgagatcaacggccacatcgacagcaagctggccggcctggagcagaagctgcagggcacccccagcaacaaggaggacgccgccgccagaaagcccctgacccccaagcccaagagagtgcagaaggccagcgacagactggtgagcagcagaaagaagctgagaaaggaggacggcgtgagagccagcgaggccctgctgaagcagctgaagcaggagctgagcctgctgcccctgaccgagcccgccatcaccgccaacttcagcctgttcgcccccttcggcagcggctgccccgtgaacggccagagccagctgagaggcgccttcggcagcggcgccctgcccaccggccccgactactacagccagctgctgaccaagaacaacctgagcaacccccccaccccccccagcagcctgccccccacccccccccccagcgtgcagcagaagatggtgaacggcgtgacccccagcgaggagctgggcgagcaccccaaggacgccgccagcgccagagacagcgagagagccctgagagacaccagcgaggtgaagagcctggacctgctggccgccctgcccacccccccccacaaccagaccgaggacgtgagaatggagagcgacgaggacagcgacagccccgacagcatcgtgcccgccagcagccccgagagcatcctgggcgaggaggcccccagattcccccacctgggcagcggcagatgggagcaggaggacagagccctgagccccgtgatccccctgatccccagagccagcatccccgtgttccccgacaccaagccctacggcgccctgggcctggaggtgcccggcaagctgcccgtgaccacctgggagaagggcaagggcagcgaggtgagcgtgatgctgaccgtgagcgccgccgccgccaagaacctgaacggcgtgatggtggccgtggccgagctgctgagcatgaagatccccaacagctacgaggtgctgttccccgagagccccgccagagccggcaccgagcccaagaagggcgaggccgagggccccggcggcaaggagaagggcctggagggcaagagccccgacaccggccccgactggctgaagcagttcgacgccgtgctgcccggctacaccctgaagagccagctggacatcctgagcctgctgaagcaggagagccccgcccccgagccccccacccagcacagctacacctacaacgtgagcaacctggacgtgagacagctgagcgcccccccccccgaggagcccagccccccccccagccccctggcccccagccccgccagcccccccaccgagcccctggtggagctgcccaccgagcccctggccgagccccccgtgcccagccccctgcccctggccagcagccccgagagcgccagacccaagcccagagccagaccccccgaggagggcgaggacagcagaccccccagactgaagaagtggaagggcgtgagatggaagagactgagactgctgctgaccatccagaagggcagcggcagacaggaggacgagagagaggtggccgagttcatggagcagctgggcaccgccctgagacccgacaaggtgcccagagacatgagaagatgctgcttctgccacgaggagggcgacggcgccaccgacggccccgccagactgctgaacctggacctggacctgtgggtgcacctgaactgcgccctgtggagcaccgaggtgtacgagacccagggcggcgccctgatgaacgtggaggtggccctgcacagaggcctgctgaccaagtgcagcctgtgccagagaaccggcgccaccagcagctgcaacagaatgagatgccccaacgtgtaccacttcgcctgcgccatcagagccaagtgcatgttcttcaaggacaagaccatgctgtgccccatgcacaagatcaagggcccctgcgagcaggagctgagcagcttcgccgtgttcagaagagtgtacatcgagagagacgaggtgaagcagatcgccagcatcatccagagaggcgagagactgcacatgttcagagtgggcggcctggtgttccacgccatcggccagctgctgccccaccagatggccgacttccacagcgccaccgccctgtaccccgtgggctacgaggccaccagaatctactggagcctgagaaccaacaacagaagatgctgctacagatgcagcatcggcgagaacaacggcagacccgagttcgtgatcaaggtgatcgagcagggcctggaggacctggtgttcaccgacgccagcccccaggccgtgtggaacagaatcatcgagcccgtggccgccatgagaaaggaggccgacatgctgagactgttccccgagtacctgaagggcgaggagctgttcggcctgaccgtgcacgccgtgctgagaatcgccgagagcctgcccggcgtggagagctgccagaactacctgttcagatacggcagacaccccctgatggagctgcccctgatgatcaaccccaccggctgcgccagaagcgagcccaagatcctgacccactacaagagaccccacaccctgaacagcaccagcatgagcaaggcctaccagagcaccttcaccggcgagaccaacaccccctacagcaagcagttcgtgcacagcaagagcagccagtacagaagactgagaaccgagtggaagaacaacgtgtacctggccagaagcagaatccagggcctgggcctgtacgccgccaaggacctggagaagcacaccatggtgatcgagtacatcggcaccatcatcagaaacgaggtggccaacagaagagagaagatctacgaggagcagaacagaggcatctacatgttcagaatcaacaacgagcacgtgatcgacgccaccctgaccggcggccccgccagatacatcaaccacagctgcgcccccaactgcgtggccgaggtggtgaccttcgacaaggaggacaagatcatcatcatcagcagcagaagaatccccaagggcgaggagctgacctacgactaccagttcgacttcgaggacgaccagcacaagatcccctgccactgcggcgcctggaactgcagaaagtggatgaactag

SEQ ID NO: 89856 - DNA, 441 bp, synthetic construct
  misc_feature 1..441: note = Description of Artificial Sequence: Synthetic coding sequence
  source 1..441: mol_type = other DNA
atggacagccagaagctggccggcgaggacaaggacagcgagcccgccgccgacggccccgccgccagcgaggaccccagcgccaccgagagcgacctgcccaacccccacgtgggcgaggtgagcgtgctgagcagcggcagccccagactgcaggagaccccccaggactgcagcggcggccccgtgagaagatgcgccctgtgcaactgcggcgagcccagcctgcacggccagagagagctgagaagattcgagctgcccttcgactggcccagatgccccgtggtgagccccggcggcagccccggccccaacgaggccgtgctgcccagcgaggacctgagccagatcggcttccccgagggcctgacccccgcccacctgggcgagcccggcggcagctgctgggcccaccactggtgcgccgcctggagctag

SEQ ID NO: 89857 - DNA, 14736 bp, synthetic construct
  misc_feature 1..14736: note = Description of Artificial Sequence: Synthetic coding sequence
  source 1..14736: mol_type = other DNA
atgagcagcgaggaggacaagagcgtggagcagccccagccccccccccccccccccgaggagcccggcgcccccgcccccagccccgccgccgccgacaagagacccagaggcagacccagaaaggacggcgccagccccttccagagagccagaaagaagcccagaagcagaggcaagaccgccgtggaggacgaggacagcatggacggcctggagaccaccgagaccgagaccatcgtggagaccgagatcaaggagcagagcgccgaggaggacgccgaggccgaggtggacaacagcaagcagctgatccccaccctgcagagaagcgtgagcgaggagagcgccaacagcctggtgagcgtgggcgtggaggccaagatcagcgagcagctgtgcgccttctgctactgcggcgagaagagcagcctgggccagggcgacctgaagcagttcagaatcacccccggcttcatcctgccctggagaaaccagcccagcaacaagaaggacatcgacgacaacagcaacggcacctacgagaagatgcagaacagcgcccccagaaagcagagaggccagagaaaggagagaagcccccagcagaacatcgtgagctgcgtgagcgtgagcacccagaccgccagcgacgaccaggccggcaagctgtgggacgagctgagcctggtgggcctgcccgacgccatcgacatccaggccctgttcgacagcaccggcacctgctgggcccaccacagatgcgtggagtggagcctgggcgtgtgccagatggaggagcccctgctggtgaacgtggacaaggccgtggtgagcggcagcaccgagagatgcgccttctgcaagcacctgggcgccaccatcaagtgctgcgaggagaagtgcacccagatgtaccactacccctgcgccgccggcgccggcaccttccaggacttcagccacatcttcctgctgtgccccgagcacatcgaccaggcccccgagagaagcaaggaggacgccaactgcgccgtgtgcgacagccccggcgacctgctggaccagttcttctgcaccacctgcggccagcactaccacggcatgtgcctggacatcgccgtgacccccctgaagagagccggctggcagtgccccgagtgcaaggtgtgccagaactgcaagcagagcggcgaggacagcaagatgctggtgtgcgacacctgcgacaagggctaccacaccttctgcctgcagcccgtgatgaagagcgtgcccaccaacggctggaagtgcaagaactgcagaatctgcatcgagtgcggcaccagaagcagcagccagtggcaccacaactgcctgatctgcgacaactgctaccagcagcaggacaacctgtgccccttctgcggcaagtgctaccaccccgagctgcagaaggacatgctgcactgcaacatgtgcaagagatgggtgcacctggagtgcgacaagcccaccgaccacgagctggacacccagctgaaggaggagtacatctgcatgtactgcaagcacctgggcgccgagatggacagactgcagcccggcgaggaggtggagatcgccgagctgaccaccgactacaacaacgagatggaggtggagggccccgaggaccagatggtgttcagcgagcaggccgccaacaaggacgtgaacggccaggagagcacccccggcatcgtgcccgacgccgtgcaggtgcacaccgaggagcagcagaagagccaccccagcgagagcctggacaccgacagcctgctgatcgccgtgagcagccagcacaccgtgaacaccgagctggagaagcagatcagcaacgaggtggacagcgaggacctgaagatgagcagcgaggtgaagcacatctgcggcgaggaccagatcgaggacaagatggaggtgaccgagaacatcgaggtggtgacccaccagatcaccgtgcagcaggagcagctgcagctgctggaggagcccgagaccgtggtgagcagagaggagagcagaccccccaagctggtgatggagagcgtgaccctgcccctggagaccctggtgagcccccacgaggagagcatcagcctgtgccccgaggagcagctggtgatcgagagactgcagggcgagaaggagcagaaggagaacagcgagctgagcaccggcctgatggacagcgagatgacccccaccatcgagggctgcgtgaaggacgtgagctaccagggcggcaagagcatcaagctgagcagcgagaccgagagcagcttcagcagcagcgccgacatcagcaaggccgacgtgagcagcagccccacccccagcagcgacctgcccagccacgacatgctgcacaactaccccagcgccctgagcagcagcgccggcaacatcatgcccaccacctacatcagcgtgacccccaagatcggcatgggcaagcccgccatcaccaagagaaagttcagccccggcagacccagaagcaagcagggcgcctggagcacccacaacaccgtgagcccccccagctggagccccgacatcagcgagggcagagagatcttcaagcccagacagctgcccggcagcgccatctggagcatcaaggtgggcagaggcagcggcttccccggcaagagaagacccagaggcgccggcctgagcggcagaggcggcagaggcagaagcaagctgaagagcggcatcggcgccgtggtgctgcccggcgtgagcaccgccgacatcagcagcaacaaggacgacgaggagaacagcatgcacaacaccgtggtgctgttcagcagcagcgacaagttcaccctgaaccaggacatgtgcgtggtgtgcggcagcttcggccagggcgccgagggcagactgctggcctgcagccagtgcggccagtgctaccacccctactgcgtgagcatcaagatcaccaaggtggtgctgagcaagggctggagatgcctggagtgcaccgtgtgcgaggcctgcggcaaggccaccgaccccggcagactgctgctgtgcgacgactgcgacatcagctaccacacctactgcctggacccccccctgcagaccgtgcccaagggcggctggaagtgcaagtggtgcgtgtggtgcagacactgcggcgccaccagcgccggcctgagatgcgagtggcagaacaactacacccagtgcgccccctgcgccagcctgagcagctgccccgtgtgctacagaaactacagagaggaggacctgatcctgcagtgcagacagtgcgacagatggatgcacgccgtgtgccagaacctgaacaccgaggaggaggtggagaacgtggccgacatcggcttcgactgcagcatgtgcagaccctacatgcccgccagcaacgtgcccagcagcgactgctgcgagagcagcctggtggcccagatcgtgaccaaggtgaaggagctggacccccccaagacctacacccaggacggcgtgtgcctgaccgagagcggcatgacccagctgcagagcctgaccgtgaccgtgcccagaagaaagagaagcaagcccaagctgaagctgaagatcatcaaccagaacagcgtggccgtgctgcagaccccccccgacatccagagcgagcacagcagagacggcgagatggacgacagcagagagggcgagctgatggactgcgacggcaagagcgagagcagccccgagagagaggccgtggacgacgagaccaagggcgtggagggcaccgacggcgtgaagaagagaaagagaaagccctacagacccggcatcggcggcttcatggtgagacagagaagcagaaccggccagggcaagaccaagagaagcgtgatcagaaaggacagcagcggcagcatcagcgagcagctgccctgcagagacgacggctggagcgagcagctgcccgacaccctggtggacgagagcgtgagcgtgaccgagagcaccgagaagatcaagaagagatacagaaagagaaagaacaagctggaggagaccttccccgcctacctgcaggaggccttcttcggcaaggacctgctggacaccagcagacagagcaagatcagcctggacaacctgagcgaggacggcgcccagctgctgtacaagaccaacatgaacaccggcttcctggaccccagcctggaccccctgctgagcagcagcagcgcccccaccaagagcggcacccacggccccgccgacgaccccctggccgacatcagcgaggtgctgaacaccgacgacgacatcctgggcatcatcagcgacgacctggccaagagcgtggaccacagcgacatcggccccgtgaccgacgaccccagcagcctgccccagcccaacgtgaaccagagcagcagacccctgagcgaggagcagctggacggcatcctgagccccgagctggacaagatggtgaccgacggcgccatcctgggcaagctgtacaagatccccgagctgggcggcaaggacgtggaggacctgttcaccgccgtgctgagccccgccaacacccagcccacccccctgccccagccccccccccccacccagctgctgcccatccacaaccaggacgccttcagcagaatgcccctgatgaacggcctgatcggcagcagcccccacctgccccacaacagcctgccccccggcagcggcctgggcaccttcagcgccatcgcccagagcagctaccccgacgccagagacaagaacagcgccttcaaccccatggccagcgaccccaacaacagctggaccagcagcgcccccaccgtggagggcgagaacgacaccatgagcaacgcccagagaagcaccctgaagtgggagaaggaggaggccctgggcgagatggccaccgtggcccccgtgctgtacaccaacatcaacttccccaacctgaaggaggagttccccgactggaccaccagagtgaagcagatcgccaagctgtggagaaaggccagcagccaggagagagccccctacgtgcagaaggccagagacaacagagccgccctgagaatcaacaaggtgcagatgagcaacgacagcatgaagagacagcagcagcaggacagcatcgaccccagcagcagaatcgacagcgagctgttcaaggaccccctgaagcagagagagagcgagcacgagcaggagtggaagttcagacagcagatgagacagaagagcaagcagcaggccaagatcgaggccacccagaagctggagcaggtgaagaacgagcagcagcagcagcagcagcagcagttcggcagccagcacctgctggtgcagagcggcagcgacacccccagcagcggcatccagagccccctgaccccccagcccggcaacggcaacatgagccccgcccagagcttccacaaggagctgttcaccaagcagccccccagcacccccaccagcaccagcagcgacgacgtgttcgtgaagccccaggcccccccccccccccccgcccccagcagaatccccatccaggacagcctgagccaggcccagaccagccagccccccagcccccaggtgttcagccccggcagcagcaacagcagaccccccagccccatggacccctacgccaagatggtgggcacccccagacccccccccgtgggccacagcttcagcagaagaaacagcgccgcccccgtggagaactgcacccccctgagcagcgtgagcagacccctgcagatgaacgagaccaccgccaacagacccagccccgtgagagacctgtgcagcagcagcaccaccaacaacgacccctacgccaagccccccgacacccccagacccgtgatgaccgaccagttccccaagagcctgggcctgagcagaagccccgtggtgagcgagcagaccgccaagggccccatcgccgccggcaccagcgaccacttcaccaagcccagccccagagccgacgtgttccagagacagagaatccccgacagctacgccagacccctgctgacccccgcccccctggacagcggccccggccccttcaagacccccatgcagcccccccccagcagccaggacccctacggcagcgtgagccaggccagcagaagactgagcgtggacccctacgagagacccgccctgacccccagacccatcgacaacttcagccacaaccagagcaacgacccctacagccagccccccctgaccccccaccccgccgtgaacgagagcttcgcccaccccagcagagccttcagccagcccggcaccatcagcagacccaccagccaggacccctacagccagccccccggcacccccagacccgtggtggacagctacagccagagcagcggcaccgccagaagcaacaccgacccctacagccagccccccggcacccccagacccaccaccgtggacccctacagccagcagccccagacccccagacccagcacccagaccgacctgttcgtgacccccgtgaccaaccagagacacagcgacccctacgcccacccccccggcacccccagacccggcatcagcgtgccctacagccagccccccgccacccccagacccagaatcagcgagggcttcaccagaagcagcatgaccagacccgtgctgatgcccaaccaggaccccttcctgcaggccgcccagaacagaggccccgccctgcccggccccctggtgagaccccccgacacctgcagccagacccccagaccccccggccccggcctgagcgacaccttcagcagagtgagccccagcgccgccagagacccctacgaccagagccccatgacccccagaagccagagcgacagcttcggcaccagccagaccgcccacgacgtggccgaccagcccagacccggcagcgagggcagcttctgcgccagcagcaacagccccatgcacagccagggccagcagttcagcggcgtgagccagctgcccggccccgtgcccaccagcggcgtgaccgacacccagaacaccgtgaacatggcccaggccgacaccgagaagctgagacagagacagaagctgagagagatcatcctgcagcagcagcagcagaagaagatcgccggcagacaggagaagggcagccaggacagccccgccgtgccccaccccggccccctgcagcactggcagcccgagaacgtgaaccaggccttcaccagacccccccccccctaccccggcaacatcagaagccccgtggccccccccctgggccccagatacgccgtgttccccaaggaccagagaggcccctacccccccgacgtggccagcatgggcatgagaccccacggcttcagattcggcttccccggcggcagccacggcaccatgcccagccaggagagattcctggtgcccccccagcagatccagggcagcggcgtgagcccccagctgagaagaagcgtgagcgtggacatgcccagacccctgaacaacagccagatgaacaaccccgtgggcctgccccagcacttcagcccccagagcctgcccgtgcagcagcacaacatcctgggccaggcctacatcgagctgagacacagagcccccgacggcagacagagactgcccttcagcgccccccccggcagcgtggtggaggccagcagcaacctgagacacggcaacttcatccccagacccgacttccccggccccagacacaccgaccccatgagaagacccccccagggcctgcccaaccagctgcccgtgcaccccgacctggagcaggtgccccccagccagcaggagcagggccacagcgtgcacagcagcagcatggtgatgagaaccctgaaccaccccctgggcggcgagttcagcgaggcccccctgagcaccagcgtgcccagcgagaccaccagcgacaacctgcagatcaccacccagcccagcgacggcctggaggagaagctggacagcgacgaccccagcgtgaaggagctggacgtgaaggacctggagggcgtggaggtgaaggacctggacgacgaggacctggagaacctgaacctggacaccgaggacggcaaggtggtggagctggacaccctggacaacctggagaccaacgaccccaacctggacgacctgctgagaagcggcgagttcgacatcatcgcctacaccgaccccgagctggacatgggcgacaagaagagcatgttcaacgaggagctggacctgcccatcgacgacaagctggacaaccagtgcgtgagcgtggagcccaagaagaaggagcaggagaacaagaccctggtgctgagcgacaagcacagcccccagaagaagagcaccgtgaccaacgaggtgaagaccgaggtgctgagccccaacagcaaggtggagagcaagtgcgagaccgagaagaacgacgagaacaaggacaacgtggacaccccctgcagccaggccagcgcccacagcgacctgaacgacggcgagaagaccagcctgcacccctgcgaccccgacctgttcgagaagagaaccaacagagagaccgccggccccagcgccaacgtgatccaggccagcacccagctgcccgcccaggacgtgatcaacagctgcggcatcaccggcagcacccccgtgctgagcagcctgctggccaacgagaagagcgacaacagcgacatcagacccagcggcagcccccccccccccaccctgcccgccagccccagcaaccacgtgagcagcctgccccccttcatcgccccccccggcagagtgctggacaacgccatgaacagcaacgtgaccgtggtgagcagagtgaaccacgtgttcagccagggcgtgcaggtgaaccccggcctgatccccggccagagcaccgtgaaccacagcctgggcaccggcaagcccgccacccagaccggcccccagaccagccagagcggcaccagcagcatgagcggcccccagcagctgatgatcccccagaccctggcccagcagaacagagagagacccctgctgctggaggagcagcccctgctgctgcaggacctgctggaccaggagagacaggagcagcagcagcagagacagatgcaggccatgatcagacagagaagcgagcccttcttccccaacatcgacttcgacgccatcaccgaccccatcatgaaggccaagatggtggccctgaagggcatcaacaaggtgatggcccagaacaacctgggcatgccccccatggtgatgagcagattccccttcatgggccaggtggtgaccggcacccagaacagcgagggccagaacctgggcccccaggccatcccccaggacggcagcatcacccaccagatcagcagacccaacccccccaacttcggccccggcttcgtgaacgacagccagagaaagcagtacgaggagtggctgcaggagacccagcagctgctgcagatgcagcagaagtacctggaggagcagatcggcgcccacagaaagagcaagaaggccctgagcgccaagcagagaaccgccaagaaggccggcagagagttccccgaggaggacgccgagcagctgaagcacgtgaccgagcagcagagcatggtgcagaagcagctggagcagatcagaaagcagcagaaggagcacgccgagctgatcgaggactacagaatcaagcagcagcagcagtgcgccatggccccccccaccatgatgcccagcgtgcagccccagccccccctgatccccggcgccaccccccccaccatgagccagcccaccttccccatggtgccccagcagctgcagcaccagcagcacaccaccgtgatcagcggccacaccagccccgtgagaatgcccagcctgcccggctggcagcccaacagcgcccccgcccacctgcccctgaacccccccagaatccagccccccatcgcccagctgcccatcaagacctgcacccccgcccccggcaccgtgagcaacgccaacccccagagcggccccccccccagagtggagttcgacgacaacaaccccttcagcgagagcttccaggagagagagagaaaggagagactgagagagcagcaggagagacagagaatccagctgatgcaggaggtggacagacagagagccctgcagcagagaatggagatggagcagcacggcatggtgggcagcgagatcagcagcagcagaaccagcgtgagccagatccccttctacagcagcgacctgccctgcgacttcatgcagcccctgggccccctgcagcagagcccccagcaccagcagcagatgggccaggtgctgcagcagcagaacatccagcagggcagcatcaacagccccagcacccagaccttcatgcagaccaacgagagaagacaggtgggcccccccagcttcgtgcccgacagccccagcatccccgtgggcagccccaacttcagcagcgtgaagcagggccacggcaacctgagcggcaccagcttccagcagagccccgtgagacccagcttcacccccgccctgcccgccgccccccccgtggccaacagcagcctgccctgcggccaggacagcaccatcacccacggccacagctaccccggcagcacccagagcctgatccagctgtacagcgacatcatccccgaggagaagggcaagaagaagagaaccagaaagaagaagagagacgacgacgccgagagcaccaaggcccccagcaccccccacagcgacatcaccgccccccccacccccggcatcagcgagaccaccagcacccccgccgtgagcacccccagcgagctgccccagcaggccgaccaggagagcgtggagcccgtgggccccagcacccccaacatggccgccggccagctgtgcaccgagctggagaacaagctgcccaacagcgacttcagccaggccacccccaaccagcagacctacgccaacagcgaggtggacaagctgagcatggagacccccgccaagaccgaggagatcaagctggagaaggccgagaccgagagctgccccggccaggaggagcccaagctggaggagcagaacggcagcaaggtggagggcaacgccgtggcctgccccgtgagcagcgcccagagccccccccacagcgccggcgcccccgccgccaagggcgacagcggcaacgagctgctgaagcacctgctgaagaacaagaagagcagcagcctgctgaaccagaagcccgagggcagcatctgcagcgaggacgactgcaccaaggacaacaagctggtggagaagcagaaccccgccgagggcctgcagaccctgggcgcccagatgcagggcggcttcggctgcggcaaccagctgcccaagaccgacggcggcagcgagaccaagaagcagagaagcaagagaacccagagaaccggcgagaaggccgcccccagaagcaagaagagaaagaaggacgaggaggagaagcaggccatgtacagcagcaccgacaccttcacccacctgaagcagcagaacaacctgagcaacccccccaccccccccgccagcctgccccccacccccccccccatggcctgccagaagatggccaacggcttcgccaccaccgaggagctggccggcaaggccggcgtgctggtgagccacgaggtgaccaagaccctgggccccaagcccttccagctgcccttcagaccccaggacgacctgctggccagagccctggcccagggccccaagaccgtggacgtgcccgccagcctgcccacccccccccacaacaaccaggaggagctgagaatccaggaccactgcggcgacagagacacccccgacagcttcgtgcccagcagcagccccgagagcgtggtgggcgtggaggtgagcagataccccgacctgagcctggtgaaggaggagccccccgagcccgtgcccagccccatcatccccatcctgcccagcaccgccggcaagagcagcgagagcagaagaaacgacatcaagaccgagcccggcaccctgtacttcgccagccccttcggccccagccccaacggccccagaagcggcctgatcagcgtggccatcaccctgcaccccaccgccgccgagaacatcagcagcgtggtggccgccttcagcgacctgctgcacgtgagaatccccaacagctacgaggtgagcagcgcccccgacgtgcccagcatgggcctggtgagcagccacagaatcaaccccggcctggagtacagacagcacctgctgctgagaggccccccccccggcagcgccaacccccccagactggtgagcagctacagactgaagcagcccaacgtgcccttcccccccaccagcaacggcctgagcggctacaaggacagcagccacggcatcgccgagagcgccgccctgagaccccagtggtgctgccactgcaaggtggtgatcctgggcagcggcgtgagaaagagcttcaaggacctgaccctgctgaacaaggacagcagagagagcaccaagagagtggagaaggacatcgtgttctgcagcaacaactgcttcatcctgtacagcagcaccgcccaggccaagaacagcgagaacaaggagagcatccccagcctgccccagagccccatgagagagacccccagcaaggccttccaccagtacagcaacaacatcagcaccctggacgtgcactgcctgccccagctgcccgagaaggccagcccccccgccagcccccccatcgccttcccccccgccttcgaggccgcccaggtggaggccaagcccgacgagctgaaggtgaccgtgaagctgaagcccagactgagagccgtgcacggcggcttcgaggactgcagacccctgaacaagaagtggagaggcatgaagtggaagaagtggagcatccacatcgtgatccccaagggcaccttcaagcccccctgcgaggacgagatcgacgagttcctgaagaagctgggcaccagcctgaagcccgaccccgtgcccaaggactacagaaagtgctgcttctgccacgaggagggcgacggcctgaccgacggccccgccagactgctgaacctggacctggacctgtgggtgcacctgaactgcgccctgtggagcaccgaggtgtacgagacccaggccggcgccctgatcaacgtggagctggccctgagaagaggcctgcagatgaagtgcgtgttctgccacaagaccggcgccaccagcggctgccacagattcagatgcaccaacatctaccacttcacctgcgccatcaaggcccagtgcatgttcttcaaggacaagaccatgctgtgccccatgcacaagcccaagggcatccacgagcaggagctgagctacttcgccgtgttcagaagagtgtacgtgcagagagacgaggtgagacagatcgccagcatcgtgcagagaggcgagagagaccacaccttcagagtgggcagcctgatcttccacaccatcggccagctgctgccccagcagatgcaggccttccacagccccaaggccctgttccccgtgggctacgaggccagcagactgtactggagcaccagatacgccaacagaagatgcagatacctgtgcagcatcgaggagaaggacggcagacccgtgttcgtgatcagaatcgtggagcagggccacgaggacctggtgctgagcgacatcagccccaagggcgtgtgggacaagatcctggagcccgtggcctgcgtgagaaagaagagcgagatgctgcagctgttccccgcctacctgaagggcgaggacctgttcggcctgaccgtgagcgccgtggccagaatcgccgagagcctgcccggcgtggaggcctgcgagaactacaccttcagatacggcagaaaccccctgatggagctgcccctggccgtgaaccccaccggctgcgccagaagcgagcccaagatgagcgcccacgtgaagagattcgtgctgagaccccacaccctgaacagcaccagcaccagcaagagcttccagagcaccgtgaccggcgagctgaacgccccctacagcaagcagttcgtgcacagcaagagcagccagtacagaaagatgaagaccgagtggaagagcaacgtgtacctggccagaagcagaatccagggcctgggcctgtacgccgccagagacatcgagaagcacaccatggtgatcgagtacatcggcaccatcatcagaaacgaggtggccaacagaaaggagaagctgtacgagagccagaacagaggcgtgtacatgttcagaatggacaacgaccacgtgatcgacgccaccctgaccggcggccccgccagatacatcaaccacagctgcgcccccaactgcgtggccgaggtggtgaccttcgagagaggccacaagatcatcatcagcagcagcagaagaatccagaagggcgaggagctgtgctacgactacaagttcgacttcgaggacgaccagcacaagatcccctgccactgcggcgccgtgaactgcagaaagtggatgaactag

SEQ ID NO: 89858 - DNA, 14907 bp, synthetic construct
  misc_feature 1..14907: note = Description of Artificial Sequence: Synthetic coding sequence
  source 1..14907: mol_type = other DNA
atgagcagcgaggaggacaagagcgtggagcagccccagccccccccccccccccccgaggagcccggcgcccccgcccccagccccgccgccgccgacaagagacccagaggcagacccagaaaggacggcgccagccccttccagagagccagaaagaagcccagaagcagaggcaagaccgccgtggaggacgaggacagcatggacggcctggagaccaccgagaccgagaccatcgtggagaccgagatcaaggagcagagcgccgaggaggacgccgaggccgaggtggacaacagcaagcagctgatccccaccctgcagagaagcgtgagcgaggagagcgccaacagcctggtgagcgtgggcgtggaggccaagatcagcgagcagctgtgcgccttctgctactgcggcgagaagagcagcctgggccagggcgacctgaagcagttcagaatcacccccggcttcatcctgccctggagaaaccagcccagcaacaagaaggacatcgacgacaacagcaacggcacctacgagaagatgcagaacagcgcccccagaaagcagagaggccagagaaaggagagaagcccccagcagaacatcgtgagctgcgtgagcgtgagcacccagaccgccagcgacgaccaggccggcaagctgtgggacgagctgagcctggtgggcctgcccgacgccatcgacatccaggccctgttcgacagcaccggcacctgctgggcccaccacagatgcgtggagtggagcctgggcgtgtgccagatggaggagcccctgctggtgaacgtggacaaggccgtggtgagcggcagcaccgagagatgcgccttctgcaagcacctgggcgccaccatcaagtgctgcgaggagaagtgcacccagatgtaccactacccctgcgccgccggcgccggcaccttccaggacttcagccacatcttcctgctgtgccccgagcacatcgaccaggcccccgagagaagcaaggaggacgccaactgcgccgtgtgcgacagccccggcgacctgctggaccagttcttctgcaccacctgcggccagcactaccacggcatgtgcctggacatcgccgtgacccccctgaagagagccggctggcagtgccccgagtgcaaggtgtgccagaactgcaagcagagcggcgaggacagcaagatgctggtgtgcgacacctgcgacaagggctaccacaccttctgcctgcagcccgtgatgaagagcgtgcccaccaacggctggaagtgcaagaactgcagaatctgcatcgagtgcggcaccagaagcagcagccagtggcaccacaactgcctgatctgcgacaactgctaccagcagcaggacaacctgtgccccttctgcggcaagtgctaccaccccgagctgcagaaggacatgctgcactgcaacatgtgcaagagatgggtgcacctggagtgcgacaagcccaccgaccacgagctggacacccagctgaaggaggagtacatctgcatgtactgcaagcacctgggcgccgagatggacagactgcagcccggcgaggaggtggagatcgccgagctgaccaccgactacaacaacgagatggaggtggagggccccgaggaccagatggtgttcagcgagcaggccgccaacaaggacgtgaacggccaggagagcacccccggcatcgtgcccgacgccgtgcaggtgcacaccgaggagcagcagaagagccaccccagcgagagcctggacaccgacagcctgctgatcgccgtgagcagccagcacaccgtgaacaccgagctggagaagcagatcagcaacgaggtggacagcgaggacctgaagatgagcagcgaggtgaagcacatctgcggcgaggaccagatcgaggacaagatggaggtgaccgagaacatcgaggtggtgacccaccagatcaccgtgcagcaggagcagctgcagctgctggaggagcccgagaccgtggtgagcagagaggagagcagaccccccaagctggtgatggagagcgtgaccctgcccctggagaccctggtgagcccccacgaggagagcatcagcctgtgccccgaggagcagctggtgatcgagagactgcagggcgagaaggagcagaaggagaacagcgagctgagcaccggcctgatggacagcgagatgacccccaccatcgagggctgcgtgaaggacgtgagctaccagggcggcaagagcatcaagctgagcagcgagaccgagagcagcttcagcagcagcgccgacatcagcaaggccgacgtgagcagcagccccacccccagcagcgacctgcccagccacgacatgctgcacaactaccccagcgccctgagcagcagcgccggcaacatcatgcccaccacctacatcagcgtgacccccaagatcggcatgggcaagcccgccatcaccaagagaaagttcagccccggcagacccagaagcaagcagggcgcctggagcacccacaacaccgtgagcccccccagctggagccccgacatcagcgagggcagagagatcttcaagcccagacagctgcccggcagcgccatctggagcatcaaggtgggcagaggcagcggcttccccggcaagagaagacccagaggcgccggcctgagcggcagaggcggcagaggcagaagcaagctgaagagcggcatcggcgccgtggtgctgcccggcgtgagcaccgccgacatcagcagcaacaaggacgacgaggagaacagcatgcacaacaccgtggtgctgttcagcagcagcgacaagttcaccctgaaccaggacatgtgcgtggtgtgcggcagcttcggccagggcgccgagggcagactgctggcctgcagccagtgcggccagtgctaccacccctactgcgtgagcatcaagatcaccaaggtggtgctgagcaagggctggagatgcctggagtgcaccgtgtgcgaggcctgcggcaaggccaccgaccccggcagactgctgctgtgcgacgactgcgacatcagctaccacacctactgcctggacccccccctgcagaccgtgcccaagggcggctggaagtgcaagtggtgcgtgtggtgcagacactgcggcgccaccagcgccggcctgagatgcgagtggcagaacaactacacccagtgcgccccctgcgccagcctgagcagctgccccgtgtgctacagaaactacagagaggaggacctgatcctgcagtgcagacagtgcgacagatggatgcacgccgtgtgccagaacctgaacaccgaggaggaggtggagaacgtggccgacatcggcttcgactgcagcatgtgcagaccctacatgcccgccagcaacgtgcccagcagcgactgctgcgagagcagcctggtggcccagatcgtgaccaaggtgaaggagctggacccccccaagacctacacccaggacggcgtgtgcctgaccgagagcggcatgacccagctgcagagcctgaccgtgaccgtgcccagaagaaagagaagcaagcccaagctgaagctgaagatcatcaaccagaacagcgtggccgtgctgcagaccccccccgacatccagagcgagcacagcagagacggcgagatggacgacagcagagagggcgagctgatggactgcgacggcaagagcgagagcagccccgagagagaggccgtggacgacgagaccaagggcgtggagggcaccgacggcgtgaagaagagaaagagaaagccctacagacccggcatcggcggcttcatggtgagacagagaagcagaaccggccagggcaagaccaagagaagcgtgatcagaaaggacagcagcggcagcatcagcgagcagctgccctgcagagacgacggctggagcgagcagctgcccgacaccctggtggacgagagcgtgagcgtgaccgagagcaccgagaagatcaagaagagatacagaaagagaaagaacaagctggaggagaccttccccgcctacctgcaggaggccttcttcggcaaggacctgctggacaccagcagacagagcaagatcagcctggacaacctgagcgaggacggcgcccagctgctgtacaagaccaacatgaacaccggcttcctggaccccagcctggaccccctgctgagcagcagcagcgcccccaccaagagcggcacccacggccccgccgacgaccccctggccgacatcagcgaggtgctgaacaccgacgacgacatcctgggcatcatcagcgacgacctggccaagagcgtggaccacagcgacatcggccccgtgaccgacgaccccagcagcctgccccagcccaacgtgaaccagagcagcagacccctgagcgaggagcagctggacggcatcctgagccccgagctggacaagatggtgaccgacggcgccatcctgggcaagctgtacaagatccccgagctgggcggcaaggacgtggaggacctgttcaccgccgtgctgagccccgccaacacccagcccacccccctgccccagccccccccccccacccagctgctgcccatccacaaccaggacgccttcagcagaatgcccctgatgaacggcctgatcggcagcagcccccacctgccccacaacagcctgccccccggcagcggcctgggcaccttcagcgccatcgcccagagcagctaccccgacgccagagacaagaacagcgccttcaaccccatggccagcgaccccaacaacagctggaccagcagcgcccccaccgtggagggcgagaacgacaccatgagcaacgcccagagaagcaccctgaagtgggagaaggaggaggccctgggcgagatggccaccgtggcccccgtgctgtacaccaacatcaacttccccaacctgaaggaggagttccccgactggaccaccagagtgaagcagatcgccaagctgtggagaaaggccagcagccaggagagagccccctacgtgcagaaggccagagacaacagagccgccctgagaatcaacaaggtgcagatgagcaacgacagcatgaagagacagcagcagcaggacagcatcgaccccagcagcagaatcgacagcgagctgttcaaggaccccctgaagcagagagagagcgagcacgagcaggagtggaagttcagacagcagatgagacagaagagcaagcagcaggccaagatcgaggccacccagaagctggagcaggtgaagaacgagcagcagcagcagcagcagcagcagttcggcagccagcacctgctggtgcagagcggcagcgacacccccagcagcggcatccagagccccctgaccccccagcccggcaacggcaacatgagccccgcccagagcttccacaaggagctgttcaccaagcagccccccagcacccccaccagcaccagcagcgacgacgtgttcgtgaagccccaggcccccccccccccccccgcccccagcagaatccccatccaggacagcctgagccaggcccagaccagccagccccccagcccccaggtgttcagccccggcagcagcaacagcagaccccccagccccatggacccctacgccaagatggtgggcacccccagacccccccccgtgggccacagcttcagcagaagaaacagcgccgcccccgtggagaactgcacccccctgagcagcgtgagcagacccctgcagatgaacgagaccaccgccaacagacccagccccgtgagagacctgtgcagcagcagcaccaccaacaacgacccctacgccaagccccccgacacccccagacccgtgatgaccgaccagttccccaagagcctgggcctgagcagaagccccgtggtgagcgagcagaccgccaagggccccatcgccgccggcaccagcgaccacttcaccaagcccagccccagagccgacgtgttccagagacagagaatccccgacagctacgccagacccctgctgacccccgcccccctggacagcggccccggccccttcaagacccccatgcagcccccccccagcagccaggacccctacggcagcgtgagccaggccagcagaagactgagcgtggacccctacgagagacccgccctgacccccagacccatcgacaacttcagccacaaccagagcaacgacccctacagccagccccccctgaccccccaccccgccgtgaacgagagcttcgcccaccccagcagagccttcagccagcccggcaccatcagcagacccaccagccaggacccctacagccagccccccggcacccccagacccgtggtggacagctacagccagagcagcggcaccgccagaagcaacaccgacccctacagccagccccccggcacccccagacccaccaccgtggacccctacagccagcagccccagacccccagacccagcacccagaccgacctgttcgtgacccccgtgaccaaccagagacacagcgacccctacgcccacccccccggcacccccagacccggcatcagcgtgccctacagccagccccccgccacccccagacccagaatcagcgagggcttcaccagaagcagcatgaccagacccgtgctgatgcccaaccaggaccccttcctgcaggccgcccagaacagaggccccgccctgcccggccccctggtgagaccccccgacacctgcagccagacccccagaccccccggccccggcctgagcgacaccttcagcagagtgagccccagcgccgccagagacccctacgaccagagccccatgacccccagaagccagagcgacagcttcggcaccagccagaccgcccacgacgtggccgaccagcccagacccggcagcgagggcagcttctgcgccagcagcaacagccccatgcacagccagggccagcagttcagcggcgtgagccagctgcccggccccgtgcccaccagcggcgtgaccgacacccagaacaccgtgaacatggcccaggccgacaccgagaagctgagacagagacagaagctgagagagatcatcctgcagcagcagcagcagaagaagatcgccggcagacaggagaagggcagccaggacagccccgccgtgccccaccccggccccctgcagcactggcagcccgagaacgtgaaccaggccttcaccagacccccccccccctaccccggcaacatcagaagccccgtggccccccccctgggccccagatacgccgtgttccccaaggaccagagaggcccctacccccccgacgtggccagcatgggcatgagaccccacggcttcagattcggcttccccggcggcagccacggcaccatgcccagccaggagagattcctggtgcccccccagcagatccagggcagcggcgtgagcccccagctgagaagaagcgtgagcgtggacatgcccagacccctgaacaacagccagatgaacaaccccgtgggcctgccccagcacttcagcccccagagcctgcccgtgcagcagcacaacatcctgggccaggcctacatcgagctgagacacagagcccccgacggcagacagagactgcccttcagcgccccccccggcagcgtggtggaggccagcagcaacctgagacacggcaacttcatccccagacccgacttccccggccccagacacaccgaccccatgagaagacccccccagggcctgcccaaccagctgcccgtgcaccccgacctggagcaggtgccccccagccagcaggagcagggccacagcgtgcacagcagcagcatggtgatgagaaccctgaaccaccccctgggcggcgagttcagcgaggcccccctgagcaccagcgtgcccagcgagaccaccagcgacaacctgcagatcaccacccagcccagcgacggcctggaggagaagctggacagcgacgaccccagcgtgaaggagctggacgtgaaggacctggagggcgtggaggtgaaggacctggacgacgaggacctggagaacctgaacctggacaccgaggacggcaaggtggtggagctggacaccctggacaacctggagaccaacgaccccaacctggacgacctgctgagaagcggcgagttcgacatcatcgcctacaccgaccccgagctggacatgggcgacaagaagagcatgttcaacgaggagctggacctgcccatcgacgacaagctggacaaccagtgcgtgagcgtggagcccaagaagaaggagcaggagaacaagaccctggtgctgagcgacaagcacagcccccagaagaagagcaccgtgaccaacgaggtgaagaccgaggtgctgagccccaacagcaaggtggagagcaagtgcgagaccgagaagaacgacgagaacaaggacaacgtggacaccccctgcagccaggccagcgcccacagcgacctgaacgacggcgagaagaccagcctgcacccctgcgaccccgacctgttcgagaagagaaccaacagagagaccgccggccccagcgccaacgtgatccaggccagcacccagctgcccgcccaggacgtgatcaacagctgcggcatcaccggcagcacccccgtgctgagcagcctgctggccaacgagaagagcgacaacagcgacatcagacccagcggcagcccccccccccccaccctgcccgccagccccagcaaccacgtgagcagcctgccccccttcatcgccccccccggcagagtgctggacaacgccatgaacagcaacgtgaccgtggtgagcagagtgaaccacgtgttcagccagggcgtgcaggtgaaccccggcctgatccccggccagagcaccgtgaaccacagcctgggcaccggcaagcccgccacccagaccggcccccagaccagccagagcggcaccagcagcatgagcggcccccagcagctgatgatcccccagaccctggcccagcagaacagagagagacccctgctgctggaggagcagcccctgctgctgcaggacctgctggaccaggagagacaggagcagcagcagcagagacagatgcaggccatgatcagacagagaagcgagcccttcttccccaacatcgacttcgacgccatcaccgaccccatcatgaaggccaagatggtggccctgaagggcatcaacaaggtgatggcccagaacaacctgggcatgccccccatggtgatgagcagattccccttcatgggccaggtggtgaccggcacccagaacagcgagggccagaacctgggcccccaggccatcccccaggacggcagcatcacccaccagatcagcagacccaacccccccaacttcggccccggcttcgtgaacgacagccagagaaagcagtacgaggagtggctgcaggagacccagcagctgctgcagatgcagcagaagtacctggaggagcagatcggcgcccacagaaagagcaagaaggccctgagcgccaagcagagaaccgccaagaaggccggcagagagttccccgaggaggacgccgagcagctgaagcacgtgaccgagcagcagagcatggtgcagaagcagctggagcagatcagaaagcagcagaaggagcacgccgagctgatcgaggactacagaatcaagcagcagcagcagtgcgccatggccccccccaccatgatgcccagcgtgcagccccagccccccctgatccccggcgccaccccccccaccatgagccagcccaccttccccatggtgccccagcagctgcagcaccagcagcacaccaccgtgatcagcggccacaccagccccgtgagaatgcccagcctgcccggctggcagcccaacagcgcccccgcccacctgcccctgaacccccccagaatccagccccccatcgcccagctgcccatcaagacctgcacccccgcccccggcaccgtgagcaacgccaacccccagagcggccccccccccagagtggagttcgacgacaacaaccccttcagcgagagcttccaggagagagagagaaaggagagactgagagagcagcaggagagacagagaatccagctgatgcaggaggtggacagacagagagccctgcagcagagaatggagatggagcagcacggcatggtgggcagcgagatcagcagcagcagaaccagcgtgagccagatccccttctacagcagcgacctgccctgcgacttcatgcagcccctgggccccctgcagcagagcccccagcaccagcagcagatgggccaggtgctgcagcagcagaacatccagcagggcagcatcaacagccccagcacccagaccttcatgcagaccaacgagagaagacaggtgggcccccccagcttcgtgcccgacagccccagcatccccgtgggcagccccaacttcagcagcgtgaagcagggccacggcaacctgagcggcaccagcttccagcagagccccgtgagacccagcttcacccccgccctgcccgccgccccccccgtggccaacagcagcctgccctgcggccaggacagcaccatcacccacggccacagctaccccggcagcacccagagcctgatccagctgtacagcgacatcatccccgaggagaagggcaagaagaagagaaccagaaagaagaagagagacgacgacgccgagagcaccaaggcccccagcaccccccacagcgacatcaccgccccccccacccccggcatcagcgagaccaccagcacccccgccgtgagcacccccagcgagctgccccagcaggccgaccaggagagcgtggagcccgtgggccccagcacccccaacatggccgccggccagctgtgcaccgagctggagaacaagctgcccaacagcgacttcagccaggccacccccaaccagcagacctacgccaacagcgaggtggacaagctgagcatggagacccccgccaagaccgaggagatcaagctggagaaggccgagaccgagagctgccccggccaggaggagcccaagctggaggagcagaacggcagcaaggtggagggcaacgccgtggcctgccccgtgagcagcgcccagagccccccccacagcgccggcgcccccgccgccaagggcgacagcggcaacgagctgctgaagcacctgctgaagaacaagaagagcagcagcctgctgaaccagaagcccgagggcagcatctgcagcgaggacgactgcaccaaggacaacaagctggtggagaagcagaaccccgccgagggcctgcagaccctgggcgcccagatgcagggcggcttcggctgcggcaaccagctgcccaagaccgacggcggcagcgagaccaagaagcagagaagcaagagaacccagagaaccggcgagaaggccgcccccagaagcaagaagagaaagaaggacgaggaggagaagcaggccatgtacagcagcaccgacaccttcacccacctgaagcaggtgagacagctgagcctgctgcccctgatggagcccatcatcggcgtgaacttcgcccacttcctgccctacggcagcggccagttcaacagcggcaacagactgctgggcaccttcggcagcgccaccctggagggcgtgagcgactactacagccagctgatctacaagcagaacaacctgagcaacccccccaccccccccgccagcctgccccccacccccccccccatggcctgccagaagatggccaacggcttcgccaccaccgaggagctggccggcaaggccggcgtgctggtgagccacgaggtgaccaagaccctgggccccaagcccttccagctgcccttcagaccccaggacgacctgctggccagagccctggcccagggccccaagaccgtggacgtgcccgccagcctgcccacccccccccacaacaaccaggaggagctgagaatccaggaccactgcggcgacagagacacccccgacagcttcgtgcccagcagcagccccgagagcgtggtgggcgtggaggtgagcagataccccgacctgagcctggtgaaggaggagccccccgagcccgtgcccagccccatcatccccatcctgcccagcaccgccggcaagagcagcgagagcagaagaaacgacatcaagaccgagcccggcaccctgtacttcgccagccccttcggccccagccccaacggccccagaagcggcctgatcagcgtggccatcaccctgcaccccaccgccgccgagaacatcagcagcgtggtggccgccttcagcgacctgctgcacgtgagaatccccaacagctacgaggtgagcagcgcccccgacgtgcccagcatgggcctggtgagcagccacagaatcaaccccggcctggagtacagacagcacctgctgctgagaggccccccccccggcagcgccaacccccccagactggtgagcagctacagactgaagcagcccaacgtgcccttcccccccaccagcaacggcctgagcggctacaaggacagcagccacggcatcgccgagagcgccgccctgagaccccagtggtgctgccactgcaaggtggtgatcctgggcagcggcgtgagaaagagcttcaaggacctgaccctgctgaacaaggacagcagagagagcaccaagagagtggagaaggacatcgtgttctgcagcaacaactgcttcatcctgtacagcagcaccgcccaggccaagaacagcgagaacaaggagagcatccccagcctgccccagagccccatgagagagacccccagcaaggccttccaccagtacagcaacaacatcagcaccctggacgtgcactgcctgccccagctgcccgagaaggccagcccccccgccagcccccccatcgccttcccccccgccttcgaggccgcccaggtggaggccaagcccgacgagctgaaggtgaccgtgaagctgaagcccagactgagagccgtgcacggcggcttcgaggactgcagacccctgaacaagaagtggagaggcatgaagtggaagaagtggagcatccacatcgtgatccccaagggcaccttcaagcccccctgcgaggacgagatcgacgagttcctgaagaagctgggcaccagcctgaagcccgaccccgtgcccaaggactacagaaagtgctgcttctgccacgaggagggcgacggcctgaccgacggccccgccagactgctgaacctggacctggacctgtgggtgcacctgaactgcgccctgtggagcaccgaggtgtacgagacccaggccggcgccctgatcaacgtggagctggccctgagaagaggcctgcagatgaagtgcgtgttctgccacaagaccggcgccaccagcggctgccacagattcagatgcaccaacatctaccacttcacctgcgccatcaaggcccagtgcatgttcttcaaggacaagaccatgctgtgccccatgcacaagcccaagggcatccacgagcaggagctgagctacttcgccgtgttcagaagagtgtacgtgcagagagacgaggtgagacagatcgccagcatcgtgcagagaggcgagagagaccacaccttcagagtgggcagcctgatcttccacaccatcggccagctgctgccccagcagatgcaggccttccacagccccaaggccctgttccccgtgggctacgaggccagcagactgtactggagcaccagatacgccaacagaagatgcagatacctgtgcagcatcgaggagaaggacggcagacccgtgttcgtgatcagaatcgtggagcagggccacgaggacctggtgctgagcgacatcagccccaagggcgtgtgggacaagatcctggagcccgtggcctgcgtgagaaagaagagcgagatgctgcagctgttccccgcctacctgaagggcgaggacctgttcggcctgaccgtgagcgccgtggccagaatcgccgagagcctgcccggcgtggaggcctgcgagaactacaccttcagatacggcagaaaccccctgatggagctgcccctggccgtgaaccccaccggctgcgccagaagcgagcccaagatgagcgcccacgtgaagagattcgtgctgagaccccacaccctgaacagcaccagcaccagcaagagcttccagagcaccgtgaccggcgagctgaacgccccctacagcaagcagttcgtgcacagcaagagcagccagtacagaaagatgaagaccgagtggaagagcaacgtgtacctggccagaagcagaatccagggcctgggcctgtacgccgccagagacatcgagaagcacaccatggtgatcgagtacatcggcaccatcatcagaaacgaggtggccaacagaaaggagaagctgtacgagagccagaacagaggcgtgtacatgttcagaatggacaacgaccacgtgatcgacgccaccctgaccggcggccccgccagatacatcaaccacagctgcgcccccaactgcgtggccgaggtggtgaccttcgagagaggccacaagatcatcatcagcagcagcagaagaatccagaagggcgaggagctgtgctacgactacaagttcgacttcgaggacgaccagcacaagatcccctgccactgcggcgccgtgaactgcagaaagtggatgaactag

SEQ ID NO: 89859 - DNA, 4575 bp, synthetic construct
  misc_feature 1..4575: note = Description of Artificial Sequence: Synthetic coding sequence
  source 1..4575: mol_type = other DNA
ctgatgcaggaggtggacagacagagagccctgcagcagagaatggagatggagcagcacggcatggtgggcagcgagatcagcagcagcagaaccagcgtgagccagatccccttctacagcagcgacctgccctgcgacttcatgcagcccctgggccccctgcagcagagcccccagcaccagcagcagatgggccaggtgctgcagcagcagaacatccagcagggcagcatcaacagccccagcacccagaccttcatgcagaccaacgagagaagacaggtgggcccccccagcttcgtgcccgacagccccagcatccccgtgggcagccccaacttcagcagcgtgaagcagggccacggcaacctgagcggcaccagcttccagcagagccccgtgagacccagcttcacccccgccctgcccgccgccccccccgtggccaacagcagcctgccctgcggccaggacagcaccatcacccacggccacagctaccccggcagcacccagagcctgatccagctgtacagcgacatcatccccgaggagaagggcaagaagaagagaaccagaaagaagaagagagacgacgacgccgagagcaccaaggcccccagcaccccccacagcgacatcaccgccccccccacccccggcatcagcgagaccaccagcacccccgccgtgagcacccccagcgagctgccccagcaggccgaccaggagagcgtggagcccgtgggccccagcacccccaacatggccgccggccagctgtgcaccgagctggagaacaagctgcccaacagcgacttcagccaggccacccccaaccagcagacctacgccaacagcgaggtggacaagctgagcatggagacccccgccaagaccgaggagatcaagctggagaaggccgagaccgagagctgccccggccaggaggagcccaagctggaggagcagaacggcagcaaggtggagggcaacgccgtggcctgccccgtgagcagcgcccagagccccccccacagcgccggcgcccccgccgccaagggcgacagcggcaacgagctgctgaagcacctgctgaagaacaagaagagcagcagcctgctgaaccagaagcccgagggcagcatctgcagcgaggacgactgcaccaaggacaacaagctggtggagaagcagaaccccgccgagggcctgcagaccctgggcgcccagatgcagggcggcttcggctgcggcaaccagctgcccaagaccgacggcggcagcgagaccaagaagcagagaagcaagagaacccagagaaccggcgagaaggccgcccccagaagcaagaagagaaagaaggacgaggaggagaagcaggccatgtacagcagcaccgacaccttcacccacctgaagcagcagctgagcctgctgcccctgatggagcccatcatcggcgtgaacttcgcccacttcctgccctacggcagcggccagttcaacagcggcaacagactgctgggcaccttcggcagcgccaccctggagggcgtgagcgactactacagccagctgatctacaagaagatggccaacggcttcgccaccaccgaggagctggccggcaaggccggcgtgctggtgagccacgaggtgaccaagaccctgggccccaagcccttccagctgcccttcagaccccaggacgacctgctggccagagccctggcccagggccccaagaccgtggacgtgcccgccagcctgcccacccccccccacaacaaccaggaggagctgagaatccaggaccactgcggcgacagagacacccccgacagcttcgtgcccagcagcagccccgagagcgtggtgggcgtggaggtgagcagataccccgacctgagcctggtgaaggaggagccccccgagcccgtgcccagccccatcatccccatcctgcccagcaccgccggcaagagcagcgagagcagaagaaacgacatcaagaccgagcccggcaccctgtacttcgccagccccttcggccccagccccaacggccccagaagcggcctgatcagcgtggccatcaccctgcaccccaccgccgccgagaacatcagcagcgtggtggccgccttcagcgacctgctgcacgtgagaatccccaacagctacgaggtgagcagcgcccccgacgtgcccagcatgggcctggtgagcagccacagaatcaaccccggcctggagtacagacagcacctgctgctgagaggccccccccccggcagcgccaacccccccagactggtgagcagctacagactgaagcagcccaacgtgcccttcccccccaccagcaacggcctgagcggctacaaggacagcagccacggcatcgccgagagcgccgccctgagaccccagtggtgctgccactgcaaggtggtgatcctgggcagcggcgtgagaaagagcttcaaggacctgaccctgctgaacaaggacagcagagagagcaccaagagagtggagaaggacatcgtgttctgcagcaacaactgcttcatcctgtacagcagcaccgcccaggccaagaacagcgagaacaaggagagcatccccagcctgccccagagccccatgagagagacccccagcaaggccttccaccagtacagcaacaacatcagcaccctggacgtgcactgcctgccccagctgcccgagaaggccagcccccccgccagcccccccatcgccttcccccccgccttcgaggccgcccaggtggaggccaagcccgacgagctgaaggtgaccgtgaagctgaagcccagactgagagccgtgcacggcggcttcgaggactgcagacccctgaacaagaagtggagaggcatgaagtggaagaagtggagcatccacatcgtgatccccaagggcaccttcaagcccccctgcgaggacgagatcgacgagttcctgaagaagctgggcaccagcctgaagcccgaccccgtgcccaaggactacagaaagtgctgcttctgccacgaggagggcgacggcctgaccgacggccccgccagactgctgaacctggacctggacctgtgggtgcacctgaactgcgccctgtggagcaccgaggtgtacgagacccaggccggcgccctgatcaacgtggagctggccctgagaagaggcctgcagatgaagtgcgtgttctgccacaagaccggcgccaccagcggctgccacagattcagatgcaccaacatctaccacttcacctgcgccatcaaggcccagtgcatgttcttcaaggacaagaccatgctgtgccccatgcacaagcccaagggcatccacgagcaggagctgagctacttcgccgtgttcagaagagtgtacgtgcagagagacgaggtgagacagatcgccagcatcgtgcagagaggcgagagagaccacaccttcagagtgggcagcctgatcttccacaccatcggccagctgctgccccagcagatgcaggccttccacagccccaaggccctgttccccgtgggctacgaggccagcagactgtactggagcaccagatacgccaacagaagatgcagatacctgtgcagcatcgaggagaaggacggcagacccgtgttcgtgatcagaatcgtggagcagggccacgaggacctggtgctgagcgacatcagccccaagggcgtgtgggacaagatcctggagcccgtggcctgcgtgagaaagaagagcgagatgctgcagctgttccccgcctacctgaagggcgaggacctgttcggcctgaccgtgagcgccgtggccagaatcgccgagagcctgcccggcgtggaggcctgcgagaactacaccttcagatacggcagaaaccccctgatggagctgcccctggccgtgaaccccaccggctgcgccagaagcgagcccaagatgagcgcccacgtgaagagaccccacaccctgaacagcaccagcaccagcaagagcttccagagcaccgtgaccggcgagctgaacgccccctacagcaagcagttcgtgcacagcaagagcagccagtacagaaagatgaagaccgagtggaagagcaacgtgtacctggccagaagcagaatccagggcctgggcctgtacgccgccagagacatcgagaagcacaccatggtgatcgagtacatcggcaccatcatcagaaacgaggtggccaacagaaaggagaagctgtacgagagccagaacagaggcgtgtacatgttcagaatggacaacgaccacgtgatcgacgccaccctgaccggcggccccgccagatacatcaaccacagctgcgcccccaactgcgtggccgaggtggtgaccttcgagagaggccacaagatcatcatcagcagcagcagaagaatccagaagggcgaggagctgtgctacgactacaagttcgacttcgaggacgaccagcacaagatcccctgccactgcggcgccgtgaactgcagaaagtggatgaactag

SEQ ID NO: 89860 - DNA, 351 bp, synthetic construct
  misc_feature 1..351: note = Description of Artificial Sequence: Synthetic coding sequence
  source 1..351: mol_type = other DNA
atggtgatcgagtacatcggcaccatcatcagaaacgaggtggccaacagaaaggagaagctgtacgagagccagaacagaggcgtgtacatgttcagaatggacaacgaccacgtgatcgacgccaccctgaccggcggccccgccagatacatcaaccacagctgcgcccccaactgcgtggccgaggtggtgaccttcgagagaggccacaagatcatcatcagcagcagcagaagaatccagaagggcgaggagctgtgctacgactacaagttcgacttcgaggacgaccagcacaagatcccctgccactgcggcgccgtgaactgcagaaagtggatgaactag

SEQ ID NO: 89861 - DNA, 5577 bp, synthetic construct
  misc_feature 1..5577: note = Description of Artificial Sequence: Synthetic coding sequence
  source 1..5577: mol_type = other DNA
atgagcatcgtgatccccctgggcgtggacaccgccgagaccagctacctggagatggccgccggcagcgagcccgagagcgtggaggccagccccgtggtggtggagaagagcaacagctacccccaccagctgtacaccagcagcagccaccacagccacagctacatcggcctgccctacgccgaccacaactacggcgccagacccccccccaccccccccgccagccccccccccagcgtgctgatcagcaagaacgaggtgggcatcttcaccacccccaacttcgacgagaccagcagcgccaccaccatcagcaccagcgaggacggcagctacggcaccgacgtgaccagatgcatctgcggcttcacccacgacgacggctacatgatctgctgcgacaagtgcagcgtgtggcagcacatcgactgcatgggcatcgacagacagcacatccccgacacctacctgtgcgagagatgccagcccagaaacctggacaaggagagagccgtgctgctgcagagaagaaagagagagaacatgagcgacggcgacaccagcgccaccgagagcggcgacgaggtgcccgtggagctgtacaccgccttccagcacacccccaccagcatcaccctgaccgccagcagagtgagcaaggtgaacgacaagagaagaaagaagagcggcgagaaggagcagcacatcagcaagtgcaagaaggccttcagagagggcagcagaaagagcagcagagtgaagggcagcgcccccgagatcgaccccagcagcgacggcagcaacttcggctgggagaccaagatcaaggcctggatggacagatacgaggaggccaacaacaaccagtacagcgagggcgtgcagagagaggcccagagaatcgccctgagactgggcaacggcaacgacaagaaggagatgaacaagagcgacctgaacaccaacaacctgctgttcaagccccccgtggagagccacatccagaagaacaagaagatcctgaagagcgccaaggacctgccccccgacgccctgatcatcgagtacagaggcaagttcatgctgagagagcagttcgaggccaacggctacttcttcaagagaccctaccccttcgtgctgttctacagcaagttccacggcctggagatgtgcgtggacgccagaaccttcggcaacgaggccagattcatcagaagaagctgcacccccaacgccgaggtgagacacgagatccaggacggcaccatccacctgtacatctacagcatccacagcatccccaagggcaccgagatcaccatcgccttcgacttcgactacggcaactgcaagtacaaggtggactgcgcctgcctgaaggagaaccccgagtgccccgtgctgaagagaagcagcgagagcatggagaacatcaacagcggctacgagaccagaagaaagaagggcaagaaggacaaggacatcagcaaggagaaggacacccagaaccagaacatcaccctggactgcgagggcaccaccaacaagatgaagagccccgagaccaagcagagaaagctgagccccctgagactgagcgtgagcaacaaccaggagcccgacttcatcgacgacatcgaggagaagacccccatcagcaacgaggtggagatggagagcgaggagcagatcgccgagagaaagagaaagatgaccagagaggagagaaagatggaggccatcctgcaggccttcgccagactggagaagagagagaagagaagagagcaggccctggagagaatcagcaccgccaagaccgaggtgaagaccgagtgcaaggacacccagatcgtgagcgacgccgaggtgatccaggagcaggccaaggaggagaacgccagcaagcccacccccgccaaggtgaacagaaccaagcagagaaagagcttcagcagaagcagaacccacatcggccagcagagaagaagacacagaaccgtgagcatgtgcagcgacatccagcccagcagccccgacatcgaggtgaccagccagcagaacgacatcgagaacaccgtgctgaccatcgagcccgagaccgagaccgccctggccgagatcatcaccgagaccgaggtgcccgccctgaacaagtgccccaccaagtaccccaagaccaagaagcacctggtgaacgagtggctgagcgagaagaacgagaagaccggcaagcccagcgacggcctgagcgagagacccctgagaatcaccaccgaccccgaggtgctggccacccagctgaacagcctgcccggcctgacctacagcccccacgtgtacagcacccccaagcactacatcagattcaccagccccttcctgagcgagaagagaagaagaaaggagcccaccgagaacatcagcggcagctgcaagaagagatggctgaagcaggccctggaggaggagaacagcgccatcctgcacagattcaacagcccctgccaggagagaagcagaagccccgccgtgaacggcgagaacaagagccccctgctgctgaacgacagctgcagcctgcccgacctgaccacccccctgaagaagagaagattctaccagctgctggacagcgtgtacagcgagaccagcacccccacccccagcccctacgccacccccacccacaccgacatcacccccatggaccccagcttcgccaccccccccagaatcaagagcgacgacgagacctgcagaaacggctacaagcccatctacagccccgtgacccccgtgacccccggcacccccggcaacaccatgcacttcgagaacatcagcagccccgagagcagccccgagatcaagagaagaacctacagccaggagggctacgacagaagcagcaccatgctgaccctgggccccttcagaaacagcaacctgaccgagctgggcctgcaggagatcaagaccatcggctacaccagccccagaagcagaaccgaggtgaacagacagtgccccggcgagaaggagcccgtgagcgacctgcagctgggcctggacgccgtggagcccaccgccctgcacaagaccctggagacccccgcccacgacagagccgagcccaacagccagctggacagcacccacagcggcagaggcaccatgtacagcagctgggtgaagagccccgacagaaccggcgtgaacttcagcgtgaacagcaacctgagagacctgacccccagccaccagctggaggtgggcggcggcttcagaatcagcgagagcaagtgcctgatgcaggacgacaccagaggcatgttcatggagaccaccgtgttctgcaccagcgaggacggcctggtgagcggcttcggcagaaccgtgaacgacaacctgatcgacggcaactgcaccccccagaaccccccccagaagaagaaggtgagcctgctggagtacagaaagagacagagagaggccagaaagagcggcagcaagaccgagaacttccccctgatcagcgtgagcccccacgccagcggcagcctgagcaacaacggcgacggctgcgccagcagcaacgacaacggcgagcaggtggaccacaccgccagcctgcccctgcccacccccgccaccgtgtacaacgccaccagcgaggagaccagcaacaactgccccgtgaaggacgccaccgccagcgagaagaacgagcccgaggtgcagtggaccgccagcaccagcgtggagcaggtgagagagagaagctaccagagagccctgctgctgagcgaccacagaaaggacaaggacagcggcggcgagagcccctgcgtgagctgcagccccagccacgtgcagagcagccccagcagccacagcaaccacatcccccagctgcaggccaagggccccgtgcccagcttcagcgagctgatggaggaccccgaccccgagaaccccgagcccaccaccaccaacgagtgccccagccccgacaccagccagaacacctgcaagagcccccccaagatgagcaagcccggcagccccggcagcgtgatccccgcccaggcccacggcaagatcttcaccaagcccgacccccagtgggacagcaccgtgagcgccagcgaggccgagaacggcgtgcacctgaagaccgagctgcagcagaagcagctgagcaacaacaaccaggccctgagcaagaaccaccccccccagacccacgtgagaaacagcagcgagcagctgagccagaagctgcccagcgtgcccaccaagctgcactgcccccccagcccccacctggagaacccccccaagagcagcaccccccacacccccgtgcagcacggctacctgagccccaagccccccagccagcagctgggcagcccctacagaccccaccacagccagagcccccaggtgggcaccccccagagagagccccagagaaacttctaccccgccgcccagaacctgcccgccaacacccagcaggccaccagcggcaccctgttcacccagacccccagcggccagagcagcgccacctacagccagttcaaccagcagagcctgaacagcaccgcccccccccccccccccccccccccccccagcagcagctactaccagaaccagcagcccagcgccaacttccagaactacaaccagctgaagggcagcctgagccagcagaccgtgttcaccagcggccccaaccaggccctgcccggcaccaccagccagcagaccgtgcccggccaccacgtgacccccggccacttcctgcccagccagaaccccaccatccaccaccagaccgccgccgccgtggtgccccccccccccccccccccccccgcccccggcccccacctggtgcagcagcccaacagccaccagcagcacagcgtggcccacgtggtgggccccgtgcacgccgtgacccccggcagccacatccacagccagaccgccggccaccacctgcccccccccccccccccccccggccccgccccccaccaccacccccccccccaccccagcaccggcctgcagggcctgcaggcccagcaccagcacgtggtgaacagcgcccccccccccccccccccccccccccccagcagcgtgctggccagcggccaccacaccaccagcgcccaggccctgcaccaccccccccaccagggcccccccctgttccccagcagcgcccaccccaccgtgcccccctaccccagccaggccacccaccacaccaccctgggccccggcccccagcaccagcccagcggcaccggcccccactgccccctgcccgtgaccggcccccacctgcagccccagggccccaacagcatccccacccccaccgccagcggcttctgcccccaccccggcagcgtggccctgccccacggcgtgcagggcccccagcaggccagccccgtgcccggccagatccccatccacagagcccaggtgccccccaccttccagaacaactaccacggcagcggctggcactag

SEQ ID NO: 89862 - DNA, 5577 bp, synthetic construct; identical to SEQ ID NO: 89861
  misc_feature 1..5577: note = Description of Artificial Sequence: Synthetic coding sequence
  source 1..5577: mol_type = other DNA

SEQ ID NO: 89863 - DNA, 5451 bp, synthetic construct
  misc_feature 1..5451: note = Description of Artificial Sequence: Synthetic coding sequence
  source 1..5451: mol_type = other DNA
atgagcatcgtgatccccctgggcgtggacaccgccgagaccagctacctggagatggccgccggcagcgagcccgagagcgtggaggccagccccgtggtggtggagaagagcaacagctacccccaccagctgtacaccagcagcagccaccacagccacagctacatcggcctgccctacgccgaccacaactacggcgccagacccccccccaccccccccgccagccccccccccagcgtgctgatcagcaagaacgaggtgggcatcttcaccacccccaacttcgacgagaccagcagcgccaccaccatcagcaccagcgaggacggcagctacggcaccgacgtgaccagatgcatctgcggcttcacccacgacgacggctacatgatctgctgcgacaagtgcagcgtgtggcagcacatcgactgcatgggcatcgacagacagcacatccccgacacctacctgtgcgagagatgccagcccagaaacctggacaaggagagagccgtgctgctgcagagaagaaagagagagaacatgagcgacggcgacaccagcgccaccgagagcggcgacgaggtgcccgtggagctgtacaccgccttccagcacacccccaccagcatcaccctgaccgccagcagagtgagcaaggtgaacgacaagagaagaaagaagagcggcgagaaggagcagcacatcagcaagtgcaagaaggccttcagagagggcagcagaaagagcagcagagtgaagggcagcgcccccgagatcgaccccagcagcgacggcagcaacttcggctgggagaccaagatcaaggcctggatggacagatacgaggaggccaacaacaaccagtacagcgagggcgtgcagagagaggcccagagaatcgccctgagactgggcaacggcaacgacaagaaggagatgaacaagagcgacctgaacaccaacaacctgctgttcaagccccccgtggagagccacatccagaagaacaagaagatcctgaagagcgccaaggacctgccccccgacgccctgatcatcgagtacagaggcaagttcatgctgagagagcagttcgaggccaacggctacttcttcaagagaccctaccccttcgtgctgttctacagcaagttccacggcctggagatgtgcgtggacgccagaaccttcggcaacgaggccagattcatcagaagaagctgcacccccaacgccgaggtgagacacgagatccaggacggcaccatccacctgtacatctacagcatccacagcatccccaagggcaccgagatcaccatcgccttcgacttcgactacggcaactgcaagtacaaggtggactgcgcctgcctgaaggagaaccccgagtgccccgtgctgaagagaagcagcgagagcatggagaacatcaacagcggctacgagaccagaagaaagaagggcaagaaggacaaggacatcagcaaggagaaggacacccagaaccagaacatcaccctggactgcgagggcaccaccaacaagatgaagagccccgagaccaagcagagaaagctgagccccctgagactgagcgtgagcaacaaccaggagcccgacttcatcgacgacatcgaggagaagacccccatcagcaacgaggtggagatggagagcgaggagcagatcgccgagagaaagagaaagatgaccagagaggagagaaagatggaggccatcctgcaggccttcgccagactggagaagagagagaagagaagagagcaggccctggagagaatcagcaccgccaagaccgaggtgaagaccgagtgcaaggacacccagatcgtgagcgacgccgaggtgatccaggagcaggccaaggaggagaacgccagcaagcccacccccgccaaggtgaacagaaccaagcagagaaagagcttcagcagaagcagaacccacatcggccagcagagaagaagacacagaaccgtgagcatgtgcagcgacatccagcccagcagccccgacatcgaggtgaccagccagcagaacgacatcgagaacaccgtgctgaccatcgagcccgagaccgagaccgccctggccgagatcatcaccgagaccgaggtgcccgccctgaacaagtgccccaccaagtaccccaagaccaagaagcacctggtgaacgagtggctgagcgagaagaacgagaagaccggcaagcccagcgacggcctgagcgagagacccctgagaatcaccaccgaccccgaggtgctggccacccagctgaacagcctgcccggcctgacctacagcccccacgtgtacagcacccccaagcactacatcagattcaccagccccttcctgagcgagaagagaagaagaaaggagcccaccgagaacatcagcggcagctgcaagaagagatggctgaagcaggccctggaggaggagaacagcgccatcctgcacagattcaacagcccctgccaggagagaagcagaagccccgccgtgaacggcgagaacaagagccccctgctgctgaacgacagctgcagcctgcccgacctgaccacccccctgaagaagagaagattctaccagctgctggacagcgtgtacagcgagaccagcacccccacccccagcccctacgccacccccacccacaccgacatcacccccatggaccccagcttcgccaccccccccagaatcaagagcgacgacgagacctgcagaaacggctacaagcccatctacagccccgtgacccccgtgacccccggcacccccggcaacaccatgcacttcgagaacatcagcagccccgagagcagccccgagatcaagagaagaacctacagccaggagggctacgacagaagcagcaccatgctgaccctgggccccttcagaaacagcaacctgaccgagctgggcctgcaggagatcaagaccatcggctacaccagccccagaagcagaaccgaggtgaacagacagtgccccggcgagaaggagcccgtgagcgacctgcagctgggcctggacgccgtggagcccaccgccctgcacaagaccctggagacccccgcccacgacagagccgagcccaacagccagctggacagcacccacagcggcagaggcaccatgtacagcagctgggtgaagagccccgacagaaccggcgtgaacttcagcgtgaacagcaacctgagagacctgacccccagccaccagctggaggtgggcggcggcttcagaatcagcgagagcaagtgcctgatgcaggacgacaccagaggcatgttcatggagaccaccgtgttctgcaccagcgaggacggcctggtgagcggcttcggcagaaccgtgaacgacaacctgatcgacggcaactgcaccccccagaaccccccccagaagaagaaggtgagcctgctggagtacagaaagagacagagagaggccagaaagagcggcagcaagaccgagaacttccccctgatcagcgtgagcccccacgccagcggcagcctgagcaacaacggcgacggctgcgccagcagcaacgacaacggcgagcaggtggaccacaccgccagcctgcccctgcccacccccgccaccgtgtacaacgccaccagcgaggagaccagcaacaactgccccgtgaaggacgccaccgccagcgagaagaacgagcccgaggtgcagtggaccgccagcaccagcgtggagcaggtgagagagagaagctaccagagagccctgctgctgagcgaccacagaaaggacaaggacagcgaccccgaccccgagaaccccgagcccaccaccaccaacgagtgccccagccccgacaccagccagaacacctgcaagagcccccccaagatgagcaagcccggcagccccggcagcgtgatccccgcccaggcccacggcaagatcttcaccaagcccgacccccagtgggacagcaccgtgagcgccagcgaggccgagaacggcgtgcacctgaagaccgagctgcagcagaagcagctgagcaacaacaaccaggccctgagcaagaaccaccccccccagacccacgtgagaaacagcagcgagcagctgagccagaagctgcccagcgtgcccaccaagctgcactgcccccccagcccccacctggagaacccccccaagagcagcaccccccacacccccgtgcagcacggctacctgagccccaagccccccagccagcagctgggcagcccctacagaccccaccacagccagagcccccaggtgggcaccccccagagagagccccagagaaacttctaccccgccgcccagaacctgcccgccaacacccagcaggccaccagcggcaccctgttcacccagacccccagcggccagagcagcgccacctacagccagttcaaccagcagagcctgaacagcaccgcccccccccccccccccccccccccccccagcagcagctactaccagaaccagcagcccagcgccaacttccagaactacaaccagctgaagggcagcctgagccagcagaccgtgttcaccagcggccccaaccaggccctgcccggcaccaccagccagcagaccgtgcccggccaccacgtgacccccggccacttcctgcccagccagaaccccaccatccaccaccagaccgccgccgccgtggtgccccccccccccccccccccccccgcccccggcccccacctggtgcagcagcccaacagccaccagcagcacagcgtggcccacgtggtgggccccgtgcacgccgtgacccccggcagccacatccacagccagaccgccggccaccacctgcccccccccccccccccccccggccccgccccccaccaccacccccccccccaccccagcaccggcctgcagggcctgcaggcccagcaccagcacgtggtgaacagcgcccccccccccccccccccccccccccccagcagcgtgctggccagcggccaccacaccaccagcgcccaggccctgcaccaccccccccaccagggcccccccctgttccccagcagcgcccaccccaccgtgcccccctaccccagccaggccacccaccacaccaccctgggccccggcccccagcaccagcccagcggcaccggcccccactgccccctgcccgtgaccggcccccacctgcagccccagggccccaacagcatccccacccccaccgccagcggcttctgcccccaccccggcagcgtggccctgccccacggcgtgcagggcccccagcaggccagccccgtgcccggccagatccccatccacagagcccaggtgccccccaccttccagaacaactaccacggcagcggctggcactag

SEQ ID NO: 89864 - DNA, 1770 bp, synthetic construct
  misc_feature 1..1770: note = Description of Artificial Sequence: Synthetic coding sequence
  source 1..1770: mol_type = other DNA
atgcacttcgagaacatcagcagccccgagagcagccccgagatcaagagaagaacctacagccaggagggctacgacagaagcagcaccatgctgaccctgggccccttcagaaacagcaacctgaccgagctgggcctgcaggagatcaagaccatcggctacaccagccccagaagcagaaccgaggtgaacagacagtgccccggcgagaaggagcccgtgagcgacctgcagctgggcctggacgccgtggagcccaccgccctgcacaagaccctggagacccccgcccacgacagagccgagcccaacagccagctggacagcacccacagcggcagaggcaccatgtacagcagctgggtgaagagccccgacagaaccggcgtgaacttcagcgtgaacagcaacctgagagacctgacccccagccaccagctggaggtgggcggcggcttcagaatcagcgagagcaagtgcctgatgcaggacgacaccagaggcatgttcatggagaccaccgtgttctgcaccagcgaggacggcctggtgagcggcttcggcagaaccgtgaacgacaacctgatcgacggcaactgcaccccccagaaccccccccagaagaagaaggtgagcctgctggagtacagaaagagacagagagaggccagaaagagcggcagcaagaccgagaacttccccctgatcagcgtgagcccccacgccagcggcagcctgagcaacaacggcgacggctgcgccagcagcaacgacaacggcgagcaggtggaccacaccgccagcctgcccctgcccacccccgccaccgtgtacaacgccaccagcgaggagaccagcaacaactgccccgtgaaggacgccaccgccagcgagaagaacgagcccgaggtgcagtggaccgccagcaccagcgtggagcaggtgagagagagaagctaccagagagccctgctgctgagcgaccacagaaaggacaaggacagcggcggcgagagcccctgcgtgagctgcagccccagccacgtgcagagcagccccagcagccacagcaaccacatcccccagctgcaggccaagggccccgtgcccagcttcagcgagctgatggaggaccccgaccccgagaaccccgagcccaccaccaccaacgagtgccccagccccgacaccagccagaacacctgcaagagcccccccaagatgagcaagcccggcagccccggcagcgtgatccccgcccaggcccacggcaagatcttcaccaagcccgacccccagtgggacagcaccgtgagcgccagcgaggccgagaacggcgtgcacctgaagaccgagctgcagcagaagcagctgagcaacaacaaccaggccctgagcaagaaccaccccccccagacccacgtgagaaacagcagcgagcagctgagccagaagctgcccagcgtgcccaccaagctgcactgcccccccagcccccacctggagaacccccccaagagcagcaccccccacacccccgtgcagcacggctacctgagccccaagccccccagccagcagctgggcagcccctacagaccccaccacagccagagcccccaggtgggcaccccccagagagagccccagagaaacttctaccccgccgcccagaacctgcccgccaacacccagcaggccaccagcggcaccctgttcacccagacccccagcggccagagcagcgccacctacacccagagatag

SEQ ID NO: 89865 - DNA, 5337 bp, synthetic construct
  misc_feature 1..5337: note = Description of Artificial Sequence: Synthetic coding sequence
  source 1..5337: mol_type = other DNA
atgagcatcgtgatccccctgggcgtggacaccgccgagaccagctacctggagatggccgccggcagcgagcccgagagcgtggaggccagccccgtggtggtggagaagagcaacagctacccccaccagctgtacaccagcagcagccaccacagccacagctacatcggcctgccctacgccgaccacaactacggcgccagacccccccccaccccccccgccagccccccccccagcgtgctgatcagcaagaacgaggtgggcatcttcaccacccccaacttcgacgagaccagcagcgccaccaccatcagcaccagcgaggacggcagctacggcaccgacgtgaccagatgcatctgcggcttcacccacgacgacggctacatgatctgctgcgacaagtgcagcgtgtggcagcacatcgactgcatgggcatcgacagacagcacatccccgacacctacctgtgcgagagatgccagcccagaaacctggacaaggagagagccgtgctgctgcagagaagaaagagagagaacatgagcgacggcgacaccagcgccaccgagagcggcgacgaggtgcccgtggagctgtacaccgccttccagcacacccccaccagcatcaccctgaccgccagcagagtgagcaaggtgaacgacaagagaagaaagaagagcggcgagaaggagcagcacatcagcaagtgcaagaaggccttcagagagggcagcagaaagagcagcagagtgaagggcagcgcccccgagatcgaccccagcagcgacggcagcaacttcggctgggagaccaagatcaaggcctggatggacagatacgaggaggccaacaacaaccagtacagcgagggcgtgcagagagaggcccagagaatcgccctgagactgggcaacggcaacgacaagaaggagatgaacaagagcgacctgaacaccaacaacctgctgttcaagccccccgtggagagccacatccagaagaacaagaagatcctgaagagcgccaaggacctgccccccgacgccctgatcatcgagtacagaggcaagttcatgctgagagagcagttcgaggccaacggctacttcttcaagagaccctaccccttcgtgctgttctacagcaagttccacggcctggagatgtgcgtggacgccagaaccttcggcaacgaggccagattcatcagaagaagctgcacccccaacgccgaggtgagacacgagatccaggacggcaccatccacctgtacatctacagcatccacagcatccccaagggcaccgagatcaccatcgccttcgacttcgactacggcaactgcaagtacaaggtggactgcgcctgcctgaaggagaaccccgagtgccccgtgctgaagagaagcagcgagagcatggagaacatcaacagcggctacgagaccagaagaaagaagggcaagaagaccagagaggagagaaagatggaggccatcctgcaggccttcgccagactggagaagagagagaagagaagagagcaggccctggagagaatcagcaccgccaagaccgaggtgaagaccgagtgcaaggacacccagatcgtgagcgacgccgaggtgatccaggagcaggccaaggaggagaacgccagcaagcccacccccgccaaggtgaacagaaccaagcagagaaagagcttcagcagaagcagaacccacatcggccagcagagaagaagacacagaaccgtgagcatgtgcagcgacatccagcccagcagccccgacatcgaggtgaccagccagcagaacgacatcgagaacaccgtgctgaccatcgagcccgagaccgagaccgccctggccgagatcatcaccgagaccgaggtgcccgccctgaacaagtgccccaccaagtaccccaagaccaagaagcacctggtgaacgagtggctgagcgagaagaacgagaagaccggcaagcccagcgacggcctgagcgagagacccctgagaatcaccaccgaccccgaggtgctggccacccagctgaacagcctgcccggcctgacctacagcccccacgtgtacagcacccccaagcactacatcagattcaccagccccttcctgagcgagaagagaagaagaaaggagcccaccgagaacatcagcggcagctgcaagaagagatggctgaagcaggccctggaggaggagaacagcgccatcctgcacagattcaacagcccctgccaggagagaagcagaagccccgccgtgaacggcgagaacaagagccccctgctgctgaacgacagctgcagcctgcccgacctgaccacccccctgaagaagagaagattctaccagctgctggacagcgtgtacagcgagaccagcacccccacccccagcccctacgccacccccacccacaccgacatcacccccatggaccccagcttcgccaccccccccagaatcaagagcgacgacgagacctgcagaaacggctacaagcccatctacagccccgtgacccccgtgacccccggcacccccggcaacaccatgcacttcgagaacatcagcagccccgagagcagccccgagatcaagagaagaacctacagccaggagggctacgacagaagcagcaccatgctgaccctgggccccttcagaaacagcaacctgaccgagctgggcctgcaggagatcaagaccatcggctacaccagccccagaagcagaaccgaggtgaacagacagtgccccggcgagaaggagcccgtgagcgacctgcagctgggcctggacgccgtggagcccaccgccctgcacaagaccctggagacccccgcccacgacagagccgagcccaacagccagctggacagcacccacagcggcagaggcaccatgtacagcagctgggtgaagagccccgacagaaccggcgtgaacttcagcgtgaacagcaacctgagagacctgacccccagccaccagctggaggtgggcggcggcttcagaatcagcgagagcaagtgcctgatgcaggacgacaccagaggcatgttcatggagaccaccgtgttctgcaccagcgaggacggcctggtgagcggcttcggcagaaccgtgaacgacaacctgatcgacggcaactgcaccccccagaaccccccccagaagaagaaggtgagcctgctggagtacagaaagagacagagagaggccagaaagagcggcagcaagaccgagaacttccccctgatcagcgtgagcccccacgccagcggcagcctgagcaacaacggcgacggctgcgccagcagcaacgacaacggcgagcaggtggaccacaccgccagcctgcccctgcccacccccgccaccgtgtacaacgccaccagcgaggagaccagcaacaactgccccgtgaaggacgccaccgccagcgagaagaacgagcccgaggtgcagtggaccgccagcaccagcgtggagcaggtgagagagagaagctaccagagagccctgctgctgagcgaccacagaaaggacaaggacagcggcggcgagagcccctgcgtgagctgcagccccagccacgtgcagagcagccccagcagccacagcaaccacatcccccagctgcaggccaagggccccgtgcccagcttcagcgagctgatggaggaccccgaccccgagaaccccgagcccaccaccaccaacgagtgccccagccccgacaccagccagaacacctgcaagagcccccccaagatgagcaagcccggcagccccggcagcgtgatccccgcccaggcccacggcaagatcttcaccaagcccgacccccagtgggacagcaccgtgagcgccagcgaggccgagaacggcgtgcacctgaagaccgagctgcagcagaagcagctgagcaacaacaaccaggccctgagcaagaaccaccccccccagacccacgtgagaaacagcagcgagcagctgagccagaagctgcccagcgtgcccaccaagctgcactgcccccccagcccccacctggagaacccccccaagagcagcaccccccacacccccgtgcagcacggctacctgagccccaagccccccagccagcagctgggcagcccctacagaccccaccacagccagagcccccaggtgggcaccccccagagagagccccagagaaacttctaccccgccgcccagaacctgcccgccaacacccagcaggccaccagcggcaccctgttcacccagacccccagcggccagagcagcgccacctacagccagttcaaccagcagagcctgaacagcaccgcccccccccccccccccccccccccccccagcagcagctactaccagaaccagcagcccagcgccaacttccagaactacaaccagctgaagggcagcctgagccagcagaccgtgttcaccagcggccccaaccaggccctgcccggcaccaccagccagcagaccgtgcccggccaccacgtgacccccggccacttcctgcccagccagaaccccaccatccaccaccagaccgccgccgccgtggtgccccccccccccccccccccccccgcccccggcccccacctggtgcagcagcccaacagccaccagcagcacagcgtggcccacgtggtgggccccgtgcacgccgtgacccccggcagccacatccacagccagaccgccggccaccacctgcccccccccccccccccccccggccccgccccccaccaccacccccccccccaccccagcaccggcctgcagggcctgcaggcccagcaccagcacgtggtgaacagcgcccccccccccccccccccccccccccccagcagcgtgctggccagcggccaccacaccaccagcgcccaggccctgcaccaccccccccaccagggcccccccctgttccccagcagcgcccaccccaccgtgcccccctaccccagccaggccacccaccacaccaccctgggccccggcccccagcaccagcccagcggcaccggcccccactgccccctgcccgtgaccggcccccacctgcagccccagggccccaacagcatccccacccccaccgccagcggcttctgcccccaccccggcagcgtggccctgccccacggcgtgcagggcccccagcaggccagccccgtgcccggccagatccccatccacagagcccaggtgccccccaccttccagaacaactaccacggcagcggctggcactag

SEQ ID NO: 89866 - DNA, 4962 bp, synthetic construct
  misc_feature 1..4962: note = Description of Artificial Sequence: Synthetic coding sequence
  source 1..4962: mol_type = other DNA
atgagcatcgtgatccccctgggcgtggacaccgccgagaccagctacctggagatggccgccggcagcgagcccgagagcgtggaggccagccccgtggtggtggagaagagcaacagctacccccaccagctgtacaccagcagcagccaccacagccacagctacatcggcctgccctacgccgaccacaactacggcgccagacccccccccaccccccccgccagccccccccccagcgtgctgatcagcaagaacgaggtgggcatcttcaccacccccaacttcgacgagaccagcagcgccaccaccatcagcaccagcgaggacggcagctacggcaccgacgtgaccagatgcatctgcggcttcacccacgacgacggctacatgatctgctgcgacaagtgcagcgtgtggcagcacatcgactgcatgggcatcgacagacagcacatccccgacacctacctgtgcgagagatgccagcccagaaacctggacaaggagagagccgtgctgctgcagagaagaaagagagagaacatgagcgacggcgacaccagcgccaccgagagcggcgacgaggtgcccgtggagctgtacaccgccttccagcacacccccaccagcatcaccctgaccgccagcagagtgagcaaggtgaacgacaagagaagaaagaagagcggcgagaaggagcagcacatcagcaagtgcaagaaggccttcagagagggcagcagaaagagcagcagagtgaagggcagcgcccccgagatcgaccccagcagcgacggcagcaacttcggctgggagaccaagatcaaggcctggatggacagatacgaggaggccaacaacaaccagtacagcgagggcgtgcagagagaggcccagagaatcgccctgagactgggcaacggcaacgacaagaaggagatgaacaagagcgacctgaacaccaacaacctgctgttcaagccccccgtggagagccacatccagaagaacaagaagatcctgaagagcgccaaggacctgccccccgacgccctgatcatcgagtacagaggcaagttcatgctgagagagcagttcgaggccaacggctacttcttcaagagaccctaccccttcgtgctgttctacagcaagttccacggcctggagatgtgcgtggacgccagaaccttcggcaacgaggccagattcatcagaagaagctgcacccccaacgccgaggtgagacacgagatccaggacggcaccatccacctgtacatctacagcatccacagcatccccaagggcaccgagatcaccatcgccttcgacttcgactacggcaactgcaagtacaaggtggactgcgcctgcctgaaggagaaccccgagtgccccgtgctgaagagaagcagcgagagcatggagaacatcaacagcggctacgagaccagaagaaagaagggcaagaaggacaaggacatcagcaaggagaaggacacccagaaccagaacatcaccctggactgcgagggcaccaccaacaagatgaagagccccgagaccaagcagagaaagctgagccccctgagactgagcgtgagcaacaaccaggagcccgacttcatcgacgacatcgaggagaagacccccatcagcaacgaggtggagatggagagcgaggagcagatcgccgagagaaagagaaagatgaccagagaggagagaaagatggaggccatcctgcaggccttcgccagactggagaagagagagaagagaagagagcaggccctggagagaatcagcaccgccaagaccgaggtgaagaccgagtgcaaggacacccagatcgtgagcgacgccgaggtgatccaggagcaggccaaggaggagaacgccagcaagcccacccccgccaaggtgaacagaaccaagcagagaaagagcttcagcagaagcagaacccacatcggccagcagagaagaagacacagaaccgtgagcatgtgcagcgacatccagcccagcagccccgacatcgaggtgaccagccagcagaacgacatcgagaacaccgtgctgaccatcgagcccgagaccgagaccgccctggccgagatcatcaccgagaccgaggtgcccgccctgaacaagtgccccaccaagtaccccaagaccaagaagcacctggtgaacgagtggctgagcgagaagaacgagaagaccggcaagcccagcgacggcctgagcgagagacccctgagaatcaccaccgaccccgaggtgctggccacccagctgaacagcctgcccggcctgacctacagcccccacgtgtacagcacccccaagcactacatcagattcaccagccccttcctgagcgagaagagaagaagaaaggagcccaccgagaacatcagcggcagctgcaagaagagatggctgaagcaggccctggaggaggagaacagcgccatcctgcacagattcaacagcccctgccaggagagaagcagaagccccgccgtgaacggcgagaacaagagccccctgctgctgaacgacagctgcagcctgcccgacctgaccacccccctgaagaagagaagattctaccagctgctggacagcgtgtacagcgagaccagcacccccacccccagcccctacgccacccccacccacaccgacatcacccccatggaccccagcttcgccaccccccccagaatcaagagcgacgacgagacctgcagaaacggctacaagcccatctacagccccgtgacccccgtgacccccggcacccccggcaacaccatgcacttcgagaacatcagcagccccgagagcagccccgagatcaagagaagaacctacagccaggagggctacgacagaagcagcaccatgctgaccctgggccccttcagaaacagcaacctgaccgagctgggcctgcaggagatcaagaccatcggctacaccagccccagaagcagaaccgaggtgaacagacagtgccccggcgagaaggagcccgtgagcgacctgcagctgggcctggacgccgtggagcccaccgccctgcacaagaccctggagacccccgcccacgacagagccgagcccaacagccagctggacagcacccacagcggcagaggcaccatgtacagcagctgggtgaagagccccgacagaaccggcgtgaacttcagcgtgaacagcaacctgagagacctgacccccagccaccagctggaggtgggcggcggcttcagaatcagcgagagcaagtgcctgatgcaggacgacaccagaggcatgttcatggagaccaccgtgttctgcaccagcgaggacggcctggtgagcggcttcggcagaaccgtgaacgacaacctgatcgacggcaactgcaccccccagaaccccccccagaagaagaaggtgagcctgctggagtacagaaagagacagagagaggccagaaagagcggcagcaagaccgagaacttccccctgatcagcgtgagcccccacgccagcggcagcctgagcaacaacggcgacggctgcgccagcagcaacgacaacggcgagcaggtggaccacaccgccagcctgcccctgcccacccccgccaccgtgtacaacgccaccagcgaggagaccagcaacaactgccccgtgaaggacgccaccgccagcgagaagaacgagcccgaggtgcagtggaccgccagcaccagcgtggagcaggtgagagagagaagctaccagagagccctgctgctgagcgaccacagaaaggacaaggacagcggcggcgagagcccctgcgtgagctgcagccccagccacgtgcagagcagccccagcagccacagcaaccacatcccccagctgcaggccaagggccccgtgcccagcttcagcgagctgatggaggaccccgaccccgagaaccccgagcccaccaccaccaacgagtgccccagccccgacaccagccagaacacctgcaagagcccccccaagatgagcaagcccggcagccccggcagcgtgatccccgcccaggcccacggcaagatcttcaccaagcccgacccccagtgggacagcaccgtgagcgccagcgaggccgagaacggcgtgcacctgaagaccgagctgcagcagaagcagctgagcaacaacaaccaggccctgagcaagaaccaccccccccagacccacgtgagaaacagcagcgagcagctgagccagaagctgcccagcgtgcccaccaagctgcactgcccccccagcccccacctggagaacccccccaagagcagcaccccccacacccccgtgcagcacggctacctgagccccaagccccccagccagcagctgggcagcccctacagaccccaccacagccagagcccccaggtgggcaccccccagagagagccccagagaaacttctaccccgccgcccagaacctgcccgtgttctggctgctgggcatcatcccccaccagctgaagccctacaccacccacctgatcaaggacctgcacttcttcctgagagtgctgatccagctgtaccacagaatcccccacaagctgcacatcatccccctgtgggacagagaccccagcaccagcctgctggagcagggccacatcgtgcactacctgagccaggtgctgatcagcagccccaaggaccagaccgtgttccagcacctgctgctgcagggcagcgtgctgatcctggccctgtggccctgccacatgggcttcaaggacctgagcagacacctgcagtgcctggacagattccagttcaccgagcacagatgccaccagcacttcaagaccatcaccatgggccagggcggcatcaagatggacagcaagaacatcttcctgaacgtgctgtag

SEQ ID NO: 89867 - DNA, 378 bp, synthetic construct
  misc_feature 1..378: note = Description of Artificial Sequence: Synthetic coding sequence
  source 1..378: mol_type = other DNA
tgaggcagcctgagcaacaacggcgacggctgcgccagcagcaacgacaacggcgagcaggtggaccacaccgccagcctgcccctgcccacccccgccaccgtgtacaacgccaccagcgaggagaccagcaacaactgccccgtgaaggacgccaccgccagcgagaagaacgagcccgaggtgcagtggaccgccagcaccagcgtggagcaggtgagagagagaagctaccagagagccctgctgctgagcgaccacagaaaggacaaggacagcgaccccgaccccgagaaccccgagcccaccaccaccaacgagtgccccagccccgacaccagccagaacacctgcaagagcccccccaagatgagctag

SEQ ID NO: 89868 - DNA, 216 bp, synthetic construct
  misc_feature 1..216: note = Description of Artificial Sequence: Synthetic coding sequence
  source 1..216: mol_type = other DNA
atgagcatcgtgatccccctgggcgtggacaccgccgagaccagctacctggagatggccgccggcagcgagcccgagagcgtggaggccagccccgtggtggtggagaagagcaacagctacccccaccagctgtacaccagcagcagccaccacagccacagctacatcggcctgccctacgccgaccacaactacggcgccagacccccctag

SEQ ID NO: 89869 - DNA, 1830 bp, synthetic construct
  misc_feature 1..1830: note = Description of Artificial Sequence: Synthetic coding sequence
  source 1..1830: mol_type = other DNA
atgagcatcgtgatccccctgggcgtggacaccgccgagaccagctacctggagatggccgccggcagcgagcccgagagcgtggaggccagccccgtggtggtggagaagagcaacagctacccccaccagctgtacaccagcagcagccaccacagccacagctacatcggcctgccctacgccgaccacaactacggcgccagacccccccccaccccccccgccagccccccccccagcgtgctgatcagcaagaacgaggtgggcatcttcaccacccccaacttcgacgagaccagcagcgccaccaccatcagcaccagcgaggacggcagctacggcaccgacgtgaccagatgcatctgcggcttcacccacgacgacggctacatgatctgctgcgacaagtgcagcgtgtggcagcacatcgactgcatgggcatcgacagacagcacatccccgacacctacctgtgcgagagatgccagcccagaaacctggacaaggagagagccgtgctgctgcagagaagaaagagagagaacatgagcgacggcgacaccagcgccaccgagagcggcgacgaggtgcccgtggagctgtacaccgccttccagcacacccccaccagcatcaccctgaccgccagcagagtgagcaaggtgaacgacaagagaagaaagaagagcggcgagaaggagcagcacatcagcaagtgcaagaaggccttcagagagggcagcagaaagagcagcagagtgaagggcagcgcccccgagatcgaccccagcagcgacggcagcaacttcggctgggagaccaagatcaaggcctggatggacagatacgaggaggccaacaacaaccagtacagcgagggcgtgcagagagaggcccagagaatcgccctgagactgggcaacggcaacgacaagaaggagatgaacaagagcgacctgaacaccaacaacctgctgttcaagccccccgtggagagccacatccagaagaacaagaagatcctgaagagcgccaaggacctgccccccgacgccctgatcatcgagtacagaggcaagttcatgctgagagagcagttcgaggccaacggctacttcttcaagagaccctaccccttcgtgctgttctacagcaagttccacggcctggagatgtgcgtggacgccagaaccttcggcaacgaggccagattcatcagaagaagctgcacccccaacgccgaggtgagacacgagatccaggacggcaccatccacctgtacatctacagcatccacagcatccccaagggcaccgagatcaccatcgccttcgacttcgactacggcaactgcaagtacaaggtggactgcgcctgcctgaaggagaaccccgagtgccccgtgctgaagagaagcagcgagagcatggagaacatcaacagcggctacgagaccagaagaaagaagggcaagaaggacaaggacatcagcaaggagaaggacacccagaaccagaacatcaccctggactgcgagggcaccaccaacaagatgaagagccccgagaccaagcagagaaagctgagccccctgagactgagcgtgagcaacaaccaggagcccgacttcatcgacgacatcgaggagaagacccccatcagcaacgaggtggagatggagagcgaggagcagatcgccgagagaaagagaaagatggtgagctgggaggccagcagcctgggcctggtgaccgccgccctgcacatggtgatcgtggccgccttcacctgggccttcaccctgttcttcgaggtgagcgagtag

SEQ ID NO: 89870 - DNA, 693 bp, synthetic construct
  misc_feature 1..693: note = Description of Artificial Sequence: Synthetic coding sequence
  source 1..693: mol_type = other DNA
atgagcatcgtgatccccctgggcgtggacaccgccgagaccagctacctggagatggccgccggcagcgagcccgagagcgtggaggccagccccgtggtggtggagaagagcaacagctacccccaccagctgtacaccagcagcagccaccacagccacagctacatcggcctgccctacgccgaccacaactacggcgccagacccccccccaccccccccgccagccccccccccagcgtgctgatcagcaagaacgaggtgggcatcttcaccacccccaacttcgacgagaccagcagcgccaccaccatcagcaccagcgaggacggcagctacggcaccgacgtgaccagatgcatctgcggcttcacccacgacgacggctacatgatctgctgcgacaagtgcagcgtgtggcagcacatcgactgcatgggcatcgacagacagcacatccccgacacctacctgtgcgagagatgccagcccagaaacctggacaaggagagagccgtgctgctgcagagaagaaagagagagaacatgagcgacggcgacaccagcgccaccgagagcggcgacgaggtgcccgtggagctgtacaccgccttccagcacacccccaccagcatcaccctgaccgccagcagagtgagcaaggtgaacgacaagagaagaaagaagtag

SEQ ID NO: 89871 - DNA, 1362 bp, synthetic construct
  misc_feature 1..1362: note = Description of Artificial Sequence: Synthetic coding sequence
  source 1..1362: mol_type = other DNA
atggtgctggtgctgagcgacaccagcgccagccccccccccagcgtgctgatcagcaagaacgaggtgggcatcttcaccacccccaacttcgacgagaccagcagcgccaccaccatcagcaccagcgaggacggcagctacggcaccgacgtgaccagatgcatctgcggcttcacccacgacgacggctacatgatctgctgcgacaagtgcagcgtgtggcagcacatcgactgcatgggcatcgacagacagcacatccccgacacctacctgtgcgagagatgccagcccagaaacctggacaaggagagagccgtgctgctgcagagaagaaagagagagaacatgagcgacggcgacaccagcgccaccgagagcggcgacgaggtgcccgtggagctgtacaccgccttccagcacacccccaccagcatcaccctgaccgccagcagagtgagcaaggtgaacgacaagagaagaaagaagagcggcgagaaggagcagcacatcagcaagtgcaagaaggccttcagagagggcagcagaaagagcagcagagtgaagggcagcgcccccgagatcgaccccagcagcgacggcagcaacttcggctgggagaccaagatcaaggcctggatggacagatacgaggaggccaacaacaaccagtacagcgagggcgtgcagagagaggcccagagaatcgccctgagactgggcaacggcaacgacaagaaggagatgaacaagagcgacctgaacaccaacaacctgctgttcaagccccccgtggagagccacatccagaagaacaagaagatcctgaagagcgccaaggacctgccccccgacgccctgatcatcgagtacagaggcaagttcatgctgagagagcagttcgaggccaacggctacttcttcaagagaccctaccccttcgtgctgttctacagcaagttccacggcctggagatgtgcgtggacgccagaaccttcggcaacgaggccagattcatcagaagaagctgcacccccaacgccgaggtgagacacgagatccaggacggcaccatccacctgtacatctacagcatccacagcatccccaagggcaccgagatcaccatcgccttcgacttcgactacggcaactgcaagtacaaggtggactgcgcctgcctgaaggagaaccccgagtgccccgtgctgaagagaagcagcgagagcatggagaacatcaacagcggctacgagaccagaagaaagaagggcaagaagaccaagatcttccagaagaagaagatccacaagatcagaatcctgctgtggatcgtgaaggagagacccaccaagtag

SEQ ID NO: 89872 - DNA, 969 bp, synthetic construct
  misc_feature 1..969: note = Description of Artificial Sequence: Synthetic coding sequence
  source 1..969: mol_type = other DNA
atgcccgtgaccgtgaccagaaccaccatcaccaccaccaccaccagcagcagcggcctgggcagccccatgatcgtgggcagccccagagccctgacccagcccctgggcctgctgagactgctgcagctggtgagcacctgcgtggccttcagcctggtggccagcgtgggcgcctggaccggcagcatgggcaactggagcatgttcacctggtgcttctgcttcagcgtgaccctgatcatcctgatcgtggagctgtgcggcctgcaggccagattccccctgagctggagaaacttccccatcaccttcgcctgctacgccgccctgttctgcctgagcgccagcatcatctaccccaccacctacgtgcagttcctgagccacggcagaagcagagaccacgccatcgccgccaccttcttcagctgcatcgcctgcgtggcctacgccaccgaggtggcctggaccagagccagacccggcgagatcaccggctacatggccaccgtgcccggcctgctgaaggtgctggagaccttcgtggcctgcatcatcttcgccttcatcagcgaccccaacctgtaccagcaccagcccgccctggagtggtgcgtggccgtgtacgccatctgcttcatcctggccgccatcgccatcctgctgaacctgggcgagtgcaccaacgtgctgcccatccccttccccagcttcctgagcggcctggccctgctgagcgtgctgctgtacgccaccgccctggtgctgtggcccctgtaccagttcgacgagaagtacggcggccagcccagaagaagcagagacgtgagctgcagcagaagccacgcctactacgtgtgcgcctgggacagaagactggccgtggccatcctgaccgccatcaacctgctggcctacgtggccgacctggtgcacagcgcccacctggtgttcgtgaaggtgtag

SEQ ID NO: 89873 - DNA, 969 bp, synthetic construct; identical to SEQ ID NO: 89872
  misc_feature 1..969: note = Description of Artificial Sequence: Synthetic coding sequence
  source 1..969: mol_type = other DNA

SEQ ID NO: 89874 - DNA, 969 bp, synthetic construct; identical to SEQ ID NO: 89872
  misc_feature 1..969: note = Description of Artificial Sequence: Synthetic coding sequence
  source 1..969: mol_type = other DNA

SEQ ID NO: 89875 - DNA, 969 bp, synthetic construct; identical to SEQ ID NO: 89872
  misc_feature 1..969: note = Description of Artificial Sequence: Synthetic coding sequence
  source 1..969: mol_type = other DNA

SEQ ID NO: 89876 - DNA, 969 bp, synthetic construct; identical to SEQ ID NO: 89872
  misc_feature 1..969: note = Description of Artificial Sequence: Synthetic coding sequence
  source 1..969: mol_type = other DNA

SEQ ID NO: 89877 - DNA, 444 bp, synthetic construct
  misc_feature 1..444: note = Description of Artificial Sequence: Synthetic coding sequence
  source 1..444: mol_type = other DNA
atgcccgtgaccgtgaccagaaccaccatcaccaccaccaccaccagcagcagcggcctgggcagccccatgatcgtgggcagccccagagccctgacccagcccctgggcctgctgagactgctgcagctggtgagcacctgcgtggccttcagcctggtggccagcgtgggcgcctggaccggcagcatgggcaactggagcatgttcacctggtgcttctgcttcagcgtgaccctgatcatcctgatcgtggagctgtgcggcctgcaggccagattccccctgagctggagaaacttccccatcaccttcgcctgctacgccgccctgttctgcctgagcgccagcatcatctaccccaccacctacgtgcagttcctgagccacggcagaagcagagaccacgccatcgccgccaccttcttcagctgcatcgcctag

SEQ ID NO: 89878 - DNA, 858 bp, synthetic construct
  misc_feature 1..858: note = Description of Artificial Sequence: Synthetic coding sequence
  source 1..858: mol_type = other DNA
atgcccgtgaccgtgaccagaaccaccatcaccaccaccaccaccagcagcagcggcctgggcagccccatgatcgtgggcagccccagagccctgacccagcccctgggcctgctgagactgctgcagctggtgagcacctgcgtggccttcagcctggtggccagcgtgggcgcctggaccggcagcatgggcaactggagcatgttcacctggtgcttctgcttcagcgtgaccctgatcatcctgatcgtggagctgtgcggcctgcaggccagattccccctgagctggagaaacttccccatcaccttcttcagctgcatcgcctgcgtggcctacgccaccgaggtggcctggaccagagccagacccggcgagatcaccggctacatggccaccgtgcccggcctgctgaaggtgctggagaccttcgtggcctgcatcatcttcgccttcatcagcgaccccaacctgtaccagcaccagcccgccctggagtggtgcgtggccgtgtacgccatctgcttcatcctggccgccatcgccatcctgctgaacctgggcgagtgcaccaacgtgctgcccatccccttccccagcttcctgagcggcctggccctgctgagcgtgctgctgtacgccaccgccctggtgctgtggcccctgtaccagttcgacgagaagtacggcggccagcccagaagaagcagagacgtgagctgcagcagaagccacgcctactacgtgtgcgcctgggacagaagactggccgtggccatcctgaccgccatcaacctgctggcctacgtggccgacctggtgcacagcgcccacctggtgttcgtgaaggtgtag

SEQ ID NO: 89879 - DNA, 729 bp, synthetic construct
  misc_feature 1..729: note = Description of Artificial Sequence: Synthetic coding sequence
  source 1..729: mol_type = other DNA
atgcccgtgaccgtgaccagaaccaccatcaccaccaccaccaccagcagcagcggcctgggcagccccatgatcgtgggcagccccagagccctgacccagcccctgggcctgctgagactgctgcagctggtgagcacctgcgtggccttcagcctggtggccagcgtgggcgcctggaccggcagcatgggcaactggagcatgttcacctggtgcttctgcttcagcgtgaccctgatcatcctgatcgtggagctgtgcggcctgcaggccagattccccctgagctggagaaacttccccatcaccttcgcctgctacgccgccctgttctgcctgagcgccagcatcatctaccccaccacctacgtgcagttcctgagccacggcagaagcagagaccacgccatcgccgccaccttcttcagctgcatcgcctgcgtggcctacgccaccgaggtggcctggaccagagccagacccggcgagatcaccggctacatggccaccgtgcccggcctgctgaaggtgctggagaccttcgtggcctgcatcatcttcgccttcatcagcgaccccaacctgtaccagcaccagcccgccctggagtggtgcgtggccgtgtacgccatctgcttcatcctggccgccatcgccatcctgctgaacctgggcgagtgcaccaacgtgctgcccatccccttccccagcttcctgagcggctag

SEQ ID NO: 89880 - DNA, 780 bp, synthetic construct
  misc_feature 1..780: note = Description of Artificial Sequence: Synthetic coding sequence
  source 1..780: mol_type = other DNA
atgcccgtgaccgtgaccagaaccaccatcaccaccaccaccaccagcagcagcggcctgggcagccccatgatcgtgggcagccccagagccctgacccagcccctgggcctgctgagactgctgcagctggtgagcacctgcgtggccttcagcctggtggccagcgtgggcgcctggaccggcagcatgggcaactggagcatgttcacctggtgcttctgcttcagcgtgaccctgatcatcctgatcgtggagctgtgcggcctgcaggccagattccccctgagctggagaaacttccccatcaccttcgcctgctacgccgccctgttctgcctgagcgccagcatcatctaccccaccacctacgtgcagttcctgagccacggcagaagcagagaccacgccatcgccgccaccttcttcagctgcatcgcctgcgtggcctacgccaccgaggtggcctggaccagagccagacccggcgagatcaccggctacatggccaccgtgcccggcctgctgaaggtgctggagaccttcgtggcctgcatcatcttcgccttcatcagcgaccccaacctgtaccagcaccagcccgccctggagtggtgcgtggccgtgtacgccatctgcttcatcctggccgccatcgccatcctgctgaacctgggcgagtgcaccaacgtgctgcccatccccttccccagcttcctgagcggcctggccctgctgagcgtgctgctgtacgccaccgccctggtgctgtggccctag

SEQ ID NO: 89881 - DNA, 567 bp, synthetic construct
  misc_feature 1..567: note = Description of Artificial Sequence: Synthetic coding sequence
  source 1..567: mol_type = other DNA
atgcccgtgaccgtgaccagaaccaccatcaccaccaccaccaccagcagcagcggcctgggcagccccatgatcgtgggcagccccagagccctgacccagcccctgggcctgctgagactgctgcagctggtgagcacctgcgtggccttcagcctggtggccagcgtgggcgcctggaccggcagcatgggcaactggagcatgttcacctggtgcttctgcttcagcgtgaccctgatcatcctgatcgtggagctgtgcggcctgcaggccagattccccctgagctggagaaacttccccatcaccttcgcctgctacgccgccctgttctgcctgagcgccagcatcatctaccccaccacctacgtgcagttcctgagccacggcagaagcagagaccacgccatcgccgccaccttcttcagctgcatcgcctgcgtggcctacgccaccgaggtggcctggaccagagccagacccggcgagatcaccggctacatggccaccgtgcccggcctgctgaaggtgctggagaccttcgtggcctgcatcatcttctag

SEQ ID NO: 89882 - DNA, 942 bp, synthetic construct
  misc_feature 1..942: note = Description of Artificial Sequence: Synthetic coding sequence
  source 1..942: mol_type = other DNA
atggccctgagaatctgcgtgacctacacccccgccctgcccatcggcctgtgcaccagatgctgcctgtgcctggagcagagccccagctggtgccactgcctgagaggcgtgagcttcctgaccttccacctgcaccagagcgtgcccctgggcgacagagacagcctgctgatgttcaccagacaggccggccacttcgtggagggcagcaaggccggcagaagcagaggcagactgtgcctgagccaggccctgagagtggccgtgagaggcgccttcgtgagcctgtggttcgccgccggcgccggcgacagagagagaaacaagggcgacaagggcgcccagaccggcgccggcctgagccaggaggccgaggacgtggacgtgagcagagccagaagagtgaccgacgccccccagggcaccctgtgcggcaccggcaacagaaacagcggcagccagagcgccagagtggtgggcgtggcccacctgggcgaggccttcagagtgggcgtggagcaggccatcagcagctgccccgaggaggtgcacggcagacacggcctgagcatggagatcatgtgggccagaatggacgtggccctgagaagccccggcagaggcctgctggccggcgccggcgccctgtgcatgaccctggccgagagcagctgccccgactacgagagaggcagaagagcctgcctgaccctgcacagacaccccaccccccactgcagcacctggggcctgcccctgagagtggccggcagctggctgaccgtggtgaccgtggaggccctgggcggctggagaatgggcgtgagaagaaccggccaggtgggccccaccatgcaccccccccccgtgagcggcgccagccccctgctgctgcaccacctgctgctgctgctgctgatcatcatcctgacctgctag

SEQ ID NO: 89883 - DNA, 942 bp, synthetic construct; identical to SEQ ID NO: 89882
  misc_feature 1..942: note = Description of Artificial Sequence: Synthetic coding sequence
  source 1..942: mol_type = other DNA

SEQ ID NO: 89884 - DNA, 279 bp, synthetic construct
  misc_feature 1..279: note = Description of Artificial Sequence: Synthetic coding sequence
  source 1..279: mol_type = other DNA
atgcaggtgagcaccgccgccctggccgtgctgctgtgcaccatggccctgtgcaaccagttcagcgccagcctggccgccgacacccccaccgcctgctgcttcagctacaccagcagacagatcccccagaacttcatcgccgactacttcgagaccagcagccagtgcagcaagcccggcgtgatcttcctgaccaagagaagcagacaggtgtgcgccgaccccagcgaggagtgggtgcagaagtacgtgagcgacctggagctgagcgcctag

SEQ ID NO: 89885 - DNA, 2334 bp, synthetic construct
  misc_feature 1..2334: note = Description of Artificial Sequence: Synthetic coding sequence
  source 1..2334: mol_type = other DNA
atgggcgtgcccttcttcagcagcctgagatgcatggtggacctgggcccctgctgggccggcggcctgaccgccgagatgaagctgctgctggccctggccggcctgctggccatcctggccaccccccagcccagcgagggcgccgcccccgccgtgctgggcgaggtggacaccagcctggtgctgagcagcatggaggaggccaagcagctggtggacaaggcctacaaggagagaagagagagcatcaagcagagactgagaagcggcagcgccagccccatggagctgctgagctacttcaagcagcccgtggccgccaccagaaccgccgtgagagccgccgactacctgcacgtggccctggacctgctggagagaaagctgagaagcctgtggagaagacccttcaacgtgaccgacgtgctgacccccgcccagctgaacgtgctgagcaagagcagcggctgcgcctaccaggacgtgggcgtgacctgccccgagcaggacaagtacagaaccatcaccggcatgtgcaacaacagatgcggctggctgggcgtggccgccggcaccggcctgagagaggccagcagaaccccccaggccagcagatgccagagacccgtgctgccctgcagaagaagccccaccctgggcgccagcaacagagccttcgtgagatggctgcccgccgagtacgaggacggcttcagcctgccctacggctggacccccggcgtgaagagaaacggcttccccgtggccctggccagagccgtgagcaacgagatcgtgagattccccaccgaccagctgacccccgaccaggagagaagcctgatgttcatgcagtggggccagctgctggaccacgacctggacttcacccccgagcccgccgccagagccagcttcgtgaccggcgtgaactgcgagaccagctgcgtgcagcagcccccctgcttccccctgaagatcccccccaacgaccccagaatcaagaaccaggccgactgcatccccttcttcagaagctgccccgcctgccccggcagcaacatcaccatcagaaaccagatcaacgccctgaccagcttcgtggacgccagcatggtgtacggcagcgaggagcccctggccagaaacctgagaaacatgagcaaccagctgggcctgctggccgtgaaccagagattccaggacaacggcagagccctgctgcccttcgacaacctgcacgacgacccctgcctgctgaccaacagaagcgccagaatcccctgcttcctggccggcgacaccagaagcagcgagatgcccgagctgaccagcatgcacaccctgctgctgagagagcacaacagactggccaccgagctgaagagcctgaaccccagatgggacggcgagagactgtaccaggaggccagaaagatcgtgggcgccatggtgcagatcatcacctacagagactacctgcccctggtgctgggccccaccgccatgagaaagtacctgcccacctacagaagctacaacgacagcgtggaccccagaatcgccaacgtgttcaccaacgccttcagatacggccacaccctgatccagcccttcatgttcagactggacaacagataccagcccatggagcccaaccccagagtgcccctgagcagagtgttcttcgccagctggagagtggtgctggagggcggcatcgaccccatcctgagaggcctgatggccacccccgccaagctgaacagacagaaccagatcgccgtggacgagatcagagagagactgttcgagcaggtgatgagaatcggcctggacctgcccgccctgaacatgcagagaagcagagaccacggcctgcccggctacaacgcctggagaagattctgcggcctgccccagcccgagaccgtgggccagctgggcaccgtgctgagaaacctgaagctggccagaaagctgatggagcagtacggcacccccaacaacatcgacatctggatgggcggcgtgagcgagcccctgaagagaaagggcagagtgggccccctgctggcctgcatcatcggcacccagttcagaaagctgagagacggcgacagattctggtgggagaacgagggcgtgttcagcatgcagcagagacaggccctggcccagatcagcctgcccagaatcatctgcgacaacaccggcatcaccaccgtgagcaagaacaacatcttcatgagcaacagctaccccagagacttcgtgaactgcagcaccctgcccgccctgaacctggccagctggagagaggccagctag

SEQ ID NO: 89886 - DNA, 1542 bp, synthetic construct
  misc_feature 1..1542: note = Description of Artificial Sequence: Synthetic coding sequence
  source 1..1542: mol_type = other DNA
atgcccagctgggccctgttcatggtgaccagctgcctgctgctggccccccagaacctggcccaggtgagcagccaggacgtgagcctgctggccagcgacagcgagcccctgaagtgcttcagcagaaccttcgaggacctgacctgcttctgggacgaggaggaggccgcccccagcggcacctaccagctgctgtacgcctaccccagagagaagcccagagcctgccccctgagcagccagagcatgccccacttcggcaccagatacgtgtgccagttccccgaccaggaggaggtgagactgttcttccccctgcacctgtgggtgaagaacgtgttcctgaaccagaccagaacccagagagtgctgttcgtggacagcgtgggcctgcccgccccccccagcatcatcaaggccatgggcggcagccagcccggcgagctgcagatcagctgggaggagcccgcccccgagatcagcgacttcctgagatacgagctgagatacggccccagagaccccaagaacagcaccggccccaccgtgatccagctgatcgccaccgagacctgctgccccgccctgcagagaccccacagcgccagcgccctggaccagagcccctgcgcccagcccaccatgccctggcaggacggccccaagcagaccagccccagcagagaggccagcgccctgaccgccgagggcggcagctgcctgatcagcggcctgcagcccggcaacagctactggctgcagctgagaagcgagcccgacggcatcagcctgggcggcagctggggcagctggagcctgcccgtgaccgtggacctgcccggcgacgccgtggccctgggcctgcagtgcttcaccctggacctgaagaacgtgacctgccagtggcagcagcaggaccacgccagcagccagggcttcttctaccacagcagagccagatgctgccccagagacagataccccatctgggagaactgcgaggaggaggagaagaccaaccccggcctgcagaccccccagttcagcagatgccacttcaagagcagaaacgacagcatcatccacatcctggtggaggtgaccaccgcccccggcaccgtgcacagctacctgggcagccccttctggatccaccaggccgtgagactgcccacccccaacctgcactggagagagatcagcagcggccacctggagctggagtggcagcaccccagcagctgggccgcccaggagacctgctaccagctgagatacaccggcgagggccaccaggactggaaggtgctggagccccccctgggcgccagaggcggcaccctggagctgagacccagaagcagatacagactgcagctgagagccagactgaacggccccacctaccagggcccctggagcagctggagcgaccccaccagagtggagaccgccaccgagaccgcctggatcagcctggtgaccgccctgcacctggtgctgggcctgagcgccgtgctgggcctgctgctgctgtag

SEQ ID NO: 89887 - DNA, 1908 bp, synthetic construct
  misc_feature 1..1908: note = Description of Artificial Sequence: Synthetic coding sequence
  source 1..1908: mol_type = other DNA
atgcccagctgggccctgttcatggtgaccagctgcctgctgctggccccccagaacctggcccaggtgagcagccaggacgtgagcctgctggccagcgacagcgagcccctgaagtgcttcagcagaaccttcgaggacctgacctgcttctgggacgaggaggaggccgcccccagcggcacctaccagctgctgtacgcctaccccagagagaagcccagagcctgccccctgagcagccagagcatgccccacttcggcaccagatacgtgtgccagttccccgaccaggaggaggtgagactgttcttccccctgcacctgtgggtgaagaacgtgttcctgaaccagaccagaacccagagagtgctgttcgtggacagcgtgggcctgcccgccccccccagcatcatcaaggccatgggcggcagccagcccggcgagctgcagatcagctgggaggagcccgcccccgagatcagcgacttcctgagatacgagctgagatacggccccagagaccccaagaacagcaccggccccaccgtgatccagctgatcgccaccgagacctgctgccccgccctgcagagaccccacagcgccagcgccctggaccagagcccctgcgcccagcccaccatgccctggcaggacggccccaagcagaccagccccagcagagaggccagcgccctgaccgccgagggcggcagctgcctgatcagcggcctgcagcccggcaacagctactggctgcagctgagaagcgagcccgacggcatcagcctgggcggcagctggggcagctggagcctgcccgtgaccgtggacctgcccggcgacgccgtggccctgggcctgcagtgcttcaccctggacctgaagaacgtgacctgccagtggcagcagcaggaccacgccagcagccagggcttcttctaccacagcagagccagatgctgccccagagacagataccccatctgggagaactgcgaggaggaggagaagaccaaccccggcctgcagaccccccagttcagcagatgccacttcaagagcagaaacgacagcatcatccacatcctggtggaggtgaccaccgcccccggcaccgtgcacagctacctgggcagccccttctggatccaccaggccgtgagactgcccacccccaacctgcactggagagagatcagcagcggccacctggagctggagtggcagcaccccagcagctgggccgcccaggagacctgctaccagctgagatacaccggcgagggccaccaggactggaaggtgctggagccccccctgggcgccagaggcggcaccctggagctgagacccagaagcagatacagactgcagctgagagccagactgaacggccccacctaccagggcccctggagcagctggagcgaccccaccagagtggagaccgccaccgagaccgcctggatcagcctggtgaccgccctgcacctggtgctgggcctgagcgccgtgctgggcctgctgctgctgagatggcagttccccgcccactacagaagactgagacacgccctgtggcccagcctgcccgacctgcacagagtgctgggccagtacctgagagacaccgccgccctgagcccccccaaggccaccgtgagcgacacctgcgaggaggtggagcccagcctgctggagatcctgcccaagagcagcgagagaacccccctgcccctgtgcagcagccaggcccagatggactacagaagactgcagcccagctgcctgggcaccatgcccctgagcgtgtgcccccccatggccgagagcggcagctgctgcaccacccacatcgccaaccacagctacctgcccctgagctactggcagcagccctag

SEQ ID NO: 89888 - DNA, 1650 bp, synthetic construct
  misc_feature 1..1650: note = Description of Artificial Sequence: Synthetic coding sequence
  source 1..1650: mol_type = other DNA
atgcccagctgggccctgttcatggtgaccagctgcctgctgctggccccccagaacctggcccaggtgagcagccaggacgtgagcctgctggccagcgacagcgagcccctgaagtgcttcagcagaaccttcgaggacctgacctgcttctgggacgaggaggaggccgcccccagcggcacctaccagctgctgtacgcctaccccagagagaagcccagagcctgccccctgagcagccagagcatgccccacttcggcaccagatacgtgtgccagttccccgaccaggaggaggtgagactgttcttccccctgcacctgtgggtgaagaacgtgttcctgaaccagaccagaacccagagagtgctgttcgtggacagcgtgggcctgcccgccccccccagcatcatcaaggccatgggcggcagccagcccggcgagctgcagatcagctgggaggagcccgcccccgagatcagcgacttcctgagatacgagctgagatacggccccagagaccccaagaacagcaccggccccaccgtgatccagctgatcgccaccgagacctgctgccccgccctgcagagaccccacagcgccagcgccctggaccagagcccctgcgcccagcccaccatgccctggcaggacggccccaagcagaccagccccagcagagaggccagcgccctgaccgccgagggcggcagctgcctgatcagcggcctgcagcccggcaacagctactggctgcagctgagaagcgagcccgacggcatcagcctgggcggcagctggggcagctggagcctgcccgtgaccgtggacctgcccggcgacgccgtggccctgggcctgcagtgcttcaccctggacctgaagaacgtgacctgccagtggcagcagcaggaccacgccagcagccagggcttcttctaccacagcagagccagatgctgccccagagacagataccccatctgggagaactgcgaggaggaggagaagaccaaccccggcctgcagaccccccagttcagcagatgccacttcaagagcagaaacgacagcatcatccacatcctggtggaggtgaccaccgcccccggcaccgtgcacagctacctgggcagccccttctggatccaccaggccgtgagactgcccacccccaacctgcactggagagagatcagcagcggccacctggagctggagtggcagcaccccagcagctgggccgcccaggagacctgctaccagctgagatacaccggcgagggccaccaggactggaaggtgctggagccccccctgggcgccagaggcggcaccctggagctgagacccagaagcagatacagactgcagctgagagccagactgaacggccccacctaccagggcccctggagcagctggagcgaccccaccagagtggagaccgccaccgagaccgcctggatcagcctggtgaccgccctgcacctggtgctgggcctgagcgccgtgctgggcctgctgctgctgagatggcagttccccgcccactacagatacagacccagacaggccggcgactggagatggaccagatggagcagaagacccgtgaacagacacagctggttcgccctgtag

SEQ ID NO: 89889 - DNA, 2817 bp, synthetic construct
  misc_feature 1..2817: note = Description of Artificial Sequence: Synthetic coding sequence
  source 1..2817: mol_type = other DNA
atgaccctgctgggcagcgagcacagcctgctgatcagaagcaagttcagaagcgtgctgcagctgagactgcagcagagaagaacccaggagcagctggccaaccagggcatcatcccccccctgaagagacccgccgagttccacgagcagagaaagcacctggacagcgacaaggccaagaacagcctgaagagaaaggccagaaacagatgcaacagcgccgacctggtgaacatgcacatcctgcaggccagcaccgccgagagaagcatccccaccgcccagatgaagctgaagagagccagactggccgacgacctgaacgagaagatcgccctgagacccggccccctggagctggtggagaagaacatcctgcccgtggacagcgccgtgaaggaggccatcaagggcaaccaggtgagcttcagcaagagcaccgacgccttcgccttcgaggaggacagcagcagcgacggcctgagccccgaccagaccagaagcgaggacccccagaacagcgccggcagcccccccgacgccaaggccagcgacacccccagcaccggcagcctgggcaccaaccaggacctggccagcggcagcgagaacgacagaaacgacagcgccagccagcccagccaccagagcgacgccggcaagcagggcctgggcccccccagcacccccatcgccgtgcacgccgccgtgaagagcaagagcctgggcgacagcaagaacagacacaagaagcccaaggaccccaagcccaaggtgaagaagctgaagtaccaccagtacatcccccccgaccagaaggccgagaagagccccccccccatggacagcgcctacgccagactgctgcagcagcagcagctgttcctgcagctgcagatcctgagccagcagcagcagcagcagcagcacagattcagctacctgggcatgcaccaggcccagctgaaggagcccaacgagcagatggtgagaaaccccaacagcagcagcacccccctgagcaacacccccctgagccccgtgaagaacagcttcagcggccagaccggcgtgagcagcttcaagcccggccccctgccccccaacctggacgacctgaaggtgagcgagctgagacagcagctgagaatcagaggcctgcccgtgagcggcaccaagaccgccctgatggacagactgagacccttccaggactgcagcggcaaccccgtgcccaacttcggcgacatcaccaccgtgaccttccccgtgacccccaacaccctgcccaactaccagagcagcagcagcaccagcgccctgagcaacggcttctaccacttcggcagcaccagcagcagcccccccatcagccccgccagcagcgacctgagcgtggccggcagcctgcccgacaccttcaacgacgccagccccagcttcggcctgcaccccagccccgtgcacgtgtgcaccgaggagagcctgatgagcagcctgaacggcggcagcgtgcccagcgagctggacggcctggacagcgagaaggacaagatgctggtggagaagcagaaggtgatcaacgagctgacctggaagctgcagcaggagcagagacaggtggaggagctgagaatgcagctgcagaagcagaagagaaacaactgcagcgagaagaagcccctgcccttcctggccgccagcatcaagcaggaggaggccgtgagcagctgccccttcgccagccaggtgcccgtgaagagacagagcagcagcagcgagtgccacccccccgcctgcgaggccgcccagctgcagcccctgggcaacgcccactgcgtggagagcagcgaccagaccaacgtgctgagcagcaccttcctgagcccccagtgcagcccccagcacagccccctgggcgccgtgaagagcccccagcacatcagcctgccccccagccccaacaacccccacttcctgcccagcagcagcggcgcccagggcgagggccacagagtgagcagccccatcagcagccaggtgtgcaccgcccagatggccggcctgcacagcagcgacaaggtgggccccaagttcagcatccccagccccaccttcagcaagagcagcagcgccatcagcgaggtgacccagccccccagctacgaggacgccgtgaagcagcagatgaccagaagccagcagatggacgagctgctggacgtgctgatcgagagcggcgagatgcccgccgacgccagagaggaccacagctgcctgcagaaggtgcccaagatccccagaagcagcagaagccccaccgccgtgctgaccaagcccagcgccagcttcgagcaggccagcagcggcagccagatccccttcgacccctacgccaccgacagcgacgagcacctggaggtgctgctgaacagccagagccccctgggcaagatgagcgacgtgaccctgctgaagatcggcagcgaggagccccacttcgacggcatcatggacggcttcagcggcaaggccgccgaggacctgttcaacgcccacgagatcctgcccggccccctgagccccatgcagacccagttcagccccagcagcgtggacagcaacggcctgcagctgagcttcaccgagagcccctgggagaccatggagtggctggacctgaccccccccaacagcacccccggcttcagcgccctgaccaccagcagccccagcatcttcaacatcgacttcctggacgtgaccgacctgaacctgaacagcagcatggacctgcacctgcagcagtggtag

SEQ ID NO: 89890 - DNA, 1989 bp, synthetic construct
  misc_feature 1..1989: note = Description of Artificial Sequence: Synthetic coding sequence
  source 1..1989: mol_type = other DNA
atggacagcgcctacgccagactgctgcagcagcagcagctgttcctgcagctgcagatcctgagccagcagcagcagcagcagcagcacagattcagctacctgggcatgcaccaggcccagctgaaggagcccaacgagcagatggtgagaaaccccaacagcagcagcacccccctgagcaacacccccctgagccccgtgaagaacagcttcagcggccagaccggcgtgagcagcttcaagcccggccccctgccccccaacctggacgacctgaaggtgagcgagctgagacagcagctgagaatcagaggcctgcccgtgagcggcaccaagaccgccctgatggacagactgagacccttccaggactgcagcggcaaccccgtgcccaacttcggcgacatcaccaccgtgaccttccccgtgacccccaacaccctgcccaactaccagagcagcagcagcaccagcgccctgagcaacggcttctaccacttcggcagcaccagcagcagcccccccatcagccccgccagcagcgacctgagcgtggccggcagcctgcccgacaccttcaacgacgccagccccagcttcggcctgcaccccagccccgtgcacgtgtgcaccgaggagagcctgatgagcagcctgaacggcggcagcgtgcccagcgagctggacggcctggacagcgagaaggacaagatgctggtggagaagcagaaggtgatcaacgagctgacctggaagctgcagcaggagcagagacaggtggaggagctgagaatgcagctgcagaagcagaagagaaacaactgcagcgagaagaagcccctgcccttcctggccgccagcatcaagcaggaggaggccgtgagcagctgccccttcgccagccaggtgcccgtgaagagacagagcagcagcagcgagtgccacccccccgcctgcgaggccgcccagctgcagcccctgggcaacgcccactgcgtggagagcagcgaccagaccaacgtgctgagcagcaccttcctgagcccccagtgcagcccccagcacagccccctgggcgccgtgaagagcccccagcacatcagcctgccccccagccccaacaacccccacttcctgcccagcagcagcggcgcccagggcgagggccacagagtgagcagccccatcagcagccaggtgtgcaccgcccagaacagcggcgcccacgacggccacccccccagcttcagcccccacagcagcagcctgcacccccccttcagcggcgcccaggccgacagcagccacggcgccggcggcaacccctgccccaagagcccctgcgtgcagcagaagcagatgaccagaagccagcagatggacgagctgctggacgtgctgatcgagagcggcgagatgcccgccgacgccagagaggaccacagctgcctgcagaaggtgcccaagatccccagaagcagcagaagccccaccgccgtgctgaccaagcccagcgccagcttcgagcaggccagcagcggcagccagatccccttcgacccctacgccaccgacagcgacgagcacctggaggtgctgctgaacagccagagccccctgggcaagatgagcgacgtgaccctgctgaagatcggcagcgaggagccccacttcgacggcatcatggacggcttcagcggcaaggccgccgaggacctgttcaacgcccacgagatcctgcccggccccctgagccccatgcagacccagttcagccccagcagcgtggacagcaacggcctgcagctgagcttcaccgagagcccctgggagaccatggagtggctggacctgaccccccccaacagcacccccggcttcagcgccctgaccaccagcagccccagcatcttcaacatcgacttcctggacgtgaccgacctgaacctgaacagcagcatggacctgcacctgcagcagtggtag

SEQ ID NO: 89891 - DNA, 2055 bp, synthetic construct
  misc_feature 1..2055: note = Description of Artificial Sequence: Synthetic coding sequence
  source 1..2055: mol_type = other DNA
atgaagctgaagagagccagactggccgacgacctgaacgagaagatcgccctgagacccggccccctggagctggtggagaagaacatcctgcccgtggacagcgccgtgaaggaggccatcaagggcaaccaggtgagcttcagcaagagcaccgacgccttcgccttcgaggaggacagcagcagcgacggcctgagccccgaccagaccagaagcgaggacccccagaacagcgccggcagcccccccgacgccaaggccagcgacacccccagcaccggcagcctgggcaccaaccaggacctggccagcggcagcgagaacgacagaaacgacagcgccagccagcccagccaccagagcgacgccggcaagcagggcctgggcccccccagcacccccatcgccgtgcacgccgccgtgaagagcaagagcctgggcgacagcaagaacagacacaagaagcccaaggaccccaagcccaaggtgaagaagctgaagtaccaccagtacatcccccccgaccagaaggccgagaagagccccccccccatggacagcgcctacgccagactgctgcagcagcagcagctgttcctgcagctgcagatcctgagccagcagcagcagcagcagcagcacagattcagctacctgggcatgcaccaggcccagctgaaggagcccaacgagcagatggtgagaaaccccaacagcagcagcacccccctgagcaacacccccctgagccccgtgaagaacagcttcagcggccagaccggcgtgagcagcttcaagcccggccccctgccccccaacctggacgacctgaaggtgagcgagctgagacagcagctgagaatcagaggcctgcccgtgagcggcaccaagaccgccctgatggacagactgagacccttccaggactgcagcggcaaccccgtgcccaacttcggcgacatcaccaccgtgaccttccccgtgacccccaacaccctgcccaactaccagagcagcagcagcaccagcgccctgagcaacggcttctaccacttcggcagcaccagcagcagcccccccatcagccccgccagcagcgacctgagcgtggccggcagcctgcccgacaccttcaacgacgccagccccagcttcggcctgcaccccagccccgtgcacgtgtgcaccgaggagagcctgatgagcagcctgaacggcggcagcgtgcccagcgagctggacggcctggacagcgagaaggacaagatgctggtggagaagcagaaggtgatcaacgagctgacctggaagctgcagcaggagcagagacaggtggaggagctgagaatgcagctgcagaagcagaagagaaacaactgcagcgagaagaagcccctgcccttcctggccgccagcatcaagcaggaggaggccgtgagcagctgccccttcgccagccaggtgcccgtgaagagacagagcagcagcagcgagtgccacccccccgcctgcgaggccgcccagctgcagcccctgggcaacgcccactgcgtggagagcagcgaccagaccaacgtgctgagcagcaccttcctgagcccccagtgcagcccccagcacagccccctgggcgccgtgaagagcccccagcacatcagcctgccccccagccccaacaacccccacttcctgcccagcagcagcggcgcccagggcgagggccacagagtgagcagccccatcagcagccaggtgtgcaccgcccagaacagcggcgcccacgacggccacccccccagcttcagcccccacagcagcagcctgcacccccccttcagcggcgcccaggccgacagcagccacggcgccggcggcaacccctgccccaagagcccctgcgtgcagcagaagatggccggcctgcacagcagcgacaaggtgggccccaagttcagcatccccagccccaccttcagcaagagcagcagcgccatcagcgaggtgacccagccccccagctacgaggacgccgtgaagcaggtgaccatgtag

SEQ ID NO: 89892 - DNA, 2961 bp, synthetic construct
  misc_feature 1..2961: note = Description of Artificial Sequence: Synthetic coding sequence
  source 1..2961: mol_type = other DNA
atgaccctgctgggcagcgagcacagcctgctgatcagaagcaagttcagaagcgtgctgcagctgagactgcagcagagaagaacccaggagcagctggccaaccagggcatcatcccccccctgaagagacccgccgagttccacgagcagagaaagcacctggacagcgacaaggccaagaacagcctgaagagaaaggccagaaacagatgcaacagcgccgacctggtgaacatgcacatcctgcaggccagcaccgccgagagaagcatccccaccgcccagatgaagctgaagagagccagactggccgacgacctgaacgagaagatcgccctgagacccggccccctggagctggtggagaagaacatcctgcccgtggacagcgccgtgaaggaggccatcaagggcaaccaggtgagcttcagcaagagcaccgacgccttcgccttcgaggaggacagcagcagcgacggcctgagccccgaccagaccagaagcgaggacccccagaacagcgccggcagcccccccgacgccaaggccagcgacacccccagcaccggcagcctgggcaccaaccaggacctggccagcggcagcgagaacgacagaaacgacagcgccagccagcccagccaccagagcgacgccggcaagcagggcctgggcccccccagcacccccatcgccgtgcacgccgccgtgaagagcaagagcctgggcgacagcaagaacagacacaagaagcccaaggaccccaagcccaaggtgaagaagctgaagtaccaccagtacatcccccccgaccagaaggccgagaagagccccccccccatggacagcgcctacgccagactgctgcagcagcagcagctgttcctgcagctgcagatcctgagccagcagcagcagcagcagcagcacagattcagctacctgggcatgcaccaggcccagctgaaggagcccaacgagcagatggtgagaaaccccaacagcagcagcacccccctgagcaacacccccctgagccccgtgaagaacagcttcagcggccagaccggcgtgagcagcttcaagcccggccccctgccccccaacctggacgacctgaaggtgagcgagctgagacagcagctgagaatcagaggcctgcccgtgagcggcaccaagaccgccctgatggacagactgagacccttccaggactgcagcggcaaccccgtgcccaacttcggcgacatcaccaccgtgaccttccccgtgacccccaacaccctgcccaactaccagagcagcagcagcaccagcgccctgagcaacggcttctaccacttcggcagcaccagcagcagcccccccatcagccccgccagcagcgacctgagcgtggccggcagcctgcccgacaccttcaacgacgccagccccagcttcggcctgcaccccagccccgtgcacgtgtgcaccgaggagagcctgatgagcagcctgaacggcggcagcgtgcccagcgagctggacggcctggacagcgagaaggacaagatgctggtggagaagcagaaggtgatcaacgagctgacctggaagctgcagcaggagcagagacaggtggaggagctgagaatgcagctgcagaagcagaagagaaacaactgcagcgagaagaagcccctgcccttcctggccgccagcatcaagcaggaggaggccgtgagcagctgccccttcgccagccaggtgcccgtgaagagacagagcagcagcagcgagtgccacccccccgcctgcgaggccgcccagctgcagcccctgggcaacgcccactgcgtggagagcagcgaccagaccaacgtgctgagcagcaccttcctgagcccccagtgcagcccccagcacagccccctgggcgccgtgaagagcccccagcacatcagcctgccccccagccccaacaacccccacttcctgcccagcagcagcggcgcccagggcgagggccacagagtgagcagccccatcagcagccaggtgtgcaccgcccagaacagcggcgcccacgacggccacccccccagcttcagcccccacagcagcagcctgcacccccccttcagcggcgcccaggccgacagcagccacggcgccggcggcaacccctgccccaagagcccctgcgtgcagcagaagatggccggcctgcacagcagcgacaaggtgggccccaagttcagcatccccagccccaccttcagcaagagcagcagcgccatcagcgaggtgacccagccccccagctacgaggacgccgtgaagcagcagatgaccagaagccagcagatggacgagctgctggacgtgctgatcgagagcggcgagatgcccgccgacgccagagaggaccacagctgcctgcagaaggtgcccaagatccccagaagcagcagaagccccaccgccgtgctgaccaagcccagcgccagcttcgagcaggccagcagcggcagccagatccccttcgacccctacgccaccgacagcgacgagcacctggaggtgctgctgaacagccagagccccctgggcaagatgagcgacgtgaccctgctgaagatcggcagcgaggagccccacttcgacggcatcatggacggcttcagcggcaaggccgccgaggacctgttcaacgcccacgagatcctgcccggccccctgagccccatgcagacccagttcagccccagcagcgtggacagcaacggcctgcagctgagcttcaccgagagcccctgggagaccatggagtggctggacctgaccccccccaacagcacccccggcttcagcgccctgaccaccagcagccccagcatcttcaacatcgacttcctggacgtgaccgacctgaacctgaacagcagcatggacctgcacctgcagcagtggtag

SEQ ID NO: 89893 - DNA, 1947 bp, synthetic construct
  misc_feature 1..1947: note = Description of Artificial Sequence: Synthetic coding sequence
  source 1..1947: mol_type = other DNA
ttcctgcagctgcagatcctgagccagcagcagcagcagcagcagcacagattcagctacctgggcatgcaccaggcccagctgaaggagcccaacgagcagatggtgagaaaccccaacagcagcagcacccccctgagcaacacccccctgagccccgtgaagaacagcttcagcggccagaccggcgtgagcagcttcaagcccggccccctgccccccaacctggacgacctgaaggtgagcgagctgagacagcagctgagaatcagaggcctgcccgtgagcggcaccaagaccgccctgatggacagactgagacccttccaggactgcagcggcaaccccgtgcccaacttcggcgacatcaccaccgtgaccttccccgtgacccccaacaccctgcccaactaccagagcagcagcagcaccagcgccctgagcaacggcttctaccacttcggcagcaccagcagcagcccccccatcagccccgccagcagcgacctgagcgtggccggcagcctgcccgacaccttcaacgacgccagccccagcttcggcctgcaccccagccccgtgcacgtgtgcaccgaggagagcctgatgagcagcctgaacggcggcagcgtgcccagcgagctggacggcctggacagcgagaaggacaagatgctggtggagaagcagaaggtgatcaacgagctgacctggaagctgcagcaggagcagagacaggtggaggagctgagaatgcagctgcagaagcagaagagaaacaactgcagcgagaagaagcccctgcccttcctggccgccagcatcaagcaggaggaggccgtgagcagctgccccttcgccagccaggtgcccgtgaagagacagagcagcagcagcgagtgccacccccccgcctgcgaggccgcccagctgcagcccctgggcaacgcccactgcgtggagagcagcgaccagaccaacgtgctgagcagcaccttcctgagcccccagtgcagcccccagcacagccccctgggcgccgtgaagagcccccagcacatcagcctgccccccagccccaacaacccccacttcctgcccagcagcagcggcgcccagggcgagggccacagagtgagcagccccatcagcagccaggtgtgcaccgcccagaacagcggcgcccacgacggccacccccccagcttcagcccccacagcagcagcctgcacccccccttcagcggcgcccaggccgacagcagccacggcgccggcggcaacccctgccccaagagcccctgcgtgcagcagaagcagatgaccagaagccagcagatggacgagctgctggacgtgctgatcgagagcggcgagatgcccgccgacgccagagaggaccacagctgcctgcagaaggtgcccaagatccccagaagcagcagaagccccaccgccgtgctgaccaagcccagcgccagcttcgagcaggccagcagcggcagccagatccccttcgacccctacgccaccgacagcgacgagcacctggaggtgctgctgaacagccagagccccctgggcaagatgagcgacgtgaccctgctgaagatcggcagcgaggagccccacttcgacggcatcatggacggcttcagcggcaaggccgccgaggacctgttcaacgcccacgagatcctgcccggccccctgagccccatgcagacccagttcagccccagcagcgtggacagcaacggcctgcagctgagcttcaccgagagcccctgggagaccatggagtggctggacctgaccccccccaacagcacccccggcttcagcgccctgaccaccagcagccccagcatcttcaacatcgacttcctggacgtgaccgacctgaacctgaacagcagcatggacctgcacctgcagcagtggtag

SEQ ID NO: 89894 - DNA, 1515 bp, synthetic construct
  misc_feature 1..1515: note = Description of Artificial Sequence: Synthetic coding sequence
  source 1..1515: mol_type = other DNA
atgagattcttctgcgccagatgctgcagcttcggccccgagatgcccgccgtgcagctgctgctgctggcctgcctggtgtgggacgtgggcgccagaaccgcccagctgagaaaggccaacgaccagagcggcagatgccagtacaccttcagcgtggccagccccaacgagagcagctgccccgagcagagccaggccatgagcgtgatccacaacctgcagagagacagcagcacccagagactggacctggaggccaccaaggccagactgagcagcctggagagcctgctgcaccagctgaccctggaccaggccgccagaccccaggagacccaggagggcctgcagagagagctgggcaccctgagaagagagagagaccagctggagacccagaccagagagctggagaccgcctacagcaacctgctgagagacaagagcgtgctggaggaggagaagaagagactgagacaggagaacgagaacctggccagaagactggagagcagcagccaggaggtggccagactgagaagaggccagtgcccccagaccagagacaccgccagagccgtgccccccggcagcagagaggtgagcacctggaacctggacaccctggccttccaggagctgaagagcgagctgaccgaggtgcccgccagcagaatcctgaaggagagccccagcggctacctgagaagcggcgagggcgacaccggctgcggcgagctggtgtgggtgggcgagcccctgaccctgagaaccgccgagaccatcaccggcaagtacggcgtgtggatgagagaccccaagcccacctacccctacacccaggagaccacctggagaatcgacaccgtgggcaccgacgtgagacaggtgttcgagtacgacctgatcagccagttcatgcagggctaccccagcaaggtgcacatcctgcccagacccctggagagcaccggcgccgtggtgtacagcggcagcctgtacttccagggcgccgagagcagaaccgtgatcagatacgagctgaacaccgagaccgtgaaggccgagaaggagatccccggcgccggctaccacggccagttcccctacagctggggcggctacaccgacatcgacctggccgtggacgaggccggcctgtgggtgatctacagcaccgacgaggccaagggcgccatcgtgctgagcaagctgaaccccgagaacctggagctggagcagacctgggagaccaacatcagaaagcagagcgtggccaacgccttcatcatctgcggcaccctgtacaccgtgagcagctacaccagcgccgacgccaccgtgaacttcgcctacgacaccggcaccggcatcagcaagaccctgaccatccccttcaagaacagatacaagtacagcagcatgatcgactacaaccccctggagaagaagctgttcgcctgggacaacctgaacatggtgacctacgacatcaagctgagcaagatgtag

SEQ ID NO: 89895 - DNA, 1374 bp, synthetic construct
  misc_feature 1..1374: note = Description of Artificial Sequence: Synthetic coding sequence
  source 1..1374: mol_type = other DNA
atgagattcttctgcgccagatgctgcagcttcggccccgagatgcccgccgtgcagctgctgctgctggcctgcctggtgtgggacgtgggcgccagaaccgcccagctgagaaaggccaacgaccagagcggcagatgccagtacaccttcagcgtggccagccccaacgagagcagctgccccgagcagagccaggccatgagcgtgatccacaacctgcagagagacagcagcacccagagactggacctggaggccaccaaggccagactgagcagcctggagagcctgctgagagacaagagcgtgctggaggaggagaagaagagactgagacaggagaacgagaacctggccagaagactggagagcagcagccaggaggtggccagactgagaagaggccagtgcccccagaccagagacaccgccagagccgtgccccccggcagcagagaggtgagcacctggaacctggacaccctggccttccaggagctgaagagcgagctgaccgaggtgcccgccagcagaatcctgaaggagagccccagcggctacctgagaagcggcgagggcgacaccggctgcggcgagctggtgtgggtgggcgagcccctgaccctgagaaccgccgagaccatcaccggcaagtacggcgtgtggatgagagaccccaagcccacctacccctacacccaggagaccacctggagaatcgacaccgtgggcaccgacgtgagacaggtgttcgagtacgacctgatcagccagttcatgcagggctaccccagcaaggtgcacatcctgcccagacccctggagagcaccggcgccgtggtgtacagcggcagcctgtacttccagggcgccgagagcagaaccgtgatcagatacgagctgaacaccgagaccgtgaaggccgagaaggagatccccggcgccggctaccacggccagttcccctacagctggggcggctacaccgacatcgacctggccgtggacgaggccggcctgtgggtgatctacagcaccgacgaggccaagggcgccatcgtgctgagcaagctgaaccccgagaacctggagctggagcagacctgggagaccaacatcagaaagcagagcgtggccaacgccttcatcatctgcggcaccctgtacaccgtgagcagctacaccagcgccgacgccaccgtgaacttcgcctacgacaccggcaccggcatcagcaagaccctgaccatccccttcaagaacagatacaagtacagcagcatgatcgactacaaccccctggagaagaagctgttcgcctgggacaacctgaacatggtgacctacgacatcaagctgagcaagatgtag

SEQ ID NO: 89896 - DNA, 1314 bp, synthetic construct
  misc_feature 1..1314: note = Description of Artificial Sequence: Synthetic coding sequence
  source 1..1314: mol_type = other DNA
atgagcgtgatccacaacctgcagagagacagcagcacccagagactggacctggaggccaccaaggccagactgagcagcctggagagcctgctgcaccagctgaccctggaccaggccgccagaccccaggagacccaggagggcctgcagagagagctgggcaccctgagaagagagagagaccagctggagacccagaccagagagctggagaccgcctacagcaacctgctgagagacaagagcgtgctggaggaggagaagaagagactgagacaggagaacgagaacctggccagaagactggagagcagcagccaggaggtggccagactgagaagaggccagtgcccccagaccagagacaccgccagagccgtgccccccggcagcagagaggtgagcacctggaacctggacaccctggccttccaggagctgaagagcgagctgaccgaggtgcccgccagcagaatcctgaaggagagccccagcggctacctgagaagcggcgagggcgacaccggctgcggcgagctggtgtgggtgggcgagcccctgaccctgagaaccgccgagaccatcaccggcaagtacggcgtgtggatgagagaccccaagcccacctacccctacacccaggagaccacctggagaatcgacaccgtgggcaccgacgtgagacaggtgttcgagtacgacctgatcagccagttcatgcagggctaccccagcaaggtgcacatcctgcccagacccctggagagcaccggcgccgtggtgtacagcggcagcctgtacttccagggcgccgagagcagaaccgtgatcagatacgagctgaacaccgagaccgtgaaggccgagaaggagatccccggcgccggctaccacggccagttcccctacagctggggcggctacaccgacatcgacctggccgtggacgaggccggcctgtgggtgatctacagcaccgacgaggccaagggcgccatcgtgctgagcaagctgaaccccgagaacctggagctggagcagacctgggagaccaacatcagaaagcagagcgtggccaacgccttcatcatctgcggcaccctgtacaccgtgagcagctacaccagcgccgacgccaccgtgaacttcgcctacgacaccggcaccggcatcagcaagaccctgaccatccccttcaagaacagatacaagtacagcagcatgatcgactacaaccccctggagaagaagctgttcgcctgggacaacctgaacatggtgacctacgacatcaagctgagcaagatgtag

SEQ ID NO: 89897 - DNA, 1035 bp, synthetic construct
  misc_feature 1..1035: note = Description of Artificial Sequence: Synthetic coding sequence
  source 1..1035: mol_type = other DNA
atgagattcttctgcgccagatgctgcagcttcggccccgagatgcccgccgtgcagctgctgctgctggcctgcctggtgtgggacgtgggcgccagaaccgcccagctgagaaaggccaacgaccagagcggcagatgccagtacaccttcagcgtggccagccccaacgagagcagctgccccgagcagagccaggccatgagcgtgatccacaacctgcagagagacagcagcacccagagactggacctggaggccaccaaggccagactgagcagcctggagagcctgctgcaccagctgaccctggaccaggccgccagaccccaggagacccaggagggcctgcagagagagctgggcaccctgagaagagagagagaccagctggagacccagaccagagagctggagaccgcctacagcaacctgctgagagacaagagcgtgctggaggaggagaagaagagactgagacaggagaacgagaacctggccagaagactggagagcagcagccaggaggtggccagactgagaagaggccagtgcccccagaccagagacaccgccagagccgtgccccccggcagcagagaggtgagcacctggaacctggacaccctggccttccaggagctgaagagcgagctgaccgaggtgcccgccagcagaatcctgaaggagagccccagcggctacctgagaagcggcgagggcgacaccggctgcggcgagctggtgtgggtgggcgagcccctgaccctgagaaccgccgagaccatcaccggcaagtacggcgtgtggatgagagaccccaagcccacctacccctacacccaggagaccacctggagaatcgacaccgtgggcaccgacgtgagacaggtgttcgagtacgacctgatcagccagttcatgcagggctaccccagcaaggtgcacatcctgcccagacccctggagagcaccggcgccgtggtgtacagcggcagcctgtacttcagagccctgagccccgagctgagctag

SEQ ID NO: 89898 - DNA, 1521 bp, synthetic construct
  misc_feature 1..1521: note = Description of Artificial Sequence: Synthetic coding sequence
  source 1..1521: mol_type = other DNA
atgggcagaaagaagatccagatcaccagaatcatggacgagagaaacagacaggtgaccttcaccaagagaaagttcggcctgatgaagaaggcctacgagctgagcgtgctgtgcgactgcgagatcgccctgatcatcttcaacagcagcaacaagctgttccagtacgccagcaccgacatggacaaggtgctgctgaagtacaccgagtacaacgagccccacgagagcagaaccaacagcgacatcgtggagaccctgagaaagaagggcctgaacggctgcgagagccccgacgccgacgactacttcgagcacagccccctgagcgaggacagattcagcaagctgaacgaggacagcgacttcatcttcaagagaggcccccccggcctgcccccccagaacttcagcatgagcgtgaccgtgcccgtgaccagccccaacgccctgagctacaccaaccccggcagcagcctggtgagccccagcctggccgccagcagcaccctgaccgacagcagcatgctgagccccccccagaccaccctgcacagaaacgtgagccccggcgccccccagagaccccccagcaccggcaacgccggcggcatgctgagcaccaccgacctgaccgtgcccaacggcgccggcagcagccccgtgggcaacggcttcgtgaacagcagagccagccccaacctgatcggcgccaccggcgccaacagcctgggcaaggtgatgcccaccaagagcccccccccccccggcggcggcaacctgggcatgaacagcagaaagcccgacctgagagtggtgatcccccccagcagcaagggcatgatgccccccctgtacctgaagagacagctgaacaccaacaacacccagagaatcagcagcagccaggccacccagcccctggccacccccgtggtgagcgtgaccacccccagcctgcccccccagggcctggtgtacagcgccatgcccaccgcctacaacaccgactacagcctgaccagcgccgacctgagcgccctgcagggcttcaacagccccggcatgctgagcctgggccaggtgagcgcctggcagcagcaccacctgggccaggccgccctgagcagcctggtggccggcggccagctgagccagggcagcaacctgagcatcaacaccaaccagaacatcagcatcaagagcgagcccatcagcccccccagagacagaatgacccccagcggcttccagcagcagcagcagcagcagcagcagcagcagccccccccccccccccagccccagccccagcccccccagccccagcccagacaggagatgggcagaagccccgtggacagcctgagcagcagcagcagcagctacgacggcagcgacagagaggaccccagaggcgacttccacagccccatcgtgctgggcagaccccccaacaccgaggacagagagagccccagcgtgaagagaatgagaatggacgcctgggtgacctag

SEQ ID NO: 89899 - DNA, 1500 bp, synthetic construct
  misc_feature 1..1500: note = Description of Artificial Sequence: Synthetic coding sequence
  source 1..1500: mol_type = other DNA
atgggcagaaagaagatccagatcaccagaatcatggacgagagaaacagacaggtgaccttcaccaagagaaagttcggcctgatgaagaaggcctacgagctgagcgtgctgtgcgactgcgagatcgccctgatcatcttcaacagcagcaacaagctgttccagtacgccagcaccgacatggacaaggtgctgctgaagtacaccgagtacaacgagccccacgagagcagaaccaacagcgacatcgtggaggccctgaacaagaaggagcacagaggctgcgacagccccgaccccgacaccagctacgtgctgaccccccacaccgaggagaagtacaagaagatcaacgaggagttcgacaacatgatgagaaaccacaagatcgcccccggcctgcccccccagaacttcagcatgagcgtgaccgtgcccgtgaccagccccaacgccctgagctacaccaaccccggcagcagcctggtgagccccagcctggccgccagcagcaccctgaccgacagcagcatgctgagccccccccagaccaccctgcacagaaacgtgagccccggcgccccccagagaccccccagcaccggcaacgccggcggcatgctgagcaccaccgacctgaccgtgcccaacggcgccggcagcagccccgtgggcaacggcttcgtgaacagcagagccagccccaacctgatcggcgccaccggcgccaacagcctgggcaaggtgatgcccaccaagagcccccccccccccggcggcggcaacctgggcatgaacagcagaaagcccgacctgagagtggtgatcccccccagcagcaagggcatgatgccccccctgaacacccagagaatcagcagcagccaggccacccagcccctggccacccccgtggtgagcgtgaccacccccagcctgcccccccagggcctggtgtacagcgccatgcccaccgcctacaacaccgactacagcctgaccagcgccgacctgagcgccctgcagggcttcaacagccccggcatgctgagcctgggccaggtgagcgcctggcagcagcaccacctgggccaggccgccctgagcagcctggtggccggcggccagctgagccagggcagcaacctgagcatcaacaccaaccagaacatcagcatcaagagcgagcccatcagcccccccagagacagaatgacccccagcggcttccagcagcagcagcagcagcagcagcagcagcagccccccccccccccccagccccagccccagcccccccagccccagcccagacaggagatgggcagaagccccgtggacagcctgagcagcagcagcagcagctacgacggcagcgacagagaggaccccagaggcgacttccacagccccatcgtgctgggcagaccccccaacaccgaggacagagagagccccagcgtgaagagaatgagaatggacgcctgggtgacctag

SEQ ID NO: 89900 - DNA, 1290 bp, synthetic construct
  misc_feature 1..1290: note = Description of Artificial Sequence: Synthetic coding sequence
  source 1..1290: mol_type = other DNA
atgggcagaaagaagatccagatcaccagaatcatggacgagagaaacagacagaccctgagaaagaagggcctgaacggctgcgagagccccgacgccgacgactacttcgagcacagccccctgagcgaggacagattcagcaagctgaacgaggacagcgacttcatcttcaagagaggcccccccggcctgcccccccagaacttcagcatgagcgtgaccgtgcccgtgaccagccccaacgccctgagctacaccaaccccggcagcagcctggtgagccccagcctggccgccagcagcaccctgaccgacagcagcatgctgagccccccccagaccaccctgcacagaaacgtgagccccggcgccccccagagaccccccagcaccggcaacgccggcggcatgctgagcaccaccgacctgaccgtgcccaacggcgccggcagcagccccgtgggcaacggcttcgtgaacagcagagccagccccaacctgatcggcgccaccggcgccaacagcctgggcaaggtgatgcccaccaagagcccccccccccccggcggcggcaacctgggcatgaacagcagaaagcccgacctgagagtggtgatcccccccagcagcaagggcatgatgccccccctgaacacccagagaatcagcagcagccaggccacccagcccctggccacccccgtggtgagcgtgaccacccccagcctgcccccccagggcctggtgtacagcgccatgcccaccgcctacaacaccgactacagcctgaccagcgccgacctgagcgccctgcagggcttcaacagccccggcatgctgagcctgggccaggtgagcgcctggcagcagcaccacctgggccaggccgccctgagcagcctggtggccggcggccagctgagccagggcagcaacctgagcatcaacaccaaccagaacatcagcatcaagagcgagcccatcagcccccccagagacagaatgacccccagcggcttccagcagcagcagcagcagcagcagcagcagcagccccccccccccccccagccccagccccagcccccccagccccagcccagacaggagatgggcagaagccccgtggacagcctgagcagcagcagcagcagctacgacggcagcgacagagaggaccccagaggcgacttccacagccccatcgtgctgggcagaccccccaacaccgaggacagagagagccccagcgtgaagagaatgagaatggacgcctgggtgacctag

SEQ ID NO: 89901 - DNA, 1494 bp, synthetic construct
  misc_feature 1..1494: note = Description of Artificial Sequence: Synthetic coding sequence
  source 1..1494: mol_type = other DNA
atgggcagaaagaagatccagatcaccagaatcatggacgagagaaacagacaggtgaccttcaccaagagaaagttcggcctgatgaagaaggcctacgagctgagcgtgctgtgcgactgcgagatcgccctgatcatcttcaacagcagcaacaagctgttccagtacgccagcaccgacatggacaaggtgctgctgaagtacaccgagtacaacgagccccacgagagcagaaccaacagcgacatcgtggagaccctgagaaagaagggcctgaacggctgcgagagccccgacgccgacgactacttcgagcacagccccctgagcgaggacagattcagcaagctgaacgaggacagcgacttcatcttcaagagaggcccccccggcctgcccccccagaacttcagcatgagcgtgaccgtgcccgtgaccagccccaacgccctgagctacaccaaccccggcagcagcctggtgagccccagcctggccgccagcagcaccctgaccgacagcagcatgctgagccccccccagaccaccctgcacagaaacgtgagccccggcgccccccagagaccccccagcaccggcaacgccggcggcatgctgagcaccaccgacctgaccgtgcccaacggcgccggcagcagccccgtgggcaacggcttcgtgaacagcagagccagccccaacctgatcggcgccaccggcgccaacagcctgggcaaggtgatgcccaccaagagcccccccccccccggcggcggcaacctgggcatgaacagcagaaagcccgacctgagagtggtgatcccccccagcagcaagggcatgatgccccccctgaacacccagagaatcagcagcagccaggccacccagcccctggccacccccgtggtgagcgtgaccacccccagcctgcccccccagggcctggtgtacagcgccatgcccaccgcctacaacaccgactacagcctgaccagcgccgacctgagcgccctgcagggcttcaacagccccggcatgctgagcctgggccaggtgagcgcctggcagcagcaccacctgggccaggccgccctgagcagcctggtggccggcggccagctgagccagggcagcaacctgagcatcaacaccaaccagaacatcagcatcaagagcgagcccatcagcccccccagagacagaatgacccccagcggcttccagcagcagcagcagcagcagcagcagcagcagccccccccccccccccagccccagccccagcccccccagccccagcccagacaggagatgggcagaagccccgtggacagcctgagcagcagcagcagcagctacgacggcagcgacagagaggaccccagaggcgacttccacagccccatcgtgctgggcagaccccccaacaccgaggacagagagagccccagcgtgaagagaatgagaatggacgcctgggtgacctag

SEQ ID NO: 89902 - DNA, 1494 bp, synthetic construct; identical to SEQ ID NO: 89901
  misc_feature 1..1494: note = Description of Artificial Sequence: Synthetic coding sequence
  source 1..1494: mol_type = other DNA

SEQ ID NO: 89903 - DNA, 1518 bp, synthetic construct
  misc_feature 1..1518: note = Description of Artificial Sequence: Synthetic coding sequence
  source 1..1518: mol_type = other DNA
atgggcagaaagaagatccagatcaccagaatcatggacgagagaaacagacaggtgaccttcaccaagagaaagttcggcctgatgaagaaggcctacgagctgagcgtgctgtgcgactgcgagatcgccctgatcatcttcaacagcagcaacaagctgttccagtacgccagcaccgacatggacaaggtgctgctgaagtacaccgagtacaacgagccccacgagagcagaaccaacagcgacatcgtggagaccctgagaaagaagggcctgaacggctgcgagagccccgacgccgacgactacttcgagcacagccccctgagcgaggacagattcagcaagctgaacgaggacagcgacttcatcttcaagagaggcccccccggcctgcccccccagaacttcagcatgagcgtgaccgtgcccgtgaccagccccaacgccctgagctacaccaaccccggcagcagcctggtgagccccagcctggccgccagcagcaccctgaccgacagcagcatgctgagccccccccagaccaccctgcacagaaacgtgagccccggcgccccccagagaccccccagcaccggcaacgccggcggcatgctgagcaccaccgacctgaccgtgcccaacggcgccggcagcagccccgtgggcaacggcttcgtgaacagcagagccagccccaacctgatcggcgccaccggcgccaacagcctgggcaaggtgatgcccaccaagagcccccccccccccggcggcggcaacctgggcatgaacagcagaaagcccgacctgagagtggtgatcccccccagcagcaagggcatgatgccccccctgagcgaggaggaggagctggagctgaacacccagagaatcagcagcagccaggccacccagcccctggccacccccgtggtgagcgtgaccacccccagcctgcccccccagggcctggtgtacagcgccatgcccaccgcctacaacaccgactacagcctgaccagcgccgacctgagcgccctgcagggcttcaacagccccggcatgctgagcctgggccaggtgagcgcctggcagcagcaccacctgggccaggccgccctgagcagcctggtggccggcggccagctgagccagggcagcaacctgagcatcaacaccaaccagaacatcagcatcaagagcgagcccatcagcccccccagagacagaatgacccccagcggcttccagcagcagcagcagcagcagcagcagcagcagccccccccccccccccagccccagccccagcccccccagccccagcccagacaggagatgggcagaagccccgtggacagcctgagcagcagcagcagcagctacgacggcagcgacagagaggaccccagaggcgacttccacagccccatcgtgctgggcagaccccccaacaccgaggacagagagagccccagcgtgaagagaatgagaatggacgcctgggtgacctag

SEQ ID NO: 89904 - DNA, 117 bp, synthetic construct
  misc_feature 1..117: note = Description of Artificial Sequence: Synthetic coding sequence
  source 1..117: mol_type = other DNA
atgggcagaaagaagatccagatcaccagaatcatggacgagagaaacagacaggtgaccttcaccaagagaaagttcggcctgatgaagaaggcctacgagctgagcgtgctgtag
